United States Patent Application Publication US 2013/0332133 A1 - sequence listing, part 50

SEQ ID NO: 307674 - DNA, 646 bp, Unknown
  Bacterial polypeptide expressing nucleotide sequence isolated from the Sargasso Sea
tctcgcaaaaaccaatcaattaactcatgcattaagagagtttggagttaaaagtggagatgttgtagcaactgtattacctaactcagttgaatactacatatcttacttagcttgtgcacaatccggtttttatatggttcctataaattggcatctagctggaccagagatagcatatattcttgaagattcaggggctaaagcattcattgcatctggtgaagtgcctgctatggaagaggcttgccaaaaagcagtgtcagctattaattttccagagcaaggctgtataagtactacccaaatgagtggctttactcatttagatgaatttatcagctcccaaccaatcaccaacccagaagaaagaactgcgggtcaagttatgaactatacatctggaacaaccggaaagcctaaaggtgtaaaacgcgcattaattcctggagaccctgatgatgttttaagtatgtttgcaatgatacttagcttctttgaaattcaaccgcaagaaaataatgttcacattgtaggatcgcctttgtatcacactgcagtccttgtccactcttcagcagctttacattatgggcattctgttgtgttgatggaaaaatttaacgcagagcaaatgctttaccta

SEQ ID NO: 307675 - DNA, 784 bp, Unknown
  Bacterial polypeptide expressing nucleotide sequence isolated from the Sargasso Sea
tgatacaataaaatggtttgaaaaactttctaactcacctgtaatcgatcattggtggcaaactgaaacaagttgggcaataacatcaagttgcacgggaatagaaaattttcctgtaaaatacggatcagcttttaaaccggtgccgggttatgatttaaaagttttaaattctgagggtaaagaagtaggtctagggaagatgggcgatattgttgtcaagctccctcttccgccaggaacttttccaacactttggggggcggataaaagatataaagaaaattatatgactacttacccaggatattatcaaacttacgatgcgggacacattgatgaagatggttatgtttggatcatgtctagaacagacgatataattaatgttgcaggtcatagattatcaaccggagctattgaagaggttttagcagagcatacaaatgttgcagagtgcgcagtaataggaattgctgataaacttaaaggtcaaatacctatcggtttgcttgcacttaaagcaggggtaaccaaagataaaaaagaaattattagtgagtgtgtaaaaatggttagagaaaaagttggacctgtcgcagcattcaaaatagcaattgtagtcaagagattacctaaaactagatcaggaaaagtactcagaggaacagttagaaaaattgcagataatgaaccttataaaatgccggcaactatagatgaccctgcaattttagatgaaattaaacaagacttgaaagacaataatattttaaaactttaa

SEQ ID NO: 307676 - DNA, 787 bp, Unknown
  Bacterial polypeptide expressing nucleotide sequence isolated from the Sargasso Sea
ttgcaagaaagtggaactcatcggcaaacgttaaagacgacctgggatagagcaaatcaactcgcaggagccctcgctaaatttgggatatgccaagaggaccgtgtcgctagtttcatgtggaataactatcggcatctggaactttatcaagcggttccgtgtatgggggctgtactccatactctaaatatcagactaagccccgtagaacttacctacataatcaatcatgccgaagacagggtcattttcgtggataacgatcttctgccggtacttgagccgatactaaaaaatacacccaaggtagaactcgtcatcgtatgtgacggtgacctgacgttacctaaatcagccgattatgagaacttcattgctgactatccaatagactttcagtggccaaccatagaagaaacggcaccaatgggcctatgctacacaagcggtacaaccggaaaaccgaaaggtgttatgtacaccaatcgttcgacctacctacacacaatggcacaagccatgactgacgcgatgcagctttccgctttagattccgtatgcggtattgttcctatgtttcatgcaatgggttggggacttccttttactgcgtgtatgctcggttgtaaacaagtaatgccccatagatttacgagcacagaacaactcgcaaaactgatggcttcggaagaagttactatatctgcaggagtacccactatctggcagggactcaaggcctggtttgagcaacaccaagaaaaaaaatatgatctatcaaaac

SEQ ID NO: 307677 - DNA, 757 bp, Unknown
  Bacterial polypeptide expressing nucleotide sequence isolated from the Sargasso Sea
gtgtttggtggctttgctgctaatgagcttgcaagcagaatagatgactccaaagcaaaaataattgtatctgcatcatgcgggtacgaaccaggacgagttgttgaatataaacctttgcttaataaagctcttgatttggcaaatcataaaccaaacaaatgtataatctttcaaagagaaaaaaataaagcaaagcttaatccaaaaatggatattacttgggaagactctcttaaaaatgctacgtcacaggattgcgtagaaatgaaatcaactgattatgcctatatactatatacatctgggaccactgggcttccaaaaggaatagtaagagatattggtggtcacatagttgcattgaagtggactatgaaaaatatttacaatataaatcaaaatgatgtttggtggtctgctagtgatattggctggatagtgggacactcatatatagtttatggacctttattttatggatgcacaactatcctgtttgagggaaaacctgtaggaacaccagacgctggggttttttggagagtaatctcagaacataaagtaaaatctttatttacagcaccaacagcgattagagcaatcaaaaaagaagatcctgatggaaaattttttaaaaaatacgacttaacaaaatttgatacattgtttttagcaggagaaagagctgacccagatacaataaaatggtttgaaaacttatcaaaatctccagttgttgatcattggtggcaaa

SEQ ID NO: 307678 - DNA, 500 bp, Unknown
  Bacterial polypeptide expressing nucleotide sequence isolated from the Sargasso Sea
catgtcgattttaatcaataaggccacaaagatcattgttcagggtctaaccggcaaaacaggcacttttcataccgaacaggcactggcctatcacgggacgcaaatggttgctggcacacaccctaaaaaaggcggccaaacctggacaagtgccgatggtcaaaacttacccttgttcagcactgttgccgaagcaaaagcccatactggagcgaatgcgtcagttatctatgtgccacccgccggtgcagccgcggctattgaagagtccattgatgccgagattgagctgattacctgtataaccgaaggagttccggttctggacatggtgcaagttaaggagaagcttaacaagtccaattcgcgcctaatcggaccaaactgcccaggattaatgacccctgatgaatgtaaaatcggcattatgccaccaagcatttttcgaaaaggttcagtcggtgttttgtcccgctcaggcacattgacttatgagg

SEQ ID NO: 307679 - DNA, 938 bp, Unknown
  Bacterial polypeptide expressing nucleotide sequence isolated from the Sargasso Sea
gatgatagtaaagcaaaactattagttactgcttcatgtggttttgaacctggaagaatagttgagtataaacctttagttgatgaagcaatcaaaatagcaaatcataaaatagagaagatgattttattccaaagaccaggtcacgaggtaaaattaaatgctcctcttgaaattagctgggatgaagttgtatctaaagcagagccagctgattgtgttgagatgaactccaatgagtttgcgtatattttatatacctcaggcacgactggaactccaaaaggaatagtaagagatgttggtggtcacattgttgctttgaagtggaccatgaaaaatatttataatattgataccaatgatatctggtggtcagcaagtgatattggatggattgttggacactcatatattgtttacgcaccattgtttaaaggatgcacaacagttttatttgaaggtaagccagttggaactccagatgctggagcattttggaaaattatttcagactataaagttaaatctttgtttaccgcaccaactgcatttagagcaattaagaaagaagaccctaatggtgagtttttttcaaagtatgatctaagtggttttgaaagtttatttttagcaggagaaagagctgatccagacacgataaaatgggctgaaaatttacttaaagttccagttattgaccattggtggcaaactgaaacgagttgggcaattagttcaaattgtactggaattgagatgatggaaactaaatacggctcagcttgtaaagcagtaccaggctatgatgtaaaaatcatcaaaccagatcaaactttagcaaaaacaaatgaaatgggtgacattgtagtgaaactccctttgcctcctggacatttcctaccctatggaatgctgacaaaagatataaagaaaat

SEQ ID NO: 307680 - DNA, 964 bp, Unknown
  Bacterial polypeptide expressing nucleotide sequence isolated from the Sargasso Sea
ttgctctcaaaatggactatgaaaagtatttacaacattgatgctgatgatatttggtggtctgctagtgatattggttggattgttggacactcatatattgtctacgctccattatttaaaggatgcactacagttttatttgaaggcaaacctgtaggaactccagatgcaggagctttttggaaaataatctctgactacaaagttaaatccttgttcactgctccaacagcctttagagctataaagaaagaagatcctgagggtaaatttttctcaaaatatgatctaagtaattttgagagtttatttcttgctggagaaagagctgacccagatacgataaaatgggctgagaatttactaaaagtgcctgtgatagatcattggtggcaaacagagactagttgggcaatcagctcaaattgtacaggtattgaaatgatggaaacaaagtatggttcagcctgtaaagctgttcctgggtacgatgtaaaaatcatcaagcctgaccaatctttggcgaaaccaaatgagatgggagatatcgttgttaaacttcctttgcctccggggacatttccaacattatggaatgcagatcaaaggtataaagaaaactatatgtctaattacgaaggttactaccaaacatatgatgcgggtcatatcgatgatgatggttacatttggattatgtctagaactgatgacattataaatgtagcaggtcatagattatctactggggccattgaagaagttttatcagaacatcaatctgttgcagaatgtgcagtacttggaattgcagataaattaaaaggtcaattacctattggattggtggtattaaaatcaggtgttgataaagataatgacacaatttctaaagaatgtgtgcaaatggttagggataaaattggaccggttgctgcatttaaagtggcgattgttataa

SEQ ID NO: 307681 - DNA, 556 bp, Unknown
  Bacterial polypeptide expressing nucleotide sequence isolated from the Sargasso Sea
atggctgtaataatacataaagataccaaaatattaattcaagggttcaccggaaaaatggggacttttcatgccgaggaaatgattaaatatggatctaatgttgtgggtggtgtaacacctggaaagggtggaacaaagcatctaagtcttccagtttttaatactgtaaaagaagcagttaaagatactggtgcatcagcatcaattttatttgttcctcctgcttttgcagctgactccgcaatggaagctgccgacgccggaattaaaacatgtgttgctatagttgatggaataccctcacatgacatgattagaattaaaagatatatgagaagatattcaaaagcagaaaagatgagtttagtaggaccaaattgtgctgggattatcagtccaggtaaatctatgctaggaattatgccggggcatatttataaagagggaagagtagggattataagcagatcaggaactttgggttatgaagctgctcaacaacttaaaaaattaaatattggtgtatcaaccaagtgtaggaattggaggtgat

SEQ ID NO: 307682 - DNA, 746 bp, Unknown
  Bacterial polypeptide expressing nucleotide sequence isolated from the Sargasso Sea
tccaaacggtgatttttttaagaaatatgatttaagtaaatttgaaaaactttttctcgcgggagaaagagctgatcctgatacaataaaatggtttgagaaactctcaggagcacccgtaattgatcattggtggcaaacagagacaagttgggcaattacatctgattgtacaggaattgaatcttttccagtaaaatatggttcagcatttaagccggtaccaggttacgacttaaaagttttaaattctgatggtaaagaagttgggccaggaaaaatgggtgacatagtagttaaactgccacttcctcctggaacttttccaactttatggggagcagacaaaagatataaggaaaattatatgtcaacttatcctggatattatcttacttatgatgccggtcatatagacgaggatggttacgtctggataatgtctagaacagatgacattattaatgttgctggacacagactgtctaccggagcaatagaggaagttttggcagagcacaaagatgttgctgagtgtgcagttcttggtattgctgataaattaaaaggtcagatacctataggattactagcgctaaaagcaggggtaactaaagataagaaagaaataatatcagaatgtataaaaatggtgcgagaaaaagtaggtccagtagcagcttttaaaattgctattattgtaaaaaggttaccaaaaacaaggtctggaaaaatattaagaggaa

SEQ ID NO: 307683 - DNA, 247 bp, Unknown
  Bacterial polypeptide expressing nucleotide sequence isolated from the Sargasso Sea
attatccgataaaaatgttaaagggatattaattaacatatttggaggcataatgagatgtgatgtccttgcagaaggagttgttgaagctgccaaagaaataaaaatagaagtacccctagttgtcagattggcaggaacaaattttaaggaaggaaagaaaattttagacaattcgggattaaaaattatttctgcatcagatttatctgatgctgcaaaaaaagtagttgatgaaataaaataa

SEQ ID NO: 307684 - DNA, 779 bp, Unknown
  Bacterial polypeptide expressing nucleotide sequence isolated from the Sargasso Sea
caagtgggctgaaaatttattaaaggtcccagtgattgaccactggtggcaaactgagactagttgggcaatcagctcaaattgtactggaattgaaatgatggagaccaaatacggctcagcttgtaaagcagttcctggatatgatgtgaaaatcattaaactagatcaatctttagctaaaccaaatgaaatgggagatattgttgtaaaattacctttgcctcctggtacattcccaactctttggaatgcagataaaagatataaagaaaactatatgactaattatgaaggatattaccaaacatatgatgcaggtcatattgatgatgatggctacatttggattatgtctagaactgatgacattataaatgtcgctggtcacagattatcaactggtgcgattgaagaggttttatctgaacatcaatcagttgctgaatgtgcggtgcttggaatagcagataaattaaaaggtcaattaccaattggtttagtagttttaaaaactggtgttgagaaagataatgaaactgtttctaaagaatgtgtacaaatggttagggacaaaattggccctgttgctgcatttaagactgttattgttattaaaagattaccaaaaacaagatcaggaaaaattttaagaggaacaataagaaaaattgcggatggtgttaattataaaattccaccaacaatagatgatccaacaatcctaaatgaaataaaagacgatttagtaaatcataaaattttaaattatggttaaa

SEQ ID NO: 307685 - DNA, 897 bp, Unknown
  Bacterial polypeptide expressing nucleotide sequence isolated from the Sargasso Sea
taccgcttcatgcggatttgaaccaggtagaactgttgaatatagacctcttgttgatggagcgctaaaactagctaaacataaaatagaaaagataattttttttcaaagacaaggtcatgaaattaaacttaatgcgccattagaaataagttgggacgaatccttaacaaatgccaaagatacagattgtgtagagatgggttcaaatgaatttgcatatattttatatacgtctggtactacaggaatacctaaaggtatagttagagatattggaggacatatagtagctctaaaatggaccatgaaaaatatttataatattgattcagatgacgtatggtggtcagcaagtgatattgggtggattgtgggtcattcctacattgtttacgctcctttatttaaaggttgtacaacagttctatttgagggaaaaccagtaggaactcccgacgcaggtgttttttggagagttatatcagaacataaaattaaatctctttttactgcgccaactgcttttagagctataaaaaaagaagacccagatgggaaatttttttccaaatatgatttaagctcttttgagtcattattccttgcaggtgagagagcagaccctgatactattaagtgggcagaaaatttattaaaagttcctgttattgaccattggtggcaaactgagactagttgggctattagctcaaactgcaccgggatagagatgcaaaaaacaaaatatggatcagcttgtaaagctgtgccaggttatgatgttaaaatcattaaaccagatcaatctttagcaaaaccaaatgaaatgggagatatagttgttaaattgccgttaccacctggaacctttcctacattatggaatgcagataa

SEQ ID NO: 307686 - DNA, 414 bp, Unknown
  Bacterial polypeptide expressing nucleotide sequence isolated from the Sargasso Sea
aatgcgattaggagctataaatgcagtgagaggaattaattctccttccttagaattagaatatattattgagcactctaattcagtaggactaatagttcaatctaaggaaatttggctaaagttaaataaccaagaagaattaaaaaaaagactaaaatttataattaatttagaagatgaaaaatttgaaagtttaataagttggaatcaatttataagtgcaggagaaaaagaaaattcaaaaaataatattattgaaaaatttaatccaaaaattaatgatgttgcaactattctttacacctcaggtacaacaggaaaacctaaaggtgtacccttgactcatgcaaatttcttacatcaaataattaatttagcttatattgctgatccagaacctggaacttctgt

SEQ ID NO: 307687 - DNA, 275 bp, Unknown
  Bacterial polypeptide expressing nucleotide sequence isolated from the Sargasso Sea
tttaatgattggcgaaattggtggcgaggaagaagaaaatgcagcagaatttatttcaaactcaaaaagaaaaaaaccagtttcagcatttatagctggacaatcggcaccaaaaggaaaacgtatgggtcatgcaggtgctatcgtttcaggctcaaaaggtacagcacattccaaaattaaatctttagaaaatgctggagttttggtgtcaaaatccccggcatcgttgggaaaaactatgaaattagcaatgcaaaatgggaataattagt

SEQ ID NO: 307688 - DNA, 613 bp, Unknown
  Bacterial polypeptide expressing nucleotide sequence isolated from the Sargasso Sea
atgaatcagttttctataaatttagataagaacaaagcaaactatgtcccactatccccactgagttttatttctcgagtaaaagacatttatccaaattatgagtcgttggtttatggtaatagaaattatacttggttagaaacatatgaacgttgtactaagtttgctagtgcattaacaaaacaaggcattggtaaaggcaatactgtttcaattcttgctgcaaataccccagaattatttgaggctcactattccattcctatgactggtgcagttatcaatacaattaatacaagattggatgcagaaacaattgcttatattttagatcatagtgacgcaaaattactaataacagatacacaattttcaccaactataaaaaaagcacttggtatatatggaaaaaaaataccaataattgatatttgtgatgatcaagcgatattaaaagaagaagagggtgaaaagcttggcaactggacttatgaagattttcttgagacaggtgataatcatttcaaatggtctttgccagatgatgagtggcaggcaatttcattaagttatacttctggaacaacagggaagcctaaaggagttgttt

SEQ ID NO: 307689 - DNA, 1005 bp, Unknown
  Bacterial polypeptide expressing nucleotide sequence isolated from the Sargasso Sea
gatagtaaagcaaaaatattagttacagcctcttgtggttttgagcctggaaggactgtcgaatacaagcctctagtagatgaagcagttaaacaagctaatcataagattgataagatgattttatttcaaagatctggacatgaggtaaaattaaatgctccaaaggagattagctgggaagatgctgtctcaaatgcaaaagaaattgattgtgtcgaaatgaattcaaatgaatttgcttatattctttatacatctggaacaacaggcactccaaaaggaatagtaagagatatcgggggtcacatagtagctttaaaatggactatgaaaaatatttacaacattgatgaaggtgatatttggtggtcagcaagtgatataggttggattgttggacattcttacattgtttatgctccattatttaaaggatgcacaactgtgttgtttgaaggtaaacctgttggtactcctgatgcaggtgctttttggaaaatcatatctgattataaagtaaaatctttatttactgctccaacagcttttagagcaattaaaaaagaagatccagaaggtaagtttttttctaagtacaatctctctaaatttgaaagtctttttcttgctggtgaaagagcagatccagatactatcaaatgggctgagaatttactaaatgttccagtaattgatcattggtggcagacagaaactagctgggcaattagctctaattgcacaggaattgagatgatggaaacaaaatatggttctgcttgtaaagcagttcctggttacgatgtaaaaattattaaatcagataagtcattagctaaaccaaatgaaatgggagatatagttgttaagttacctttgcctccaggaacattcccaacactttggaatgcagatcaaagatataaagaaaactacatgtcaaattatgaaggatactatcaaacttatgatgcaggtcatatagatgaagatggttatatt

SEQ ID NO: 307690 - DNA, 766 bp, Unknown
  Bacterial polypeptide expressing nucleotide sequence isolated from the Sargasso Sea
aatgattgatttaggcacaacttttttatcttcagttgatcgttgtcctcaagctatagcaataacttatgaaaacaaacgtctcaattattctaattggctaattaaaatttcaagtttagcgatctctttaaaaaaaatagggctccgaaaaggcgataagttaatgacccttttaccaaatacctttgaggcatgtacaattcactgggcatgtcaactaattggaattattatagttcctatcaattggagagtgaaatctgaagaaataattttttttttaaaaaattcaaaatcaaaatgtataatatttgatgattttactgaaaaagaaataaaatcatccaatttatcaaattctattataaaaatctctacatcgtcacaaacttcaaattatgaaaattttaaaagtttaataaaattgaagacgatatttgaatcatcagaatctaattataaagattgttcaataattctatatacctcaggtacaaccggaaaaccaaaaggcgttccaagatctcattttgcagaaagaagttctgcgatagctcatattgcacagaataaatacgaaagatatgagtctacattaggtgtaatgcccttataccacacgatgggtgtaagatctttattatcaatgacaatattaaatggtaactttgttgctcaatctaaatataatcctcgagaagctatagatttaattaataaaaataatatttcatctttatatttagttcctaccctttatcat

SEQ ID NO: 307691 - DNA, 842 bp, Unknown
  Bacterial polypeptide expressing nucleotide sequence isolated from the Sargasso Sea
tatacgtaagggcagcactgtttcgattattgctgcaaatactccagaattatttgaagctcattattcaattccaatgactggtggtgtaattaatactattaataccagattagatgctgaaacaattgcctatattttagatcatagtgatgcagaattattaataacagatacccaattttctccaactattaaaaaagcacttagtatatatggaaaaaaaataccaattattgatattcaagacgaacaagcggtacttaaaaatgatgagggtgaaaaacttggagattggacttatgaagaatttcttaatacaggagataataattttaaatggtctttacctgatgatgagtggcaagcaatttcattaagttatacatctggcacaactggtaagcctaaaggtgttgtctaccatcaccgcggttcatacttaatgtctactggtagtgtaacagcttggaatatgccaaataaactaacttttctttatactgtccctatgtttcattgtaatgggtggggctatccttggacagctgccttgatacacgctaaagttatttgttgtcgttatattattgctaaagatatttataatttaattgataaacacaaagttactcattttggaggtgctccaatagttttaagcttaattgctaatgcagatttaaaagataaaaaagaaatatcacataaagtttttgttttaacagcaggagcgcctccaactagtgcaatacttgaaaaaatggataaactaggttttgaagtgatgcatgtatacgggttaactgaaacttatggacacatccttcaatgtgcttgga

SEQ ID NO: 307692 - DNA, 241 bp, Unknown
  Bacterial polypeptide expressing nucleotide sequence isolated from the Sargasso Sea
gacaaaaatgttaaaggaatattgataaatatttttggaggaatcatgagatgtgacgtgcttgcacaaggagtggttgatgccgcaaaagaaataaatttatctgtcccgttagttgttaggctagctggcactaattttaaagaaggcaaagagatactagataagtcaaatttaaaaatcttatcagcgtcagatttaaatgatgcagctaaaaaaatagttgaggcaataaaataaa

SEQ ID NO: 307693 - DNA, 907 bp, Unknown
  Bacterial polypeptide expressing nucleotide sequence isolated from the Sargasso Sea
gagatggtggtatcgatctgggggtgtttaaaggcgggcggtgcttatgtacctgtagatccttctttccccaaggagcggatagggtatattctttcggataccaaggcagagctgatcttaagtcaaaggcatctgattgacgataggtctttgggactccccgatgataaggtgattgatgtgtctttggaggaggagatctacgacttagaagtgggtcctttaggcagctacagtagcgcagagcatctagcctatgtgatctacacctcagggaccacaggcaaacccaagggggtgatggtagagcataaaggagttatcaatttgattgctgatttactaggtaaatataatgttataccttcagagcgttttctcttgtttgctaactatgtttttgatgcatcagttgagcaaatatttttgccattactctccggagcaagcttatatgttattgaaaataaatctattcttgatcatagtaagtttacaacctttataacaaaaaatgaaattacacatttacatgcaacaccttcttatttatattctatagatccttcactgataagcacagtaaaaagagtagtttttggtgccgaatacttgtctaacgatttatttgccaaatacaaaaagaatatccctgtagtcattaatgagtacggcccaaccgaggcgactataacatcacttatatcaatcaattcttatctattaaataatgtcagtatccaaaacgtaaaaatctacgttttggatggcaatggacatcctgtacccgtaggagtagctggggagttgtatatatccggcacaggattggccaggggatatttgaacaatgaagcccttaccagagaacgttttgtggagaatccttttgctaccgaaagtg

SEQ ID NO: 307694 - DNA, 874 bp, Unknown
  Bacterial polypeptide expressing nucleotide sequence isolated from the Sargasso Sea
ttgtacgacagttttgtttgagggaaaaccggtaggatttcctgatgcaggagttttttggagggtaatttcagagcataaagtaaaatctctttttactgcaccaacagcaataagagctataaaaaaagaggatcctaacggagatttttttaaaaagtatgatttaagtaagtttgataaactatttcttgctggtgagagagccgaccctgacacaataagatggtttgaaaaactttctaactcacctgtaatcgatcattggtggcaaactgaaacaagttgggcaataacatcgagttgcacaggaatagaaaattttcctgtaaaatacggatcagcttttaaaccggtgcccggctatgatttaaaagttttaaattctgaaggtaaagaagtaggtccgggtaaaatgggagatattgttgtaaagctccctcttccgccaggaacttttccaactctttggggagcagataaaagatacaaagaaaattatatgactacctaccctggatattaccaaacttatgatgcaggacacattgatgaagatggttatgtttggatcatgtctagaacagacgacataattaatgttgcaggtcatagattatctactggagctattgaggaagttttagcagaacatccaaatgttgctgagtgcgcggtaataggaatagctgataaacttaaaggtcaaatacctattggtttgctagctctgaaggcaggggtaaccaaagataaaaaagaaattattagtgaatgtgtaaaaatggtaagagaaaaagttggtcctgttgcagcatttaaaatagcaattgtagttaagagattgctaaaactagatcgggaaaagtgctga

SEQ ID NO: 307695 - DNA, 895 bp, Unknown
  Bacterial polypeptide expressing nucleotide sequence isolated from the Sargasso Sea
gtagatgaagctatcaaactggcaagtcataaaataagtaaaatgattttatttcaaagaaaaggtcatgaggcaaaattaaatgcacccaatgaaattagttgggaggaagcattagctgatgctaaagatactgattgtattgagatgaattccaatgagtttgcctatatactatacacctcgggtacgaccggtacacctaaaggaatagtaagagacattggagggcacattgtagctttgaaatggacaatgaaaaatatttacaatattgatgaaggtgatatttggtggtctgctagtgatattggatggattgttggtcattcctatatcgtatacgcaccattatttaaaggatgcacaacagtattgtttgaaggaaagccagttggtacacctgatgcaggagctttctggaaaattatatctgactacaaagtaaagtctctttttactgcaccaaccgcttttagagcaattaaaaaggaagaccctgagggtaaatttttttctaaatatgatctttcaaattttgaaagtctattccttgctggggaaagagcggatcctgatacaatcaagtgggcagaaaatttattaaatgtaccagtgattgatcattggtggcaaacagaaacaagctgggcaattagctctaattgtacaggaattgaaatgatgaaaacaaaatatggttctgcttgcaaagctgtaccgggttatgatgttaaagttataaaatcagatcaaaccttagctaaacctaatgaaatgggagatatagtagtaaaacttcctttgcctccaggtacctttcccactctatggaatgcagatcaaaggtacaaagaaaattatatgtcaaactatgatggttattatcaaactt

SEQ ID NO: 307696 - DNA, 865 bp, Unknown
  Bacterial polypeptide expressing nucleotide sequence isolated from the Sargasso Sea
ctatacacatcaggaactactggaactcccaaaggtattgtcagagatattggaggtcatatagttgctcttaaatggaccatgaaaaatatctacaatatagatactgatgatatttggtggtccgctagtgatattggatggattgttggacactcttacattgtttatgcccctttgttcaaaggatgtacaacagttttatttgaaggaaaaccagttggaactcctgatgcaggtgctttctggaaaattatttctgattataaagtaaaatctttatttacagctccaacagcattcagggctataaagaaggaagatcctgaaggtaaatttttttcaaaatatgatcttagtaattttgaaagtttattccttgcaggtgaaagagcagatcctgatactattaagtgggcagaaaacttgcttaaagttccagtaatagatcattggtggcaaacagagactagttgggcaatcagttcaaattgtacaggaatagagaggatggaaactaaatacggctcagcgtgtaaggctgttccgggttatgatgtaaaaattatcaaaccagatcaatctttagcaaaatcaaatgaaatgggagacatagtggttaaactgcccttacctccaggaacttttccaacattatggaatgcagaccaaagatataaagaaaattatatgacaaattatgaaggttattatcaaacatatgacgcaggtcacattgatgaagatggttatatttggattatgtctagaactgatgacattattaatgttgcggggcacagattatctactggtgctatagaagaagttttatcagaacatcaatcagttgctgaatgtgcag

SEQ ID NO: 307697 - DNA, 295 bp, Unknown
  Bacterial polypeptide expressing nucleotide sequence isolated from the Sargasso Sea
aatgtttgagaatgatgatcagacagaagcaattgtgatggtaggtgagataggaggaacagcagaagaagcagctgctcaatatattaaagaaaatattacaaaaccggttgtatcttacatagcaggcgttaccgctccatcaggaaaaagaatgggccatgcaggagctataattgctggaggaaaaggcaccgcagatgataaattcgaagcacttaaatcagcaggggtttataccgtcaaaagccctgctgaaataggaaagggacttaaagagttaactggctggtaa

SEQ ID NO: 307698 - DNA, 786 bp, Unknown
  Bacterial polypeptide expressing nucleotide sequence isolated from the Sargasso Sea
aatttttttaacaactttcctacatgattatatttcttctggggatagatgtttattactatctgagaatagaccagaatggttaattgctgatattgctataatgaactccagaggcgttactgtaccattatttacgacttattcagcgttagactatgaatatattatcaatgattgtggaccaaagatttgtatagtttctaataaattacaatacgaaaaaattaaaaagtttttaaatgaaaatattaagataatttccattgatgaaataagtgataaaattgaaaacttttctaaaatatttaaaaaaacaaatttaattaatcaaaattataataaggaaattaaaagaaatgatttagcctgtataatttatacctcaggtacaacgggtaaaccaaaaggtgtaatgttaagccatggaggaattctctctaattgtgaaggtgctctagaaatattgtcctcaattgttgagaagaaaaaaccagtttttttgacatggttacctctttcacattcatacgaacatacagttcaatttgtccaaatctcactgggggcaaaagtttattatgccgagagtctagataagctaattcctaatatgaaagtggcaaaaccaactatcatgactgctgtccctagattttatcaaaatttgtataataaaatatctttcagtttttctaaacttagtggattaaaaaagatactgataacgaatactctaaagttaggtacaaaaaaacttaaaaaagaaaacctaaatttttgtga

SEQ ID NO: 307699 - DNA, 418 bp, Unknown
  Bacterial polypeptide expressing nucleotide sequence isolated from the Sargasso Sea
gtaatagttcaatctaaggaaatttggctaaagttaaacaacaaagaagaattaaaaaaaagactgaaatttataatcaatttagaagatgaacaatttgaaagtttaataagttggagtacattcataacttcagtagaaaaagaaaattcacaaaataataatcttgaaaaatttaatccaaaaattgatgacgtcgctactattctttacacttctgggacgaccggaaaacctaaaggcgtgcctttgactcatgcaaattttttacatcaaataatcaatttagcctatatcgctgatccagaaccagggacctctgtattaagcgttttgcctatctggcattcttatgagagaagtgctgaatacttctttttttcatgcggttgttctcaatactatacaattccaaaat

SEQ ID NO: 307700 - DNA, 260 bp, Unknown
  Bacterial polypeptide expressing nucleotide sequence isolated from the Sargasso Sea
atttaaaattatacttgaagatctggacgtgaaagttgttttagtgaatatatttggaggcattgtaaggtgtgatttaattgctaaaggaattattgcagccattaaagaagttgaagtaaaaatacccgtcgttgttcgattagagggtaatagtgctgaagagggttcaaaaatcttatcaaaagcagatattaaaatcgatagcattaatgatttagcttatgcagctaagaaagcagtggagctagctaaatgag

SEQ ID NO: 307701 - DNA, 1000 bp, Unknown
  Bacterial polypeptide expressing nucleotide sequence isolated from the Sargasso Sea
aataaagcgaattacgcaccctttacgccattgtcgcatctaagacgcgcttcaactgtattttcagatataactgctgtattttatggctctcaccgaaaaaattactatgagtactaccagcgctgttcccaacttgctagcgcgctggaaaaaattggaattaagcctggtgacgttgtagcaactgttttaccaaatataccagctcaagctgaagcgcattttggtgttcccgcatgtggagcggttttaaatactattaatacgcgcttagatttaaacacaattacatatatttttgaacatggcggagccaaattggtttttgcagatacacaatttttatcagttgtagaagatgcaatcgcaaagctaaaaggcccaaggccaactttaatcgaagtacctgatgaatttgcaggctttccagcaacaggaaagtacgagacatatgaaagttttttaaaaactggtaatgtgcattttgattggattatgcctcaagacgagtgggagagtttagctcttaattatacatctggaaccacaggaaagcctaaaggtgtagtttatcatcacaggggagcatatttgatgacgatgggtaccatcgttagctggcggatgactttaaaccctgtatttatggcgatagttccactttttcattgcaatgggtggaaccatacatggatgatgccagtgctaggcggatctctcgtttgttgtagagatattacgtctcaagcaatctatgatgcaatagctgatgagggcgttcaatactttggcggagcgcctattgtattaaatatgatagtaaacacaaacgacaccgaacgccgtgaatttgaccatacagtggaggtttttaccgctggagcaccaccagcacctgccactttactgaagatagaaaaattaggttttaatgttacacaggtttacggactaacagaaacttatggccatgttacagaatgttattggaaaacca

SEQ ID NO: 307702 - DNA, 316 bp, Unknown
  Bacterial polypeptide expressing nucleotide sequence isolated from the Sargasso Sea
ttcaaagatattttagaaaagtttgaagaagacaatgaaacagatgcagttttaatgattggagaaattggcggaccacaagaagttgcggctggaaaatttgcaaaagagaacatgaagaaacctgtaattgcctatattgcaggtttaacagcacccaaaggtcgagtcatgggacatgcaggagcaattgtttcagcatatggagaaagtgctgtagaaaaagtagaacttttaaaagagtgtggagttataatttcaaaaaacccatcagttatgggagaaacggtaaagtcagtattaattaaaaaataaa

SEQ ID NO: 307703 - DNA, 547 bp, Unknown
  Bacterial polypeptide expressing nucleotide sequence isolated from the Sargasso Sea
atgacagtattaattgacaaaaacagtaagattattattcaaggttttacaggaaaaatgggctcttttcatgcagacgagatgattaagtatggttctaatgtcgttggtggagttactccaggaaagggtggctctatgcacctaaatttgccagtgtttaatacagttaaagatgcagtaagcgtaacaggagcagacgcatcaattttatttgtaccaccagcttttgcagcagactcagcaatggaagctgctgatgctggtattaaaacttgtgtagctattgttgatggaattccatctcatgacatgatcagaataaaaagatatatgagaagatatactaaaagttctaaaatgactttagttggacctaattgtgcaggaattataagtccaggaaaatcaatgttgggtattatgccaggtcatatttataaagaaggaagaatcggaattataagtagatcaggaacattaggttatgaagcagctcaacaactcaagaatttgaatataggtgtctcaacgagtgtaggtatgg

SEQ ID NO: 307704 - DNA, 870 bp, Unknown
  Bacterial polypeptide expressing nucleotide sequence isolated from the Sargasso Sea
attatgtatatatatttaaccattctgaagtaaagtatgttttcgtaagtgatgaagaaattttaggaaaagttttaaaagcgaaagaagaatccccaacaataatagatgtttatacatttgacacaattcaaggagctaaacattggactgaagttcttcagcttggcaaagggcaacaccaaaacgagcttcaacaaagaataaataacatcacggaaactgatcttgccacgataatctatacatctggaacaacaggtaaaccaaaaggagtcatgcttagccataataaccttatttcaaatgtagttgcaggaaaacctctactacctactgaaatcggtgataaagcactaagtttccttccagtatgtcatgtattcgagcgaacagttttaaacctttatttgcttggcggaataaaaatatattacgcagaaagccttgaaaccataggagacaatattaaagaagtgaaacctcacgtttttacagcagtccctcgacttattgaaaaagtatacgataaagtaatagccggtggtagcgaaaaaagtggtattattaaaaaactgtttttctgggcagtaggtaaagcacaaaattttgaaattggaacaaatagaaattttatagccgataaattagtttattcaaaaataagacaagggctaggcggaaacgttaaagttattgtttctggatctgcagcattacaagaacgattacaaaaattcttttggggaataggactacctatacttgaggggtatggccttactgaaacctccccaattatttcagtaaatacacttttagacaatggaaccaaatttggaaccgttggaaaagtgatgaaaaagtaga

SEQ ID NO: 307705 - DNA, 839 bp, Unknown
  Bacterial polypeptide expressing nucleotide sequence isolated from the Sargasso Sea
atgaattcaaatgaatttgcttatattctctacacatctggaacaactggaacaccaaaagggatcgtaagagacaccggtggtcatatcgtggctcttaaatggaccatgaagaatatctacaatattgatattgatgatatttggtggtctgcaagcgatattggttggattgttgggcactcttatattgtttatgctccattgttcaaaggatgcaccacggttttatttgaaggcaagcctgttggaactccagatgctggtgctttctggaaaatcatctcagactataaagtaaaatctttatttacagcaccgactgcttttagagccattaagaaagaagatcctgaaggtaaatttttctcaaaatacgatttatccagttttgagagcctgttccttgctggagaaagagcagatccagatacaattaaatgggctgaaaatttattgaaagttccagtgattgatcactggtggcaaacggagacaagctgggcaattagctcaaattgcactggtattcaaatgatggaaacaaaatatggttcggcttgcaaggctgtcccaggatatgatgtgaaaatcattaagccagatcaatctttagcaaaaccaaatgaaatgggagacattgttgtaaaactaccattgcctccaggtacatttccaacattatggaaagcagaccaaaggtataaagaaaattacatgtcaaattatgaaggctattaccaaacttatgacgcaggtcacattgatgaggatggttacatttggataatgtctaggactgatgacattataaatgttgctggtcatagattgtcaac

SEQ ID NO: 307706 - DNA, 745 bp, Unknown
  Bacterial polypeptide expressing nucleotide sequence isolated from the Sargasso Sea
attgatcattgtgtggcaaaccgaaacaagttgggcaattagttcaaattgcactggaattgaaatgatgaaaacaaaatatggttcagcatgcaaagcagtccctggatacgatgttaaaataataaaaccagatcagtcacttgcgaaaccaaatgagatgggagatatagtcgttaaacttcctttaccaccaggaacatttccaacattatggaatgcagacgaaagatataaagaaaactatatgtctaattacgatggttattaccaaacttatgatgcgggccatattgatgatgatggttatatttggataatgtctagaacagatgacattattaatgtagctggtcatagattatctactggagcaattgaggaagtattatcagaacatcaatcagtcgcggaatgtgcagtacttggaattgcagataagctaaaaggacaattaccaattggtttagtagttcttaaatcaggtgttgataaagataatgaaactatatcaaaagaatgtgttcaaatggttagggataaaataggacctgtagcagcgtttaaagtggtaattgttataaaaagattaccaaaaacaaggtctggaaaaattttaagaggaaccataagaaaaattgctgataacgttgaatataaaataccaccaacaatagatgatccagcaatattatcagagattaaggaagatttaatcaaaaataaaatattaaataatggttaa

SEQ ID NO: 307707 - DNA, 297 bp, Unknown
  Bacterial polypeptide expressing nucleotide sequence isolated from the Sargasso Sea
tgtttctcgaagacaaagatactgagtcgatagtaatgattggagagataggtggttcttctgaagaagaagccgccgactttattaaaagatctaagataaaaaaaccaatggtaggtttcgttgctggtctaactgcccctccaggaagacgcatgggccatgcaggggcaattatatcaggtggaaaaggaggagctgacgataaaattgatataatgaaatctgccggtatcacaatttctaaatcacctgcagatataggaaaaacgttatttgaaaaacttaagtcttgat

SEQ ID NO: 307708 - DNA, 873 bp, Unknown
  Bacterial polypeptide expressing nucleotide sequence isolated from the Sargasso Sea
gtctttggtggatttgcttcaaatgaattagcaagcagaattgatgatagtaaagcaaaaattttaattacagcttcttgtggatttgaaccaggaagaacagttgagtacagaccattagtagatggagcattaaaacttgcaaaacataaagtcgaaaaagtaattttctttcaaagaaaagatcacgaggtaaatcttaactctccacttgaaataagttgggacgaagtacttgttaaagccaaaaataaagattgcgttgaaattggagcaaatgaatttgcttacattttatatacatcaggaacaacaggaataccaaaaggaatagttagagatgttggtggtcatatcgttgctcttaaatggacaatgaaaaatatttataatattgatgagaatgatgtttggtggtcagctagtgacataggttggatagtaggtcattcgtatattgtttacgccccactattcaaaggatgcactacagttttatttgagggaaaaccaattggtactcctgatgcaggagtattttggagaataatttcagagtataaaattaaatctttattcacagcgcccacagcttttagagcaattaagaaagaagatccagatggaaaatttttttcaaaatatgatttaggttcttttgaaagtttatttttagctggagaaagagctgatcctgacacaataaaatgggctgaaaatcttttaaacataccagtgatagatcattggtggcaaacggaaacaagttgggcgataagttcaaattgtactggcatagaaatgcaaaaaactaaatatggttctgcatgtaaagcggtcccgggttatgatgtaaaaataattaaaccagat

SEQ ID NO: 307709 - DNA, 907 bp, Unknown
  Bacterial polypeptide expressing nucleotide sequence isolated from the Sargasso Sea
tcggatcgacgatagtaaagcaaaattactagtaacagcttcgtgtgggtttgagcctggaagaacagtaaaatataaaccattagtcgacaaagcacttgaactctcatcacataaaattgaaaaagttatattttttcaaagaccagggaatgaagcaaaactaaacgaacccagagacattgattggaatgaagcactttcaactgccgaaagcactgactgtgttgaaatgaattctaatgattatgcatatattttgtatacttcagggactactggaattccaaaaggaattgttagagatataggcggtcacatagttgctcttaagtggactatgaaaaatatttataatattgatgcagatgacgtatggtggtctgctagcgacattggttggattgttggtcactcatacattgtgtatgcacctttatttaaagggtgcacaactgttttgttcgaaggcaaaccagtaggcaccccagacgcaggagcattttggaaaattatttctgactataaagtaaaatcattatttactgccccaacagcttttagagcaataaaaaaagaagatcctgatggaaattatttttctaagtacgacttaagttcgtttaagtctctatttcttgctggagaaagagctgacccagatacaataaaatgggcagaaaaactacttaaggttccagttatagatcattggtggcaaacagaaactagttgggcaataagttcaaactgtacaggaatagaaatgcaaaaaacgaaatatggttcagcatgtagagcagtaccgggatatgacgtaaaagttttaaaaagtgatagctctatcgctaaaccaaatgagatgggtgatattgttgttaaacttcctttgcctccaggaactttt

SEQ ID NO: 307710 - DNA, 948 bp, Unknown
  Bacterial polypeptide expressing nucleotide sequence isolated from the Sargasso Sea
gtggttttgcttcaaatgaacttgcaagcagaattgacgatagtaaagccaaacttttagtgactgcatcgtgtggttttgaaccaggacgaactgttgaatacaaacctttggtagatgaagcaatcaaacaagctcaacataaaattagtaagatgattttatttcaaagaaaaggtcatgaagttaaattaaacactccaatggagataagttgggatgaggcacatgctaatgccaaagatacagattgtgttgaaatgaattcaaatgaatttgcctacatactttacacttcaggtactactggaacgccaaaaggtatcgttagagatattgggggtcacattgttgcattaaaatggacgatgaaaaatatttataatattgatgcagatgatatttggtggtcagcaagtgatattggttggatcgtcggccactcctacattgtttatgctccattattcaaagggtgtactactgtattgtttgaaggtaaacctgttggtacgccagatgctggagcgttctggaaaataatttctgactataaagtaaaatctttattcaccgcaccaacagcttttagagcaattaaaaaagaagatcctgagggaaagtttttttcaaaatatgatttaagtaaatttgaaagtctatttcttgcaggagaacgtgctgatcctgatacaattaaatgggccgagaatttattaaaagttccagtaatagatcactggtggcaaactgaaacaagttgggcgataagttcaaattgcactggaattgaaatgatgaagactaaatatggctctgcttgtaaagctgtacctggttatgatgttaaaattataaaatcagaccaaactttagctaaaccaaatgagatgggagatattgtagtaaaattacctttacctccaggaacttttccaactctttgaa

SEQ ID NO: 307711 - DNA, 784 bp, Unknown
  Bacterial polypeptide expressing nucleotide sequence isolated from the Sargasso Sea
tccagatacgattaagtgggcagaaaatttattatatgttcctgtaatcgaccattggtggcaaacagaaacaagttggtcaattagtggaaattgcactggtatcgaaatgcaaaaaactaaatatggttctgcatgtaaacctgtaccaggatatgatgtaaaaataattaaacctgatagtactttggcaaagccaaatgaaatgggcgatatagttgtaaaacttcctttgccccctggtacttttcctacactatggaatgctgatgaaagatataaagaaaattatatgacaaattatgaaggttattaccaaacttatgatgcgggacatattgatgaagatggttacgtttggatcatgtctagaacagatgacattataaatgttgcaggtcatagattatccactggggcaatagaggaagttttatcagaacatcaatcagtagctgaatgtgcagttattggaattaaagatcaattgaaaggtcagcttccaattggtctgattgctttaaaagctggtgttacaaaagaaaatgaaattatttcaaaagaatgtattcaaatggttagagataaagttggaccagttgcagccttcaaaactgtgatagttgttaaaagattacctaaaacaagatcaggcaaaatattaagaggtacagttagaaaaattgctgataaagaggaatataaaatgccagcaacaatagatgacccagtgattttagatgaaataaaagataatttaataaaaaatggtatattaaaataa

SEQ ID NO: 307712 - DNA, 329 bp, Unknown
  Bacterial polypeptide expressing nucleotide sequence isolated from the Sargasso Sea
aatgagtattctagttaataaaaactcaaaagtcatagttcaaggctttacaggttctgagggaacttttcatgctactcaaatgctagaatatgggactaatgttgttggtggtgtaacaccaggaaaagggggactatcacatttagagaaacctgtcttcaatactgtttatgatgcaaaaaaaaatacaggggctaacgtttcaataatttttgttccaccagcatttgctgctgatgcaattttagaatcaatagattctgaagttgaagttatagttgcaatcactgaaggtatacctgtaaaagatatgattaaagtcaaag

SEQ ID NO: 307713 - DNA, 768 bp, Unknown
  Bacterial polypeptide expressing nucleotide sequence isolated from the Sargasso Sea
gggcagaaaatttattaaatgttccagtaattgatcactggtggcaaacagaaacaagttggtcgataagcggtaactgtacaggtattgaaatgcagaaaacaaaatatggttcagcctgtaaacctgttccagggtatgatgtaaaagtaattaaaccagataattctttagcaaaacctaatgagatgggagatttagttgttaagcttccattgcctccaggtacatttccaactttatggaatgcagatcaaagatataaagaaaattacatgactaactatgaaggttattatcaaacgtatgacgcaggacacattgatgaagatggttatgtttggattatgtcacgtacagatgatataattaatgttgctggacacagattatcaactggcgcaatagaagaagtgctttcggaacaccaatctgtagctgaatgtgcagttataggaattaaagatcaattaaaaggtcaacttcctattggtcttattgccttaaaagctggagtttcaaaagataatgagacgatatcaaaagaatgtattcaaatggttagaaataaagttgggcctgttgctgcatttaaaacagtaattgttgtaaaaagattaccgaaaactcgatctggaaaaattttaagaggtacagttagaaaaattgctgacaaagaagactataagatgccagcaacaattgacgatccagcaattttagatgaaataaaacaagatttaataaaaaataatattttaaaataat

SEQ ID NO: 307714 - DNA, 751 bp, Unknown
  Bacterial polypeptide expressing nucleotide sequence isolated from the Sargasso Sea
ttggttgatgaagcctttaagcttgccaatcacaaaccaagtaagacaattttatttcaaaggcagggtcatgaagtcagattaaatgtgcctaatgaaataagttgggacgaagcattagcaaatgctgaagaagttgactgtgtggaaatgagttctaatgactttgcttatatactatatacatcgggaactacaggtatcccgaaaggaatagtaagagacattggtggacatattgttgctctaaaatggacaatgaagaatatttacaatatagacgctgatgatgtctggtggtcagcaagtgacatagggtggattgtaggacactcctatatagtttatgctccattgtttaaagggtgcacaacagttttattcgaaggtaaaccagtgggcactcctgatgcaggtgctttttggaagataatatctgaatacaaagttaagtcactttttactgcacctacagcctttagagctattaaaaaagaagatcccgatggaaaatttttttctaagtatgatctaagtaaatttgaagctctttttttagctggagaaagagcagatccagataccattaaatgggcagagtcccttttaaaagttccggtaatagatcattggtggcaaactgaaacaagttgggcaattagttcaaattgcacaggaatagaaatgatgaaaacaaaatatggttcagcgtgtaaagccgtccctggttacgatgtaaaagtaattaaac

SEQ ID NO: 307715 - DNA, 223 bp, Unknown
  Bacterial polypeptide expressing nucleotide sequence isolated from the Sargasso Sea
tgctgaatttattctaaatcataaaattaaaaaacctatagttgggtttattgctggaataacagcgcctccaggacgaagaatgggtcatgcaggggcaattatttctggtggaaaaggtggagcagaacataaaataaaaaaaatggaagaatctggaattactattgcaaaatctccatcaataattggaaaaactttatttaataaactgtctaattga

SEQ ID NO: 307716 - DNA, 664 bp, Unknown
  Bacterial polypeptide expressing nucleotide sequence isolated from the Sargasso Sea
atgaatcaattttcgacaaatcttgataaaaataaagctaattatgtacctctgtctccattaagttttttaactcgtgcaaaagatatttatccaaattatgaatcagtaatttatggaaatagaagttatacatggcttcaaacatataatcgctgcgtgaagtttgctagtgcgttaacaaaaaaaggtattggtcttggtagtactgtttctattattgctgcaaataccccagaaatatttgaagcccattattccattccaatgacaggtggtgtaattaatacaatcaatacacgattagatgctgaaactattgcttatatcttagagcatagtgatgcaaaaatattaattacagatactcaattttcaccaactgttaaaaaagctctaagtatttatggtaaaaaaattcctgtgattgatatacatgatgatcaagcaattttcaaagacggtgagggtgaaaaaattggagattacaattatgaagattttttatcaacaggtgatgaaaattataattggtcattaccagaggatgaatggcaagctatatcattaagttatacttctggaacaactggaaaacctaagggtgtagtttatcaccatcgaggatcttacttaatgtctaccggtagtgttacagcgtgaa

SEQ ID NO: 307717 - DNA, 760 bp, Unknown
  Bacterial polypeptide expressing nucleotide sequence isolated from the Sargasso Sea
tcattctgtggtatttggaggatttgcttctaatgaacttgcgagcagaattgatgacagtaaagcaaaaatattaatcacagcttcttgtggttttgagcctggaaggactgttgaatataaacctttagttgatgaggcagttaaacaagcaaatcacaaaattgataaaatgattttgtttcagagaccaggtcatgaggttaaacttaacgaacctagcgaagttagttgggaagaagttatttcaaatacaaaagaggttgattgcgttgaaatgaattccaatgaatttgcgtacattctttatacatctggaactactggcactccaaaagggatagtaagagacatcggtggtcatattgttgcgttaaagtggactatgaagaatatttataacattgatgagggagacatttggtggtctgcaagtgatattggttggattgttggacattcatatattgtttatgctcccttgtttaaaggatgcactacagttttatttgaggggaaaccagtcggtactccagatgctggagctttttggaaaattatttctgattataaagtaaaatctttatttactgctcctactgcatttagagcaattaaaaaagaagatccagagggaaaatttttttcaaaatatgatctttctaaatttgaaagtctatttcttgctggtgaaagagctgatccagatacaattaaatgggcagaaaatttattaaaagtaccagtgattgatcactgg

SEQ ID NO: 307718 - DNA, 781 bp, Unknown
  Bacterial polypeptide expressing nucleotide sequence isolated from the Sargasso Sea
acaataaaatgggctgaaaatcttttaaatgttcccgtcatagatcattggtggcaaaccgagactagttgggcaataagttcaaattgtactggaatagaaatgcaaaaaactaagtatggttcagcgtgtaaagcagttccaggttatgatgtaaaaataattaaaccagatcattcaattgcagcacctaatgagatgggtgatatagttgtaaaattaccattaccacctggtacttttcctacgctttggaatgctgataggagatatgaagaaaattatatgactaactataaaggttactatcaaacttatgatgcaggacacattgatgaagatggatatatttggattatgtcacgaaccgatgacattataaacgttgctggtcatagattatcgacaggtgcgatagaagaggtattatctgaacatcaatcagttgctgagtgtgctgttcttggaattgcggacaaattaaaaggacaattacctattggtttagttgtattaaaatctggagttgaaaagaacaatgaaactatttcaaatgaatgtattaaaatggttagggataaaattggacccgttgcagcattcaaagttgttatagttataaaaagattgcctaaaacaagatcaggaaaaatattgagaggaactattcgtaaaattgctgacaaggaagattataaaatgccagcaacaatcgatgatccagcaattttagatgagattactcaaagtttaatagaaaataaaattctgactaaataaa

SEQ ID NO: 307719 - DNA, 454 bp, Unknown
  Bacterial polypeptide expressing nucleotide sequence isolated from the Sargasso Sea
atgactgtacttgtggacaaaaatagtaagataattattcaaggttttacaggtaaaatgggctcttttcatgcagatgagatgataaaatatggctcaaaagtagtaggtggagtaacacctggaaaaggaggctctaagcatttagatttgccagtatttaatacagttaaagatgccgttaatgaaacagaagccgacgcttcaattttatttgtgcctccagcttttgcagctgactctgcgatggaagcagcagatgctggaataaaaatatgtgtagcaatagttgatggaataccttctcacgatatgatcagaataaaaaggtacatgagaagatacactaaaagtgccaaaatgacattagtcggaccaaactgtgctggaattattagtcctgaaaaatcaatgttaggaataatgccaggtcatattttaaagaaggaagagt

SEQ ID NO: 307720 - DNA, 878 bp, Unknown
  Bacterial polypeptide expressing nucleotide sequence isolated from the Sargasso Sea
gcgagcagaatagatgatagtaaagcaaaaattttgattacagcttcatgtggttttgaaccagggagaactgttgaatatcgtcctttagtagatggagccttaaaattagcaaaacataaagttgaaaaagtaattttttatcaaagaaaagatcatgaaataaaattaaatgctcctttagaaataagttgggcagaagcattaagtaatacaaaaaatatggattgtgttgagatgggtgcaaatgaatttgcttatatattatacacttcgggaactactggtgttcctaagggaattgtaagagatattggaggtcatattgtcgctttaaaatggacaatgaaaaatatttataacatagacgttgatgatgtttggtggtcggctagtgatatagggtggatagtgggtcactcctatatagtttatgcgccattgtttaaagggtgcactacagttttgtttgaaggaaaaccagttggcactcctgatgctggtgctttttggaaaataatttcagattataaagttaaatcattattcacagctccaactgcttttagagcaattaaaaaagaggatccagatggaaaattcttttcgaaatatgacctgtcttctttcgagtcattatttttagctggggaaagagcagatcctgacactattaaatgggcagaaaatttattaaatgttccagttattgatcattggtggcaaacagaaactagctgggcaataagttcaaactgtactggaattgaaatgatgaaaacaaaatatggctcagcctgcaaagcagttcctggttatgatgttaaaattattaaacctgatcaatctttggctaaaccaaatgaaatgggtgatat

SEQ ID NO: 307721 - DNA, 844 bp, Unknown
  Bacterial polypeptide expressing nucleotide sequence isolated from the Sargasso Sea
atgacaccatcaaaaaaaataaaacagacatcagcaaggtttcctgaaaaagtagctatgaggtacaaagagtttggtgtatggcaagaaacatcatacgaagaattttggagaaagtctaactacctttcaatggccttaaagttttttggcattgaaaaaggcaactcagtagcaattcattcagaaaatagacctgagtggtttattgcagatattggaattcaatctataggtgccgtgagtgtaggtctttatccaacaaatcctgcttccgaagttgaatacttattgtcccattctgaatcaaaaattctttttgcagaagatcaagaacaagtcgacaaagcgttacaagcgatagatagcttaccgatattagaaaaaataatttattttgaagataggggattatataactatgatcatccaaaattaatgtcatttgatgaatttctagaaataggaaagtcagaatatggttcttttccagaatacgttgaccaacagctagatcaaatagaagatgaagacgtagcttttttagtctacacatctggaacaactggcaaaccaaaaggctcaatgataactcatgggaatataagttgggttgcatcacaaattcctaatttttcattagttgaaaatgttaaagctaaagagccacagtttttatcctatcttccactatgtcatatttttggacgcttaattgatttacttatagcttcccatacaatggcgacaattaattttgctgagtctattgatacagtgcaaagtgatttagtagaaattcaacctactatttttccagcagttccaaggatattagaaagaa

SEQ ID NO: 307722 - DNA, 271 bp, Unknown
  Bacterial polypeptide expressing nucleotide sequence isolated from the Sargasso Sea
taatgataggagaataggagggtctgcagaagaagatgctgctgaatttattataaaatcttctataaagaagcctacagcagcttttattgcaggcattactgctccaaaagggaaacgcatgggacatgctggtgctattatatcaggtaataaaggaactgcagagtctaaaatcaaagcactagaacaatcaaatgttttaatagccccctcacctgcgaaacttggtgaaaccatgttaaaagcgatgcaaaaaagctatacttag

SEQ ID NO: 307723 - DNA, 903 bp, Unknown
  Bacterial polypeptide expressing nucleotide sequence isolated from the Sargasso Sea
tgattgcgttgaaatgaatgcaaatgagttcgcttatattttgtatacttcaggaacaactggaattccaaaaggaattgtaagagatattggaggtcacattactgctcttaagtggacaatgaagaatatttacaatatcgatcaggatgatgtttggtggtcagctagcgatattggatggatcgttggtcactcttatattgtatatgctccattatttaaaggatgcacaactgtattattcgaaggtaaaccggttggaacaccagatgctggagctttttggaaaataatatctgattacaaagtaaaatctttatttactgctccaacagcttttagggctattaaaaaagaagatcctgaaggtaaatttttttctaagtacgatctaagttcatttgaaagtttgtttcttgcaggagaaagagcagatccagatacaatcaaatgggcagaatctcttttaaacgttcctgtaattgatcattggtggcaaactgaaaccagttgggcaataagctctaattgtactggtatagaaatgatgaaaacaaagtacggttcagcatgtaaagcggtgcctggttacgatgttaaagttatcaaacctgaccacagtatagctaagccaaacgaaatgggtgatatagttgtaaaacttccattgcctccaggaacattcccaactttatggaatgctgatgaaagatataaaaaaacttatatgacaaactacaaaggttattatcaaacctatgatgcaggccatatagacgaggatggatatatttggattatgtctagaactgatgacatcattaatgttgcaggtcatagactttcaactggcgctatagaagaggttttatcagaacatcagtcggtcgcagaatgcgc

SEQ ID NO: 307724 - DNA, 895 bp, Unknown
  Bacterial polypeptide expressing nucleotide sequence isolated from the Sargasso Sea
atgaattcaaatgaatatgcatatattctttatacgtcagggaccacaggtgtgcctaaaggaattgtaagagatattggaggccacatagtggctctcaaatggacaatgaaaaatatttataacatagatgaaggtgacgtttggtggtctgcaagtgatattggttggatcgttggtcactcctatattgtgtatgcacctttattcaaaggttgtacaacagttttatttgaaggaaagccagtgggtacacctgacgcaggtgcattctggaaaatgatttcagactataagattaaatctttatttactgcacctactgcgttcagagctattaaaaaagaggatccagaggggaaatttttttcaaaatacgatttaagttcttttgagtcattatttttagctggagaaagagctgaccctgatacaattaaatgggctgaaaatttacttaaggttccagttattgatcattggtggcagacagaaacaagttgggcaattagctctaattgcactggaatagaaatgatgaaaacaaaatatggttctgcatgtaaagctgttccagggtacgatgtaaagataataaaaccagaccaaactattgcaaaagcaaatgagatgggtgacatagtagttaagctacctctgcccccgggaacttttcctactttatggaacgctgataaaagatacaaagataattacatgtctaactatgatggattttaccaaacctacgatgcagggcatattgatgaagatggctacatttggatcatgtcaagaacagatgatataatcaatgttgctgggcatagactttcaacgggtgcgatagaggaagttttgtcagaacataaatctgtcgcagagttgctgtaat

SEQ ID NO: 307725 - DNA, 912 bp, Unknown
  Bacterial polypeptide expressing nucleotide sequence isolated from the Sargasso Sea
attcaaatgagtttgcttacattctatatacatctggaacaacagggacaccaaaaggtattgttagagacactggtggtcatatcgttgctcttaaatggactatgaagaatatttacaatattgatactgatgatatttggtggtctgcaagcgatattggttggattgttgggcactcttatattgtttatgctccattgtttaaaggatgtaccacagttttatttgaaggaaagcctgttggaactccagatgctggtgctttctggaaaatcatttcagattataaagtaaaatctttatttacagcaccgactgcttttagagctatcaaaaaagaagatccagagggtaaatttttctcaaaatatgatttatccagttttgagagcttgtttcttgctggagaaagagcggatccagatacaataaaatgggctgaaaatttattaaaagttccagtaattgaccattggtggcaaactgagactagttgggcaatcagctcaaattgtactggaattgaaatgatggaaacgaaatatggttcagcctgcaaggctgtcccaggatatgatgtgaaaatcattaagccagatcaatctttagcaaaaccaaatgaaatgggagatattgttgtgagactaccattgcctccaggtacatttccaacattatggaatgcagaccaaaggtataaagaaaattacatgtcaaattatgaaggatattatcaaacctatgacgcaggtcacattgatgaggatggctacatttggataatgtctagaactgatgatattataaatgttgctggtcatagattatcaacaggtgcaatcgaagaagttttgtcagaacatcaatctgttgctgaatgtgcagtactcggaattgcagataaataaa

SEQ ID NO: 307726 - DNA, 849 bp, Unknown
  Bacterial polypeptide expressing nucleotide sequence isolated from the Sargasso Sea
tttttaaaaaatacgaccttgcaaatttcgatactctcttcctggcaggtgaaagagcagatccagacacaattaaatggtttgaaaaactttcaaatgctcctgttatagatcactggtggcaaacagaaacaagttgggcaataagttcaaattgtgctggaattgaaaagtttccaatcaaatatggttctgcattcaagccagtgccaggctatgatttaaaagttcttaatagtgaaggtaaagaaaataagtcaggtcaaatgggagatatagttgtaaaattacctttgccacctggaaccttccctactttatggaatgcagatgaaagatacaaaaaagtttatatgtcaacttacaagggttattaccaaacatatgatgcgggccacattgatgaagacggttatgtttggattatgtctagaacagatgatattataaatgtagcgggtcacagattatctactggagcaattgaagaagttttagcagaacataaaaatgttgctgagtgtgcagtaattggaattgcagacaaattaaaaggacagcttccaatcgggttaattgctttaaaagcaggtgttaatagagacaacaaagaaattacaaaagaatgtgtggctttagttcgtgaaaaagttggaccagtggctgcatttaaattagctattgttgtaaaaagattgcctaaaactagatcaggaaaagttttgaggggaacagtaagaaaaattgctgatggtgaaacatataaagtgcctcccactattgatgatccagcaattttagatgagattaaaaaagaccttaaagataataatattttaaaaggttaag

SEQ ID NO: 307727 - DNA, 367 bp, Unknown
  Bacterial polypeptide expressing nucleotide sequence isolated from the Sargasso Sea
aatgtcaattttagttgataaaaatactaaacttatatgccaaggatttactggttcccatggtacttttcattcagaacaagctttaaaatatggaactaatttagttggtggtgttacaccaagaaaaggtggtcaaatccatcttggaaaaccagtttttaattctgtaaaagatgctgtgactgcaacaaacgcaaatgcatcaatgatttatgttcctgcaaagtttgccgctaatgcaataatagaagctattaatgcatcaattgaaatcatagtttgtataacagagggaattccagtcatagatatgttgaatgtgaaaaaacatctttctaattctaaatctaaattaataggccca

SEQ ID NO: 307728 - DNA, 346 bp, Unknown
  Bacterial polypeptide expressing nucleotide sequence isolated from the Sargasso Sea
ctattaagggcacagaattcatcaatgttattgataagttttttaagcgatgatgaaacacaatctataataatgataggggagatcggaggcaacgctgaggaagaaacttgtgaatatttaataaaggagcgcaaaaagggaagatcaaaaccaattgcgggtttcattgctggaagaacagctcccaagggaagaagaatggggcatgccggggccatagtggcaggaggtatgggtgccgctgaagataaaatggaagcaatgaaaaaagctgggattgttgtttcagatagtccagccacgttaggagaagctgtacaagaggcaattcaaaaaaattagt

SEQ ID NO: 307729 - DNA, 364 bp, Unknown
  Bacterial polypeptide expressing nucleotide sequence isolated from the Sargasso Sea
ttaacaacggcagtaggaattggtggagattcagtgattgggtcaagcatgatcgatatcttaaaacattttaataatgacagtgaaacacaaggtgttgttatgattggtgaaattggtggaaacatggaaaatgaagctgcaaaatggataaaagataatatggaaaagccagtagtatcttttattgctggacaaactgcgcctaaaggaaaaagaatggggcatgcaggtgcaattatatcagaaggatcagaaactgctgaggctaaaatcaaaatattaaaagaatgtggagttacaatttcaaacactgtatcagaaattggaaataccatgaaaaaaataatgggggaaatatgaa

SEQ ID NO: 307730 - DNA, 1025 bp, Unknown
  Bacterial polypeptide expressing nucleotide sequence isolated from the Sargasso Sea
tatttcagagaaaagattcatgaggtaaaattaaataagccattagaaataagctgggatgaagcgctatctggagctaatgataaagattgtgttgagatgggcgctaatgattatgcttacatcctttatacttctggcaccactggtattccaaaaggaatagttagagatattggtggtcacattgttgctcttaaatggacaatgaaaaatatttataacattgatcaagatgatgtatggtggtcagcaagtgatattggatggatagtaggacactcttatattgtctatgctccattattcaaaggatgtacaacacttctatttgaaggcaaaccagtgggtactcctgatgctggagtattttggagaataatatcagaatataaaattaagtcattattcacagctccaacagcatttagagcaataaaaaaagaagatccagaaggtaaatttttttcaaaatatgatttaggttcatttaaatcgttatttttagcaggtgaaagagcagacccagatactattaaatgggcagaaaatttactcaatgttcctgtaattgatcactggtggcaaactgaaaccagttgggcaataagctcaaactgtactggaattgaaatgcaagaaacaaaatatggatcagcttgtaaagcagttccaggttatgatgtaaaaattattaaaccagatcaaacaatagcaaaaccaaatgaaatgggagatattgtagttaaacttccacttcctccaggaacattcccaactttgtggaatgcagatgaaagatataaagaaaattatatgtcaaattataaaggctactatcaaacttacgatgcagggcatattgatgatgatggatatatttggattatgtctagaacggatgacataataaatgttgcaggtcatagacttttcactggagcaatagaagaagttttgtcagagcatcaatctgttgccgaatgtgcagtgataggaattaaagatcaactaaaaggtcaatt

SEQ ID NO: 307731 - DNA, 208 bp, Unknown
  Bacterial polypeptide expressing nucleotide sequence isolated from the Sargasso Sea
tgatattgattccaatgcactatttagacaagaaaaaattgcaaaatttcatgacacatccgaggaagaccctttagaactaaaggcttcagaatatggattaaattatatcaagcttgatggaaatgttggctgcatggttaatggagctggccttgctatggcaacaatggatatagtaaaacatcatggacggagaaccagctaa

SEQ ID NO: 307732 - DNA, 876 bp, Unknown
  Bacterial polypeptide expressing nucleotide sequence isolated from the Sargasso Sea
aaaagggggatgtagttactgtaatatctgaaaattctccaagatggctagcagtagatcaaggcttaatgcgtttaggagctataaatgcagtgagaggtattaattctccttcagtagaattagactatattattgaacactctaattcggtaggactaatagttcaatctaaggaaatttggcaaaaattaaacaacaaagaagaattaaaaaaaagactgaaatttataatcaatttagaagatgaacaatttgaaagtttaataagttggagtacattcataagttcagtagaaaaagaaaattcacaaaataataatcttgaaaaatttaatccaaaaattgatgatgtcgccacgattctttacacttctgggacgacaggaaaacctaaaggtgtgcctttgactcatgcaaattttttacatcaaataatcaatttagcctatattgctgatccaaatccagggacctctgtattaagcgttttgcctatctggcattcttatgagagaagtgctgaatacttctttttttcatgcggatgttctcaatattatacaattccaaaatttcttaaagatgatattacacaaataaaacctgttgtcatggctactgtaccgagactgtgggaagcaatacatgatggtttttttcaggctttgaaaaaaatgccttccaaaaagcaaaaacttatcaagtttttgataagtaatagttcggttttcaaaagaagtcttagaaagataagaaatatagatataaatcaaataacttttaaatcaaaaatccccttactgggttctattattagccgatatcctttacataaattgtctactatttttttatggccggaatattcttaga

SEQ ID NO: 307733 - DNA, 274 bp, Unknown
  Bacterial polypeptide expressing nucleotide sequence isolated from the Sargasso Sea
agtttctgctgcatttaaaattattttgtcagataaaaatgtaaaaggaatattaatcaatatttttggtggaataatgcggtgtgatgtacttgccaatggattagtgaatgcggcaaaaaaaaataaattatcggtaccgttggtagtaagattagcaggtaccaatgttgagcaaggtaaagaaatcttaaataaatctggactcaaaattatttcagcaaacaatttatctgatgctgcaaaaaaaattattgaagctataaaacaataa

SEQ ID NO: 307734 - DNA, 783 bp, Unknown
  Bacterial polypeptide expressing nucleotide sequence isolated from the Sargasso Sea
tatttggtggtctgcaagtgatattggttggattgttggacactcatatattgtctacgctccattgtttaaaggatgtacaacggttttatttgagggcaagccagttggaacccctgacgctggtgctttttggaaaattatttcagattataaagtaaaatctcttttcacagctcccacagcttttagagctataaaaaaagaagatcctgaaggtaaatttttctcaaaatatgatttaagtaattttgagagcttgtttctcgcaggggaaagggctgacccggacacaattaaatgggcagaaaatttgctgaaggttccagtaattgatcattggtggcagacggagactagttgggcaatcagctcaaattgtactggaattcaaatgatgaaaacaaaatatggttctgcatgtaaggccgttcctggatatgatgttaaaatcattaagccagatcaatcattagctaaaccaaatgaaatgggagatattgtcgtgaagcttccattgcctcctgggacatttccaacattatggaatgcagatcaaagatataaagaaaattatatgtctaattatgatggctattatcaaacttatgatgcaggccacattgatgatgatggttatatttggatcatgtctagaactgatgacattataaatgttgctggtcataggttatcaacaggagcgattgaagaagtattatctgaacatcaatctgttgctgaatgtgctgtacttggtattgctgataaattaaaggtcaa

SEQ ID NO: 307735 - DNA, 922 bp, Unknown
  Bacterial polypeptide expressing nucleotide sequence isolated from the Sargasso Sea
caaaaaggtattgtcagagacattggaggtcacattgttgctttgaaatggactatgaaaaacatctacaacatagactcggatgatatttggtggtctgcaagtgatattggctggattgttggacactcatacattgtttatgcgccattgtttaaaggttgcaccacagttttatttgagggtaaacctgttggaacaccagatgctggtgctttctggaaaattatttcagattacaaagtaaaatcactttttacagctccaacagcttttagagcaataaaaaaggaagatcctgagggcaagtttttttcaaaatatgatttaagtaattttgaaagtttatttcttgcaggagaaagggcggatccagatacgattaagtgggctgagaatttacttaaagtacctgtgattgatcattggtggcaaacagaaactagttgggcaatcagctcaaattgcacaggtatagagatgatggaaacaaaatatggttcagcatgtaaagctgtccctggatatgatgttaaaatcattaaaccagatcaatctttggctaaaccaaatgaaatgggagacatagtagtgaaactcccattacctccaggtacattcccaacattatggaatgcagatgaaagatataaagaaaactatatgtccaattatgtgggatactaccaaacatatgatgcaggccacattgacgatgatggttatatttggattatgtctagaacggatgacatcataaatgtagcgggccacagattatctacaggtgctatcgaagaagttttatcagaacatcaatctgttgctgagtgtgcagtacttggaattgcagataaattaaagggtcaattacctattggattagtagttttaaagtctggcgttgataaaaataatgata

SEQ ID NO: 307736 - DNA, 799 bp, Unknown
  Bacterial polypeptide expressing nucleotide sequence isolated from the Sargasso Sea
tgattttgttccaagacctggaaatgaggtaaaactatttgcacctaatgaggtcagttgggaagaagttgtatctaatgctaaagatgctgactgtgttgagatgagctcaaatgaatttgcatatattttatatacatcaggtacgaccggaacccctaaaggtatagtaagagacattggaggtcacattgttgctctcaaatggactatgaaaaatatctacaacatagattcggatgatatttggtggtctgcaagtgatattggttggattgttggacactcttatattgtttatgctcctttgtttaaaggatgtaccacagtactgtttgagggtaagcctgtaggaactccagatgcaggagctttttggaaaatcatttcagattataaagtaaaatctctttttacagctccaacagcttttagagctattaaaaaagaggatcctgaaggtaaatttttctcaaaatatgatttgagtagttttgaaagcttattccttgccggggaaagagctgatccagatactataaagtgggctgagaatttacttaaggttcctgtgatagatcattggtggcaaacagagactagttgggcaattagctcaaattgtacaggtattgaaatgatggaaacaaaatatggttctgcttgtaaagctgttcctgggtacgatgtaaaaatcatcaagcctgaccaatctttggctaaaccaaatgagatgggagatatagttgtgaaactcccgttgcctccaggaacatttccaacattatggaatgcagac

SEQ ID NO: 307737 - DNA, 850 bp, Unknown
  Bacterial polypeptide expressing nucleotide sequence isolated from the Sargasso Sea
aatacaagaacatatagtgagctaacacaaagaatagattcaatttcaagcctgatctcttcttttggcattctttcaaaatccaatatagcaattgttgcctctaattctatcgagtatatggaaattgtattggcagcctctcaattgggtcatcccatcgctactgtcaatccaaaattgacaacaaaagagatcgtttctatatgtgaagacgcccaagcaagtttgatctttgttgatcaaaaagtgtctacattgcttgaaggaattcacattgatggtgctcaaaggataattaatatcgagaatgagttaagcaacttaattgatcattcaagtcaaatgggtggccttccagccattgatgaaaaagaaacattcacgataccttatacttcgggaacaacaggaaagccaaagggtgttcttgtgcctcatcgatcaagggcgttgacgttatatggaatggcagatgcttatggttgtttttcttctgatgaccgctttctttctattgcgccaatgtgccatggcgctgggatgatcttctcattagcgcctatattttttgggggttacgctgaaattatggatgacttcaatcctgaattggtaatgaaaactatcgaagaggaaaacattacagggttttttggcgttccaacccatttttatgggatgcttggcatagatcaatccattctcgacagctgcactggaagctcattaaaaacgatcatatcaaacgcagccgcactgccacaatcgttaaaagaaaagatagttgaacattttggtgagggactgctttatgagtgctatggttcaacagagggggaattattca

SEQ ID NO: 307738 - DNA, 742 bp, Unknown
  Bacterial polypeptide expressing nucleotide sequence isolated from the Sargasso Sea
aatgaacaactttgataaaaatcttgaaaaaaatactgctaattatgttccattatctccactaagttttatttcgcgtgttaaagatatttatccaaattatgactcattagtttatggaaatagaagttatacttggctacaaacttataatcgctgcactaagttcgctagtgccttgattaaacaaggtattaataagggctcaaccgtttcaattattgctgcgaatacacctgaattatttgaggcacattattcaattccaatgattggcgcagttattaatacaatcaacacaagacttgatgctgaaactgttgcttatattttagaacacagtgatgcaaaattgttaataacagatactcaattttctccaataataaaaaaggcgcttagcatatatggaaaaaaaataccaataattgatattcatgatgagcaggcaatatttaaggagggggaaggagagaaaattggtgattggtcgtatgaagaatttcttgctacaggtgaagataattttcaatggcacttacctgatgatgaatggcaagcaatttcattaagctatacatctggaacaacaggcaaaccaaaaggtgtagtttatcatcatcgaggatcttatttaatgtcaacaggtagtgtaacagcatggaatatgccaaataagttaacttttctttacactgttcctatgttccattgtaatggatggggatacccttggacagct

SEQ ID NO: 307739 - DNA, 136 bp, Unknown
  Bacterial polypeptide expressing nucleotide sequence isolated from the Sargasso Sea
atggcagtctgggtcggtaatgagactaaggtgatttgtcagggtttcactggtagccagggcacgtttcattccgaacaagcaatcgcctacggcaccaatttggttggtggctgctcgccaggaaagggcggca

SEQ ID NO: 307740 - DNA, 865 bp, Unknown
  Bacterial polypeptide expressing nucleotide sequence isolated from the Sargasso Sea
aagaaagctttacagatgtatggcaagaatattccaattattgatattcatgatgatcaggcaatttttaaagatggtgagggtgaaaaaattggagaaatgacttatgaagaatttttacaaacaggtgatgataattataattggactttgcctaaagatgaatggcaagcaatctcactaagttatacatcaggtacaactggaaaaccaaaaggtgtagtttatcaccacaggggatcatacttaatgtctacaggaagtgtaacagcatggaatatgccaaataaattaacatttctatacactgttcctatgtttcactgtaatggttggggttatccttggacagctgctctaatacatgcaaagattatttgctgcagatatattgttgcaaaagatatttataacttaataaataaatacaaagtaactcattttgggggtgctcctatagtcttaagtttgattgctaatgcagaagaaaaagataaaaaagaaataaaccacaaagtatatgtattaactgctggtgctccaccaacaagtgcaattctcgaaaaaatggataatttaggttttgaagtaatgcatgtttatggtcttactgaaacatacggccatattcttcaatgtgcttggaatgaagaatggcagtcacaaacaaaatctgaaaaagctgatattaaagcaagacaaggtgttcgttatccaaatactgaagaagtatgtgttgtagatcctgagacgtatgaaaaagttccaatggatggagaaaccatgggagaaattttaattcgaggcaatgttgttatgaagggaaactataaaaataaggaggctacagaaacatcaatgaaaa

SEQ ID NO: 307741 - DNA, 315 bp, Unknown
  Bacterial polypeptide expressing nucleotide sequence isolated from the Sargasso Sea
ttatagattgtcttgaactttttttaaaagataaggacacacaatcaatcgtgatgatcggagaaataggaggatccgcagaggaagaagcggcagaatttttaaaaaattctaaaattaaaaaaccaactgtaggctttatagcaggactaacagcccctccgggtagaagaatggggcatgctggagcaataatttcaggtggcaaaggtggggcaaaagataaaattgaagtaatgaaatctgcgggtataactatatctaaatctccagctgatattggtagaactctttatgaaaaacttaataattaaa

SEQ ID NO: 307742 - DNA, 349 bp, Unknown
  Bacterial polypeptide expressing nucleotide sequence isolated from the Sargasso Sea
atgtcagttttagtaaataagaacactagactaatttgccaaggttttactggttcacacggtacttttcattctgaacaagctatcaaatacggaacaaaattagttggtggcgttactcctaaaaaaggtggtcaaaaacatttaggattacctgtttttaatacggtgaaagaggcaaaagatgctgagaatgctaatgcttctatgatttatgtgccagctaaatttgcagctgaagcaattattgagtcaattgatgcatcaattgaactgattgtttgtataactgaaggaattcccatccaagatatgttaaaaggaaacaaagattatcaaaatcaaaaag

SEQ ID NO: 307743 - DNA, 757 bp, Unknown
  Bacterial polypeptide expressing nucleotide sequence isolated from the Sargasso Sea
gcaagcagaattgatgacagtaaagcaaaattattagtaacggcttcatgcggttttgagcctggaaggacagttgaatacaaacctttggtagatgaggcaataaaaatagcaaatcataaaattgataagatgatattgtttcaaagaccaggaaacgaagtcaaattaagtgctcctactgagataagttgggaggaagcagtctcaaatgcaacagatgcggattgtgttgagatgaattcaaatgagtttgcttatattttatatacatctggcacaactggaaccccaaaagggattgtaagagacacgggtggccatatcgttgctcttaaatggaccatgaagaatatttataatattgatacagatgacgtttggtggtcagcgagtgatattggttggattgttggtcactcatatattgtttatgctccattgtttaaaggatgcactacagttttatttgaaggaaagcctgtcggaactccagatgctggtgctttctggaaaatcatcgcagactataaagtaaaatcattatttactgctcccactgcattcagagctattaaaaaagaagatcctgagggtaaatttttctcaaaatatgatttatcaagttttgagagcttgtttcttgctggagaaagagcagacccagatactatcaaatgggctgaaaatttattaaaggttccagtaattgaccattggtggcaaactgagactagttgggctatcagctcaaatt

SEQ ID NO: 307744 - DNA, 241 bp, Unknown
  Bacterial polypeptide expressing nucleotide sequence isolated from the Sargasso Sea
attgacacttaaaattgatagaaatactaaagttattgttcaaggaataactggaaaagaaggtggatttcatgctttgaagtgccaagaatatggaactcaaatagttggaggtgtaacacctggtaaaggtggtcaattatttaataattctataccagtttttaattctgttattgaagcgaaagatataactgatgctaatacatctttgatatttgtccctgctccattgcaccag

SEQ ID NO: 307745 - DNA, 658 bp, Unknown
  Bacterial polypeptide expressing nucleotide sequence isolated from the Sargasso Sea
atgaatgatttagcgtattggacttcagccaaatctctttctaaaaagaataaatttactaaaaatagagattttgttgagaaccttaatcatattgaccaactttgggacaatttaaaatctagatgtggagatactttggctgtttgcgacttaagagggaaatacaaagaaaaattttcttattctgagctagctgatttaataacaaaagtctctttttcttttaagaattatggtttagtaaaaggggatgtagttactgtaatatctgaaaattctccaagatggctagtagtagatcaaggcttgatgcgtttaggagctataaatgcagtgagaggtattaattcaccctcagtagaattaaactatatcattgagcactctaattcagtaggtctaatagttcaatctaaggaaatttggctaaagctaaacaacaaagaagaattgaaaaaaagaatgaaatttataatcaatttagaagatgaacaatttgaaagtttaataagttggaataaatttataagtgctgcagaaaaagaaaattcgcaaaataataatcttgaaaaatttaatccaaaaattggcgatgtcgctactattctttacacttctgggacaacaggaaaacctaaaggtgtccccttaactc

SEQ ID NO: 307746 - DNA, 900 bp, Unknown
  Bacterial polypeptide expressing nucleotide sequence isolated from the Sargasso Sea
ttgcctatattttatatacttcaggtacaacaggaacgccaaaaggtattgtaagagacattggaggtcacattgttgctcttaaatggactatgaaaaatatctacaacatagatatagatgatatttggtggtctgctagtgatattggttggattgttggacactcatatattgtctacgctccattatttaaaggatgcactacagttttatttgaaggtaagcctgtaggaactccagatgcaggagctttttggaaaataatctctgactacaaagtcaaatccttattcactgctccaacagcttttagagcaattaaaaaagaagatcctgatggtaaatttttctcaaaatatgatttgagtagttttgaaagcttatttcttgctggagagagagctgatccagatacaattaaatgggccgagaatttacttaaagtaccagtcattgatcattggtggcaaacagagactagctgggcaattagctcaaattgtaccggaatagagatgatggagacaaaatatggttcagcatgtaaggctgtccctggatatgatgtaaaaatcatcaagcaagaccaatctttggcaaaaccgaatgagatgggagatattgttgtgaaactaccattgcctccaggtacatttccaacattatggaatgcagatcaaagatataaggaaaactatatgtcaaattatgaaggttactaccaaacatatgatgcaggccatattgatgatgatggttacatttggatcatgtctagaacggatgacatcattaatgtagcaggccacagattatctacaggtgctattgaagaagttttatcagaacatcaatcggtcgctgaatgtgcggtacttggaattgctgataaataaa

SEQ ID NO: 307747 - DNA, 947 bp, Unknown
  Bacterial polypeptide expressing nucleotide sequence isolated from the Sargasso Sea
tgaatataagcctttagttgatgaagcaatcaaaatagcaaatcataaaatagagaagatgattttattccaaagaccaggccacgaggtaaaattaaatgctcctcttgaaattagctgggatgaagttgtatctaatgcaaaaccagcagattgtgttgagatgaactccaatgagtttgcttatattttatatacctcaggcacaactggaactccaaaaggaatagtaagagatgttggtggtcacattgttgctttgaagtggaccatgaaaaatatttataatattgataccaatgatatctggtggtcagcgagtgatattggatggattgttggacactcatatattgtttacgcaccattgtttaagggatgcacaacagttttatttgaaggtaagccagttggaactcctgatgctggagcattttggaaaattatttccgactataaagttaaatctttgtttaccgcgccaactgcatttagagcaattaagaaagaagaccctgatggtaagtttttttcgaagtatgatctaagtagttttgaaagtttatttttagcaggcgaaagagctgatccagacacgattaagtgggctgaaaatttacttaaagttccagtgattgatcattggtggcaaactgaaacgagttgggcaattagttcaaattgtactggaattgagatgatggaaactaaatacggctcagcttgtaaagcggtaccaggctatgatgtaaaaatcattaaaccagatcaatctttagcaaaaccaaatgaaatgggtgatattgtagtgaaactccctttgcctcctggaacattccctaccctatggaatgcggacaaaagatataaagaaaattacatgtccaattatgatggctactatcaaacttatgatgcaagacacattgatgatgatgggtacattt

SEQ ID NO: 307748 - DNA, 910 bp, Unknown
  Bacterial polypeptide expressing nucleotide sequence isolated from the Sargasso Sea
tcacattgttgctctcaaatggacaatgaaaaatatctataacattgatacagatgatatttggtggtctgcgagtgatattggttggattgttggacactcttatattgtttatgcaccattatttaaaggatgcacaacagttttatttgaaggtaagccagtcggaactccagatgcaggagctttttggaaaataatatctgattataaagtaaagtctctctttacagctccaacagcttttagagcaattaagaaagaagatcctgagggtaaatttttctcaaaatatgatctaagcagttttgaaagtttattccttgcaggagagagagctgatccagatactataaagtgggcagagaatttacttaaagttccagtcattgatcattggtggcaaacagaaactagttgggcaattagctcgaattgtactggtattgaaatgatgaaaacaaaatatggttctgcctgcaaagctgtccctgggtatgatgtaaaaatcattaagccagatcaatctttggcaaaaccaaatgaaatgggagatattgttgtgaaactccctttgcctcctggcacttttccaacattatggaatgctgatcaaaggtacaaagaaaactacatgtctaattatgaagggtattatcaaacatatgatgcaggtcatatagatgatgatggttatatttggataatgtctagaacagatgacattataaatgtagcaggtcacaggttatcaactggagcgattgaagaagtattatctgaacatcaatcggttgcagaatgtgcagtgcttggtattgcagataaattaaaaggtcaattacctattggtttagtagttttaaaatctggtgttgataaagataacgacactatatctaaagaatgt

SEQ ID NO: 307749 - DNA, 400 bp, Unknown
  Bacterial polypeptide expressing nucleotide sequence isolated from the Sargasso Sea
atgtcagtattaattgataaaaatacaaaagtaatttgccaaggttttacaggatcccatggtacttttcactctgaacaatctattaaatatggaacaaacttagttgggggcgtaacaccaaaaaaaggtggacaaattcacttagaaagaccggtgtttaacacagttaaagaagcaaaagatgccactggtgctgatgcaacaatgatatatgtacctgcaaagtttgcttcatcagccatcatagaagctatagatgcatctattgaattaattgtttgtataagcgaaggaataccaattctagatatgttaaaagtaaaaaaaaaattacaaaattctaaatccagattaattggtccaaactgtccaggaataattacacctaatgaatgta

SEQ ID NO: 307750 - DNA, 308 bp, Unknown
  Bacterial polypeptide expressing nucleotide sequence isolated from the Sargasso Sea
gttatttttagaggatgatgagaccgaaggcattttgatgattggtgaaattgggggtgaagaagaagaaaatgcggcagaatttatttcaaattcaaaaataaaaaaacctgtttcagcatttatagctggacaatcggcacctaaaggaaagcgtatgggtcatgcaggcgctattatttcaggctcaaaaggtactgcgcgttctaagattgaaactttaaaaaatgctggagttttggtatcaaaatcaccagcctcactgggaaaaacaatgcaattagcaatgcaaaatgggaataattagt

SEQ ID NO: 307751 - DNA, 175 bp, Unknown
  Bacterial polypeptide expressing nucleotide sequence isolated from the Sargasso Sea
aatggcaatcttggttaacgaaaatacaaaagttatctgccaaggcataacgggaagtcagggtacttttcattctgagcaagcaatcgaatacggtactaaaatggttggaggagtaaccccaggaaagggagggagtaaccacttaggcttgcctatcttcgacacagtaaga

SEQ ID NO: 307752 - DNA, 729 bp, Unknown
  Bacterial polypeptide expressing nucleotide sequence isolated from the Sargasso Sea
aatgtcattatctttccaacaagcaattgaacaggtctgcgctccaggtggcctatttgaaataacagaaactgaagtgagggggataccaacaaaagtctttgcaggtactccaccaaacttacgttttctttatcagatggcggctgaacgagaagacgaattcgttatatatgaagacgagcgatggaccatgccagaagtccttaaactgtccggccaattaggatctgcgcttgaaaaaaagttttctatacaaaaaggcgatcgggttgccatcgcaatgcgtaactaccccgaatggatagcagcattcgcagcaatcacttcgatcggcgcagtcgctgttccattgaatgcgtggtgggaaccagacgaattaggctttgctcttaatgacagtggagcgaaagtggtctttgccgatatcgagcgcattcaaaaaatttcagattccaatgtaaacataagaacgctagagataatcaaagtcagatcagaatctcaagacaacttcgatactaatttactggaatcattattggagtcagattcaacaatgccagaagtcgaaatcgacccagatgagaacgcgacaatcctctacacatcaggaacaacagggaaacctaaaggagcagttagctcccatcgggcgatcttaagcgccctcctcggattctccgcaagggctcaagtagcagaattagtagaaccacaaaagggtga

SEQ ID NO: 307753 - DNA, 178 bp, Unknown
  Bacterial polypeptide expressing nucleotide sequence isolated from the Sargasso Sea
tcgtttaattggtccaaattgtcctggtataattactcctgatgaatgtaaggttggtattatgccaggcaatatccataaaaaaggttcttgtggtataatttcaagttctggaacccttacttatgaagctgtagctcaaacttctgaaaatggactgggtcattcaaccgttata

SEQ ID NO: 307754 - DNA, 982 bp, Unknown
  Bacterial polypeptide expressing nucleotide sequence isolated from the Sargasso Sea
aaagtggactatgaaaaatatttatacatttaatcaaggtgatgtttggtggtctgctagtgacattgggtggattgttgggcattcctatatagtttatgcaccattatttaaaggatgtaccacagtactttttgaaggtaaacctgttggaactcctgatgcaggtgctttttggaaaatcatttctgattataaagtaaaatcattatttaccgctcctacagctttcagggctatcaaaaaagaagatcctgatggcaaatttttttcaaaatatgatttaagtaaatttgaaagtcttttccttgcaggagaaagagcagatccagatactatcaaatgggctgaaaacttattaaaggttccagtaattgatcattggtggcaaactgaaacaagttgggcaattagttcaaactgtacaggaattgaaatgatgaagacaaaatatggttcagcttgcaaagctgtaccaggttatgatgtaaaaataataaaatcagataaaactttagctaaagcaaatgaaatgggagatatagttgttaaactcccattgcctccaggaacttttccaacactttggaatgctgataaaagatataaagaaaattatatgtcaaattatgaaggttattatcaaacctatgatgctggacatattgatgaagatggttatatctggattatgtcacgtacagatgatattataaatgtagctggtcatagactatctacaggagcaatcgaagaagttttgtccgaacataaaagcgttgccgaatgtgctgtggttggtatagctgataaacttaaaggacaactgccaattggtttgttaacattaaaatctggcgttgatgaagataatgaaaatatatcaaaagattgtataaaaatggttagggataagattggaccagttgcagcttttaagatagctatagttgtaaaaagactccaaagacaagatcaggca

SEQ ID NO: 307755 - DNA, 822 bp, Unknown
  Bacterial polypeptide expressing nucleotide sequence isolated from the Sargasso Sea
ttttctaaatatgatctctctaaatttgaaagtctttttctcgctggcgaaagagctgatcctgatacaatcaaatgggctgaaaatttattaaaagtaccagttattgatcattggtggcaaactgaaactagttgggctattagttccaactgtacaggaattgaaatgatgaaaacaaaatatggctctgcatgtaaagctgttcctggatatgatgttaaagttattaaatctgataaaactttagctaaaccaaatgaaatgggagatatagttgttaaacttcctttacctccaggaacttttccaacgctttggcgtgctgatcaaagatataaagaaaattacatgagtagctacgaaggatattatcaaacttatgatgctggtcacatagatgaggatggttatatctggatcatgtcgcgaactgatgatattataaatgtagctggtcatagattgtctactggagcaattgaagaggttttatctgaacatcagtctgttgctgaatgtgcagttcttggaatagcagataaattaaagggacaactacccattggattagtagttttaaaagcaggtgttgataaagataataagatcatatctaaagaatgtgtaaaaatggttagagataagataggtcctgttgctgcatttaaagttgtaatagttataaaaagacttccaaaaactagatcaggtaaaatattaagaggaactataagaaaaattgctgataatgttgaatataaaatgcctccaacaattgacgacccaacaatcttaagtgaaattaacaagatcttatta

SEQ ID NO: 307756 - DNA, 252 bp, Unknown
  Bacterial polypeptide expressing nucleotide sequence isolated from the Sargasso Sea
taattttatctgataaaaaagtaaaaggaattttaataaatatttttggaggaataatgcgttgcgacgtgcttgcacaaggtgttgtagatgcagcgaaagagacaaatattaaagttccattagtagttagacttgccggaactaactttgaaaaaggcaaggatattttggaaaaatcagatttaaaaattttatctgcatcagatcttaatgatgctgctaaaaaaatcgtagaagctattaaataaa

SEQ ID NO: 307757 - DNA, 673 bp, Unknown
  Bacterial polypeptide expressing nucleotide sequence isolated from the Sargasso Sea
catagtatttgtaccagcaaaatttttcttaaatgctgcaaaagatgctcttaactcaggaataaaactactagttgccattccagagcatgttccaattagagatgcaatggaggcaatagaattagcaaaacaaaaagatgcagttatgattggaccaaatactccaggcgtgattgtgccaggattgattaaagttggaattatgcctgcaagcccattttcatctggaaaagtagcagttttgtcaaagagcggaacattactttatgaaatttcaaataatttgacaagcgcaggttttggacaaaacatcacaatcggtattggaggggatccagttaacggaacacgaatgattgatgcatttgacatggtaaaagatgatcctgaattagaagcaatggtagttgtcggagaaattggaggagattctgaagagattttggctcaacatatcatagatacaggtttcaagaaaccaattgtcggatatattgcaggacgtcaagcaccaaaagaaaaacgaatgggacatgcaggtgcaatagtcatgggaacatatggttcagcagaatcaaaaatatccatgtttgccaaggcaaatattccagttgcaaagagaccaggcgaagtagcagtgcttctagcaaggcagatgagtagccaatag

SEQ ID NO: 307758 - DNA, 684 bp, Unknown
  Bacterial polypeptide expressing nucleotide sequence isolated from the Sargasso Sea
aatgaattttcatacattttatacacctcctggaacaacaggagttccaaaaggtatagttagagatattggaggccacatagtagctttaaaatggactatgaaaaatatttataatatcgatgacaatgatatctggtggtcagcaagtgatataggatggatagttggacattcgtatattgtctatgctcctttgtttaaaggatgtacgactatattgtttgaaggaaagccagttggtactcctgatgctggggttttttggagaataatttcagactataaggttaaatcattatttactgctcctactgcgttccgagctataaaaaaagaagatcctgatggaaagttctttacaaaatataacttaagttcttttaagtctctttttcttgccggagaaagagctgacccagatacaatcaaatgggctgaaaacttattaaaagttccagtgatagatcattggtggcaaaccgaaacgagttgggcaataagttcaaattgtactggaatagacatgcaaaaaactaaatatggatcagcgtgtaaagctgttccaggttatgatgttaaagttttaaaaagtgataaatctattgctaaaccaaatgaaatgggcgacatagttgtaaaacttccattgccgccaggtacttttccaactttgtggaatgc

SEQ ID NO: 307759 - DNA, 958 bp, Unknown
  Bacterial polypeptide expressing nucleotide sequence isolated from the Sargasso Sea
ccaaaaggcatagtaagagatgttggggggcacattgttgctcttaaatggacaatgaaaaatatttacaacatagatgaaaatgatgtttggtggtcagctagcgatatcgggtggatagttggtcattcctatattgtttatgctcccttatttaaaggatgtacgacagttctatttgaaggaaaaccggtaggaacacctgatgctggagttttttggagaattatttctgaatataaaatcaaatctttatttacagcaccaactgctttcagagctatcaaaaaagaagatccggatggaaaatttttttctaaatatgatttgagttctttcgagtctttatttttggctggagaaagagctgatccagatacaataaagtgggcagagaatcttttaagtgttcctgtcattgatcattggtggcaaacagaaactagttgggcaataagttccaattgtaccggtattgaaatgcaaaaaactaaatatggttcagcgtgtaaagctgtacctggttataatgtaaaaataattaaacctgatcactcaattgcaaaaccaaatgaaatgggagatatagttgttaaattacctttgcctccaggaacatttcctacactttggaatgcagacaagagatatgaaaaaaattatatgacaaattataaaggttactatcaaacttatgatgcaggacatatcgatgaagatggatatatttggataatgtcacgaactgatgacattataaatgttgcagggcatagattatcaacgggagcaatagaagaagtattatctgaacatcaatcagttgctgaatgcgcagttcttggaattgcagataagttaaaggggcaattaccaattggtctagttgttttaaaatctggagtagaaaaagacaacgatactatttcaaaagaatgtgttcaaatggttagagaca

SEQ ID NO: 307760 - DNA, 756 bp, Unknown
  Bacterial polypeptide expressing nucleotide sequence isolated from the Sargasso Sea
ggctagagaaattggtggatctaaatgggttgtaaaagcacactttttttcaggtgcaagaggaaaagcaggagggataattgtttgtaataatccattagaagttgctcaagcaacagataaattattaggaaaaaaattagttacaaatcaaacaggacctgaaggaaaaattgtaaatagaatatatatcgaggaagcaacagatatagagcgagaattatatcttggtttggtctttgatagaagttcagaaagtattatggtggttgcatcaacagaaggcgggatgagtgttgaagaaatttcaaaagagaaaccagaaactataataagatcaaaaattgaagttgctgttggaatgcaaagtttccaagctagagaattagcttttggtttaggaattgaacctgatttaattagaagagcatctgagacaattattggatgctataaggcatttagtgaattagatgctacaatggttgaggttaatccattagtaatttcaaaacaaaaacaaattttagctttggattgtaaaatgagttttgataacaatgcaatgtttagaagaaatcaagtttctgaattaagagacaaaacacaagaggactcaaaagaagtttttgcgtctgatagagggctaaattatgtaagcttagatggaaacattggtaatattataaatggtgctggcttagcaatggcatcaatggacatgattaaattagctggaggaagtcctgcaaattt

SEQ ID NO: 307761 - DNA, 958 bp, Unknown
  Bacterial polypeptide expressing nucleotide sequence isolated from the Sargasso Sea
cgttttcgcatctaatgagcttgcaagcagaattgatgatagtaaagctaaacttttaataacagcttcatgtggttttgagccaggaaggacagttgaatacaggcctcttatcgatggagctatcaagcttgccaaacataaattagaaaaagtcgttttttttcaaagaaaaaaacatgagatcaacttaaatgcaccattggagatatcttgggatgaggcgctttcaaatgcaaaagataaagattgtgttgaaatgggatcaaatgactttgcttacatattgtacacttctggaactactggagtcccaaaaggaattgtaagagatattggaggacatattgtagccctcaaatggactatgaaaaacatttataatattaatgaagatgatgtttggtggtcagcaagtgatattggatggattgtcggccactcatacatagtttatgcaccattgtttaaaggatgtacaacagttttatttgaaggaaagccggtgggtactcctgatgcaggggttttttggagaataatatctgattataaaataaaatctttattcacagcacctactgctttcagagcaataaaaaaagaggatcctgaaggaaagtatttttctaaatatgatctaagttcatttgagtctttattcttagctggagaaagagcggacccagacacaattaaatgggcagaaaatttattgaaagtcccagtaatcgatcattggtggcaaactgaaacaagttggtcgataagtggaaattgtacaggaattgaaatgcaaaaaactaaatatggatctgcctgcaaaccagttcctgggtatgatgttaaaataattaaacctgataactctttggctaaacctaatgagatgggggatatagttgtaaaacttccattgcctccaggaacatttcctacacttggaatgcagataaaa

SEQ ID NO: 307762 - DNA, 851 bp, Unknown
  Bacterial polypeptide expressing nucleotide sequence isolated from the Sargasso Sea
gtattcaggaatgataaatgtaccactaaatttagtcgctggtgatgagcagctatcctatattatcaaacattcagaggcaaaaattctattttctacaaagtctaatctgcaattagctcgaagaataattgaaaagtccaacttacatgttgaactaatagaaatagataaaaataacttcgtagataatttggaggacgttaaaaaaaaagaaacttttgaactcaatggttcagataatgctttgcttatgtacacatctggaactacaggaaaacccaaaggagtaatgttaacacatgataatattttaaatggtggtaaaaatgtattgttatctcacaatcttgataaattagataaagctttgtgtgtattaccactatatcatatcaatggttttatagttacagtgatgggcccattagtcagccaaagctctgtagttttatgtgaaaagttttcagcaacaaatttttggcatcaaattagtgaatttaaatgcacatggtttagtattgtacctacgattgtatcttcattgattaataaatactctgaaagtgaatttaaattaataaacacaaatttggttaaatttggaagaagtgcctccgctgcattagctcctgaaactcataagaaatttgagaaaaaatttaaaataaaccttattgaaaccatgggcttaactgagacatgtgctccaattttatctaatcctatggatccaagaaaaataaaatatggatcaccaggaatagcctatggaaatgatgttaaaattttagatcacaattttattgaggttaaaaaaaacgaaattggtcaaatctgtgtccgaagca

SEQ ID NO: 307763 - DNA, 286 bp, Unknown
  Bacterial polypeptide expressing nucleotide sequence isolated from the Sargasso Sea
gacgaagaaacaaaatctatattaatgatggagaaaataggaggatcggcagaagaggaagcttctgagtttttgaaaaatcataaaattaaaaaaccagtagttggttttatagctgggattacagcaccaaaaggaagaagaatgggacatgcgggagcaattatttctggaggcaaaggagatgcaaaagacaagataagaaaaatgcaagaatgtggcataactattgctcattctcctgcagaaataggaaaaactttattgcacaaactgtctaattgaa

SEQ ID NO: 307764 - DNA, 763 bp, Unknown
  Bacterial polypeptide expressing nucleotide sequence isolated from the Sargasso Sea
aaaactttcaaatgcaccagttatagatcactggtggcaaacggaaactagttgggctattagtgcgaactgcgcaggaatagaaaaatttccaattaaatatggttcggctttcaaaccagttcctggttacgatttgaaagttttaaattcagagggaaaagaaaataaaccaggtcaaatgggtgatatagttgtaaaactacctttgcctccaggaacttttcctactctttggaatgcagatgaaagatataaaaaagtttatatgtcgacttatgatggctattatcaaacttatgatgcgggacatattgatgaagacggttatgtttggattatgtctagaacagatgatattataaatgtagctggtcatagattgtctactggtgcaatagaagaagttttagcagagcataaaaatgttgctgaatgtgctgttataggaattgcagataaattaaaaggacaacttccaattggattgatagctttaaaagctggtgttaacagagacaacaaagaaattacaaaagagtgcgtagcactagttagagagaaagttgggccagtcgcagcttttaaacttgccattgttgttaaaagactgccaaagactagatcaggaaaagttttaagaggaacagtaagaaaaattgccgatggagaagcttataaaatccctccaactatagatgatccggcaattttagatgaaattaagaaggacttaagagataataatattttaaaaaattaa

SEQ ID NO: 307765 - DNA, 850 bp, Unknown
  Bacterial polypeptide expressing nucleotide sequence isolated from the Sargasso Sea
aaaaggtatcgttagagatattggaggtcacatagttgctctaaaatggactatgaaaaatatttataatattgatactgacgacgtttggtggtcagcaagtgacattggttggattgttggtcactcttatattgtatacgctccattatttaaaggatgtacgactgttctatttgaggggaagccagtagggactcctgatgctggggtattttggagagtaatatctgaatataaaatcaaatctttatttacagcaccaactgcttttagagctataaaaaaagaagatccagaaggtaaatttttttcaaaatatgatctgggttcatttaaatctttatttctagccggagaaagagcggatcctgataccataaaatgggccgagaaccttctaaaagttcctgtgattgatcattggtggcaaactgaaactagttgggctattagttcaaattgcaccggaattgagatgcaaaaaacaaagtatggttcagcttgcaaagcggttccaggttatgatgtaaaaatcttaaagccagaccaatcattggcaagaccaaatgaaatgggtgacatagttgtaaaactacctctgcctccagggacttttcctacattatggaatgcagataaaagatacgaggaaaattacatgtcaaattataaaggatattaccaaacatatgatgcaggacatatagatgatgatggatatatttggattatgtcaagaactgacgatataattaatgttgctggtcatagactatctactggacagatagaggaggttctatcagagcatcagtctgttgctgaatgcgcagttattggaattaaa

SEQ ID NO: 307766 - DNA, 527 bp, Unknown
  Bacterial polypeptide expressing nucleotide sequence isolated from the Sargasso Sea
catgagtattttagtaaataataaaactaaattggttgtacaaggaattactggtagggaaggtagtttccacgccataaggtgcaaaaactatggaacaaacttagtagcaggagtaactccaggtcaaggtggtaataagtttgaccagaccgtacctatttttgatactgtggaagaagcagttcgtatgactggggcaaatacttctttgatatttgtgcctccaccatttgcaattgaagcaatatcggagtctatagattcaggaattgaggtaattgcttgcattacagaaggtgtaccagctttagattctttaaaaatctataattatttacaaaactcatcatctattttggttggtcctaattgtcctggaatgatttctcctaatgaccattgtaaagttggaattatgcctggaagtattcatttgcctggaagaataggtgtggtatcaagaagtggaactttaacctatgaagcagtagggcaattaagtaatttgggaattggtcaatcga

SEQ ID NO: 307767 - DNA, 286 bp, Unknown
  Bacterial polypeptide expressing nucleotide sequence isolated from the Sargasso Sea
gcatccaaagaaaaagtatctgctgcattaaaaataattctctcagatagaaatgttaaaggtattttgattaatatttttggaggaataatgagatgtgatgtccttgcccaaggagtagttgatgcagctaaagaaattaatattagtgtacctttggttgtaagattagcaggtacaaatttcaaggagggaaaagaaattcttgataattctggattaaaattaatttctgcagaaaatttagatgatgctgctaagaaaattgttgaggcgataaaataaa

SEQ ID NO: 307768 - DNA, 274 bp, Unknown
  Bacterial polypeptide expressing nucleotide sequence isolated from the Sargasso Sea
aaatcaattttaatgattggtgaaataggtggatcagctgaagaagaagcagctgaatttgtaaaaaatcatgaaataaaaaaacccatggttggttttattgcaggagttacagcaccaccgggtagaagaatgggacatgcaggggccataatatcaggtggtaaaggtggggctaaagataagatcaaaaaaatggaagattgtggcatagaagtagccacatcaccttcagaaattggaaaaacattgttaaataaattgtccaattgaa

SEQ ID NO: 307769 - DNA, 316 bp, Unknown
  Bacterial polypeptide expressing nucleotide sequence isolated from the Sargasso Sea
ctttattgactgtctagatctttttttgagggataaagatactcattcaattgttatgattggagaaattggcggctcagcagaggaagatgctgcagaattccttaaaaagtcaaaattaaaaaaacctacagttggttttatagctggattgacagcccctacaggcagaagaatgggacatgctggcgcaataatatcaggtggcaaaggtggcgcagaagacaaaatagaggttatgaaatcagcggatattactatatcaaaatctccagctgatatcggaaaaactatttacgaaaaacttaataattaa

SEQ ID NO: 307770 - DNA, 552 bp, Unknown
  Bacterial polypeptide expressing nucleotide sequence isolated from the Sargasso Sea
cgccatcctgcctccccagcatctggggcgcggacgacgccttcatcgagaaatatctgacgaccttccccggctattacgagactggtgacgccggctacaaggacgaggacggctatctctacatcatggcgcgcaccgatgacgtcatcaatgtcgcgggccaccgtctgtcgacaggccagctggaagaggtgcttgccgaacatcccgatgttgccgaatgcgcggtgatcggggttgcggacgagcttaaaggccagcttccgcttggcctaatctgcctctatccgaattgcgaaaagccggtcgagcaggtctgttccgaatccatcgatctcgtgaagggccgcgtcggtcgggtctccgccttcaaccttgtcgtggccattgaccgtctgccgaagacccggtccggcaaggttttgcgcggcaccatggcgaagatcgccgatggcgaggaatggacaatgccggcgacgatcgatgatccggtgatcctcgacgagatcggcgcggcgttgaagacaatcggctatccaaagtcctgac

SEQ ID NO: 307771 - DNA, 816 bp, Unknown
  Bacterial polypeptide expressing nucleotide sequence isolated from the Sargasso Sea
tgatttgagtagttttgagagcttatttctcgctggagaaagagctgatccagatactataaagtgggctgagaatttacttaaggttcctgtgatagaccactggtggcaaacagagactagttgggcgattagctcaaattgtactggtattgaaatgatggaaacgaaatatggttcagcgtgcaaagctgttcctgggtatgatgtaaaaatcattaagccagaccagtctttagcaaaaccaaatgagatgggagacatagttgtgaaactccctttgcctccagggacatttccaactctgtggaatgcagaccaaagatataaagaaaactatatgtctaattatgcaggatactatcaaacatatgatgcaggtcacattgatgatgatggttatatttggattatgtctagaactgatgacattataaacgtagcgggtcacaggttatcaactggagcgattgaagaagtattatctgaacatcaatcagttgctgaatgtgcggtgcttggaattgcagataaattaaaaggtcaactacctattggattagtagttttaaagtctggtgttgataaagataatgatacaatatcaaaagaatgtgttcagatggttagagataaaataggcccagttgctgcatttaaagtagtgattgttataaaaagattaccaaaaacaagatcaggaaaaattttaagaggaactataagaaaaattgcagatggtgttgaatataaaatccctcctacaattgatgatccttcaatattaacagaaataaaagaagacttaattaatca

SEQ ID NO: 307772 - DNA, 381 bp, Unknown
  Bacterial polypeptide expressing nucleotide sequence isolated from the Sargasso Sea
aatgtcgattttaattgataaaaatacaaaacttctggttcaaggaattaccggctcacagggaatgctccacaccaaaggctgtattgattatggtacaaacgtcgtagcaggagtaactcccggaaaaggaggacaggaatttgaaggtgtcccaattttcaattcggtatctgaagcaatcagggaaactgatgcaaatgcttcaatgattttggtcccaccagcatttacttcagatgcaataatggaggcagcagcagcagaaatacctcttattgtgtcaattactgagggagttccagtagtggatatggttcaggcagttgattttgtaagcaaaaaaggatgtcggcttattggtccaaattgtcctggaat

SEQ ID NO: 307773 - DNA, 859 bp, Unknown
  Bacterial polypeptide expressing nucleotide sequence isolated from the Sargasso Sea
agtatcaattattgctgcaaatactccagaattactagaagcacattattcaataccaatgacaggaggcgtcattaatacaattaatacaaggttagatgcagagacaattgcttatattttagaacatagtgatgcaaaattattaataacggatacacaattctctcctacgataaaaaaagccttaaatatatacggtaaaaaaataccgataattgatattcatgatgatcaagcaatatttaaagaagaagaaggtgaaaaatttggagaatggacatatgaagaatttcttcagacaggtgatgataattttcaatggtcattaccagatgatgaatggcaagcaatttcattaagttatacttctggcactacaggtaagccgaaaggtgtagtttatcatcatcgtggttcttacctaatgtcaacaggaagtgtaacggcttggaatatgccaaataaattaacttttctttacactgttcctatgtttcattgtaatggttggggttatccttggacagctgccttaatacatgccaaagttatttgttgtcgttatataattgcgaaagatatttataatttaatagacaaacataaggttactcattttggaggcgcaccaatagttttaagtttgattgcaaatgctgatgaaaaagataagaaagaaattaatcacaaggtatttgttttaacagcgggagcacctccaacaagtgctatactagaaaaaatggataatcttggttttgaagtgatgcatgtatatggtttaaccgaaacttatggacatatacttcaatgctcatggaatgaagaatggaatcatctttcaaacacggaaaaa

SEQ ID NO: 307774 - DNA, 721 bp, Unknown
  Bacterial polypeptide expressing nucleotide sequence isolated from the Sargasso Sea
actgtccgtcagagacttaattgacttaagagcaaaagaaatccctgatcttccatttttgctcactccaataaacccttttcccatcaattttcaacaactaaaggattattgttccagaattagtacaggattggaggctttgggtgtggaagagggtcagactgtggcaacgatgatgcccaatggtcttgcttcgactctcctcaacctctcgattttttataaaggaaaaatcttgtgtccgctcaacctggcagcaggagacatgcaactttcctatgttctggaacattcggaaagccgtttgttgctgttagcatcagaacttcgtgcacgggcggaagccatcctcaagactcttcccaatcctccggaaatggtcgagatcgctgcagatgaaatcccttttgaaaatgctggaaaccaatgggaaagtgaaaatcaaacggatgcgttgaaaatcggccttttgatgtacacctcaggcactaccggaaagcccaagggagtgatgctgtctcatcggagtttgatttccggaggtctcaacgccatggaatcgcatgatttaaagcctgaggatcgagccttgtgtgtactacctctttatcatatcaacggtttgatcaacaccatgatgggacctttggtcagtgggagcagtgtcttcatgccgccaaaatttaagacttcagagttttgggggctggattcttga

SEQ ID NO: 307775 - DNA, 901 bp, Unknown
  Bacterial polypeptide expressing nucleotide sequence isolated from the Sargasso Sea
ccagctgattgtgttgagatgaactccaatgagtttgcatacattttgtatacctcaggcacaactggaactccaaagggaatagtaagagatgttggcggtcatattgttgctttgaagtggaccatgaaaaatatttataatattgataccaatgatatctggtggtcagcgagtgatatcggatggattgttggacactcatatattgtttacgcacctttgtttaagggatgcacaacagttttatttgaaggtaagccagtaggaactcctgatgctggagcgttttggaaaattatttcagattataaagttaaatctttgtttaccgctcctactgcatttagagcaattaagaaagaagaccctgagggtaagtttttttcaaagtatgatctaagtaattttgaaagtttatttttagcaggagaaagagctgatccagacacgataaaatgggctgaaaatttattaaaagttccagtaattgaccattggtggcaaactgaaacgagttgggcaattagttcaaattgtactggaattgagatgatggaaactaaatatggctcagcttgtaaagcagttccaggatatgacgtaaaaattatcaaaccagatcaatctttagcaaaaccaaatgaaatgggggatattgtagtgaaactccctttgcctcctggaacgttccctactctttggaatgcggacaaaagatataaagaaaattacatgtccaattatgaaggttactatcaaacttacgatgcaggacacattgatgatgatggttacatttggattatgtctagaacagatgacattataaatgttgcaggtcacagattatctactggagcaatagaagaagttttatctgagcatcaatcagtgctga

SEQ ID NO: 307776 - DNA, 746 bp, Unknown
  Bacterial polypeptide expressing nucleotide sequence isolated from the Sargasso Sea
tttgaattggaagagtctatctaataatccaaatataactatagatataattcgagaaaatcctggaaagccatttgattgggagtggatatcattcaacccaaatattacatgggatataattagagaaaatcctggaaaggaatgggattggaataaaatatctaaacatccaaatattacatgggatataattaaagaaaatttagacctaccttggaagtggtataaaatatcatgtaatccaaatataactatagatattattagagaaaatccagataaaccttggaattggcaatggatatctcgtaacccaaatattacgatggagattattaaagataatttagacctaccgtgggattggaggtggatatctagaaacataaatataactatagattttattctagaaaatccagacaaaccctggagatgggatgttctatctagatatcaaattataacttgggatattattcgagaaaacccagacaaaccgtggaattgggattatatatcttgcaacccaaatataactatggatattataaaagaaaatctagacaaaccttggaattttcaatggatttctagcaacccaaatataactatggatattataaaagaaaatctggatatgccttgggattggaaatatatatctcaaaacccaaatattactatggatattattcgagataatcctgataaaccgtggtgttggtatagtatatctggaa

SEQ ID NO: 307777 - DNA, 760 bp, Unknown
  Bacterial polypeptide expressing nucleotide sequence isolated from the Sargasso Sea
ttcagagcaattaaaaaagaagatcctgaaggtaaatttttttctaaatatgatctaagttcatttgaaagcttattccttgcaggagaaagagcagacccagatactattaaatgggctgaatctcttttaaaagttccggtgattgatcattggtggcaaactgaaactagttgggcaataagttctaattgtacaggtatagaaatgatgaaaacaaaatacggttcagcttgtaaagcggttcctggttatgatgtaaaagttataaaaccagatcagactttagctaaaccaaatgaaatgggagatattgttgtaaaacttccactgcctcctggaacatttccaaccctgtggaatgctgatgaaagatataaaaaaacttatatgacaaattatgaaggttattatcaaacgtatgacgcaggccatatagatgatgacggttatatttggatcatgtcaagaactgatgacattattaatgttgctggtcatagactttcgactggagctatagaagaagttttgtcagaacatcaatcagttgctgaatgtgcagtcattggaattgctgataaattaaaaggtcaactgccaattggtttaatagctttaaaagcaggtgttcaaaaagataatgtggctatatcgaaagaatgtattcaaatggtaagagataaagttggccctgttgctgcttttaaaactgcaatagttgtaaaaagattaccaaaaacaagatctggaaaaattt

SEQ ID NO: 307778 - DNA, 959 bp, Unknown
  Bacterial polypeptide expressing nucleotide sequence isolated from the Sargasso Sea
agaaataagttgggaagagtccctatcaagcgcaaaagatacagattgtgtagagatgggttcaaatgaatttgcatatattttatatacctcgggtacgactggagtgccaaaaggaattgttagagatattggaggtcacatagttgctctaaaatggactatgaaaaacatttataatattgatactgatgacgtatggtggtcagcaagtgacattggttggatcgtcggtcattcttatattgtttatgctcctctatttaaaggatgtacgactgttctttttgaaggaaaacctgtggggactccagatgcaggtgtattttggagaattatttctgaatacaaaatcaaatctttatttactgcaccaactgcttttagggcaattaaaaaagaagatccagaaggtaaatttttttctaaatatgatttaagctcttttaagtctttatttcttgctggtgagagagcagatcctgatactataaaatgggctgagaacctcctaaaagttccagttattgatcattggtggcaaactgaaactagctgggctattagttcaaattgtacaggtatcgaaatgcaaaagacaaaatatggttcagcttgtaaagctgtccctggttatgatgtaaaaattattaaaccagatcaaactttagctaaacctgatgaaatgggagatatagttgtaaaattgcctttgccaccaggaacttttccaacattatggaatgcagataaaagatatgaggagaattacatgtcaaattacaaaggatattatcaaacctatgatgcaggacatattgatgaggatggttatatatggataatgtctaggactgacgatataataaatgttgcaggccacagattatctacaggacaaattgaggaagtgctatctgaacatcagtcggttgctgaatgtgcagttatggaataaa

SEQ ID NO: 307779 - DNA, 659 bp, Unknown
  Bacterial polypeptide expressing nucleotide sequence isolated from the Sargasso Sea
attagaagttgcccaagcaacagataaactgctaggaaaaaaactaattacaaatcaaacaggacctgaaggaaaaattgtaaacagaatttacattgaagaagctacagacatcgaaaaggaactatatttaggattggtttttgatagaagctcagaaagtattatggttgttgcatctacagaaggtggaatgagtgttgaagaaatttcaaaggaaaaaccagaaacaattattagatctaaaattgaagttgcagttggaatgcaaaattttcaagctagagaattagcatttggtcttggtatagagccagacttaattagaagagcttctgatactattattggatgttataaagctttcagtgaattagatgcaacgatggtagaagttaatccattggttatttcaaaacaaagacaaattttagcattagactgtaaaatgagtttcgataacaacgcaatgtttagaagaagtcaagtttctgaacttagagataaaacacaagaagattcaaaagaaatttttgcatcggacagaggtttaaactatgtcagtttagatggaaatataggtaacattattaacggtgctggtctcgcgatggcatctatggatatgattaaattagctggaggagctccagcaaatt

SEQ ID NO: 307780 - DNA, 897 bp, Unknown
  Bacterial polypeptide expressing nucleotide sequence isolated from the Sargasso Sea
atgttccagtttgctagcgcattagcaaaaaaaggaattacaaaaggaagtactgtatcaattatagctgcaaatactccagaattatttgaagcacattattctatcccaatgactggtggcgttattaatactatcaataccagacttgatgcagaaacaattgcatatattttagatcatagtgatgcaaaacttctaataactgatactcaattttcacctacaatgaagagagctttgcaaatatatggaaaaaatattcctattattgatattcatgatgaccaagcaatttttaaagatggcgaaggtgaacaaataggagaaatgacatatgaagaatttttacaaactggtgatgataattataattggtctttacctgaagatgaatggcaagctatctcactaagctatacatcaggtacaactggtaaaccaaaaggtgttgtttatcaccaccgaggatcatatttaatgtctacaggaagtgttacagcatggaatatgccaaataaattaacattcctatatacagttccaatgttccattgtaatggatggggttatccttggacagctgctttaatacatgcaaagattatttgctgcagatatattattgcaaaagatatttataacttaatagataaatacaaagtaactcattttggaggtgctcctatagttttaagtttaatagctaatgcagatgaaaaagataaaaaagaaataaatcataaagtatttgtacttactgctggagccccaccaactagtgcaattcttgaaaagatggataacttaggttttgaagttatgcatgtatacggattaaccgaaacatacggccacattcttcaatgtgcttggaatgaagaatgggagtcacaa

SEQ ID NO: 307781 - DNA, 751 bp, Unknown
  Bacterial polypeptide expressing nucleotide sequence isolated from the Sargasso Sea
cttgctggcgaaagagctgatccggatactattaagtgggctgagaatttacttaatgttcctgtgatagatcattggtggcaaacagagactagctgggcaattagctcaaattgtactggtattgaaatgatggaaacaaaatacggttcagcgtgtaaggctgtccctggatatgatgtcaaaatcattaaaccagatcaatctttagcaaaaccaaatgaaatgggagatatcgttgtgaaacttcctttgcctccaggaacctttccaacattatggaacgcagatcaaagatataaagaaaactatatgtccaattatgatggatactatcaaacgtatgatgcaggtcacatcgatgatgatggttatatttggataatgtctagaacagatgacattataaatgtagcaggtcatagattatcaacaggtgcgattgaagaagttttatcagaacatcaatctgttgcagaatgtgcagtacttggaattgcagataaattaaaaggtcaattacctataggtctagtagttttgaaatctggtgttgataaagataatgacactatatctaaagaatgtgtacaaatggtaagagataaaattggaccagttgctgcatttaaagttgtaattgttattaaaagattgccaaaaacaagatcgggtaaaattttaagaggaacaataagaaaaattgcagataacgttgaatataaagtgcctcctacaattgatgatccag

SEQ ID NO: 307782 - DNA, 702 bp, Unknown
  Bacterial polypeptide expressing nucleotide sequence isolated from the Sargasso Sea
ttcgtggctatattaggccgtaatcgtccagatctttatattgcgatggtcgcgatacagatggttggcgcaactccagtgccacaatatcaagactctgtggcagaagaaatggaatatgttctcgctcattgtggcgctaaattcgtcattgctggtgatcaagagcaagtagataaaatattggaaattgaggctaagcttccagattttaaacaaatgatttatttagatggcagaggtcttcgaaaatatgatcactcaaaattacactcttttgtatcaatcatggagaatgggaaaaatagcgggccggcctctaggtctaccttaaatgaacgagaaagtgctttaacatacgattctacctgtgtcatgttgtacacatcgggtacgacaggaaagccaaaaggcgttgttttgtccaacgcaaatattatcgaaacttcaaagaccacatgtgagtttgatgacctaaaacaaagtgatgaaattttggcatatttacctatggcttgggtgggtgattttatattttctgttggtcaagcaatgtggcgtggtttttgcgtaaattgtcccgaaagcgctgatactttatcgaatgaccttagagaaataggtccaacttactactttgcgcctccaagagtttttgaaatgcaacttaccaacgtaatgatacgtatggaagactctgga

SEQ ID NO: 307783 - DNA, 799 bp, Unknown
  Bacterial polypeptide expressing nucleotide sequence isolated from the Sargasso Sea
ttggaatgatgcgcttaaaggtgctcaagaagtagattgtgttgaaatgaatgcaaatgattttgcatatatactttatacatcaggaacaacaggggttcctaagggaattgtaagagatataggtggtcatatagttgctcttaaatggactatgaaaaatatttataatattaatcaaaatgatgtttggtggtctgcaagtgatataggatggattgtaggtcactcttacattgtttatgctccattgtttaaaggatgtacaactgtattatttgaaggtaaaccagttggaacgcctgatgcgggtgttttttggaggataatatctgaatataaaattaaatctttgttcaccgcacctactgcttttagagcaattaaaaaagaagatccggaagggaaatttttttcaaaatatgatttaagttgttttgaatctctatttttagcgggagaaagagctgatcccgatactattaaatgggctgaatcgttattaaaagttcctgttatagatcattggtggcaaactgaaactagctgggcaattagttctaattgcacaggtatagagatgcaaaaaaccagatatggatctgcttgtatgcctgttccaggatatgacgttaaagttttgaaatctgataagtctgaagcgaaagcaaatgaaatgggagatatcgttattaaacttccgcttcctcctggaacttttccaactttatggaatgctgatgaaagatataaaaaaacttatatgtcaaattatgaaggctattatcaaacttacgat

SEQ ID NO: 307784 - DNA, 257 bp, Unknown
  Bacterial polypeptide expressing nucleotide sequence isolated from the Sargasso Sea
taagataattttatcagacaaaaatgttaaaggaatattgataaatatttttggtggaattatgagatgtgatgttcttgctcaaggtgttgttgatgcagcaaaagaaattaatattactgttccacttgtagtaagattagctggtacaaactttaaagaaggaaaagaaatactagataactctggtttaaaattgatttctgctgaaaacctcgatgacgcagctaaaaaaattgttgaggcaattaaataaa

SEQ ID NO: 307785 - DNA, 621 bp, Unknown
  Bacterial polypeptide expressing nucleotide sequence isolated from the Sargasso Sea
attcaggaataaaactactagttgccattccagagcatgttccaattagagatgcaatggaggcaatagaattagcaaaacaaaaagatgcagttatgattggaccaaatactccaggagtgattgtgccaggattgattaaagtgggaattatgcctgcaagtccattttcatctggaaaagtagcagttttgtcaaagagcggaacattactttatgaaatttcaaataatttgactagtgcagggtttggacaaaatatcacaatcggtattggaggggatccagttaacggaacacgaatgattgatgcatttgacatggtcaaagatgatcctgaattagaagcaatggtagttgttggagaaattggaggagattctgaagagattttggctcaacatatcatagatacaggtttcaagaaaccaattgtaggatatattgcaggacgtcaagcaccaaaagaaaaacgaatgggacatgcaggtgccatagttatgggaacatatggttcagcagaatcaaagatatccatgtttgccaaggcaaatattccagttgcaaagagaccaggcgaggtagcagtcctcctagcaggcaaaatgagtagccaataga

SEQ ID NO: 307786 - DNA, 831 bp, Unknown
  Bacterial polypeptide expressing nucleotide sequence isolated from the Sargasso Sea
cgaagatgatgtttggtggtcagcaagtgatattggatggattgttgggcattcttatattgtttatgctcctctttttaaaggatgcactacagttctatttgaagggaaaccagtgggcactcctgacgcaggtgttttttggagaatgatttcagaatataaaataaaatcattgtttacagctccaacagcatttagagcaatcaaaaaagaagatcctgaaggtaagtttttttctaaatatgatttaagttcatttgaatctctttttcttgctggagaaagagctgatcctgatacaataaagtgggcagaaaatcttttaaatgttccagtaattgatcattggtggcaaacagaaacaagttgggctattagctcaaattgtacaggtattgaaatgcaaaaaactaaatatggttccgcatgtaaggctgtgccaggttatgatgtaaaaataattaaacctgatcaaacattagctgaaccaaacgaaatgggtgatatagttgttaagctaccacttccacctggaacttttcctacgctttggaatgcggatgaaagatataaagaaaattatatgactaactatgaaggttattatcaaacttatgatgcgggtcacatagatgaagacggctacatttggattatgtctaggactgatgacattattaacgttgcaggacacagattatctacaggtgcaattgaagaagtattatctgaacatcaatcagttgccgaatgtgcagttttaggaattgcagataaattaaaaggacaattaccaataggtttgattgttttaaaatctggagttga

SEQ ID NO: 307787 - DNA, 915 bp, Unknown
  Bacterial polypeptide expressing nucleotide sequence isolated from the Sargasso Sea
ttggagagtatatctgaatacaaaattaaatctttatttacagcaccaactgcttttagagccattaaaaaagaagatccggaaggtaaatttttttctaaatatgacttaagctcttttgagtctttatttctagctggtgagagagcagatcctgatactataaaatgggctgagaaccttctaaaagttcctgttattgatcattggtggcaaactgaaacaagttgggcaattagttcgaattgtacaggaattgaaatgcaaaagacaaaatatggttcagcctgtaaagctgttccaggttatgatgtaaaaattattaaaccagatcaatctttagcaaaaccaaatgagatgggggatatagttgtaaaattacctttgccaccaggaacttttccaacattatggaatgcagataaaagatatgaagagaattacatgtcaaattacaaaggatattatcaaacctatgatgcaggacatattgatgaggatggttatatatggataatgtcaaggactgacgatataataaatgttgcaggtcacagattgtctacaggacaaattgaagaagtattatctgaacatcagtcagttgctgaatgtgcagttgttgggataaaagatcaattaaaaggacaattaccaattggattgatagctttaaaagctggagttacaaaagaaaatgaagcaatctcaaatgagtgtattcaaatggtaagagataaagttggaccagttgcagcatttaaaattgcaatagtcgtaaaaaggcttccaaaaacaaggtcgggtaaagttttgagaggaacaataagaaaaattgctgataaggaagattataaaatgcctgcaactattgatgatcctgctattttgactgagataacagaagaatttatt

SEQ ID NO: 307788 - DNA, 343 bp, Unknown
  Bacterial polypeptide expressing nucleotide sequence isolated from the Sargasso Sea
aggtattggtggtgatccttttcctggatcgtcatttatagatatgcttaagttatttgaggaagacgaacaaactgaagcaattgtcatggttggtgaaattggtggaaatgctgaagaggctgctgcagattatataaaaaataatgtaaataaaccggtaatttcttacattgcaggtcagacagcacctgctggaaaaagaatgggtcatgcgggtgcaattattgctggtggaaaaggaacagctgcagaaaaaattaaaaaactaaaagagtgtggtgttcacgtagctgataacttagtatcaattggttctaaagtggctgaagttcttggttaa

SEQ ID NO: 307789 - DNA, 883 bp, Unknown
  Bacterial polypeptide expressing nucleotide sequence isolated from the Sargasso Sea
gatgctggtgctttctggaaaatcatctcagatcatagagtaaaatctttatttactgcaccaacagcttttagagctatcaagaaagaggaccctgagggtaaatttttctcaaaatatgatctaagcaattttgaaagcttatttcttgctggagaaagagccgatccagatactataaagtgggctgagaatttacttaaagtccccgtaatagatcattggtggcaaacagagactagctgggcaattagctcaaattgtactggtattgaaatgatggaaacaaaatatggttcagcgtgtaaagctgttcctgggtatgatgtcaaaatcattaagccagaccaatctttagctaaaccaaatgaaatgggagatattgttgtaaaactacctttgcctccgggtacatttccaacattatggaatgcagatcaaagatataaagaaaactatatgactaattatgaaggctattatcaaacatatgatgcaggtcacattgatgatgatggctacatttggatcatgtctagaacagatgacattattaatgtagctggtcatagactatcaacaggagcgattgaagaagtattatctgaacatcagtctgttgcagaatgtgctgtgcttggtattgctgacaaattaaaaggacaattacctattggcttagtagttttaaaatcaggtgttgataaagataatgaatctatttcaaaagaatgcgtacaaatggttagagataaaattggaccagttgctgcatttaaagttgtaattgttattaaaagattaccaaaaacaagatcaggaaaaattttaagaggaacaattagaaaaattgcagatggtgttgattataaagtgccaccta

SEQ ID NO: 307790 - DNA, 805 bp, Unknown
  Bacterial polypeptide expressing nucleotide sequence isolated from the Sargasso Sea
ccttgcgggggaaagagctgatccagatacattaaaatgggcagaaggtttattaaaagttccagtgattgatcactggtggcaaacggaaacgagctgggcaattagtgcaaattgtgcaggcataggactagaaaaaacaaaatatggatccgcatgtaaaccagttccaggttacgatgtaaaaatattaaagagtgatggtaaagaagcaaaacctaatgaaatgggtgatgtagtagttaaacttcctcttcctccaggaacctttccaacactttggggagctgatcaaagatataaagaaacttatatgtcaaactatcctggttattatcaaacttatgatgcaggacatattgatgaagatggttacgtctggattatgtcgcgaaccgatgacattattaatgttgccggtcacagactatcaacaggtgctatggaagaagttttagccgaacataaagatgttgcagaatgtgcggtcttaggaattgctgataaattaaaaggacaattacctattggtttattaactcttaaagcaggtgtcactaaaaaacatgaagatatttcaaaagaatgtgtgcaaatgatcagacaaaaaattggtcccgttgcagcttttaaaactgcgattgttataaaaagacttccaaaaacaagatcgggcaaaatattaaggggaacagtgagaaaaatagccgataatgaaccttataaaatgcctgctactattgatgatcctgctatacttgatgagataaaaggggatttaaaaaaacacaacatactaaaatga

SEQ ID NO: 307791 - DNA, 838 bp, Unknown
  Bacterial polypeptide expressing nucleotide sequence isolated from the Sargasso Sea
ttgttattatggtaccaataacccagaacaaatagttctactttttgctgcatcaaaaatcggtgcaattatgttcccaattaattggagattagccaatccggaaattgaatatttgataaatcattcaaaccctaatgtgattttttttgatactaaatttggggataaaatttctcagatacatattccaagaagtattaaaaccatcgcagtagataattcagaaattaatcataaaagcttagaagctagaagattgtcttgtaatgggagaattaaaaaaacgataaaaaataatttgccattattgttagtttatacatctggtactacggggaaaccaaaaggagctcttttgggacagaaagctataatcagtaatgccaaaatgagtcatgatgcacattcattgaaatcttctgacaaggtattaatttcacttccattattccatgtgggtggaatcaatattcttttactaccagcccttttaaaaagtgcaacagttgtcctgcaggaaagatttgaaccagatcaagccctagaaattataagaaaatttaaaatttctaaaatgataacagtccctacaatattagaccaaatgattaaaagtagattttggattaagcctaactataaatatttgcaagttatatcaattggttctacaaatgtacctaaatatttattaaaaaaacttcattccataaaaatacctgtaattcaaatatatggtgcaacagagacagggcctttagcaatttatcaaaaagttaaggatgcttttacaactgaggggtctataggaaaagccggttcgctttgtaagata

SEQ ID NO: 307792 - DNA, 894 bp, Unknown
  Bacterial polypeptide expressing nucleotide sequence isolated from the Sargasso Sea
atattttatatacctcaggtacaactggaactccaaagggaatagtaagagatgttggtggtcatattgttgctttgaagtggaccatgaaaaatatttataatattgataccaatgatatctggtggtcagcgagtgatattggatggattgttggacactcatatattgtttacgcacctctgtttaaaggctgcacaacagttttatttgaaggtaagccagttggaactccagatgctggagccttttggaaaataatttcagactacaatgttaaatctttgtttactgctcccactgcatttagagcaattaagaaagaagaccctgatggtaagtttttttcaaagtatgatctaagtaattttgaaagtttatttttagcaggggaaagagctgatcctgatacgataaaatgggctgaaaatttacttaaagttccagtgattgatcattggtggcaaactgaaacgagttgggcaattagttcaaattgtactggaattgagatgatggaaactaaatacggctcagcttgtaaagctgttcctggttatgatgtaaaaatcatcaaaccagatcaaactttagctaaaccaaatgaaatgggtgacattgttgtgaaactccctttacctcctggaacattccctaccctatggaatgcggacaaaagatataaagaaaattacatgtccaattatgaaggttactatcaaacttacgatgcaggacacattgatgatgatggttacatttggattatgtctcgaacagatgacattataaatgttgcaggtcacagattatctactggagcaatagaggaagttttatctgagcatcaatcagttgctgagtgtgctgtgttagggatcgctgataaataaa

SEQ ID NO: 307793 - DNA, 214 bp, Unknown
  Bacterial polypeptide expressing nucleotide sequence isolated from the Sargasso Sea
aatatttttggtggcataatgcgatgtgatgttctggcccaaggtgttgtagatgctgcaaaagaaatgaaaatcaatgttcctttggtagtcagactagctggtacaaattttaaagaaggtaaagaaatattagataattcaggtttaaaattaatatctgctgaaaatttagatgatgcagcaaaaaaaattgttgaggcaattaattaaa

SEQ ID NO: 307794 - DNA, 961 bp, Unknown
  Bacterial polypeptide expressing nucleotide sequence isolated from the Sargasso Sea
aaagagataagttgggatgaagctatgtcggatgcaaaagatactgactgtgttgaaatgaattcaaatgagtttgcatatattttgtatacttcaggtactacaggggtacccaagggtattgttagagacattggtggacacatagttgctttaaaatggactatgaaaaatatttataacataaataccgatgatgtatggtggtcagcgagtgatataggatggattgtaggacactcatacattgtttatgctccattatttaaaggatgcacaacagtactctttgaaggaaagcctgttggcactcctgatgctggtgccttctggagaataatttctgagtataatgtaaaatctttattcaccgctccaacagcttttagagctattaaaaaagaagatccagatggaaaatttttttcaaaatatgatttaagtaaatttgaagctctctttctagctggagaacgagcagatccagatacaatcaaatgggcagagtctcttttaaaagtcccggtaatagatcattggtggcaaacagaaacaagttgggcaataagttccaattgcactgggatagagatgatgaaaacaaaatatggttcagcttgtaaagctgtcccaggatatgatgtaaaaattataaaaccagatcaatcattagcaaaaccaaatgagatgggagatatagttgtaaaacttcctcttcctccaggaacatttccaactttgtggaacgcagataaaagatatgaggaaaattatatgaccaactacaaaggttattaccaaacttatgatgcgggtcacatagatgatgatggatatatttggattatgtccagaactgacgatattataaatgttgcaggtcatagactttcaactggagcaatcgaggaagttttatctgaacatcaatcagttgctgaatgtgcagtaataggaataa

SEQ ID NO: 307795 - DNA, 918 bp, Unknown
  Bacterial polypeptide expressing nucleotide sequence isolated from the Sargasso Sea
tttgcatgctaatgaactagcaagtaggattgatgactctaaagcaaaaatattagtaactgcttcttgtggatttgaaccaggaagaactgttgaatataaaccgctcgtggataaagctttagagatcgcaaaacataaacctgaaaaattaattctttatcaaagagaaggtcacgaagttgatttaaataatataaatgaaataagttggaatgatgcacttaaaggtgctcaagaagtagattgtgttgaaatgaatgcaaatgattttgcatatatactttatacatctggaacaacaggcattcctaagggaattgtaagagatataggtggtcatatagttgcacttaaatggactatgaaaaatatttataatattaatcaaaatgatgtttggtggtctgcaagtgatataggttggattgtaggtcactcttatattgtttatgctccattattcaaaggatgtacaactgtactatttgaaggcaaaccagttggaacacctgatgcaggagttttttggagagtaatatctgaatataaaattaaatctctgttcactgcacctactgcatttagagcaattaaaaaagaagatccggaaggaaaatttttttctaaatacgatttaagttgttttgaatcattgtttttagcaggagaaagagctgatcctgatactcttaaatgggctgaatcattattaaaagttcctgttatagatcattggtggcaaactgaaactagttgggcaataagctctaattgcacaggtattgagatgcaaaaaacaaaatatggatctgcatgtatgcctgtgccaggttatgatgtcaaagttttgaaagctgataagtctgaagcaaaagcaaatgaaatgggagatattgttgtgaaacttccactccc

SEQ ID NO: 307796 - DNA, 517 bp, Unknown
  Bacterial polypeptide expressing nucleotide sequence isolated from the Sargasso Sea
aatgacagttttaatagacaaaaatagtaagataattattcaaggttttacagggaaaatgggctcttttcatgcagatgagatgattaagtatggttctaatgtcgttggtggagttactccaggtaagggtggctctatgcacctaaatttgccagtttttaatacagtgaaagatgcagttagcgaaactggagcagatgcatcaattttatttgtaccaccagcttttgcagcagactcagcaatggaagctgctgatgctggtattaaaacgtgtgtagctattgtagatggaattccatctcacgatatgatcagaattaaaagatatatgagaaggtatactaaaagttctaaaatgactctagttggacctaattgtgcaggaattatcagtcctggaaaatcaatgttgggtattatgccggggcatatatataaagagggaagaattggaattataagtagatcaggaacattaggatatgaagcagctcaacaactcaagaattga

SEQ ID NO: 307797 - DNA, 786 bp, Unknown
  Bacterial polypeptide expressing nucleotide sequence isolated from the Sargasso Sea
caaatgaacttgcaagcagaattgatgatagtaaagcaaaattattagtaactgcttcttgtggttttgagccaggacggacagtggagtacaagccgcttgtcgatgaagcaataaaaattgccaatcacaaaatcaaaaaaatgattttattccaaagacctggttatgaagtcaaattaaatgccccaagtgaagttagttgggaagaagtagtttctaatgctaaggatgctgactgtgttgagatgaactccaatgagtttgcatacattttatatacatcagggacaacaggaactccaaaaggtattgtaagggatattgggggtcacattgttgctctcaaatggactatgaaaaacatctacaatatagactcagatgatatttggtggtctgctagtgatattggatggattgtcggacactcttatatcgtttatgctcctttatttaagggatgcacaacagttttgtttgaaggtaagcctgtgggaacaccagacgctggtgctttttggaaaatcatctctgattataaagtaaaatctcttttcacggctccaacagcttttagagcaattaaaaaagaagatcctgaaggtaaatttttctcaaaatatgatttaagcagttttgaaagtttatttcttgccggagagagagctgatccagatactataaagtgggctgaaaatttacttaaagttcctgtgatagatcattggtggcaaacagagactagctgggcaattagctcaaattgcacaggaaaaaaatgat

SEQ ID NO: 307798 - DNA, 844 bp, Unknown
  Bacterial polypeptide expressing nucleotide sequence isolated from the Sargasso Sea
tcttatattgtttatggaccgttattttatgggtgtacaacagttttgtttgagggaaaacctgttggaactccagatgcaggagttttttggaggataatttcagagcataaagtaaaatctctttttactgctccaacagcaataagagccataaaaaaagaggatcctaatggagaattttttaaaaaatatgatttaagtaagtttgataaattatttcttgctggcgagagagccgatcctgatacaataaaatggtttgaaaaactttcaaattcccctgtcattgatcattggtggcaaacagaaacaagttgggcaataacatcaagctgtactggaattgaaaatttttccataaaatatggttctgcattcaaaccagtgccaggttatgatttaaaagttttaaattctgaaggtaaagaagtaggaccgggtaaaatgggagatattgttgttaagcttcctcttccaccaggaacttttccgacattatggggggcagataaacggtacaaagaaaactatatgtcaacttacccaggatattatcaaacttatgatgcaggacatatcgacgaagatggctatgtttggatcatgtctagaacagatgacataataaatgttgcaggccatagattatcaaccggggctattgaagaagttttggcagaacatcaggatgttgcagagtgtgcagtgataggaatagctgataaacttaaaggtcaaatacctataggtttgttagcgcttaaggcaggagtaaccaaagataaaaaggatattattagcgaatgtgtaaaaatggttagagaaaaagttggtcctgttg

SEQ ID NO: 307799 - DNA, 604 bp, Unknown
  Bacterial polypeptide expressing nucleotide sequence isolated from the Sargasso Sea
ccttttagttacaaatcaaacaggaccagagggaaaaattgtaaatagaatttatatcgaggaagcaaccgatatagaaaaggaactttatttgggtttagtgtttgatagaagctcagagagcataatggttgtagcttcaacagaaggaggaatgagtgttgaagaaatcgctaaagaaaaacctgaaacaattataagatccaaaattgaagtagcagttggaattcaaagttttcaagcaagagagctcgcatttggattaggaattgaatctgatttaattgctagagcatctgatacaattattggatgtgctaaagcgtttagtgagttagatgctacaatggttgaagttaatccattagtcatttcaaaacaaaaacaaatattagctttagattgtaaaatgagcttcgataataatgctatgtttagaagaaataaagtatcagagttaagagataaatcccaagaagatgagaaagaagtatatgcatcagatagaggcttaaattatgtaagtctagaaggaaacattggtaatattattaatggggctggacttgctatggcatcgatggacatgattaaattagctgga

SEQ ID NO: 307800 - DNA, 787 bp, Unknown
  Bacterial polypeptide expressing nucleotide sequence isolated from the Sargasso Sea
cctgatactattaaatggtttgaaaagttgtcaggttcaccagttattgatcattggtggcaaactgaaactagttgggcaattacctctagttgcactggtatagaaaaatttccagtgaagtatggatcagcttttaaaccagtgcctggttacgatttaaaagttttaaattctgaaggtaaagaggtaggtcctggtaaaatgggtgatatagttgtaaaattacctttacctccaggtacttttccgactttatggggagctgacaaaagatataaagaaaactatatgtctaattatccagggtactatcagacctatgatgccggtcatatagatgaagatggttatgtttggataatgtcaagaactgacgatatcattaatgttgcgggccataggttgtcaactggcgcaatagaagaagttctagccgagcataaatcagtagcagaatgtgctgtaattggaatagcagataaactaaagggacaaatacctataggattgttagctttaaaagcaggagtatcaaaaaaaaactcagacataataaaagagtgtgtttcaatggttagagaaaaagttggaccagtcgcggcattcaaaatagctattattgtgaaaagattgcctaagacaagatcaggtaaagttttgagaggaacggtaagaaaaattgcagataatgaaccatataaaatgccagcaacaatcgatgaccctgctattttagatgagattaaagctgatttaattgaaaataaaatactaaaaaactaag

SEQ ID NO: 307801 - DNA, 901 bp, Unknown
  Bacterial polypeptide expressing nucleotide sequence isolated from the Sargasso Sea
tcttcttttggcattctttcaaaatccaatatagcaattgttgcttctaattctatcgagtatatggaaattgtattggcagcctctcaattgggtcatcccatcgctactgtcaatccaaaattgacaataaatgagattgtttcaatatgtgaagacgcccaagcaagtttgatctttgttgatcaaaaagtgtcttcattgcttgaaggaattcagattgatggtgctcaaaggataattaatatcgagaatgagttaagcaacctaattgatcattcaagtcaaatggttgaccttccagccattgatgaaaaagaaacattcacgataccttatacttctggaacaacaggaaagccaaagggtgttcttgtgcctcatcgatcaagggcgttgacgttatatggaatggcagatgcttatggttgtttttcttctgatgaccgctttctttctattgcgccaatgtgccatggcgctgggatgatcttctcattagcgcctatattttttgggggttacgctgaaattatggatgacttcaatcctgaattggtaatgaaaactatcgaagacgaaaacattacagggttttttggcgttccaacccatttttatgggatgcttggcatagatcaatccattctcgacagctgcactggaagctcattaaaaacgatcatatcaaatgcagccgcactgccacaatcgttaaaagaaaagatagttgaacattttggtgatggactgctttatgagtgctatggttcaacagagggtggaattatttcaaaccttaagccagaagatcaattaagaaaaaagcaatgcgtaggagagccatttccttttacagagataaaaatattaaatcatgatggcaatgaatgtgaccaaa

SEQ ID NO: 307802 - DNA, 805 bp, Unknown
  Bacterial polypeptide expressing nucleotide sequence isolated from the Sargasso Sea
tggccggattcaattttttttatttctcctggaaataattctacagagaaaagtgagctatcttattccgtagctgccacaaaaataaagtcttatgagaattacttttcacaatcaggatatggatatggtgaaaggatagcactacttttaggaaacagcgtggagcattatttggttaagttagcagcaaataacttaggaatttctgtggttcctctcaatccagattcttccaaatctgagataatatacattctcaatgatagtaactcggttttattaataacaaataaaaatcattcgaagttagcttcatcggtaaaggataaattagaaacttcaattttaatagttaatattgaagagttttcaaaatcactcccagcatcaagaacaccaattcaaaaagttgtggtcactcataatagtgaagcaagccttttatacacgtccggtacaactgggaagcctaaaggatgcatcctttctcacgaatacgaactaatgtgcggggatagctatcgttctgccgggccacccgttgggttaaaggttaatcaggacagagtctataatcctttaccaagttttcatataaatgcaggaatcctgacgttatttggttgtatattaacaggaaattgtcttattcagccagcacgatttagttcaaataactggtggatagatattaaagaaacgcaagctacagtttttcattatcttggagttataatcgccgttttattacagaatgaaaaaacttcagatattaaaccaaattcattacgattagggctgg

SEQ ID NO: 307803 - DNA, 839 bp, Unknown
  Bacterial polypeptide expressing nucleotide sequence isolated from the Sargasso Sea
gatgcatgcaatccgaaaagcgggaggggtatctgtaccaattccctaccggtcaacgcccgcggaagcttcatacctcttggggcacgctgatgcgaagattctcatcattgaggcgacataccttccagtgctttcttctatcagagaccagttgccgatgttgcagcacgtcatcgcctatggaaacgccgagcagtattcagggattttgttatgggaggatgctctgggtgatgcgcaaacacctgcaagtgaaggaaaagcggaaagcgcgctgacaatgatttacacgtcggggacaactgggaaaccgaaaggcgccatgcggcgcgtcggaggggaaatcaaccaatacggggcgcttttggaatttatcggttgggacaagatggaagaactcatctttcttaccacagggcccttgtaccactctggcccttctggatttgcccgccgagctcagctcgtcggcgccaccattgtctgccagtacacgttcgatccagaagactggcttcgccttgtcgaaacacatcgtgtttctgcaacattttctgcccctacccctattcgccggatcactgccctaccgaaagaaaccaaagacaagtacgatgtttcatcgatgcaatcgatgatcgcaaatgctgctccatggacaatggcgctcaaaaaagcctatcttcgagattttcctcccgattcgctttgggagatttatggctccacagaactttcggtatgcactgttttagcgcctgaggatcagcttcggaaaccggggtcatgtggccttccatctcccggagttgagattcaactcatcgacgatgaag

SEQ ID NO: 307804 - DNA, 816 bp, Unknown
  Bacterial polypeptide expressing nucleotide sequence isolated from the Sargasso Sea
aagactaaaatttataatcaatttagaagatgaacaatttgaaagtttaataagttggaatcaatttataaatgcagaagaaaaagaaaattcaaaaaataatattattgaaaaatttaatccaaaaattgatgatgtcgctactattctttacacctctggtacaacaggaaaacccaaaggtgtgcccttaactcatgcaaattttttacatcaaataactaatttagcctatatcgctgatccagagcctggaacttctgtattaagcgtgttacctatctggcattcttatgaaaggagtgctgaatacttctttttttcatgtggttgttctcaatactatacaattccaaaatttctgaaagatgatattacacaaataaaaccagttgtaatggccactgtaccaagactatgggaggcaatacatgatggttttttccaagcgttgaaaaaaatgccctccaagaagcaaaaacttattaagtttttgataagtaatagttcagttttcaaaagaagtctaagaaagataagaaatttagatatcaatcaaataacttttaaatcaaaaatccccttactggttactgttagttttcgatatcctctacataaattgtctactatttttttatggcccaatattcttagacaactgtgcggagagaaattgaaatttcctattaacggcggaggtgcattgccagaacatgtagatcttttttttgaatctttaggtgtagatgttttggtgggatacggacttacagaaactagtccagtattaacttgtaggagaagagaattaaa

SEQ ID NO: 307805 - DNA, 779 bp, Unknown
  Bacterial polypeptide expressing nucleotide sequence isolated from the Sargasso Sea
gatgagtaattttgatacaaacttagataaaaattcagccaattttgttccattatcaccgttaagttttatttctcgagtaaaagatatttatccaaactatgactctttagtttatggaaatagaagttacacttggcttgaaacctacaatcgatgtaccaagtttgctagtgctttagcaaaaaaaggaattacaaaaggaagtaccgtttcaattatagcagcaaatactccagaattattcgaagcacattattctattccaatgactggtggtgttattaatacgatcaataccagacttgatgcagaaacaattgcgtatattctagatcatagcgatgcaaaacttctaataactgatactcaattttcacctacaatgaaaaaagctttaaaaatatatgggaagaatattcctattattgacattcatgataatcaggcagtttttaaagatggtgagggtgaacaaattggagaaatgacatatgaagaatttttacaaacgggtgatgacaattataattggtctttacctgaagatgaatggcaagcaatctcactaagctatacatcaggtacaacaggtaagccaaaaggtgttgtgtatcaccaccgtggatcatatttaatgtctacaggaagtgttacggcatggaacatgcctaataagttaacatttctttatactgttccaatgttccactgtaacggatggggctacccttggacagccgctttaatacacgcaaagattatttgctgcagataca

SEQ ID NO: 307806 - DNA, 904 bp, Unknown
  Bacterial polypeptide expressing nucleotide sequence isolated from the Sargasso Sea
aatttctgattacaaagtaaaatctttatttacagctcctacagcttttagagcaattaaaaaagaggatccagagggaaagtttttttcaaaatatgatctaagtaaatttgaaagtcttttccttgcgggtgaaagagctgacccagatacaattaaatgggctgaaaatttattaaaagttcctgtaattgatcactggtggcagactgaaactagttgggcgattagttcaaattgtactggtatagaaatgatgaaaacaaaatatggttcggcatgcaaagcagtccctggttatgatgtaaaaattattaaatcagatcaaactttagcaaaaccaaatgaaatgggtgatattgttgtaaaacttccacttcctccaggaacatttccaacactttggaatgcagatcaaagatataaagaaaattatatgtcaaactataacggttattaccaaacatacgatgcaggacacattgatgaagatggatatatctggattatgtctagaacagatgacattataaatgttgctggccatagattatcaacaggagcaattgaagaggttttatcagaacaccagtcagttgctgaatgtgctgttcttggaatagcagataaattaaaaggccaattaccaattggattaattgttttaaaagctggagtagataaagataatgaaacgatctcaaaagaatgtattcaaatggtaagagataagattggaccagtagccgcgtttaaagttgcaatagttattaaaagactcccaaaaacaagatcaggtaaaatattaagaggtacaataagaaaaattgctgataatgttaagtataaaatgccaccaactattgatgatccggcaattttagatgaaataaaagaagattta

SEQ ID NO: 307807 - DNA, 885 bp, Unknown
  Bacterial polypeptide expressing nucleotide sequence isolated from the Sargasso Sea
ttggaaaatcatttcagattataaagtaaaatctctttttacagctccaacagcttttagagcgataaagaaagaagatcctgaaggtaaatttttctcaaaatatgatttgagtagttttgaaagcttattccttgctggagaaagagccgatccagatacaattaagtgggctgagaatttacttaaagttcctgtgatagatcattggtggcaaacagagactagttgggcaattagctcaaattgtactggtattgaaatgatggaaacaaaatatggttcagcctgcaaagctgtacctggatatgatgttaaaatcattaagccagatcaatctctagcaaaaccaaatgaaatgggagacattgtagtaaaattacctttgccaccaggaactttcccaacattatggaatgcagatgaaagatacaaagaaaactatatgtctaattatgagggatactatcaaacatatgatgcaggtcacatcgatgatgatggttatatttggatcatgtctagaacagatgacatcattaatgtagcaggtcatagattatccactggtgccatagaagaagtattgtcagaacatcaatctgttgctgaatgtgcagtacttggaatagcagacaaattaaaaggtcaattacctattggattagtagttttaaaatctggtgttgataaagataatgacactatttcaaaagaatgtgtgcaaatggtaagagataaaataggtccagttgctgcatttaaagttgtaatagttattaaaagattaccaaaaacaagatcagggaaaattttgaggggaacaataagaaaaattgctgatggtatagattataaggtgccacctacaattgatgatccagc

SEQ ID NO: 307808 - DNA, 604 bp, Unknown
  Bacterial polypeptide expressing nucleotide sequence isolated from the Sargasso Sea
aaggtaaaatctctttttactgccccaacagcaattagagctattaaaaaagaggatcccaatggtgaattttttaagaaatatgatctaagtaaatttgataaattatttttagcaggcgagagggctgatcctgatactattaaatggtttgaaaaattatcaaattcgccggtaatagatcattggtggcaaacagaaacgagttgggcgatcacctctgattgtactggaattgaatcttttccagtcaagtatggatctgctttcaaacctgttccaggttatgatttaaaagttttaaattcagatggaaaagaggttgggccaggaaaaatgggagacatagttgttaagcttccgcttcctccaggaacctttcctacactttggggcgctgataaaagatataaagaaaactacatgtcaacttaccctggttattatcaaacttatgatgcgggacatattgatgaagaaggttacgtttggatcatgtctagaacagatgatatcattaatgttgcaggtcacagattatcaactggagcaatcgaagaagtattagctgaacataaaatgttgctgagtgtgcggtcatagg

SEQ ID NO: 307809 - DNA, 476 bp, Unknown
  Bacterial polypeptide expressing nucleotide sequence isolated from the Sargasso Sea
catgacagtattaatagataaaaaaagcaagataattattcagggttttactggtaaaatgggatcttttcatgcagaggagatgatcgagtatggttcaaatgttgttggtggagtaaccccaggaaaaggtggttcaaaacatctaaatttaccagtattcaatacagttaaggatgcagttagcgaaactggtgcagatgcatcaattttatttgtgcctccagcttttgcagcagactcagcaatggaggctgcagatgctggaattaaaacatgtgttgcaattgtagatggaataccttctcacgacatgatcagaataaaaagatatatgagaagatatacgaaaagttctaaaatgactttggtaggacccaattgtgcagggattattagtcctggtaaatcaatgttaggaataatgccaggacatatttacaaagagggaagaattgggattataagtagatcag

SEQ ID NO: 307810 - DNA, 913 bp, Unknown
  Bacterial polypeptide expressing nucleotide sequence isolated from the Sargasso Sea
tatgattgccgtaagaccaagttcatacaggaattctaagatttcttcaggaataagatcatccgccagaaggacacccgataaaatttctttctcaatggataataagcaagtcacctataaaagttttgttaaaaggttagataaagttgcagttgctggtatagatggattgggtctttgtaaaggtgatcatgtagcgatattttcaagtaactgtattgagtttattgagatagttgttggtctcgcagatgcaggtattgctaccgcaatgattccgccttcagtaactgttccagaagtggagcatatttgtaatgattctaatgctaaagtattattttgtcataaaggtttagaggatatagcacgagcagcaaaccttgaatctgtagaaaaaattattgttattggcaaaaactatgaatcattgattgctgatgctggaagcagaccgccaaatacaaatctagaagaatgggacgtctttagtataccctatacttctggaactactggcaaaccaaagggatgtttactttctcatagatcaagagttatggctttctatactatgggtgttgagtttggttgttattctccagatgatagagctttggctttagcgcctctctttcatggagcagggttcgcatttgctttagcacctattttttttggaggtacatgtgagattcttccaaagtttgaccccgaaatagttttaaaaaaattacaagatttaaatctttcaaatactttttttgtacctactcattttcatcaaattttttctcttgaaaaaaaaatattacaaaaatacaagcctaactctcttagaacaattatttcaaatgctgctccattgcctcaggctactaaagaaaaaatagtaaaatattttgggtga

SEQ ID NO: 307811 - DNA, 310 bp, Unknown
  Bacterial polypeptide expressing nucleotide sequence isolated from the Sargasso Sea
atgtcagttctagttaacaaagatacaaagcttatatgccaagggtttactggcactcatgggacttttcattcagagcaagcaattaagtatgggaccaagcttgttggaggtgttactcccaaaaaaggggggcagacacatttgaaacttccagtttttaatacagtattagaggctaaagaacaaacatcagcaaacgctacaatgatttatgttcctccaaaatttgctggagcagccataatcgaggcaattgaagctaaaattgaattgatagtttgtataaccgaagggattcctatcttag

SEQ ID NO: 307812 - DNA, 877 bp, Unknown
  Bacterial polypeptide expressing nucleotide sequence isolated from the Sargasso Sea
gagattagccaatccagaaattgaatatttgatacagcattcaaatcctaatgtgattttttttgatactaaatttgaggacaaaatgtcacagatatgtattccaaaaaggattaaaactatcacagtaagtaattctgaaattaatcaaacaagcttagaagctcgaagattatcttgtaatggaagaattaaaagaccgattaaaaataatttaccattattgttagtttatacgtctggtactacagggaaacctaaaggagctcttttgggccagaaagctataatcagcaatgctaaaatgagccatgatgcacattcgttgaaatcttctgacaaagtattaatttcacttccattattccatgtgggtggaattaatattctatttctcccagcccttttaaaaagtgcaacagttgtcttacaggaaaagtttgaaccagatcaagccttagaaattatagggaaatataaaatcacgaaaatgataactgttcctacaattttagaccagatgattaaaagtaaattttggatcgaggctaattataaatttttgcaagttatatcaattggttctactaatgtgcctaaatatttattaaaaaaactacattctataaatatacctataatccaaatatatggagcaacagagacagggcctttagcaatttatcaaaaagtaaaggatgcttttataactgaaggttctattggaaagtctggttcgctctgtaagattaaattagtagatgaggatttaaatgaggtttcaattggccaacctggtcaaatacttgttaaaggtgaaaatatacttgaatgctattggaatgatgaaattgcttctcaaccaaagtataaaaga

SEQ ID NO: 307813 - DNA, 828 bp, Unknown
  Bacterial polypeptide expressing nucleotide sequence isolated from the Sargasso Sea
cgctgtacccgcgctggcatcagcattgaagaaaaaaggagtggttccgggaacaacggtttcggttatggcccccaatgttccggaattgctcgaggcccattttggcgttttgatgaccggaggggtgttgaacgctctcaacattcggttggaagccgaaactctggcctacattctggaacatggagaatctcaagtgttgatcacggatcgggaattttctccggtcatccaaaaagtcctgcaacaactcgaagatcctcctctggtaattgacatcgatgatccgatggcagaaggcggagaactgcttggggaaatggattacgaagcgtttttgaaaaccggtgatgaagattttgaatggaatctcccggaagatgaatggcaggctgtcagtctgaattatacttcgggaaccactggaaagccgaaaggggtggtttaccacagccgcggagcacatcttctagccatcgacaatatccttgcctggggtatgcaaaggcatccagtttatctttggacgctgccgatgtttcattgcaacggctggtgttttccatggaccatcaccttattggctgggacgcatgtttgtctgagaaaagtcaacgcagccaacatttatgattccattgacaaacatggagtgacgcacctctgcggtgctccgattgtgatgggaatgattgcgaatgctgaggatcaggaccaacgtgtcctttcagaccaggtccagatcatgactgccgcggctccaccgccgcccccggtgattgcaagaatggaggaaatgggttttcaggtgacgcatgtttacgg

SEQ ID NO: 307814 - DNA, 838 bp, Unknown
  Bacterial polypeptide expressing nucleotide sequence isolated from the Sargasso Sea
gatgaaatcaaatgagtatgcttacattctctatacatcgggaaccactggtgtgcctaaaggaattgtaagagatattgggggacacatagtagctttaaaatggactatgaaaaatatttataacattgatgaaggtgatatttggtggtccgctagtgatattggttggattgtaggtcattcctatattgtttatgctcctttatttaaaggttgcaccactgttttattcgaaggtaaaccagttggaaccccggacgctggagctttttggaaaatgatttcagactataaaattaaatctttatttacagctccgactgcatttagagctataaaaaaagaagacccagaaggaaaatttttttcaaaatatgatttaagttcttttgagtcgttgtttttagcgggagaacgtgcagatccagatacgataaagtgggccgaaaatttactccaagtacctgtaattgatcattggtggcaaacggaaactagctgggcaattagttcaaattgtactggtattgaaatgatgaaaacaaagtacggatctgcatgcaaggctgttcctggttatgatgttaaaataataaaaccagatcaaactttagcaaaaccaaatgaaatgggagatattgttgtcaagctacccttgcctccaggaacatttccaactctttggaatgcagataaaagatataaagaaaattatatgtcaaattatgaaggctattatcaaacctatgatgcaggtcatattgatgaagatggttacatttggattatgtctagaactgatgacataataaatgtagctggtcacagactgtct

SEQ ID NO: 307815 - DNA, 786 bp, Unknown
  Bacterial polypeptide expressing nucleotide sequence isolated from the Sargasso Sea
ctctttctaaaaaaaataaatttgccaaaaatagagattttattaagaaccttgatcatatagatcaaatctgggaaaaattaaaatttaaatgtggtgatgctttagcggtttgcgatttaagagggaaatacaaagaaaaattttcttattctgagctggctgatttaataacaaaagtctctttttcttttgaaaattatggcttagtaaagggtgatgtagttactgtaatatctgaaaactctccaagatggctagcagtagatcaaggcttaatgcgtttaggagctatcaatgcagtgagaggtattaattctccttcagtagaattagactatattattggtcactctaattcagtaggattaatagttcaatctaaggaaatttggctaaagttaaataacaaagaagaattaaaaaaaagactgaaatttataatcaatttagaagatgaacaatttgaaagtttaataagttggagtacattcataagttcagtagaaaaagaaaattcacaaactaacaatattgaaaaatttaaaccaaaaattgatgatgttgctactatcctttacacttctgggacaacaggaaaacctaaaggtgttcctttgactcatgcaaattttttgcatcaaataattaatttagcctatattgctgatccagaaccagggacctctgtattaagtgtgttgcctatctggcattcttatgagaggagtgccgaatacttctttttttcatgtggttgttctcaaatactatacaattcctaaa

SEQ ID NO: 307816 - DNA, 304 bp, Unknown
  Bacterial polypeptide expressing nucleotide sequence isolated from the Sargasso Sea
tctagatgttggaggcggagcgtctaaagaaaaagttacagcggcatttaaattaatccttgctgacaaaaatgttaagggcatattaataaatatatttggaggaattatgaggtgtgatgtccttgcgcaaggagtagtagaggctgcaaaacaagtaaatttatctgttccattagttgtcagattagcaggaacaaactttgaagagggaaaagaaattttaaataaatcgaacttaaagattttatctgcatcagatttaaatgatgcagcaaaaaaaattgttgaggcaataaaataa

SEQ ID NO: 307817 - DNA, 831 bp, Unknown
  Bacterial polypeptide expressing nucleotide sequence isolated from the Sargasso Sea
ttctcaaaatatgatttaagttcttttgagtctttatttctagctggagaaagagctgatcctgatactataaaatgggctgaaaatcttttaaatgttcccgtgatagatcattggtggcaaaccgagactagttgggcaataagttcaaattgtaccgggatagaaatgcaaaaaactaagtatggttcagcgtgtaaagcagttccaggttatgatgtaaaaataattaaaccagatcattctattgcagaacctaatgagatgggtgatatagttgttaaattacctttgccaccaggtacatttccaacactttggaatgctgataagagatatgaagaaaattatatgactaattataagggttactatcaaacttatgatgcaggtcatattgatgaagatggatacatatggattatgtcacggactgacgacattattaatgttgctggtcatagattatcgacaggtgcgattgaagaggtattatctgatcatcaatcagttgctgagtgtgctgttcttggcattgctgataaattaaaaggacaattaccaattggtttagttgttttaaaatctggtgttgaaaaagataacgaaactatttcaaaagaatgtattcaaatggttagagataaaattggaccagttgctgcatttaaagttgtaattgttataaaaagattaccaaaaacaagatcaggaaaaatattaagaggaactattcgtaaaattgccgacaaggaagattacaaaatgccagcaacaattgacgatccagcaattttagatgagattactcaaagtttaatagaaaataaa

SEQ ID NO: 307818 - DNA, 779 bp, Unknown
  Bacterial polypeptide expressing nucleotide sequence isolated from the Sargasso Sea
tatgcatgatttagcatactggccttcagctaaacctctttctaaaaaagataaatttactaaaaaaagagattttattaagaaccttcatcatattgatcaaatttgggagaaattaaaatttaaatgtggtgatactttagctgtttgtgatttgagaggaaaatataaagaaaaattttcttattctgagttggctgatttaataacaaaagtctctttttcttttaaaaattatggtttagtaaagggggatgtagttactgtaatatctgaaaattctccaagatggctagtagttgatcaagggttaatgcgtttaggagctataaatgcagtgagaggtattaattctccttcagtagaactagactatattattgagcactctagttcagtaggtctaatagttcaatctaaggagatttggctaaagttaaacaataaagaagaattaaaaaatagactgaaatttataatcaatttagaagatgatcaatttgaaagtttaataagttggaatcaatttataaaagcagcagaaaaagaaaatacacaaactaataatattgaaaaatttaatccaaaaattgatgatgtcgctactattctttacacttcagggacaacaggaaaacctaaaggtgtccccttgacgcatgcaaattttttacatcaaataatcaatttagcctatatcgctgatccagaacctgggacctcagtattaagcgtgttgcctatttggcattcttatgagaggagtgctgaatacttct

SEQ ID NO: 307819 - DNA, 796 bp, Unknown
  Bacterial polypeptide expressing nucleotide sequence isolated from the Sargasso Sea
atgggtgatttagcgtattggtcttcagccaaacctctttttaaaaacgataaatttgttaaaaatagagattttattgaaaaccttaatcatatagatcaaatttgggaaaatttaaaaattaaatgtggtaatactttagctgtttgtgatttaagagggaaatacaaagaaaaattctcttattctgagatagctgatttgataacaaaagtctctttcgcttttaaaaattatgggttagttaaaggggaagtagttactgtaatatctgaaaattctccaagatggctaatagcagatcaaggcttaatgcgtttaggagctataaatgcagttagaggtattaattctccttcagtagaattagaatatattattgagcactctaattcagtaggactaatagttcaatctaaggatatttggctaaagttaaacaacaaagaagaattaaaaaaaagactgaaatttataatcaatttagaagatgaacaatttgaaagtttaataagttggaggcaatttataagtgtagaagaaaaagaaaattcacaaaataatattattgaaaaatttaatccaaaaattgatgacgttgcttctattctttacacctctgggacaacaggaaaacctaaaggtgtgcccttgactcatgcaaattttttacatcaaataattaatttagcctatatcgctgatccagaacctggaacgtctgtattaagcgtgttacctatctggcattcttatgagagaagcgctgaatacttctttttttcatgtggttgtt

SEQ ID NO: 307820 - DNA, 742 bp, Unknown
  Bacterial polypeptide expressing nucleotide sequence isolated from the Sargasso Sea
tttgaataattatctttattcacaactaattcacccaaatttagataataaagaaacttttttacttcttgatgatggtaaatcgttcagctatgaggaaattatctcaattgcctcaaaaatatctcataaactaatcaagttaggattaaaagttggagatcctttacttgtaaaagctcctaaatgtaaagaaacgatcgctttatacctatcttctataatgactggtgccgtttatttccctcttaattcaaattatacatcaattgaaactaactactttgtaaaagactcaaaaccagcttttttaatttgtgaagaaagtgatataaaaaatctaaagcctatatgtgatgaggttgggtgcaaaattttatctatgagcgcgaatggagagggagagattacagatggccttaaaaattttgataactattttaagccagcttttagaaaagatgaagatttagctgctctattatatacctcaggcacaactggtaagcctaaaggagctatgttaactcagcagaatttagtttctaatgcaattcaattagttaatttatggaatattaaccgtgatgatactttaatccattctcttccaatttatcatactcatggattatttgtggctatgaacactacaatgatggctggagcaactgtaagatttcttaaaaatttcaatttagattatgtttttgaggcttttaataaatctaccttaatgatg

SEQ ID NO: 307821 - DNA, 712 bp, Unknown
  Bacterial polypeptide expressing nucleotide sequence isolated from the Sargasso Sea
acatcaggaactactggaactcccaaaggtattgttagagatattggaggtcatatagttgctcttaaatggaccatgaaaaatatctacaatatagatactgatgatatttggtggtctgccagtgatattggttggattgttgggcactcttatattgtttatgctcctttattcaaaggatgtacaacagtcttatttgaaggaaaaccagtgggaactccagacgcaggtgctttttggaaaattatctctgattataaagtaaagtctttatttactgctccaacagcctttagagctataaagaaagaagatcctgaaggtaaattcttctcaaaatatgacctaagtaattttgaaagtttatttcttgctggagaaagagcagatccagatactattaagtgggcagagaacttgcttaaagttccagtaattgatcattggtggcaaactgagaccagttgggcaataagctcgaattgtactggtattgaaatgatgcaaacaaaatatggttcagcatgtaaagctgttcctggatatgatgtaaaaattattaaaccagatcaatctttagcaaaaccaaatgaaatgggagacatagtagttaaactacctttgcctccaggaactttcccaactttatggaatgctgataaaagatacaaagaaaactacatgtctaattatgaaggttattatcaaa

SEQ ID NO: 307822 - DNA, 922 bp, Unknown
  Bacterial polypeptide expressing nucleotide sequence isolated from the Sargasso Sea
cacatctggaactacaggtattccaaagggtattgtaagagatgtcgggggccatatcgtagctcttaaatggactatgaaaaatatttacaatattgatgaaaatgatgtgtggtggtcagctagtgatattggttggattgtagggcattcatatattgtttacgctccgttattcaaaggatgtaccacagttttatttgaaggaaaaccagtcgggactccagatgcaggtgtattttggagaataatttcagaatataagattaaatctttattcactgctccaacggcatttagagctattaaaaaagaagatccagatggaaagtttttctctaagtatgatttaagttcattcgagtctttatttttagctggagaaagagctgatccagacacaattaaatgggctgaaaatcttttagatgttcctgtgatagatcactggtggcaaactgaaactagttgggcaataagttcaaattgcactggaattgaaatgcaaaaaactaaatatggttctgcatgtaaagcagttcctggatatgatgtaaaaataattaaaccagattattcaatcgcaaaacctaacgaaatgggtgacatagttgttaaattacctttgcctccaggtacatttcccacactttggaatgctgataagagatatgaagaaaattatatgactaattataacggttattatcaaacttatgatgcaggacatattgatgaagatggatacatatggattatgtcacgaaccgatgacataattaatgttgctggtcatagattatcgacaggagctattgaagaggtattatctgatcatcaatcagttgctgagtgtgctgttcttggcattgctgataaaataaaaggacaattaccaattggtttagttgttttaaaatct

SEQ ID NO: 307823 - DNA, 286 bp, Unknown
  Bacterial polypeptide expressing nucleotide sequence isolated from the Sargasso Sea
gaagaaaccgtagagaagggctttcagatcatcacccaggatcccaacgtacgatgcattctgatcaatatattcggaggtatcgttcgatgtgacatggttgcttccggaatcgtcgaggccttccgaaaagtcaatttgcagattccagtggtggtaagacttgaagggaccaatgcagaagaagcccagaagatcatcggatcttctggtttcggagatcgtttacaaatggcggacggacttggagaggcagctgaaatggctgttgctgctgcggcctaat

SEQ ID NO: 307824 - DNA, 772 bp, Unknown
  Bacterial polypeptide expressing nucleotide sequence isolated from the Sargasso Sea
atggctttcgaatacataaataaggatggaaacagaaaaccaaaaataacaccaaatatagaaaatatctcagattttaagaaggattttatctgggaagaaatgtttgaagaaataccttggttgcctggaggcggactcaataatgcttatgtatgtattgacagtcacgtagattctggtgccggtgataatgtggcaatgatatggaatggaaaaaatgatgaagaagagacatatacattcaaagacttaaaagttcatactgataaatttgccaatgtactcaaaagtcttggggttaataaaggagacagagtttttgtgtttatggatagattgcctgaatgctatatttctgtattcggaggccttaagataggtgcaatagttggacctttattctcagcatttggtcctgatcctgtaaaagataggatgctagattcaggcgcaaaaattcttgttacacagccagaattaagaaaaaagatagaaagtattcttcctgatctacctgatttagaaaaaatcataattgttaataaaaataatagagaagagaatgctttggtaggagaagatttgtcttacgaagaactgatggcatcatcagaacccattgaatcaattgagaacacatcacaatatgactattcaattatgcattatacttctggaactactggtaagcctaagggtgcattgcataggcatcaatctatagttcagcagtatgcgacaggaaaatgggcccttgatttccaaaaga

SEQ ID NO: 307825 - DNA, 181 bp, Unknown
  Bacterial polypeptide expressing nucleotide sequence isolated from the Sargasso Sea
catgtcagtactcgtgaacagccagaccagggtgatctgccagggctttaccggctcgcagggcaccttccattccgaacaggccatcgattacggcaccaacatggtcggcggtgtcacgccgggcaagggcgggcaggcgcatctcggcctgccggtgttcaactcggtcgccgacgcg

SEQ ID NO: 307826 - DNA, 853 bp, Unknown
  Bacterial polypeptide expressing nucleotide sequence isolated from the Sargasso Sea
tggtgggcacatcgttgctttaaaatggacaatgaaaaatatttataacatcaatgaagatgatgtttggtggtcagcaagtgatattggttggatagttggtcactcttatattgtgtatgctccactttttaaaggatgtaccactgtactgtttgaaggtaaaccagttggtactcctgatgcaggtgttttttggagggtgatttctgaacacaaaattaaatctttatttacagctccaactgcatttagagcgattaaaaaagaagatccagatggaaagtttttttcaaaatatgatttgagctcttttgagtcacttttcttagcaggagaaagagctgatccagatacaattaaatgggcggagaatttattaaatgttccagtaattgatcattggtggcaaactgaaactagttgggcaattagttcaaattgtacaggaattgaaatgcaaaaaactaaatatggttcagcttgtaaagcggtacctgggtatgatgtaaaaattataaaacctgatcagacaattgcaaaaccaaatgaaatgggagacattgtagtaaaacttccacttcctccaggaacttttccaactttatggaatgctgataaaagatatgaagaaaattatatgagtaattataaaggctactatcaaacttatgacgctggtcatattgatgacgatggatatatttggattatgtctaggactgatgacattattaatgttgcaggccatagactatcaacaggtgcaatagaggaagttttatctgaacatcaatctgtcgctgaatgtgcagtgataggaattaaagatcagctgaaaggccaattacca

SEQ ID NO: 307827 - DNA, 891 bp, Unknown
  Bacterial polypeptide expressing nucleotide sequence isolated from the Sargasso Sea
gttgctcttaagtggaccatgaaaaatatttataatattgataccaatgatatctggtggtcggcgagtgatattggatggattgttggacattcatatattgtttacgccccactatttaaaggatgcacaacagttttatttgaaggtaagccagttggaactccagacgctggaacgttttggaaaattatttccgattataaagttaaatctttgtttactgcaccaactgcatttagagctatcaagaaagaagatcctgatggtaagtttttttcaaagtatgatctaagtagttttgaaagtttatttttagcaggtgaaagagctgatccagacacgattaagtgggctgaaaatttacttaaagttccagtgattgatcattggtggcaaactgaaacaagttgggcaattagctcaaattgtactggaattgaaatgatggaaacaaaatatggctcagcttgcaaagcagttcctggttatgatgtaaaaattattaagcctgatcaaactttagcaaaaccaaatgaaatgggtgatattgtagttaaactgcctttgcctcctggaacatttccaactctatggaatgcggatcaaagatttaaagaaaactatatgactaattataaaggttactatcagacatatgatgcgggtcatattgatgatgatggttacatttggattatgtctagaacagatgacattataaatgttgctggtcacagattatctacaggggctatagaagaagttttatcagaacatcaatccgttgctgaatgtgcggtgttaggtattgctgataaattaaaaggtcaactgccaatcggcttagttgtgcttaagtctggtgtagataaaaataatgatacaatt

SEQ ID NO: 307828 - DNA, 847 bp, Unknown
  Bacterial polypeptide expressing nucleotide sequence isolated from the Sargasso Sea
tttttcaagtatgatctaagtagttttgaaagtttatttttagcaggtgaaagagctgatccagataccattaagtgggctgaaaatttacttaaagttccagtgattgatcattggtggcaaactgaaacaagttgggcaattagctcaaattgtactggaatagaaatgatggaaacaaaatacggctcagcttgtaaagcagtaccaggatatgatgtaaaaatcatcaaaccagatcaaactttagcgaaaccaaatgagatgggggatattgtagtgaaactccctttgcctcctggaacgttccctaccttgtggaatgctgacaaaagatataaagaaaattacatgtccaattatgagggttactatcaaacttatgatgcaggacacattgatgatgatggttatatttggattatgtctagaacagatgacattataaatgttgcaggtcacagattgtctactggagcaatagaagaagttttatctgagcatcaatcagttgctgagtgtgctgtgttagggattgcagataaattaaaaggtcaattaccaattggcttagtagttctcaaatctggagtagataaagataatgaaacaatttcaaaagaatgtattcaaatggttagagctaaaattggtcctgttgctgcatttaaagtagcaattgttattaaaagacttcctaaaacaagatcaggaaaaatcctaagagcaacgattagaaaaattgctgacaatgttgaatacaaagttcctcctacaatcgatgatccagctatattaagtgaaattaaagaagatttaatcagaaataaaattcttaatggttaaa

SEQ ID NO: 307829 - DNA, 331 bp, Unknown
  Bacterial polypeptide expressing nucleotide sequence isolated from the Sargasso Sea
ggagggctcaactttatagacacccttaaactttttgaagcggatcctgatactgatgctgtaataatgattggtgaaatcggtggaaatgctgaggttgatgcagggcgctggattaaggaaaatatgagcaaacctgttgtcagttttattgcaggagcttcagctcctccaggcaaaaggatgggacatgcaggtgcgattatatcaggtggagatgacactgctgaagccaaatttgctattttagaggaatgtggagttgccattgctcgttctccagcagagttgggggaaagagttgaagaagttttaaaatcaaggggttaat

SEQ ID NO: 307830 - DNA, 796 bp, Unknown
  Bacterial polypeptide expressing nucleotide sequence isolated from the Sargasso Sea
tcaaaaggatgtatcactattgatgacttggagggttttattcatttagataaatttgttgaaggtgaatcccatgctgatcccgaggaaagaactgcaggtcaagttatgaactacacctcaggaacaaccggtaagccaaagggtgtcaaaagaagtttagtggaaggtgatccagatgatgtgttaagcatgtttgcaatgattctaagtttttttgagattcaacctgaagaagaaaacgttcatatagttggttcacctctttatcatactgctgtcattattcattcaactgctgccttgcattacggacatagtcttgtggtgatggaaaaatttaatgctgaaagaatgttgtatctgattgataaatacaaagttacaacctcacatatggtccctactcaatttcatagacttcttcaattacccggggaagttaaagataaatacgactgctcatcaacccgtgcgatgattcacgcagctgcaccatgtccaattcatactaaacaggaaatgatagcttggtggggaaattctatatgggaatactatgctgccactgaaggtggtggaactgtggttggagcaaatgattggtcaaattttccagggactgttggtaaagcgtggccaggagccgatataaaaattattcttgataatcaagaggaagcttcggtaaatgagcaaggcactgtttacatgagactaggagatgccactaagtttgaatataaaggtgataaagcaaaaactcaaaaagaaagactggagcttgatgactcag

SEQ ID NO: 307831 - DNA, 856 bp, Unknown
  Bacterial polypeptide expressing nucleotide sequence isolated from the Sargasso Sea
tgtggatttgaacctggacgaactgttgaatatagacctttagttgatggagcattgaaacttgcaaaacataaagttgaaaaagtaattttctatcaaaggaaagataacgaagtaaaaattaactctccacttgaaataagttggaatgaggcacttgttaatgccaaaaataaagattgtgttgaaattggagcaaatgagtttgcttacattttatatacctcaggaactacaggcataccaaaaggaatagttagagatgttggaggtcacattgttgctcttaaatggacgatgaaaaatatttataatatagatgaaaatgatgtgtggtggtcagctagtgatattggctggatagtgggacattcatatattgtttatgctccattgtttaaagggtgtacaacagttttatttgaggggaaaccagttggaactcctgatgcaggagtattttggagaataatttcagagtataaaattaaatctttgtttacagctccaacagcatttagagcaattaaaaaagaagacccagatggaaagtttttctctaaatatgatttaagttgttttgaatctttattcctggctggcgaaagagctgatccagatacaattaagtgggctgaaaatcttttaaatgttcccgtgatagatcactggtggcaaacagaaactagctgggcaataagttcaaattgtaccggaatagaaatgcaaaaaacaaagtatggttcagcatgtaaagcagttccagggtatgacgtaaaaataattaaacatgatcattcaatagcaaaacctaatgagatgggtgatatagttgttaaattacctttaccaccag

SEQ ID NO: 307832 - DNA, 878 bp, Unknown
  Bacterial polypeptide expressing nucleotide sequence isolated from the Sargasso Sea
tgtgattgcaatgcttggggtgtgcaagaaattggtgcaatacactctgtattctttggtggatttgcatctactgaacttgctagcagaattgatgatagtaaagcaaaactattagtgactgcttcatgtggttttgaacctggaagaacagttgagtataaacctttagttgatgaagcaatcaaaatagcaaatcataaaatagagaagatgattttattccaaagaccaggtcacgaggtaaaattaaatgctcctcttgaaattagctgggatgaagttgtatctaatgcagaaccagctgattgtgttgagatgaactccaatgagtttgcgtatattttatatacctcaggcacaactggaactccaaaaggaatagtaagagatgttggtggtcacattgttgctttgaagtggaccatgaaaaatatttataatattgataccaatgatatctggtggtcagcaagtgatattggatggattgttggacactcatatattgtttacgcaccattgtttaaaggatgcacaacagttttatttgaaggtaagccagttggaactccagatgctggagcattttggaaaattatttcagactataaagttaaatctttgtttaccgcgccaactgcatttagagcaattaagaaagaagaccctaatggtgagtttttttcaaagtatgatctaagtagttttgaaagtttatttttagcaggagaaagagctgatccagacacgataaaatgggctgaaaatttacttaaagttccagtgattgaccattggtggcaaactgaaacgagttgggcaattagttcaaattgtactggaattgagatgatggaaactaaatacggctcagc

SEQ ID NO: 307833 - DNA, 868 bp, Unknown
  Bacterial polypeptide expressing nucleotide sequence isolated from the Sargasso Sea
agtgacataggatggatagttggtcattcttatatagtttatgctcctttgttcaaaggatgtactactgttttgttcgaaggaaaacctgtaggaactccagatgctggagcattttggaaaataatttctgattataaggttaaatccttattcacagcaccaactgcatttagagctataaaaaaagaagatccagaaggaaaattcttttcaaaatatgatttaagttcatttgaatctttatttttagctggagaaagagctgatcccgatacaataaaatgggctgaaaatttattaaatgttcctgttattgatcactggtggcagactgaaactagttgggcaataagttcaaactgcacaggaattgaaatgatgaaaacaaaatatggatcagcctgtaaagctgtgcccggctatgatgttaaaattattaaacctgatcaatctttagcaaaaccaaatgaaatgggtgacattgttgtaaaacttccattgcctccaggaacttttccaacattgtggaatgctgataaaagatatgaagaaaactatatgacaaactacaaaggttattaccaaacttatgacgctggtcatattgacgatgatggatatatttggattatgtctagaacagatgacataattaatgtagcaggacatagattatccactggtgctattgaagaagtattatctgaacatcaatctgtagctgaatgtgccgtattaggaattgcagataaattaaaaggacaactaccaataggtttagtagtattaaaagcaggagttaaaaaaaataacgaaaccatatcaaaagaatgtattcaaatggttagagataaaattggccctg

SEQ ID NO: 307834 - DNA, 697 bp, Unknown
  Bacterial polypeptide expressing nucleotide sequence isolated from the Sargasso Sea
atgcacattaaatcgcataataaaataggaaaagtggaggcaaattatactcctcttagccctatatcgtttttgtcaaaggcagcaaagatatttccaaaaaggacctctattatatatgaaagtcaaaaattcacttggttagaaacgtattcaagatgtaaaaaactggcgagtgtactttcaaatcaatttagtaatggtgatgtaattggtttttttgctgcaaacactcctgaactttatgaggcccattttggtgtgccaatggctggtatggtgctaaatgcccttaacattcgattagacccagaaactattggttacatcattgatcattcagagattaaaattatttttgtagacgacgaatttctagaattggttattaaagcaattgaaattgctcatgaaaaaccacagctaataagaataaaagataactttttggatatcagtcataataattttgattatatgaattacgaagaatttatctcaaacggagacgaaaactttgaacctgtgaaactcatggatgaatgggatagcatatcaatcaattatacttctggaactactggcaaaccgaaaggcgttgtgtatcaccacagaggtgcatatctaaacgctttggggaatgctttagagtgggaaatgaatatgcaccccagtgtatctttggacactcccgatg

SEQ ID NO: 307835 - DNA, 811 bp, Unknown
  Bacterial polypeptide expressing nucleotide sequence isolated from the Sargasso Sea
ttattcttagcaggtgaaagggcagatcctgacactataaaatgggctgaaaaattactaaaagttccagtaattgatcactggtggcaaactgaaactagttgggcaattagtgctaattgcacaggtatagaaatgatgaaaacaaaatatggttcagcttgtaaagctgtaccaggttatgatgtaaaaataataaaaccagatcaaaccttagccaaaccaaatgaaatgggggacattgttgttaaacttccacttcctccaggaacttttccaacactatggaatgctgataaaagatataaagaaacttatatgtccaattatcaaggttattatcaaacttatgatgcaggacacattgatgaagatggatatgtttcaattatgtctagaactgatgacattattaatgttgcgggacatagattatcaacgggagcaatagaagaagtattatctgaacatcaatctgttgctgaatgtgcagttattggaatagcagataaattaaaaggacaaatgccaatcggtttaattacattaaaagctggtgttaaaaaagaaaatgaaacaatatctaaagaatgcatacaaatgattagagataaagttggtccagtagcagcttttaaaactgcaatagtagtaaaaagattacctaaaacacgatctggaaagattttaaggggaacggttagaaaaatagctgataaagaagagtataaaatgccagcaacaattgacgatcctgcaattttagatgaaataaaacaagatttgattaaaaataatattttaaaataat

SEQ ID NO: 307836 - DNA, 318 bp, Unknown
  Bacterial polypeptide expressing nucleotide sequence isolated from the Sargasso Sea
ttgattgtttggaacttttcttatccgatccagaaactgagtcaataatcatgattggtgaaattggtggttcagctgaggaagaagcagctgaatttttgagaaaagaaaaggtaaaaaagccaaccgttggatttattgcaggaacgtcagcacctccaggaagaagaatgggacacgctggagcaattgtatctggagggaaaggtggagcagaagataaaattgaagccatgaagagtgctgggattcaaatttcaaattctccagcagctttaggatcaactttacttgaggtattaaagaatcaaaactaaa

SEQ ID NO: 307837 - DNA, 643 bp, Unknown
  Bacterial polypeptide expressing nucleotide sequence isolated from the Sargasso Sea
agatcactggtggcaaacagaaacaagttgggcaataagttcaaattgtgctggaatcgaaaaatttccaattaaatatggttctgcattcaagccagtaccaggttatgatttaaaggttcttaacaatgaaggtaaagaaaataagccaggtcaaatgggagatattgttgttaaattgcctttgcctcctggtaccttccctactttatggaatgcagatgaaagatacaaaaaagtatatatgtcaacttataagggttattaccaaacatatgatgcgggccacattgatgaagacggttacgtttggattatgtctagaacggatgatattataaatgtagcaggtcacagattatctactggagcaattgaagaagttttagcggaacataaaaatgttgctgagtgtgcagtaattggaattgcagacaaattaaaaggacagcttccaatcgggttaattgctttaaaagcgggtgttgatagagacaacaaagaaatcacaaaagaatgtgtggctttagtaagagaaaaagttgggcctgttgctgcttttaaattagccattgtcgtaaaaagattgcctaaaactagatcgggaaaagttttaagaggaacagtaagaaaaattgctgat

SEQ ID NO: 307838 - DNA, 628 bp, Unknown
  Bacterial polypeptide expressing nucleotide sequence isolated from the Sargasso Sea
atggtatcgctacccgctttgttgcgaaaaaatgcagctagctttggaagcaaagccgcgtttagagaaaaagaatttgggatttggcaaacttggtcgtgggccaaagctttagatgaagctgaaaactttgctcttgggttaattgaattaggggtagagccaggcgactttgtggctatattaggccgtaatcgtccagatctttatattgctatgatcgcgatacagatggttggcgcaactccagtgccacaatatcaagactctgtagcagaagaaatggaatatgttctcgctcattgtggcgctaaatttgtcattgctggtgatcaagagcaagtagataaaatattggaaattgaggctaagctcccagattttaaacaaatgatttatttagatggcagaggtcttcgaaaatatgatcactcaaaattacactcctttgtatcaatcatggagaatgggaaaaatagcggcccggcctcaaagtctacgttaaatgaacgagaaagtgctttaacatacgattctacctgtgtcatgttgtacacatcaggtacgacaggaaaaccaaaaggcgttgttttgtccaacgcaaatattatcgaaacttcaaagacca

SEQ ID NO: 307839 - DNA, 934 bp, Unknown
  Bacterial polypeptide expressing nucleotide sequence isolated from the Sargasso Sea
caacataagattagcaagatgatcttattccaaagaaaaggtcatgaagttaaacttaatgcaccaatggagataagttgggatgatgctcttacaaatgccaaagatactgattgtgaggaaatgaattctaatgaatttgcctatatactttatacatcaggtacaacaggaacccccaagggtattgttagagatattggtggtcatatcgttgcccttaaatggacaatgaaaaatatttataacatcgatgaagatgatatttggtggtcggcgagtgatattggttggattgttgggcactcttacatagtttacgctccattatttaaaggatgcaccactgtattgtttgaaggtaagccagtgggcacacctgatgcaggagctttctggaaaattatttctgactataaagtaaaatctttattcactgcaccaacagcatttagagctattaaaaaagaagaccctgagggtaagtttttttcaaaatatgatttaagtaagtttgaaagtttgtttctagctggtgaaagagcagatcctgatacaattaaatgggctgaaaatttattaaaagtaccagtaattgaccattggtggcaaacagaaacaagttgggcgattagttcaaattgcacaggtattgaaatgatgaaaacaaaatatggctcagcttgtaaagcagtgccagggtacgatgtaaaaattattaagtctgatcaaactttggctaaacctaatgaaatgggagatatagttgttaaactacctttgcctcctggaacttttccaactctttggaatgcagatcaaagatacagagaaaactacatgtctaattataagggttattatcaaacttacgatgcaggacacattgatgaggatggatacatctggatcatgtctagaactgatgacatta

SEQ ID NO: 307840 - DNA, 322 bp, Unknown
  Bacterial polypeptide expressing nucleotide sequence isolated from the Sargasso Sea
agagatataattgaaaagtttgaaaatgatgatgaaactattgcagttttaatgataggtgaaataggtggcccacaagaagttgaagctggacaatttgctaaagaaaatatgagcaaaccagtaattgcgtatatagctggactaactgcacctaaaggtcgtgtgatggggcatgctggcgcaattgtttctgcttatggtgaaagcgcaatagaaaaagtagaactacttaaagagtgtggagttacaatttccaaaaacccttctgtaatgggtgaaactgtaaaaaaagtattagtagataataatttgaattaat

SEQ ID NO: 307841 - DNA, 487 bp, Unknown
  Bacterial polypeptide expressing nucleotide sequence isolated from the Sargasso Sea
tattatctgactggtgatgaaggaacaaaggatgaagacaattatctttttgtgatgggacggacagatgatgtaattaatgttgcaggtcaccgtctttcaactggtgaaatggaggagttaattgcaggacatcccgctgtagcagaatgtgctgttactggtatagatgacgagttgaggggacaggtaccagttggatttgttgtactgaaagatggtgtagaaatgtcccaggagcaaatgcagaaggagttggttgacattatcagaagagatattggggccgttgcttactttagacaatcaggcattgttaaaaggttaccaaaaacacggtccggtaaaatcctgcgcaagacgattcgtaagattgcagtcgagaacgaggtttcagtacctcccacaatcgatgatccagttattcttgatgaaatccgggatgtgatgcgtgaacgcggaataggtcagttcgctttgtcctaac

SEQ ID NO: 307842 - DNA, 282 bp, Unknown
  Bacterial polypeptide expressing nucleotide sequence isolated from the Sargasso Sea
aaaccgttaaaaatggatttagaattattttaagtgataaaaatgttaaggcggttttgataaatatttttggaggcatagtgcgatgcgatcgagttgcaaatggagttgttgaagcagttaaagaattaggactcgatgttcctgtcgtagttcgattagagggaacaaatgctgaagaggctcagataattctggagcaatcaggagtatcgattattcctgctaaaggcatgaaagatgcagcagaaaaagtggtcagtgccgccttaggatcttagg

SEQ ID NO: 307843 - DNA, 920 bp, Unknown
  Bacterial polypeptide expressing nucleotide sequence isolated from the Sargasso Sea
taaaataaaatcgttatttactgcaccgactgcttttagagctattaaaaaggaagatccagatggcaaatttttttcaaaatatgatctaagttcatttgagtctttattcttagctggagagagggcggatccagataccattaagtgggcagaaaatttattaaaagttcctgtaatagatcactggtggcaaacagaaacaagttgggcgataagttcaaattgtacgggcatagaaatgcaaaagacaaagtacggttctgcctgtaaagcagtacctggatatgatgtaaaaattattaaaccagaccaaactttggcaaaaccaaatgagatgggagatattgttgtaaaattaccattaccacctggaacttttcctacattgtggaatgcggataaaagatacgaggaaaattatatgtcaaattacaaaggatactatcaaacttatgatgcagggcatattgatgaagatggttatatttggattatgtcaagaactgacgatataattaacgttgctggtcacaggttatctactggtcaaatcgaagaagtactatctgaacatcaatcggttgccgaatgtgcagttatagggataaaagatcaattaaaaggacaattgcctattggattaattgctttaaaggcaggagtaacaaaagataatgaaacaatctcaaaagaatgtattcagatggttagagataaagttggaccagttgcagcatttaaagttgctatagttgtaaaaagacttccaaaaactaggtctggcaaagtattgagaggtacaataagaaagattgctgataaagaagagtataaaatgcctgcaacaatagacgatcctcaaattttaaccgaaattaaagaagatttaattcaaaacaaaattttaaaaatataaa

SEQ ID NO: 307844 - DNA, 955 bp, Unknown
  Bacterial polypeptide expressing nucleotide sequence isolated from the Sargasso Sea
gatgcaggagtattttggagaataatttcagagtataaaattaaatctttatttacagccccgacagcatttagagcaattaaaaaagaagacccagatggaaagtttttttcaaagtatgacttaacttcatttaagtctttatttttagctggagaaagagctgatccagatacaattaagtgggctgaaaatcttttaaatgttcccgttatagatcattggtggcaaacggaaaccagttgggcaattagttcaaattgtactggaatagaaatgcaaaaaactaagtatgggtcagcatgtaaagcagttccaggttatgatgtaaaagtaattaaaccagatcattcaatagcaaaaacaaatgaaatgggagatatagttgttaaattacctttacctccaggaacttttcctacgctttggaatgcaaacaaaagatatgaagaaaattatatgactaattataaaggttactatcaaacttatgatgcaggacacattgatgaagatggatacatttggattatgtcacgaaccgatgacattataaatgttgctggtcatagattatccacaggtgctattgaagaggtattatctgaacatcaatcagttgctgagtgtgctgttcttggaattacagataaattgaaaggacaattgcctattggtttagttgttttaaaatctggtgttgaaaaagacaatgaaactatctcaagggaatgtattaaaatggtaagagataaaattggacctgttgctgcgttcaaagttgttattgttattaaaagattgcctaaaacaagatcaggaaaaatattgagaggaactattcgtaaaattgccgacaatgaagattataaaatgccggcaacaatcgatgatccgtcaattttagaggagattactcaaagtttaatagaaaataaaattctgattaaataaa

SEQ ID NO: 307845 - DNA, 1264 bp, Unknown
  Bacterial polypeptide expressing nucleotide sequence isolated from the Sargasso Sea
atgaatgaattttcaacaaacctagataagaataaagctaattatgtacctctttctccattaagttttatcctgcgggccaaagatatttatccaaattatgaatcagtggtttatggcaatcgtagttatacatggctccaaacttacaaacgctgcgctaaatttgctagtgcattgacaaaaaggggtattggttttggtagcacagtatcaattattgctgcaaatactcctgaattactagaagcacattattctataccaatgacgggaggtgttattaatactataaatacaagattagatgcagagacgattgcttatattttagaacatagtgatgcaaaattattaataactgatacacaattttcgccaacgataaaaaaagctctaagtatatatggtaaaaaaatacccatcatagatattcatgatgaccaagcaatattcaaagaagaagagggtgaaaaacttggagaatggacgtatgaagaatttcttcagactggtgatgataattacaattggtcattaccagatgatgaatggcaagcaatttcattaagttatacttcaggcaccacaggtaaacctaaaggcgttgtttatcatcatcgaggttcttacttaatgtcaactggaagcataacagcttggaatatgccaaataaattaactttcctttacacagtccctatgtttcattgtaatggttggggttacccttggacggcagcattaatacatgccaaagttatttgttgtcgttatataattgcaaaagatatttataatttaatagataaacataaagttactcattttggaggcgcaccaatagttttaagtttaattgcaaacgctgatgaaaaagataagaaaaaaattaatcacaaagtatttgttttaacagcaggagcacccccaactagttctattcttgaaaaaatggacaaccttggctttgaagtaatgcatgtttatggtttaacagaaacttatggccatattcttcaatgttcttggaacgaggaatggaatcatctttcaagttcagaaaaagctgacataaaagcaagacaaggcgtaagatatccaaacactgaagcagtatgtgtagctgatccagaaacttatgaaactgtacctatggatggagaaacaatgggagaaatactcataagaggaaatgttgtaatgaaaggttattataaaaataaacaggcaactgagacatccatgaaaaatggatggttca

SEQ ID NO: 307846 - DNA, 1073 bp, Unknown
  Bacterial polypeptide expressing nucleotide sequence isolated from the Sargasso Sea
cccggagttgcttgaggcccatttcggcgttttgatgaccggaggggtgttgaacgctctcaacattcggttggaagcggaaactctggccttcattctggagcatggagaatctcaggtgttgatcacggatcgggaattttctccagtcatcaaaaaagtcctgcaacaactggaagatcatcctttggtaattgacatcgatgatccgatggcagaaggcggagaacttcttggggagatggattacgaagcgtttttgaaaaccggagatgaagattttgaatggaatctccctgaagatgaatggcaggcggtcagtctgaattatacttccggtaccaccggaaaaccgaaaggagtggtttaccacagccgcggagcacatcttttagccatcgacaatatccttgcctggggtatgccgaggcatccggtttatctttggacgcttccgatgtttcattgtaacggctggtgttttccatggaccatcaccttattggcagggacgcatgtttgtctgagaaaagtcaacgcagccaatatttatgattccattgtcaaacatggagtgacgcacatttgcggtgctccgattgtgatgggaatgattgcgaatgctgaggagcaggaccaacgcgtcctttcagaccaggtccagatcatgactgccgctgctccaccgccgcccccggtgattgcaagaatggaggaaatgggttttcaggtgacgcatgtttacgggctgacagaaacctatggaccttcggtggtcagtgtctggcaagaagaatggaatggattgagttctacggatcgggccctgaaaaagggaaggcagggggtcaattatcctgggttggaaggtctgatggtggcagatcctgaaactctgaaagaggttccatcggatggtcaaactttgggagaagtcttcatgaagggaaatcttgtgatgaaaggctattttaaaaatcctgaagcaacccaagaggcttttcggggaggctggtttcattcgggagatcttggggtcaggcatcctgacgggtacatcgaactcaaggacc

SEQ ID NO: 307847 - DNA, 937 bp, Unknown
  Bacterial polypeptide expressing nucleotide sequence isolated from the Sargasso Sea
tggggtctttttggagaattatattctgaacacaaagtcaaatcactattcactgcccctactgcttttcgtgcgattaaaaaagaagatccaaacggaaccttttttaaaaaatatgatttatcatcttttgaaactttattccttgctggcgaaagagcggatcccgataccttaaagtgggcggaaggtttattaaaagttcctgttattgatcactggtggcaaacggaaaccagttgggcgattagtgcgaactgtgtgggtataggactagaaaaaacaaaatacggatccgcgtgtaaacctgtcccaggttatgatgtaaaaatattaaaaagtgatggtaaagaagctaaaccaaatgaaatgggagatgtggtggttaaacttccgcttcctccaggaacttttccaactctctggggtgctgatcaaagatataaagaaacttatatgtcaaactatcctggctactatcaaacgtatgatgcgggacacattgatgaagatggttacgtttggatcatgtcacgaacagatgatattattaatgttgctggccaccgattatcaacgggtgctatggaagaagttttagctgaacatcaagatgttgctgaatgcgcagtgttaggaattgcagataaattaaaaggacaattacccattggtttattaacattaaaagctggtgtcacaaaaaaacatgaagatatttcaaaagaatgcgtgcagatgattagacaaaaaattggtcccgttgcagcttttaaaactgcgattgttataaaaagacttcctaaaacaagatcaggtaaaatattaagaggtacggttaggaaaatagccgataatgaaccttataaaatgccagcaactattgatgatcccgctattctagatgagataaaaggtgattttaaaaaaacataac

SEQ ID NO: 307848 - DNA, 826 bp, Unknown
  Bacterial polypeptide expressing nucleotide sequence isolated from the Sargasso Sea
atgggtgatttagcatactggccttcagccaaacttctatctaaaaaagttaaatttgctaaaaatagagattttattaagaaccttgatcatatagatcaaatttgggaaaaattaaaatttaaatgtggtgatactttagctgtttgcgatttaagagggaaatacaaagaaaaattttcttattctgagctggctgatttaataacaaaagtctctttttcttttaaaaattatggtttagcaaagggggatgtagttactgtaatatctgaaaattctccaagatggctagtagtggatcaaggcttaatgcgtttaggagctataaatgcagtaagaggtattaattctccttcagtagaattagactatattgttgagcactctaattcagtaggtctaatagttcaatctaaggagatttggctaaagttaaaaaacaaagaagaattaaaaaaaagactgaaatttataattaatttagaagatgaacattttgaaagtttaataagttggaatcaatttataaggtcggcagaaaaagaaaattcacaaaataataatcttgaaaaatttagtacaaaaattgatgatgtagctactattctttacacttctgggacaacaggaaaacctaaaggtgtccccttgactcatgcaaattttttacatcaaataatcaatttagcctatattgctgatccagaacctgggacctctgtattaagcgttttgcctatctggcattcttatgagaggagtgctgaatacttctttttttcatgtggttgttctcaatactatacaattcctaaattttgaa

SEQ ID NO: 307849 - DNA, 592 bp, Unknown
  Bacterial polypeptide expressing nucleotide sequence isolated from the Sargasso Sea
ttgaaaaaaaataatttacccgtttttccattaggcttagttgcgcttcctgggactatacaaaatctacaaatctttgaaccaagatatatcaatatggtcaaaaattgtatgaaaaatagtcaaggatttgtaatagtttttcaaaaaccaactgatagcatcgatgattttgaaatatcaaaaaagggatcttatgttgagataattgattttaacaatcttccaaatggactactgggtatatctgtaaaatcaataaataaagttgttgtaaataacttaatacaattaaaagatggcttgcatattgctgaaatcaatcctctagttgatcctgaggtagatgatcaagcattactcgcagaatttccagaaataacaaatatattgaatcagctggttaaacatccaagaattgttgatatgccaattgaagttgactttaattctgcagattctgtggcctatcatcttgctggcctgattccaattccatggacctcaaaacaaaacttacttgaggcatttgatgcttcacaaagattaaaaatcttatctaaatatattgatgaaatttcatcaaattaaa

SEQ ID NO: 307850 - DNA, 856 bp, Unknown
  Bacterial polypeptide expressing nucleotide sequence isolated from the Sargasso Sea
tatgaacctagcgatttggctagaaagaacggctttgaaacacccagatcgagaagctctatttttgggttctgaatgcattggaacatacaaagatttctggctagctgtttgtgcgttgagatttcatttagaaaaagaggggattaaacgcggcgatagagtagcggtgtatatgcccaactgtcctgagttcttggtggcgttctatgcggtttggtcaatgggtgcagttattttacctattaacgctaagcttcatacgcgagaagttagctggattttagataatgccaagtgttggtatgttttaggtgacgctatcttatcatctgaaatacgcctgcctaatataactatattcaatccaaaatgggatgatttatccaaaagcgttcaggtttcgccggtttcatgttcttttaatgacctagcttggctgttttatacttctggtacaacgggcaaaccgaaaggtgtaatgataacacacggtatgatcaagactatggctttgtcttattttgctgatgttgatcaagtttatccttcggatacaactctctatgccgctcctatgtcccatggggcaggattatatagtattatgcatgtgctagcgggtacacgacatgcaatacctgtgagtggtggatttgacgaagaagagatctttaacttagctgaaaaattaaaaaacgtacatatgtttgcagctccaacaatggtgaagcggctaacaaattttgccaaaaagaacaataaagacggtagtgggtttcgcacagtagtttatgctggggcccctatgtacttgtccgatgtaatagaagcggtagagcatttcggtccaata

SEQ ID NO: 307851 - DNA, 1954 bp, Unknown
  Bacterial polypeptide expressing nucleotide sequence isolated from the Sargasso Sea
atgagcaaccatgaatccggccaggtgtggaaacccggccagcgcgagctgcagcacgccggcatcgtgaaactgatgcacgcattgggcgtgccgtcgtacgaagaactgatgcgtgtgtcgatcgctgagccggagcgctactggacgacggtgatggacgaatgcgcaatcgcatgggacgcactgccgacaggctacgctgacctgtcgcgcggcccgcagtttccgagctggttccccggcggcaaactcaactgggtcaacaccatctatggctgggcgcgcaaccccgccactgcgcaacaaaaggccgttgtcgccgagcgggaagacggcagcgtcagcgagctgacctacgcggagctggagcagcgcgtcagcgatttcgccgcaggactcgtacggcacggtgtcagacagggcgaccgcgtcggcctgctgatggaaaacggcgtcgaggcgaccgtctcgctgctggccatcgtgcatctcggcgcgctggtcgtgccgttgttcagcggcttcggggtcgatgcgatcgtggctcgcctgtcggctgccgaggcacgcatcgtgatcgcatccaccggcttctcgcgccgaaccaagcgggtggatgtacagggcgcgctgcgcgacgcatggcgccagctgccgttgctcgaacacgtgatctggaagcgcggcgaaggcgacaccgctcaagatacacgcgacctcgactggcaggaaacggcaagcgccggacagggccagggcgtcccgccggtgtccgtcacgcccgatacgccgttcatggtgatctatacgtcgggcaccacgggcaagccgaaaggcgtggtgcatacgcacgggagcttcccgatcaagatcgcgcacgattcgctggttcacttcgacgtgcatcccggcgacgtctactgctggcccgccgacatgggctggatcgcgggcacgctggtgctcggctgcgcgctgctgcggggcgcgacgctggtgtgctacgacggcgcgccggactaccccgactggtcgcgcatgtcgcgcgtggtggaacgtcaccgcgtcacgcacttcggatcggcgcccacgctgatccgcgggatggccagccacgaggcgctcgcactcgcgggcgatcgctccaccgtccggttgctgatcacggcgggcgaaggcatcgcgcccgagcatttcaactggttcctgcagcgcttcggcgacggcacggcgcccgtcatcaactacacgggcggcaccgaggcatcgggcgcgctgctcgcgagcgtcccgatccggccgattccgccgagcggcttcaataccgtctcgcccggcgtggccgcagacgtggtgaatgccgacggtcagagcgtgaccggcgaaatcggcgagctcgcgattcgcgctccgttcgtcggtatgacgcagtcgttctggcacgacgacgaacgctacctggaaacctactggcagaccattccgggcatctgggtccacggcgacctggcgctgcgcacgtccacgggtaactacttcatgatgggccgctccgacgacacgctcaaagtcgcgggcaagcgcctggggccggccgaggtcgaggaagttgtgctggaactgccggacgtggccgaggcggccgcgatcggcgtcgccgatgcggacaaggggcagaaactcgtcgtgttcgtcgtgcccaagcccgacgccgatggcacgggtgcggatctggaggccatcgtgtccggccacgtcgacaagcgtctcggtcgcccgttccggccgggccgtgtacatgtggtcgcgcaactgccgaagacgcgcagctccaagatcatgcggcgcgtgatccgtagcgtgtactgcggtcaacctccgggcgacctgtcgtcactcgacaaccccggcgcgctggacgaagtgcgcgctgcggcgacctccgcctgac

SEQ ID NO: 307852 - DNA, 910 bp, Unknown
  Bacterial polypeptide expressing nucleotide sequence isolated from the Sargasso Sea
catgaatcaattttcgacagatcttgataaaaataaagctaattttgcacccttatctccattaagttttatcactcgcgccaaagatatttatccaaattatgaatcagtagtttatggaaatagaagttacacatggcttaaaacatatgatcgttgtactaagtttgctagtgctttgacaaagcaaggtattggtattggcagtactgtatcaattattgctgcaaatactccagaattattggaggcccattattctattccaatgacaggtggcgtcgtaaatacaatcaatacaagattagatgctcagacaattgcttatatcttagaacatagtgatgcaaagatgttaattactgatactcaattttcaccaacaataaaaaaagcactagatctttatggtaaaaaaatacccataattgatatccatgatgagcaagcaatctttaaagagggtgagggtgaaaaaataggtgattggacatacgaagagtttttaggaacaggagacgatgactttgattggtctttgccagaagatgagtggcaagcaatctctctaagttatacatccgggacaactgggaaaccaaaaggtgttgtctatcatcatcgtggatcttatttaatgtcaaccggtagtgtcactgcttggaatatgacaaataaacttacttttcttgcaactgtaccaatgtttcattgtaatggatgggggtatccatggacagctgcattaattcacgccaaagtagtttgttgtcgatacattgttgccaaggatatttataatcttattgataaacacaaagtaacacattttggtggggcgccaatcgtattaaatttaattgctaatgctgaagaaaaagacaaaaaaccaatcaatcataaaatttac

SEQ ID NO: 307853 - DNA, 1513 bp, Unknown
  Bacterial polypeptide expressing nucleotide sequence isolated from the Sargasso Sea
ctgccatcaacatacaaacatacaaatatctcagatgggattcggtcggcgtgtttgaagaatcctttaaaaattgcatataagcacggcaagaatacaagaacatatattgagctagcacaaagaatagattcgatttcaagcctgatctcttcttttggtattccttcaaaatccaatatagcaattgttgcctctaattctatcgagtatatggaaattgtattggcagcctctcaattgggtcatcctatcgctactgtcaatccaaaattgacaataaaagagatcgtttcaatatgtgaagatgcccaagcaagcttgatctttgttgatcaaaaagtgtctacattgcttgaagtgattcacattgatggtactcaaaggaaaattaatatcgattatgagttaagcaacttaattgatcagtcaagtcaaatgggcggccttccagccattgatgaaaaagaaacattcacgataccttatacttctggaacaacaggaaagccaaagggtgttcttgtgcctcatcgatcaagggcgttgacgttatatggaatggcggatgcttatggttgtttttcttctgatgaccgctttctttctattgcgccaatgtgccatggcgctgggatgatcttctcattagcgcctgtattttttgggggttacgctgaaattatggatgacttcaatccagaattggtaatgaaaactatcgaagacgaaaacattacagggttttttggcgtaccaacccatttttatgggatgcttggcatagatcaatccattcttgacagctgtaccggaagctcattaaaaacgatcatatccaacgcagccgcactgccacaatccttgaaagaaaagatagttgaacattttggagaggggctactttatgagtgctatggttcaacagagggtggaattatctcaaacctaaagccagaagatcaattaagaaaaaagcaatgtgtaggagagccctttcctttcacagaaataaaaatattaaatcaagatggtcatgaatgtggaccaaatgagattggagaagttttcaccagcagtccatatatatttaatggttactggcaaaaagaaaaagaaactcgagatgcttttgatggagaatggctaacagtaggtgaccttgcaaaaaaagatgaagatgggttcctatatatagtcgatagaaaaaaagacatgattatttcaggcggaatcaatatttacccaagggaaattgaagaaatacttttggagcatccagatatcaatgatattgctattgttggagaacctgatgaaaaatggggtgaaatcattaaagcatttattgtttttaaagaaacacaactatcccttgatgagattcatgatttttgcagtgataaaattgcgtctataaaaataccaaaaattatagaaacaattaatgcattaccaagaaatgccaatggcaaagtactcaaaacagaattaagaggaaaaaaactatgag

SEQ ID NO: 307854 - DNA, 531 bp, Unknown
  Bacterial polypeptide expressing nucleotide sequence isolated from the Sargasso Sea
aatggcagtaattattcaaaaagatacaaaaattttaattcaaggtttcacagggaaaatgggaacctttcacgctgaagaaatgattaagtatggatccaatgttgtgggaggagtaacaccaggaaaaggtggtcaaaaacatttagatagaccggtattcaacacagtaaaagatgcagtacaagaaacaggagccactgcttcaatattatttgttcctccagcttttgcagcagactctgcgatggaagctgcagatgctggtataaaaacatgtgttgctattgttgatggaattccttcacatgacatgatcagaataaaaagatacatgcgaagatattctagaaaagaaaaaatgacattagtgggacctaattgcgcaggaataataagcccgggtaaatcaatgttgggaattatgccaggtcatatttataaggaaggaagagttggaattattagtagatctggaactttaggatacgaagcggcacaacaattaaaagatttaaatattggtgtttc

SEQ ID NO: 307855 - DNA, 1577 bp, Unknown
  Bacterial polypeptide expressing nucleotide sequence isolated from the Sargasso Sea
agactatattatcgagcactctaattcagtaggtctaatagttcaatctaaggagatttggctaaagttaaataacaaagaagaattaaaaaaaagactgaaatttataattaatttagaagatgaacaatttgaaagtttaataagttggagtaaatttataagttcagaagaaaaagaaaattcacaaaattataattttgaaaaatttaatccagaaattgatgacgtcgctactattctttacacttctgggacaacaggaaaaccaaaaggtgtccccttgactcatgcaaattttttacatcaaataatcaatttagcctatatcgctgatccagaaccaggaacctctgtattaagcgttttgcctatctggcattcttatgagagaagtgctgaatacttctttttttcatgcggttgttctcaatactatacaattccaaaatttcttaaagatgatattacacaaataaaacctgttgtcatggctactgtaccgagactatgggaagcaatacatgatggtttttttcaggctttgaaaaaaatgcctttcaaaaagcaaaaacttattaagtttttgataagtaatagttcggttttcaaaagaagtctaagaaagataagaaatatagatataaatcaaataacttttaaatcaaaaatccctttaatgggttctgttattagccgatatcctttacataaattgtccactatttttttatggccgaatattctgagacaactatgtggagaaaaactgaaatttcccattaatggtggaggtgcattaccagaacatgtagatcttttttttgaatctttaggtgtagatgttttggtgggatatggactcacagaaactagtccagtattaacttgtagaagaagagaattaaatgttagaggatcatctgggcagcctctttcatttactgaaatcaaaatagtgaatgatgataaaaaaaagattctgaagttcagagaagtcgggaaaattcttgttagggggccgcaagtaatgaaaggttatcttaataatgcaatagctacaaatgatgttttatccaaggatggttggtttgatacaggtgatttaggttttctaataccaaatggttctctctttataacaggaagagctaaggatacaatagtgctatcaagtggtgaaaatatagaaccgaatccgctagagactgaaattcttagttctgaatttattaatcagattcaattagtaggacaagataagaaatgtttaacagcccttgtagttcctaatgtcgaattggttaaaagcaagtttttggaagaagacctttcaaaattaaacctgaataagaaaattggtacatttttcaaatcacaaattaataatttgcttaaaagtcgattaggagcaagatcagaagaacaaatattagattgttattttgttgatgcctttactctagaaaatggcttgttaacacaaactcttaaacaaaaaagaaaagaaatagaaaaaaagtattcattacaaatagaaaatatgtatgaaaacaaatttagtaagaaaatttgat

SEQ ID NO: 307856 - DNA, 1513 bp, Unknown
  Bacterial polypeptide expressing nucleotide sequence isolated from the Sargasso Sea
ctgccatcctcattcaagcataccgttatctctgatggaatattatctgcttgttctcagagtccctctaaagttgcatataaacatggacaaaagacaagaacatatcatgaactgaagcagagaattgactcaatttctgggattatccattcttttcagattccaatgaaatgcaatattgcaattgttgcatctaattcgattgagtatatggaaattgttctcgctgcctccaagttgggtcatccaattgccaccgttaaccccaaattgacagcaaatgatattgtttcaatctgcgaagatgctgaagcaaaattggtatttgttgatcagaaagtctcatctttgctggttggtagaaatatccgaggtgttcaagagattattggaatagataacgagatggaaacccttatcgctcaaactgaatgtccaagtcagcttccaaccattaaagaaaaagaaacatttacaatcccttacacatctgggacgactggaaaaccaaaaggtgttttagtgccccatcgatcaagagctctgactctttatgggatggcagatgcttatggttgtttttcttctgatgatcgctttctttctattgccccaatgtgccatggcgctgggatgatcttttcattagcgcccatattttttggaggctatgcagagattatggatgacttcaatcctgaattggtaatgaaaactcttgaagacgaggaaatgacaggtttttttggagttccaacccatttttatgggatgctaggcgtagatcaatccattcttgacaactgctctggaagctcgttaaaaacgatcatatcaaacgcagccgcactgccacaatcattaaaagaaaagattgttaaacattttggagaggggctgctttatgaatgttatggttcaacggaaggtggaattatttcaaacctagggccagatgaccaattaagaaaaaagcaatgtgtcggagagccctttccttttacagagataaaaattttaaataatgatggtgatgaatgcgagccaaatgaggttggggaagttttcacaagcagcccatatatatttaatggctactggcaaaaagaaaaagaaactcaagatgcttttgacggagaatggcttacagtaggcgaccttgctaaaaaagacgaagatgggttcctatacatagtcgatagaaaaaaagacatgatcatctcgggtggagtcaatatttatccaagggaaattgaagaagtgctcttagagcacccagagattaatgatattgctattgttggtgagcctgatgaaaaatggggtgaaatcattaaagcatttattgttttcaaagaagaggaactttcccttgatgtgattcaagatttttgtagtaataaaatcgcgtctattaaaatgccaaagattattgaaaaaattgatgcattaccaagaaatgccaatggcaaagtactcaaaaccgaattaagaggaacaaaagcatgag

SEQ ID NO: 307857 - DNA, 1576 bp, Unknown
  Bacterial polypeptide expressing nucleotide sequence isolated from the Sargasso Sea
tatgagtgatctcggtttttatagatttgctaatgctcaacctgatgaaattgctattgttgagccatccgaaaaaatttggacaaggggggagctgttagctaaaaccaatcagttaacgcatgcattaaaagattttggagtggaaactggtgatgtagttgcaacagttttaccaaattctgttgagtactacatagcatatcttgcttgcgctcagtctggattttatatggtgccaataaattggcacttagctggaccagaaatagcatacatacttgaagattcaggggcaaaggcctttattgcctcaggtgaagtgccagcaatggaggaagcatgtaaaaaagcagttgctgcaattgattttcctaaagagggttctataagcactactgatatggatggcttcattcatttagatgattttgttgctccgcatccaacaagcaatccagttgaaagaactgcaggtcaagtaatgaattacacgtctggcacaacaggcaaacctaagggtgtcaagagagctttggttccaggtgatcctgacgatatcttgagtatgtttgcaatgattttaagcttttttgaaattcaacctaatgaagacaatgtacatatcgtaggctctcctttatatcacactgctgtattggttcattcctcagcagctttacattatgggcattcagtagttttaatggaaaaattcaatgctgagaaaatgctctatctaattgacaaatataaagttactaccagtcacatggttccaactcaatttcatagattgctacagcttccagatgaaattaaaaataaatatgactgctcatcaaccagggcaatgattcacgcggctgcgccttgtcctattcatacgaaacaagcaatgatcgaatggtggggaaattctatctgggaatattatgcagccactgagggtggtggcacagttgtagacgcagaatcttggtcaaaatttcccggcacagtaggtaaagcttggccaggagctgaaataaaaattattaatgatgacggaagtgaagccgatactgataatcaaggcacagtttatatgaaattaggtgaagccactaaatttgaatacaaaggagatcaagcaaaaactaaaaaagaaagattagttattgatgaacaagtttattttactgtaggtgacatagggtatttaaatgatgaaggttatttatttttgtgcgacagaaaaatagatatgataatttctggaggagcaaatatctatcctgcagaaattgaaagtacatttttaatgcatcctgcggtcgcagatgtggctgtttttggaatccctaatgaagaatggggcgaagaagtaaaagcagtgatagagttaaattcagatcaaaaatcctcagaagagttacttggagagttaatgggttttgctcaagaaaatcttgcaaaaatgaaattacctagaagtatagatttcattaaaaaacttccaagagatgaaaacggcaagttgtataaaagaagacttagagatccttactgggaaaatcaatcaacacaagtctaa

SEQ ID NO: 307858 - DNA, 658 bp, Unknown
  Bacterial polypeptide expressing nucleotide sequence isolated from the Sargasso Sea
aactcctaaaggaatagttagggatgttggcggtcatatagttgctttaaagtggacaatgaaaaatatttataacattgatccggatgatgtgtggtggtcagccagtgatattggttggatagtaggtcactcttacattgtttatgctcctctctttcatggatgtacaacagttttatttgaaggtaagcctgtgggaactccagacgctggcgtattttggagagttatctctgaacacaaagttaaatctctttttactgcacctacagcgtttcgtgctattaaaaaagaagatcctaatggaaattttttcaaaaaatatgatttatcatgttttaaatctttattccttgcgggagaaagagctgatccagatacaataaaatgggcggaaaaattattaaaagcaccagtaatagaccactggtggcaaactgaaaccagttgggcaattagtgctaactgcactggtttggagcttgcaaaaattaaatatggatctgcttgcaaacctgttccaggttataacgtcaaaatattaaaaagtgatggcaaagaatcaaaaccaaacgaaatgggagatgttgttgttaaactcccgcttcctccaggaacttttccaacgctttggggtgctgacctaacgctataa

SEQ ID NO: 307859 - DNA, 340 bp, Unknown
  Bacterial polypeptide expressing nucleotide sequence isolated from the Sargasso Sea
atgagtattatagttaataaggactcaaaagttttagttcaaggatttactggaagtgagggtacttttcactctgagcaaatgattgaatatggaacaaatgtggtttgtggtgtgactccaggaaagggtgggacaaaacacctagataagcctgtttacaatagtgtggcagaggctatgataaatgaagatattaatacatcaataatttttgtacctccgatgtttgcagccgatgctataatggaagctgctgagtcaggtataaataccatagttgcaataactgaaggaattccagttaatgatatgacaaaaagttgtgtcttatattaaa

SEQ ID NO: 307860 - DNA, 486 bp, Unknown
  Bacterial polypeptide expressing nucleotide sequence isolated from the Sargasso Sea
catgactgtactcgtagataaaaatagcaagataattattcaaggttttactggtaaaatgggctcttttcatgcagatgagatgataaaatacggctcaaatgtagttggtggagtaacaccaggaaagggaggctcaaagcatttagatttaccggtattcaatacagttaaagatgctgttaatgaaacaggagccgacgcatctattttatttgtacccccagcttttgcagccgactctgcgatggaagcagcagatgctggaataaaaatatgtgtagcaatagttgatggaataccttctcacgacatgatcagaataaaaaggtatatgagaagatatactaaaagttctaaaatgacattagttgggccaaactgtgctggaattattagccctggaaaatcaatgttgggaataatgccaggacatatttataaagaaggaagagttggaattataagtagatcaggtactttagg

SEQ ID NO: 307861 - DNA, 757 bp, Unknown
  Bacterial polypeptide expressing nucleotide sequence isolated from the Sargasso Sea
ctgccatcaacatacaaacatacaaatatctcagatggggttcggtctgcctgtttgaagaatccttcaaaaattgcatataagcacggcaagaatacaagaacatatagtgagctagcacaaagaatagattcgatttcaagtctcatctcttcttttggtattctttcaaaatccaatatagcaattgttgcctctaattctatcgagtatatggaaattgtattggcagcctctcaattgggtcatcccatcgctactgtcaatccaaaattgacaataaaagagatcgtttcaatatgtgaagatgcccaagcaagtttgatctttgttgatcaaaaagtgtctacattgcttgaaggaattcagattgatggtgctcaaaggaaaattaatatcgagaatgagttaagtaacttaattgatcagtcaagtcaaatggatggccttccagccattgatgaaaaagaaacattcacgataccttatacttctggaacaacaggaaagccaaagggtgttcttgtgcctcatcgatcaagggcgttgacgttatatggaatggcagatgcttatggttgtttttcttctgatgaccgctttctttctatagcgccaatgtgccatggcgctgggatgatcttctcattagcgcctgtattttttgggggttacgctgaaattatggatgacttcaatcctgaattggtgatgaaaactatcgaagatgaaaacattacagggttttttggcgttc

SEQ ID NO: 307862 - DNA, 503 bp, Unknown
  Bacterial polypeptide expressing nucleotide sequence isolated from the Sargasso Sea
aaaatcatatctctctacatttccaggtttttacgaaaccggtgatgctggtttgatagataatgatgggtacgtttatataatggcccgaacagatgacgttatcaatgttgcgggtcatcgattatcaacaggagccatggaagaagctttatctaatcacgctgacgtggcagaatgcgcagttataggcgtttcagatcaacttaaagggcaaattccacttgggttcttatgtttaactaagggcgttaacagacctcatgaagaaatcgtaagtgagtgtattaaattagtacgcaatcaaattggacctgtggcgtcatttaaacttgcagcgatagttccccgtttaccaaagacccgctcaggcaaaattttacgcgctactatggtcaaaattgctgacggtcaggaattcaaaatgccagcaacaattgatgatccggtaattttagatgagataaaggcttcgttacaaacactggggtatgcaaaataaa

SEQ ID NO: 307863 - DNA, 849 bp, Unknown
  Bacterial polypeptide expressing nucleotide sequence isolated from the Sargasso Sea
tttttaagaaatatgacttatctaaatttgatactttgtttcttgctggtgaacgtgcagatccagatacgattaaatggtttgaaaaactttcaaatgctcctgttatagatcactggtggcaaacagaaacaagctgggcaattagtgctaattgtgctggaatagaaaaatttccaattaaatatggttcagcatttaaacccgttcctggttatgatttaaaagttctgaatagcgaaggcaaagaaaacaaatcaggtcaaatgggtgacattgtagttaaattacctttgccacctggaactttcccaacattgtggaatgcagatgaaagatataaaaaagtttatatgtcaacttatgaaggttattaccaaacttacgacgcgggacatattgatgaggatggttacgtttggatcatgtctagaacagatgatatcataaacgtagctggtcatagattgtcaactggagctatagaagaagttttagctgaacataaaaatgttgctgaatgtgctgttgtaggaattgctgataaattaaaaggtcaacttccaataggattaatagccctaaaagcaggtgttgatagagataacaaagaaattacaaaagaatgtgtggctttagtccgagaaaaagttggtccagttgccgcttttaaattagctatagttgtaaaaagattacctaaaacgagatcaggaaaagttttaagaggtacagttagaaaaattgcagatggagaaacctataaagtgcctccaactattgacgaccctgtaattttagatgaaattaaaaaagaccttaaagataataatattttaaagagctaaa

SEQ ID NO: 307864 - DNA, 346 bp, Unknown
  Bacterial polypeptide expressing nucleotide sequence isolated from the Sargasso Sea
tgttggaataggcggtgacccaattcctggctcttcttttattgatattttggaactttttgaagctgatgatcaaacagacgcaattgttatggttggagagattggaggaaacgctgaagaggaagctgctgaattcatttcacagaatgtcactaaaccagttgtttcatatattgctggccagactgcaccaccgggcaaaagaatgggccatgcaggtgccataatttctggaggtaagggtacggcagaggataaaattaaaaaactaaatgagagcggtgttgttgttgcaaaaaatcttcttgaaataggctctactataaagtcactgatgtcttaa

SEQ ID NO: 307865 - DNA, 343 bp, Unknown
  Bacterial polypeptide expressing nucleotide sequence isolated from the Sargasso Sea
ggaggagatccgattaatggtagttctttcagagacattattgagaaatttgagacagatgaagagactgatgcaattttaatgataggggaaattggaggtccacaagaagtagcagcaggccattttgcaaaagaaaatatgaaaaaacctgttattgcttatattgctggattgaccgctcccaaaggtagagtgatggggcatgctggtgcaatcgtttcagcatacggcgaaagtgcagttgaaaaagttgaacttctaaaagaatgtggtgtaactatttcaaaaaatccatctgtaatgggtgatactgtaaaggaagtattaggtaaaagctgat

SEQ ID NO: 307866 - DNA, 214 bp, Unknown
  Bacterial polypeptide expressing nucleotide sequence isolated from the Sargasso Sea
tttgaaaaaccataagatcaaaaaaccaacagttggatttatagcaggaattactgcaccaccaggaagaagaatggggcatgcaggtgcaattatttctggaggaaaaggtggcgcagaggataaaataaaaaaaatggaagaatgtggaattatagtcgcaaaatcaccatcaataattggcaaaactttatttgataaactgtctaattga

SEQ ID NO: 307867 - DNA, 960 bp, Unknown
  Bacterial polypeptide expressing nucleotide sequence isolated from the Sargasso Sea
ggactccagatgcaggtgccttttggaaaataatttctgactataaagtaaaatctctattcactgctccaacagcttttagggcaattaaaaaagaagaccctgagggtaagtttttttctaaatatgacttaagttcatttgaaagtttatttttagcaggagaaagagcagacccagatacaattaagtgggcagagtctcttttaaaggttccagtaattgatcattggtggcaaactgaaactagttgggcaataagctctaattgtactggtatagaaatgatgaaaactaagtatggttcagcttgtaaagctgttccaggttatgatgttaaagttataaaaccagatcaaactttagctaaaccaaatgagatgggagacatagtggttaaactaccattgcctcccggtacttttcctactttgtggaatgctaatgaaagatataaaaaaacttatatgtcgaactatgagggatactaccaaacttatgatgcgggccacatcgatgaagatggatatatttggataatgtctagaactgatgacattataaatgtagctggccacagattgtcaactggagctattgaagaagttttgtcagaacaccagtctgttgctgagtgtgcagttattggaattgccgataagttaaaaggacaattgccaataggtttaatagctcttaaagcaggagttcaaaaagataatgaaacaatatcgaaagaatgtattcaaatggtaagagataaagttggtcctgttgcagcgtttaaaacggctattgttgtaaaaagattaccaaaaacgagatctggaaaaattttaagaggtacggttagaaaaatagctgataaagaagagtataaaatgccagcaacaattgatgatcctgctattttagaggaaattaaagaagatttaataaaaaataatattttaaaataat

SEQ ID NO: 307868 - DNA, 1573 bp, Unknown
  Bacterial polypeptide expressing nucleotide sequence isolated from the Sargasso Sea
atggaactaggattttatagatttgctaacaaagaaccaaataaacttgccatagtaggaccaaatgaagaattagtatcgagaggagaattactgtcaaaggcaaacaaacttactcatgctttacgtgatttaggactaaaaaagtttgatactgttgcagttgttttaccaaattcggttgaatattttgttgtttatatggcatgtcttcaagctggtttttaccttgtgccaataaattggcatcttgcaggacccgagattgcatatatattagaggattccgaggcaaaggcttttatagcgtcaggaaaaaatcctgatatggaaaaggcatgcattaacgcggtttcagagataagttttgataagaaaggatgcattacaatcgatgagcttgagggatttaggcatattgatgactttaccaaatctatgcctgatgaaaatcctcatgacagatcggcaggacaagttatgaattacacgtctggaacaactggcaaaccaaagggggtaaaaagaaatctcgtggagggcgatcctgatgatgttttaagtttgtttgcaatgatcttcagtttttataatattcaacccgaagatgagaatgtccatatagttggttctcccttataccatacggcagtcattgttcattcaacagcatctcttcactatggtcactcagttgttgtgatggataaatttgatgctgaaaaaatgctttatctgatagataaatataaagtcacaacttcgcatatggttcccactcaatttcacaggctcctgcaagtaaatgactctattaagaaaaagtatgattgcacttcaaccagggcgatgatacatgccgcagccccctgtccaattcatacaaaacaagagatgattgattggtggggagattcaatttgggaatactatgctgcaacagaaggaggcggaacagttataagtgctaaggattggagtcgctttcccggaacagttgggcaagcatggccaggtgcagagattaaaattattcgtgatgatggtactgaagcagatattgatgagcaaggtactgtttatatgagattaggagacactacaaaatttgagtataagggtgataaggcaaaaaccgaaaaagaaagattggtaattggagatagtgtcttttttactgtcggtgatattggttacatgaattctgaggattatttatttttgtgtgataggaagattgatatgattatttctgggggagcaaatatttatccagcagaaattgaaagtgttttcttaatgcatccaaaagtccaagacgtagctgtatttggaatacctaacgaagagtggggagaagaaatcaaagcggtagtggagttaagtgacgaagaaataattgaggaagatataaaaaatgatttgatggaatttgcatcaaagaatcttgctaaaatgaaacatccacgctcaatcgatctaattgataaattaccaagagacgaaaatggaaaattatttaaaaggaaactacgagatccatattgggaaaatcaagataggcaagtctaat

SEQ ID NO: 307869 - DNA, 532 bp, Unknown
  Bacterial polypeptide expressing nucleotide sequence isolated from the Sargasso Sea
ctgtccgtcagagacttaattgacttaagagcaaacgaaatctctgatcttccatttttgctcactccagcaaaccctttccctatcaattttcaggaacttaaggatcattgttcaagaattagtttaggattgggggctttgggcgtgggagaaagtcagaccgtggcaacgatgatgcccaatggtcttgcttcgactctcctaaacctctcgattttatacaaagggaaaactttgtgtccgctcaaccttgcaacaggagacatgcaactttcctatgttctggaacattcggaaagccggttgttgctggtagcatcagaacttcgtgcgcgggcggaagccattctcaagacccttcccaatcctccggaaatggtcgagatcccagcagatgaaatcccttttgaaaatgctggaaaccaatgggaaattgaaaatcaaacggacgcatcggataccggccttttgatgtacacttcaggcactactggaaagcctaagggagtaatgttgtctcatcggaatt

SEQ ID NO: 307870 - DNA, 419 bp, Unknown
  Bacterial polypeptide expressing nucleotide sequence isolated from the Sargasso Sea
tgtcatgggcagaatggacgatgtgataaatgtggctggtcatcgcttgtcaactggacagatagaagaggtagttgctaagcatacggtgatagccgaatgcgctgttgtaggaattaatgataaggaaaagggtcaggtgcccgtttctttagtagtgctcaaagacggtgctaatatgatgcccgaagcgctagagaaagagttagttatgatggttcgagaagctgtcggacccattgctaattttaagcgtatacttatagtagagcggttgcccaaaactcggtctggcaaaattcttcggcagataatgagaaaaatgatagatagggaagaatattccgttccgtcaaccatcgaagatccttctgtaattggagagctcgagactggcatcgctaattggaagctttagg

SEQ ID NO: 307871 - DNA, 337 bp, Unknown
  Bacterial polypeptide expressing nucleotide sequence isolated from the Sargasso Sea
catgtcaatattagtaggtaataaatcaaaaatagttgtgcaaggtataacaggttcagaaggaacatttcactcccatcagatgatcgaatatggaacaaatatagttgcaggcgtaactccaggaaaaggaggacaaactgctttagaaacaaaagtaccagtttttgattgcgttgaagactctattaaggaaactggtgctaatgtatcaattatttttgtacctcctccctttgctgcggatgctataattgaagcatctgaatctggaatagatctggtagtttgtattaccgaaggagttcctgtccatgatatggtgaaagctaaaagg

SEQ ID NO: 307872 - DNA, 824 bp, Unknown
  Bacterial polypeptide expressing nucleotide sequence isolated from the Sargasso Sea
ttttgaaagtttatttttagcaggggaaagagctgatccagacacgataaaatgggctgaaaatttacttaaagttccagtgattgatcattggtggcaaactgaaacgagttgggcaattagttcaaattgtactggaattgaaatgatggaaactaaatacggctcagcttgtaaagctgttcctggttatgatgtaaaaatcatcaaaccagatcaaactttagcgaaaccaaatgaaatgggtgacattgttgtgaaactccctttacctcctggaacattccctaccctatggaatgcggacaaaagatataaagaaaattacatgtccaattatgaaggttactatcaaacttacgatgcaggacacattgatgatgatggttacatttggattatgtctcgaacagatgacattataaatgttgcaggtcacagattatctactggagcaatagaagaagttttatctgagcatcaatcagttgctgagtgtgctgtgttagggatcgctgataaattaaaaggtcaattaccaattggtttggtcgttcttaaatctggggtagataaggataatgaaacaatttcaaaagaatgtattcaaatggttagagctaaaattggtcctgttgctgcatttaaagtggcaatagttattaagagacttcctaaaacaagatcaggaaaaattttaaggggaacaattagaaaaattgctgacaatgttgaatacaaagttcctccaacaatcgatgatccagcaatattaagtgaaattaaagaagatttaatcagaaataaaattctagatggttaag

SEQ ID NO: 307873 - DNA, 718 bp, Unknown
  Bacterial polypeptide expressing nucleotide sequence isolated from the Sargasso Sea
atggaattaaataagattaatagtttagtagaacttttttttaaaaagtgtgaagagaaaaaagttaaacccaacctaccatttttaaaatggttaaaagttgataaaaaagattttttaacttggggagaagttgaacacaatattagtattttatctgaatacttaagaaacattttgtcccctggagatagatgtgtcttgttatctgagaatcgacctgaatggcttattgcagatattgcaattatgaatgctggaggtgtaactgttccattgtttactacttattcaaaaaatgattatgaatatataattaatgattgtaaaccaaaggtatgtatcatttcaaatgatattcaatttaaaaaacttgaaaaatctatttcaaatgaaactgttgttttatcgattgaaaattttagtaaaaaaattgaaagtattgaaaatatttttaataaatattctaaaaaagaaaaaaaatttctttctctcaaatataatcaaaatatttacagaaaagatctggcatgcataatttacacctcggggacaactggcaaacctaaaggagtaatgctaagtcatggaggaatattatcaaattgtgaaggagcaaaagaaattttagagtctttagttaaagatgaagagccagtttttttaacttggcttccattatctcactcttatgaacatactgttcaatatgtccaaa

SEQ ID NO: 307874 - DNA, 1532 bp, Unknown
  Bacterial polypeptide expressing nucleotide sequence isolated from the Sargasso Sea
gttgatcggcatctgcatttcgcgtggcgcgagcatcgttccggccatgctcggcgtgctcacccatggcgcgggctacctgccgctcgacccgcagatgccggatgagcgcttgcgctacatcgtcaaggatgcgcaactgcgcgccgtgattgtcgatgcggcaacccatgagcgtttgagcgcgctggtcgattgcgcgctataccggatcgacgatctgctaaaaggcccggcggccgggttggccggatcggctttcgcgcgaggcgcgccgctcgatccgcaacgcaccgcctacgtgatctacacctcgggcacgacgggcaaacccaagggcgtggtcatcgagcgcggcatgctggcgcatctgatcgcctcgctgacgggccgctaccggcgtgacgcgagcacgcgctggctgcagttcgcatccgtcaatttcgacgccagcgtgctggagattttcaatccgctgacgcacggcggccatctgatcgtcgcgcccgaagcggtgcgcaccgatgccgacgcactgtccgccttcctcgacgccgaacgcatcacgcatgcgttcctgccgccggcgattctgaagctgctgccgcggcgcgcgctgccgcatctggacacgattctctgcggcggtgaagcgagcgacgacgagacgatccgcttctggtccggcatgctgcgcctgtcgaacatctacggcccgaccgagaccaccgtgatggcgaccgaaaacaccttcgacggcgacaaggccgccaatcaactgggccatccgttgcccggctatcagattcatctgctcgatgaggaaggcgaaccggtgccgctcggcggcatcggcgagatctgcattggcggcgcggcggttgcgcgtggctatctgctgcggcccgagctaaccgggcagaagtttcgggcgaatccgttcggcccaggacgtctctaccgctccggcgacctcggccgttttcagccggatggcgcgatcgaatttctcgggcgcagcgattttcaggtgaagattcgtggctaccggatcgaactgggcgaaatcgaggccagcatcgtcgaacagccggaggtgcgtagcgcctatgtcggcacctgcgaacgacaaggtgggacggccctcgtggcctggtatgcaggggccgcgctggagccggcggtgctgcgaagtcgtcttgcgcaacgactcgcgcattacatggtgccggcctttctgctaccggtcgaggcgctgcccttgacgctcaacggcaagatcgaccgcagcagattgccggcgccgcaagccggtccggccgactccgcgaagcgcgctttcgacgctttcgaactggccgtgcaagcgatctggtcggaggtgctgggcgtgccgctcgacagcgtcggggaggacagccacttcttccacctcggcggccactcgctgcttgccacacttgtgtggcatcgtgtcagcgcaagcctgtccgcacccagtcagctgaagacgctgttcgagcatccgcagt

SEQ ID NO: 307875 - DNA, 292 bp, Unknown
  Bacterial polypeptide expressing nucleotide sequence isolated from the Sargasso Sea
gaaaaggatgaacagacagaagcaatagtaatgataggagaaattggaggagatgccgaagaacaggcagcggattatgtgaaaaataatgtaactaagccaattgtcagtttcattgcaggtcaaactgcccctcctggacgcaggatggggcacgccggtgccatcatttctggaggacatgggacggcagaagaaaaaatgagtgcattaagagaagcgggaatatatgttattaactcattagatgaaattgggattaagatgttggaagctttagaaaaagcatgaa

SEQ ID NO: 307876 - DNA, 835 bp, Unknown
  Bacterial polypeptide expressing nucleotide sequence isolated from the Sargasso Sea
tatgaaaatagaaaacataaatagtttagtagaactttatttcaaaaaatacgatgaaattaaaaacaaaaaaggtcctccttttttatttggattaagttcaaaagataaaaactcttcgttaaattggaatgaagtaacattaaagattaagagcttaacaacttttctacaagactatattacccctagagatagatgtgtattattgtctgagaatagaccacaatggttaattgctgatattgcaataatgaattctggaggcgtaacagtgccattatttaccacttactcagactcagactatgaatatataattaatgattgtggaccaaaggtttgtatagtttcaaataaattacaatatgaaaaaatagaaaaatttttaaatgacaagattaagataatttctattgataaatttacaaatcaaattgaaaatttttcagatatatttaaaaaaacaaattttactaataaaaattataataataaaataaaaagaaacgacttagcttgtataatctatacctctggtacgacaggtaaaccaaaaggagtaatgctaagtcatggtggaattctttcaaattgcgagggggctttagaaatattagcttctattgtcaaaaagaaaaaaccagtttttttgacatggttacctctttcacattcgtacgaacataccgtccaattcgttcaaatttctctgggggcaaaagtttattatgctgaaagcctagataaactaattcctaacatgtcagtggcgaaaccaaccatcatgaccgctgtcccaagattttatcaaaatttatataacaaaattctt

SEQ ID NO: 307877 - DNA, 343 bp, Unknown
  Bacterial polypeptide expressing nucleotide sequence isolated from the Sargasso Sea
tatgctatttgataaaaacacaaaagttctagttcagggactaggaaaagacggtagctttcaggcaaaaaaatctatagagtatgggaccaatgtagtagcttgcgttcatcctaatagaaaaggacagctttttgaagaaaaaattcctttttttgaaactgttattgaggctaaagaaaaaacaggtgcaaatgcaggagtaatttatgtacctgctccttttgcaatagacgcaataattgaacaaatagatgcaggattagatctagtggtatgcataacagaaggaatacctgtacatgatatggtcaaagtaaaaaattatcttaaggataagaaa

SEQ ID NO: 307878 - DNA, 1621 bp, Unknown
  Bacterial polypeptide expressing nucleotide sequence isolated from the Sargasso Sea
gatgctacccgccgccgaccgttacgacgacctgctctcccgcttcgcgtgggacgtcccggcgcgctacaacatcggcgtggacgtctgcgacaaatgggccgacggcagcggacgcctcgcgctgatccacgaaacggcgcaaggcgacgttttccggatcacgttcgacgacctgaggaatgcttctaaccggctcgcgaacagcttcgtgcgcgccggccttcggcgcggcgaccgcatcggcatctttctcgcgcagggccccgaaacggccgtcgcgcatctcgccgcgtacaaactcggcgcgatcgcggtgccgctcttcacgttgttcggcgtcgatgcgctcgaataccggctcgcgaacagcgaggcggctgcgctcgtcaccgacgcagctggctacgcgaaaatcgcaccgctgcgcgcccggttgccggcactgcataccgtctactgcatcggcgacgatgcgcccgatcagccgggcgtgctgcgctacgacgcggcgctcgccgccgaaacacccgacttcgtgccggccgatacggccgccgacgatccggcggtcatcatctatacgtccggcacgacgggcaaaccgaaaggcgcgttgcacgcgcatcgcgtgctgctgggccacctgccgggcgtcgagatgtcgcagcagtgcttcccgcgcgacgcgcgcctgttctggacacccgccgactgggcatggatcggcggcctgctcgacgtgctgctgccgtcatggcatcacggcgtgcccgtactcgcccgccgcttcgagaaattcgacggcgacgcggcgttcgcgctgatggcacggcacggcgtgacccatgcgttcctgccgcccaccgcgctgaagctgatgcgcaccgtcccggcaccgcgcgaacgctacgcgctgtcgctgaagtccgtcgcgagcggcggggaatcgctcggcaccgagctgacggcctgggggcgcgatgcgctcggcgtgacgatcaacgagttctacgggcaaaccgagtgcaacatggtgctgtcgtcgtgcgcggcgctgttcgatgcgcagcccggcgccatcggcagggccgtgcccggccatgcggtcgcgatcgtcgacgcggacggcacgccgctgccgcccggcgtcgaagggcgtatcgcagtgcgccgccccgacccggtgatgttcctcgaatactggcgcaacgccgacgcgacgcgcgacaagttcgccggcgactacctgctgaccggcgacacgggcacgatcgacgccgacggcttcgtgcgcttcgtcggccgcgacgacgacgtgatcacgagcgccggctaccggatcggcccgggcccgatcgaggactgcctgctcacgcatccggcggtgcggatggccgccgtcgtcggcgtgcccgacgcgacgcgcaccgagatcgtcaaggcgttcgtcgtgctgaatcccggccacaccggcgacgatgcgctcgtgcaggcgctgcaggcacatgtgcgcacgcgcgtcgccgcgcacgagtatccgcgcgcgatcgcgttcgtcgacagcctgccgatgaccgcgaccggcaagatcgtgcgccgcgcgctgcgcgacgcgtag

SEQ ID NO: 307879 - DNA, 1137 bp, Unknown
  Bacterial polypeptide expressing nucleotide sequence isolated from the Sargasso Sea
catgtctccgatcagtccttttgaagaaaatctcccaaaaaatcaggcgaattattctcccctgactccattaagttttttaacacggaccgcagaggtttttcctgaacggacagcgattattcatggtgaaatcaaaagaagttggcgagaaaccctcaaacgctgtacccgactggcatcagcattgaagaaaaaaggagtggttcagggaactacggtttcagtgatggcgcccaacgttccggagttgcttgaggcccatttcggcgttttgatgacgggaggggtgttgaacgcgctcaacattcggttggaggcggaaactctggcctacattctggtgcatggagaatctaaggtgttgatcacggatcgggaattttctccagtcatccaaaaagtcctgcaaaaactggaagatcctcctctggtgatcgatatcgatgatccgatggcagaaggcggagaactgcttggggagatggattacgaagcatttttgaaaaccggagatgaaaattttgaatggaatctcccggaggatgaatggcaggctgtcagtctgaattatacttccggaactaccggaaagccgaaaggggtggtttaccatagccgcggagcacatcttttagccatcgacaatatccttgcctgggggatgccgaggcatccggtttatctttggacgctgccgatgtttcattgcaacggctggtgttttccatggaccatcaccctattggccgggactcatgtttgtctgagaaaagtcaacgcagccaacatcaatgattccattgtcaaacatggagtgacgcacctctgcggtgctccgattgtgatgggaatgattgcgaatgctgaggatcaggaccaacgcgtcctttcagaccatgtccagatcatgactgccgcggctccaccgccgcccccggtgattgcaaggatggaggaaatgggttttcaggtgacgcatgtttacgggctgacagaaacctatggaccttcggtggtcagtgcctggcaggaagaatggaatgaattgagtcctacggatcaggccctgaaaaagggaaggcagggggttaactatcctgggttggagggtctgatggtggcagattctgaaac

SEQ ID NO: 307880 - DNA, 652 bp, Unknown
  Bacterial polypeptide expressing nucleotide sequence isolated from the Sargasso Sea
atgaatcaattttcgacagatcttgataaaaataaagctaatttcacacccttatctccattaagttttatcactagagctaaagatatttatccaaattatgaatcagtagtttatggaaatagaagttacacatggcttcaaacatatgatcgttgtactaagtttgccagtgctttgacaaagcaaggtattagtattggcagtactgtatcaattattgctgcaaatactccagaattattggaggcccattattctattccaatgacaggtggcgtcgtaaatacaatcaatacacgattagatgctcagacaattgcttatatcttagaacatagtgatgcaaagatgttaattgctgatactcaattttcaccaacaataaaaaaagcattagatatttatggtaaaaaaatacccataattgatatccatgatgagcaagcaatccttaaagaaggtgagggtgaaaaattaggtgattggacatacgaagagtttttaggaacaggagacgctgactttgattggtctttaccagaagatgagtggcaagcaatctctctaagttatacatcagggacaacagggaaaccaaaaggtgttgtctatcatcatcgtggatcttatttaatgtcaaccaggtagt

SEQ ID NO: 307881 - DNA, 931 bp, Unknown
  Bacterial polypeptide expressing nucleotide sequence isolated from the Sargasso Sea
gatgagtaattttgatacaaacctagataaaaattcagccaattttgttccactatcaccattaagttttataactcgcgtgaaagatatttatccaaactatgactctttagtttatggaaaaagaagttacacttggcttgaaacctataatcgatgtaccaagtttgctagcgcattagcaaaaaaaggaattacaaaaggaagtaccgtttcaatcatagcggcaaatactccagaattattcgaagcacattattctatcccaatgactggaggcgttattaatacgatcaatactagacttgatgcagatacaattgcgtatattctagatcatagtgatgcaaaacttcttataactgatactcaattttcacctacaatgaaaaaggctttaaaaatatatgggaagaatattcctattattgacattcatgatgatcaggcagtttttaaagatggtgagggtgaacaaattggagaaatgacatatgaagaatttttacaaacaggtgatgacaattataattggtctttacctgaagatgaatggcaagcaatctcattaagctatacatcaggcacaactggtaaaccaaaaggtgttgtgtatcaccaccgtggatcatatttaatgtctacaggaagtattacggcatggaacatgcctaataaattaacatttctttatactgttccaatgttccactgtaacggatggggctacccttggacagccgctttaatacatgcaaagattatttgctgcaggtacattgttgcaaaagatatttataatttaatagataaatacaaagtaactcattttggaggcgctcctatagttttaagtttaattgctaatgctgatgaagaagataaaaaagaaataaatcataaagtatatgtattaactgctggtgctcca

SEQ ID NO: 307882 - DNA, 332 bp, Unknown
  Bacterial polypeptide expressing nucleotide sequence isolated from the Sargasso Sea
aatgtcaattttagttaacaaaaatacaaaagtaatatgtcagggttttacaggaaaacatggcacatttcactctgaacaagcaattaaatatggaactaatttagttggaggagtaacacctaaaaaaggtggtcaaatgcatttatcaaaaccagtttttaattctgttaaggaagcaaaagaaaaaactggtgcaaatgcttccatgatttatgtacctgctaagtttgctgcttctgctattatagaagctatagaggcttccatggaattaataacatgtattactgaaggaataccagttttagatatgctaaaggttaaaaaaa

SEQ ID NO: 307883 - DNA, 292 bp, Unknown
  Bacterial polypeptide expressing nucleotide sequence isolated from the Sargasso Sea
ttattagacgaacaaactgaaggtattttaatgataggtgaaattggaggttcggcagaagaggaagcagcgaattttgtaaaaaatcataccataaaaaaaccaatagcaggattcatagcaggtagaactgctccaccgggtagaacgatgggacatgctggcgctattgttagtggtggcagtggagatgctgaaactaaaataaaaacttttgaagaatgtggaattgaagttgctctttctccatctgatttgggagaagctatagttagagcaatgaaaggttgaa

SEQ ID NO: 307884 - DNA, 320 bp, Unknown
  Bacterial polypeptide expressing nucleotide sequence isolated from the Sargasso Sea
cgaagagtttttaggaacaggagacgatgactttgattggtctttaccagaagatgagtggcaagcaatctctctcagttatacatcaggaacaactgggaaaccaaaaggtgttgtctatcatcatcgtggatcttatttaatgtcaacaggtagtgtcactgcttggaatatgacaaataaacttacttttcttgcaactgtaccaatgtttcattgtaatggatgggggtatccatggacagctgcattgattcacgccaaagtagtttgttgtagatacattgttgccaaggatatttataatcttattagataaa

SEQ ID NO: 307885 - DNA, 598 bp, Unknown
  Bacterial polypeptide expressing nucleotide sequence isolated from the Sargasso Sea
aatgaatttacatgagtatcaagctaaagacctcttaagaaagtataatttacctatattgcagggtaaaagctatatagaaaaaattgacaattttagtaaagacatagaaaatattaagggcccaccgtgggtaattaaatcacagatacatgcaggtggaagaggagctggaaaatttttaaaaccatttaatgacaaaggcggtgtgcaaatcagcaatacttctgaagatgctgaaaaaattgctaaggggatgatgggcaataccttagttacaaaacaaacaggaaatgaaggaaagcttgtaaaaagagtttatttagaggctggatgtgaaattgatagagagtactatttaagtattttgcttgacagaaatcagtcaaaattaatgtttatggtctctgatgctggaggtataaatatagaagatgttgctgaaaagactccggaaagaattcattatatccattttgataatttagaaaatattatagtaagtgataatcttcaaaaaaaattaaacttttcaattaatgaatttagtcagtttaaagaaattatttctaatttatgccgtgcatatttgaaatag

SEQ ID NO: 307886 - DNA, 937 bp, Unknown
  Bacterial polypeptide expressing nucleotide sequence isolated from the Sargasso Sea
tatgggtgatttagcgtattggcctgcagccaaacctctttctaaaaaaaatacatttgccaaaaatagagattttattaagaaccttgatcatatagatcaaatttgggaaaaattaaaatttaaatgtggtgatactttagctgtttgcgatttaagagggaaatacaaagaaaaattttcttattctgagctggctgatttaataacaaaagtctctttttctttcgaaaattatggtttaaaaaagggggatgtagttactgtaatatctgaaaattctccaagatggctagcagtagatcaaggcttaatgcgtttaggagctataaatgcagtgagaggtattaattctccttcagtagaattagactatattattgggcactctaattcagtaggactaatagttcaatctaaggaaatttggctaaagttaaacaacaaagaagaattaaaaaaaagactcaaatttataatcaatttagaagatgaacaatttgaaagtttaataagttggagtacattcataagttcagtagaaaaagaaaattcacaaaataataatcttgaaaaatttaatccagaaattgatgacgtcgctactattctttacacttctgggacgaccggaaaacctaaaggtgtgcctttgactcatgcaaattttttacatcaaataatcaatttagcctatatcgctgatccagaaccagggacctctgtattaagtgttttgcctatctggcattcttatgagagaagtgctgaatacttctttttttcatgcggttgttctcaatactatacaattccaaaatttcttaaagatgatattacacaaataaaacctgttgtcatggctactgtaccgagactatgggaagcaatacatgatggtttttttcaggctttgaaaaaaatgcctttcaaaaag

SEQ ID NO: 307887 - DNA, 726 bp, Unknown
  Bacterial polypeptide expressing nucleotide sequence isolated from the Sargasso Sea
gatgaataatttcgatacaaatcttgataaaaatactgctaactttgttcctttatctcccttaagttttatttctcgtgctaaagatatttatccaaattatgagtcacttgtttatggtaaaagaagttatacttggaaagaaacctataaccgttgtacgaaatttgctagcgctttagaaaaacaaggtattggtaaaggagatactgtttccataattgcagctaatacacctgaaatatttgaggctcattattctattcccatgatcggtgctgtaattaatacaattaatacaagattggatgcagaaacaattgcatacattctagatcatagtgatgcaaaattattaatcacagattcacaattttcacctaccatgaaaaaagctttaagcctttatggaaaaaatattcctattattgatattcatgatgatcaagcattatttaaagaaggtgagggtgaaagaataggtaaatggacttatgaagattttcttttaactggagatgataattttgaatggtctttacctgatgatgagtggcaggctatctctttaagctatacctcaggaacaacaggaaaacctaaaggtgttgtctatcatcatagaggttcttatctaatgtcaacaggtagtgtaacggcatggaatatgactaataaattaacttttttatatacagtgccaaatgtttcattgcaatggatggg

SEQ ID NO: 307888 - DNA, 890 bp, Unknown
  Bacterial polypeptide expressing nucleotide sequence isolated from the Sargasso Sea
ttttagagcaattaaaaaagaggatcccgaaggtaaatttttctcaaaatatgacctaagcagttttgaaagcttatttctggcaggagagagagctgatccagatactattaagtgggctgagaatttgcttaaagttccagtgatagatcattggtggcaaacagagactagttgggcgattagctcaaattgtactggtattgaaatgatggaaacaaaatatggttcagcctgtaaggctgttcctgggtatgatgtaaaaatcatcaagcctgaccaatctttggcaaacccaaatgagatgggagatatagttgtgagactcccgttgcctccaggaacatttccaacattatggaatgcagacgaaagatacaaagaaaattatatgtctaattatgagggatactaccaaacatatgatgcgggtcacatagatgacgacggttatatttggatcatgtctagaacagacgatataataaatgtagcaggtcatagattatctactggagccatcgaagaagttttatcagaacatcaatctgttgcggaatgtgcagtacttggaattgcagataaattaaaaggtcaattacctatagggttagtggttttaaaatctggtgtggataaagataatgaaactatttcaaaagaatgtgttcagatggttagggataaaataggcccagttgctgcatttaaagttgtgatagttattaaaagattaccaaaaacaagatcaggtaaaattttaagagggaccataagaaaaattgcggatggtgttgattataaagtgccacctacaattgatgatcctgcaatattaacagaaataaaagaagatttaattaaacataaaattttaaataatggttaaa

SEQ ID NO: 307889 - DNA, 1494 bp, Unknown
  Bacterial polypeptide expressing nucleotide sequence isolated from the Sargasso Sea
tgttggtctttatccaacaaatccagcttcagaagttgaatacttactatcccattccgaatctaaaattctctttgccgaagatcaagagcaagttgataaagcacttcaagtaattgaaaatttacctttgctagaaaaaattgtttattttgaagaccgtggcttatacagttacgatcatccaaaactcatgagatttgatgagttccttgaaattggaaaatcagaatatgaatcatttcctgaatatgttgatcagcaacttgaggaaattaatgatgaagatgtcgctttcttagtttatacatcaggtacaactggaaagcctaaaggatcaatgattactcatggaaatataagctgggtagcttcacagattccaaatttttcattagttgaaaacgtaaaagcaaaagatccgcaatttttatcttatcttccgttgtgccatatttttggaaggttgactgatttattaattgcatcacatacaatggcgacaattaattttgcagaatctattgacactgttcaaatggacttagcagaaatacaacctaccatttttcctgctgtaccaagaattttagaaagaatgcattctggtgcgatggttaaaatgagagatgcatcattcatcaaaaggcaactatttaagatttcaatgtatcttggcaatataggtgctgaaagaaaacttaaatatggtttcaatgatgtttttgcaaatttcttaatatcaattggctggcttttatcttttagaacattaaagaaaaaacttggattaagtaaagccgagacagctatttctggtgcagctcccatagctcctgaaattttgaaattttttatggctttaggggttccaattttcgaaggatacggtatgactgaaaattgtggatatgcatccggaaacaatgataaaaaaatgaaactaggtacggttggtgtaccaaaccatggtatggagataaaacttgctgaagatggagaaattctaacaagaggaggagcagtatttaaggggtatttcaagaatgaagaagcaacaaaagaaacaattgatgaagatggttggcttcataccggcgacgttggtgtttttgaaggagagtttctcaaaatagttgacaggaaaaaagatattattattactagcggtggtaaaaatgtatctcctcaggaaattgaaaacaaaattaaaatttcaccatttataaaagatgcgattgtaattggagataagagaaagttcctgtctgctttagttgctattgagtttgatactgtatcaaattgggcactaagaaaaaatattgcacatactacttatagagatctttctgaaaaacaggaagtaaaagatttagtgtggaaagaaattgttaaagcaaatgaacagacatcttcactagaaattagaaaatttagaatgatacctaaagaattagaccatgaagatggtgaattaactgcaactcaaaa

SEQ ID NO: 307890 - DNA, 1165 bp, Unknown
  Bacterial polypeptide expressing nucleotide sequence isolated from the Sargasso Sea
gggtattcagcgtgatcaaagtatagctatcgctgcgccaaatagtactgcttcttgtttaatgttcatggctgttgtttgttccggctttgtagctgttccattaaacttagtcgccggaagcgcaatattagcttatacaattgaacattctgaggccaaatttatttttgtagcagacgattgcaaagatctgatcgattcagcggtggctcaacaaaatagtagtgtgaagttaataaagcttgatcctgttaggggaccagacttagccgcacttccttcggaagtaaaaaagtttcaattagaagggattgactcaaaacccactgatattgctctactcatgtatacctcaggaacaactggaaaacctaagggtgtcatgttgagccacgcaaatttactcgcggcaggtcgatttatatctaccggtcatgaaatagatagaaatgatagtggtctgtgcgtactgccaatttatcatataaatggaatgtgtgttactgtcatgggcacaattgtatcggcgagcaccttagttattccacacaaattttccgtaaattcattttggaagactatagctaagtttaagtgctcttggttttcggcagtgcctacccaattctcatatattttaaataatgaggaagttccggaagatttatcatcgcttcgttttgctcgctcagcatctgcccctttatcacctgatattcataaaaaatttgaaaagcggtttaatatcccaatcattgaaactatgggattaacagagactggttctcagataacgacaaaccctatgccaccaggacaacgtaaaattggatctccaggaaaggcttatggcaaccagattatgattggtgatgatcaatttgaagccttacccgcaggtgaagcgggagaaatattggttaagggcgataatgtcatgcaggggtattttaaacaacctgaagaaacccacaaaacaattttaggaaatggttggctacgaacgggtgatttagggtatttagatactgatggttatgtatttgtgtcaggcagaataaaggaattaatcattaagggtggcgaaaatattgctccgagagaaattgatgaagcgctgttgacccatccaggtatattagaggctgcggcctttgcggtt

SEQ ID NO: 307891 - DNA, 937 bp, Unknown
  Bacterial polypeptide expressing nucleotide sequence isolated from the Sargasso Sea
aaaattatttcagattataaagtaaagtcccttttcacagcacccactgcttttagagcaattaagaaagaagatcctgacggtaagtttttctctaaatacgatcttagtaaatttgaaagcttatttcttgctggagaaagagcagatcctgacacaattaagtgggcagaaaatttactcaaagtacctgttattgatcactggtggcaaactgagactagctgggcaattagttcaaattgtactggaattgagatgatgaagacaaaatatggatctgcttgtaaagctgttccaggttacaatgttaaaattattaaaccagaccaatcattagcgaacccgaatgaaatgggtgacatagtagttaaacttccactgcctcccggaacatttcctacactttggaatgcagataaaagatacaaagaaaattatatgacaaattatgaagggtattatcaaacatatgatgcaggtcacattgatgaagatggttatatttggatcatgtctagaacagatgatattattaatgttgcaggacataggttatctactggcgcaattgaagaagttttatcagaacatcaatcagttgcagaatgtgcggttctaggtattgcagataaattaaaaggtcaattaccaataggtctagttgttttaaaatcgggagtagataaagataatgaaactatttcaaaagaatgtattcaaatggttagggataaaattggaccagttgcagcatttaaagtagtaattgtaataaaaagactacctaaaactagatctggaaaaattttaagaggaacgatcagaaaaattgctgataacgttgagtataaagtacctccaactattgatgatcctgctatactaacagaaataaaagaagatcttattaataataatttactaaaaaactaaa

SEQ ID NO: 307892 - DNA, 319 bp, Unknown
  Bacterial polypeptide expressing nucleotide sequence isolated from the Sargasso Sea
tcatttagggatattatagaaaagtttgaaacagatgatgaaacagacttaattttaatgataggtgaaattggcggtccacaagaagttgctgcaggtgaatttgcaaaagaaaatatgaaaaaaccagtcgtagcctacatagctggtctgacggctccaaaaggtagagtgatggggcatgcaggtgcaatagtctcagcctatggggaaagtgcaattgaaaaagttgaaattttaaaagagtgtggaattacaatttctaaaaatccatctgttatgggtgatacagtaaaatcggttctagaaaaaatgtaat

SEQ ID NO: 307893 - DNA, 1210 bp, Unknown
  Bacterial polypeptide expressing nucleotide sequence isolated from the Sargasso Sea
tgaaaaaaacgaagcgaattatgtacccctaacaccattgtctcacttaagacgtgcttcaactgttttttcagataggactgctgtaatttatggcgcttaccgaaaaagttattctgagtactaccagcgttgttcccaacttgctagcgcactggcaaaaattggaattcaacccggtgaagttgtagcaactgttttacctaacattcctgctcaagctgaagcacattttggcgttcctgcatgtggagcagttttaaatacaattaatacgcgtttagatattggtaccatttcatatatttttgaacacggtgaggccaggttggtttttgctgatacacaatttctatcagtcgtcgaagcagctatagaaaaactttctggcccgcgccgaccaacgttaatcgaagtacccgatgactctgcaggctttcccgcaacaggaaagtacgaaacatatgaaagttttcttagaaccggaaatgtagattttgattggataatgccacaagacgagtgggaaagtttagctctaaattatacatctggcactacgggaaagcctaaaggcgtagtttatcatcacaggggggcatatttgatgacgatgggtaccatcgttagctggcggatgactttaaacccagtattcatggcaattgtaccacttttccattgtaatgggtggaatcacacttggatgatgccagttctaggaggatcacttgtatgttgcagggatattacttctcaagcgatttatgatgccatagctgatgagggagttcagtactttggcggagcacctatcgttttgaatatgatagttaacacaaaggagactgaacggcgcgactttgatcatacagtggaagttttcacagctggcgcaccacccgcacctgcaactttgcttaaaatagaaaatttaggctttaacgttacgcaggtttacggcctaacagaaacttacggtcatgtgacggaatgttattgggaaactgagaaatggtccaaactagaaggagagcaacgcgcttctatcaaagctagacaaggtatagcttttcctatgatggaacacattacagttatggatcaatcaatgtctgacgtccccaaagatggtaaaacacaaggggaaataatgatacgaggcaattcagtaatgaaagggtattttaaaaaacaaggaagcaactaa

SEQ ID NO: 307894 - DNA, 225 bp, Unknown
  Bacterial polypeptide expressing nucleotide sequence isolated from the Sargasso Sea
tagttctggtaaatatttttggcggtattgtgagatgtgatttaattgcagaaggtattgttgccgctattaaagaagttgaagtaaaaattccagttgttgttcgcttggaaggtaataatgctgacattggatcaaaaattttatctaaagcaaaaatcaagattgaaagtatcaacgatttagctgaagctgctaaaaaagcagtcttacttgcaaaatgag

SEQ ID NO: 307895 - DNA, 1708 bp, Unknown
  Bacterial polypeptide expressing nucleotide sequence isolated from the Sargasso Sea
atgaacgaacgccattatccgcattggccgccgcacgtgccaaagcatctgacgctgcccgaaaccaatatcttctataacgccgaggtgtcggcggcacgctatcccaacaagccgttcatcatcttctatgacacgccggtcacgttcgccgcgttcaaggacgaagccgagcggattgcgggatttctgcaacaggagtgccacgtcaaggccggcgaccgcgtgctgctctatatgcagaacagcccgcaatggatcatcgcctactacggcatcctgcgcgcaaacgccgtcgtggtgccggtcaacccgatgaatatgagcggcgaactggcgcattacgtcgaggatagcggtgcgactacgatcattacaccgcaatgcctgttcgcgaacgtcgcgccgctgatcggtaccggcccggggcggggcatcgagcacgcgatcgtcgcaacctatagcgactacgtgaaggggccatcgtcgattcccgtgccggaactggtggcggcgccgcgcaagaccttcgatatgccgggcgtcacgccgtggcgcgaggtgctcgaaaaacatctcgcgccgggcccgctcaccacaggtccagatgatctgtgcgtgatgccttacacctccggcaccaccggtaagccaaagggctgcatgcacacgcaccgcagcgtgatgagcacgctgctgggcggttgcgtgtggttctcggcgccctcggacggtgtgtatctctcggtattgccgttgtttcatgtgaccggcatgcaaggcggcatgaacagcgccgtgttctccggggcaaccattgttatattgcctcgctgggatcgcgaagcggcggcgctatgcatgcagaaatatcgcgtgagcgcgtggcagtcgatcacggcgatgatggtcgattttctgtccaacccaaaactggacgaatacgatctgtcgagcctgacaggcgcgcgcggcggcggcgcggcgatgccggaggccatcgccagaaagctcaagtcacttacggggctcgattacgtcgaaggctatggcatgtccgagacgatcgccggcacgcacatcaatccgccgcatcggcccaagccgcagtgtctcggcattccggtgttcgacgtggactcgcgcgtgatcgatccggtcacgctgcaggaactcccacaaggcgaaaccggcgagatcatcgtgaatgcgcctcaggtgatgcaaggctactggcgcaatcccaaggcgacagacgaagcgtttatccaactcgacggcaagcgttttctgcgcaccggggatctcggtcatatcgacgaggacggctatttcttcatgacggaccgccttaaacggatgatcaacgcatcgggctacaaggtctggccggctgaagtcgaggcgctgatgtaccggcatcccgcgatacacgaggtgtgcgtgatcggcgtgaaggacgcgaagcgcggagaaaccgtcaaggcgctggtagtgcccgccgcggcgcatgccggtgcgatcagcgagcaggagattgtcgactgggcgcacgaacagatggcgtcttacaaggcgccgcgcatcgtcgagttcgtgacgtcgctgcccaagtcgggtagcggcaagattctgtggcgcaagttacaggaagaggatgcggcgcgcacggcggcggccagtcagagcgaaggcggcgcctcatagc

SEQ ID NO: 307896 - DNA, 382 bp, Unknown
  Bacterial polypeptide expressing nucleotide sequence isolated from the Sargasso Sea
aactactgatttaggatttggacaaagtagttgtgttggcataggtggagatcctattccaggttcttcttttatagatatgcttaaattatttgaagaagatgatcaaactgaagctattgtaatggttggcgaaattggaggtaatgctgaggaatctgctgctgaatttattaaaaataatataacaaaaccagtcatatcatatattgcaggtaaaaccgcaccagcaggcaagcgaatgggtcatgctggagctattattgctggtggcaagggtactgcagaagataaaataaaaaaattaacagagtgcggagttcacgtagcagataatttagtttctattggttcaaaagttgatgagattctgaaatcttaa

SEQ ID NO: 307897 - DNA, 241 bp, Unknown
  Bacterial polypeptide expressing nucleotide sequence isolated from the Sargasso Sea
aatgagtatcttagttaacaaagatacacgtgttatttgtcaaggttttacaggtgctcaaggcacttttcattcagagcaatcgataaagtatggtacgaaaatggtgggaggtgtgactcctggcaagggaggtcagaagcatctgggattgcctgtttttgataccgttaaagaggctagggagactactggtgctgaggcttccgttatttatgtgcctgctcccttttgtaaagag

SEQ ID NO: 307898 - DNA, 1378 bp, Unknown
  Bacterial polypeptide expressing nucleotide sequence isolated from the Sargasso Sea
ttgaaaaagattaatccagaaattgatgacgtcgctactattctttacacttctgggacaacaggaaaacctaaaggtgtgcctttgactcatgcaaattttttacatcaaataatcaatttagcctatatcgctgatccagaaccagggacctctgtattaagcgttttgcctatctggcattcttatgagagaagtgctgaatacttctttttttcatgcggttgttctcaatactatacaattccaaaatttcttaaagatgatattacacaaataaaacctgttgtaatggctactgtaccgagactatgggaagcaatacatgatggtttttttcaggctttgaaaaaaatgccttccaaaaagcaaaaacttattaagtttttgataagtaatagttcggttttcaaaagaagtcttagaaagataagaaatatagatataaatcaaataacttttaaatcaaaaatccccttactgggttctgttattagccgatatcctttacataaattgtctactatttttttatggccgaatattcttagacaactatgcggagaaaaactgaaatttcccattaacggtggaggtgcattgccagaacatgtagatcttttttttgaatctttaggtgtagatgttttggtgggatatggactcacagaaactagtccagtattaacttgtaggagaagagaattaaatgttagaggatcatctggtcagcctctagcatttactgaaatcaaaatagtgaatgatgataaaaaaaagattctgaagttcagagaagtcggaaaaattcttgttagggggccacaagtaatgaaaggttatcttaataatgaaatagctacaaaagatgttttatccaaggatggttggtttgatactggtgatttaggttttctaataccaaatggttctctctttataacaggaagagccaaggatacaatagtgctatcaagtggtgaaaatatagaaccgaatccgctagagactgaaatccttagttctgagtttattaatcaaattcaactagtaggacaagataagaaatgtttaactgcccttatagtgcctaatgtcgaattagttaaaaacaagtttttggaagaagacatatcaaaattaaacctggataagaatattggtatattctttaaatcacaaattaataatttgcttaaaagtcgattaggagcaagatcagaagaacaaatattagattgttattttgttgatgcctttactttagaaaatgggttgttaacacaaactcttaaacaaaaaagaaaagaaatagaaaaaaagtattcattacaaatagaaaatatgtatgaacagaaatttagtaagaaaaattgat

SEQ ID NO: 307899 - DNA, 763 bp, Unknown
  Bacterial polypeptide expressing nucleotide sequence isolated from the Sargasso Sea
atgaataattttgatacaaatcttaataaaaatagtgctaattttgtcccattatcccctttaagttttatttctcgtgccaaagatatttatccaaattatgagtcactcgtttatggtaatcgaagctatacttggctagaaacttataatcgttgctcaaaatttgctagcgctttgcaaaaacagggaattagcaaaggggacactgtgtccattattgctgcaaatacaccagaaatatttgaggcccattattctattccaatgattggtgctgttattaatacaattaatacaagattagatgcagagacaattgcatatattttagaacacagtgatgcaaaattattaatcactgacacacaattttcacctactatgaaaaaagctttaaacctttatggaaaagaaattcctattattgatattcatgatgaacaagcaattttcaaagagggtgagggtgaaagaattggtaagtggtcatatgaagaatttcttttaactggagatgataattttaactggtcattacctgatgatgaatggcaggcaatatctttaagttatacatctggcacaactggaaaacctaagggggtcgtttatcatcatcgtggttcttatctaatgtcaactggaagtgtaacggcttggaatatgccaaataaactaacttttttatatacagtaccaatgtttcattgcaatggatggggctacccatggacagctgcattaattcacgcaaaagttg

SEQ ID NO: 307900 - DNA, 286 bp, Unknown
  Bacterial polypeptide expressing nucleotide sequence isolated from the Sargasso Sea
catgagcattctagtaggtaaagacaccaaagttatatgtcagggtttcactggtggacagggtactctgcatagcgaggcatcgatagcatacggaacaaagatggtagggggtgttactcctggtaaaggagggtctgagcatttaggtctgccagtatttgataccgtcagtgaggctgttgataagacaggcgcgactgcatcagtaatctacgtgccagctggattctgcaaggattcgattttagaggcgctagatgctggtatagagttgattgtctgt

SEQ ID NO: 307901 - DNA, 1006 bp, Unknown
  Bacterial polypeptide expressing nucleotide sequence isolated from the Sargasso Sea
actctttaaaggatgtactactattttatttgaaggaaagcctgttggaacgcctgacgcaggagcattttggaaaataatttctgattataaagttaagtctttatttactgcaccaactgcttttagagctattaagaaagaagatccagaaggtaaattcttttctaaatatgatttaagttcatttgaaagtttatttttagccggtgaacgagctgatcctgacactattaaatgggcagagtctcttttaaaagttccagtaattgatcactggtggcaaactgaaactagttgggcaataagttcaaattgtactggcatagaaatgatgaaaacaaaatatggatctgcatgtaaagcagttccgggatatgatgtaaaagtaatcaaaccagataatactttagctaaaccaaatgaaatgggagatattgtagttaagcttccattgccgcctggaacttttccaactttgtggaatgctgatgaaagatataaaaaaacttacatgacaaattatgatggatattatcaaacttatgatgcaggtcatattgatgaagatgggtatatatggattatgtcaagaacggatgacattattaatgtggctggtcatagactatctacaggagcaattgaggaagttttatccgaacatcagtcagttgctgaatgcgcagtaattgggattgcagacaaattaaaaggacaactaccaataggtttgatagctctaaaagcgggagttaaaaaggataatgaaacaatatctaaagaatgtataaaaatggtaagagataaagtaggacctgttgcagcatttaaaactgcgattgtagttaaaagacttccaaaaactagatctggaaagatacttagaggtacagttagaaaaatagcagataaagaggagtataaaatgcctgcaactattgatgatccagcgattttaactgaaattaaagaagatttaattaaaaataatattcttaaataa

SEQ ID NO: 307902 - DNA, 547 bp, Unknown
  Bacterial polypeptide expressing nucleotide sequence isolated from the Sargasso Sea
aaattaatagcattagatgcgaaaattactattgatgatgactcattatttaggcataaagatttagaagaattgtttgatgaatctcagataaataagtcagaacttgatgctcaaaaaaatgatcttgcttatataaaattgggtggaggtgaggttggttgtatggtaaatggagctgggcttgcaatggcaacaatggatataactatgaaggcgggtgcaatgcctgcaaattttttagatgttggcgggagtgcttctgaagaaagaattagtcaagcatacaatattattgcatctgatgaagatgttaaattgattttagtaaatctttttggtggaattttaagatgcgatgttgcagctcagggcattattgagggatttaagttaaatcaaaaatctgtaccgatggtggtagttttgcgaggaacaaattctgaagaggccaaagaaatattgaaaggttcggatatggaaatttacttttctgatgacttgccaagtgctgcaagggaaataaataaaaggttaggaagatgat

SEQ ID NO: 307903 - DNA, 463 bp, Unknown
  Bacterial polypeptide expressing nucleotide sequence isolated from the Sargasso Sea
gatgataaatattcttaataaggaatcgaacaatgtgctggttcagggactgggtagagatggaagttttcaatctcaaaaatgcattgattttggaactaaaatagtttcaggagttcatcctactaaagctggagacaactttaatggtataccaatttatggaagtgttaaggaggcagtaaaaaaaacttctcctgatatagggttaatatttgttccggcaccatttgcatctgatgcaataattgagcaagtagactccggtattgaaacaatagtttgcattacagagggaattccaataaacgatatgttgaaagtaaataattatattgaaggaaaaaatgtaaggctgttaggtccaaattgccctggatttttaattcctagaaaaaaattaaaagttggaataatacctggaagtattgtttctgacggaaaagttggcgttgtatcgagg

SEQ ID NO: 307904 - DNA, 382 bp, Unknown
  Bacterial polypeptide expressing nucleotide sequence isolated from the Sargasso Sea
atgtcggttttggtaaataaaaatactaaagtaatttgtcagggatttactggctcacatggaacatttcattcagagcaggctataaaatatggaaccaatcttgttggtggagttacgccaaagaaaggtggacaaaaacatttagacagaccagtttttaatagcgttttagaggcaaaaaatgaagtaggagcagatgcaactatgatttatgtacctgctaaatttgcagcagcagcaatcattgaagctattgatgcatcagttgaacttattgtttgtataacagagggaattccaattcaggatatgcttaaggtcagacaaaaattaagtggatctaaatgcagattaattggacctaatgtccaggaataat

SEQ ID NO: 307905 - DNA, 890 bp, Unknown
  Bacterial polypeptide expressing nucleotide sequence isolated from the Sargasso Sea
atgcttgggtgtgcaagattggtgcatacactctgtagtctttggtggatttgcatctactgaacttgctagcagaattgatgatagtaaagcaaaactattagtgactgcttcatgtggttttgaacctggaagaacagttgagtataaacctttagttgatgaagcaatcaaaatagcaaatcataaaatagagaagatgattttatttcaaagatcaggtcacgaggtaaaattaaatgctcctcttgaaattagctgggacgaagtagtgtccattgcagaaccagctgattgtgttgagatgaactccaatgagtttgcatatattttgtatacctcaggcacaactggaactccaaaaggaatagtaagagatgttggtggtcacattgttgctttgaagtggaccatgaaaaatatttataatattgataccaatgatatctggtggtcagcgagtgatatcggatggattgttggacactcgtatattgtttacgcccctctatttaaaggatgcacaacagttttgtttgagggtaaaccagttggaactccagatgctggagcattttggaaaattatatcagattataaagttaaatctttgtttactgccccaactgcatttagggcaatcaagaaagaagaccctgagggcaagtttttttcgaagtatgatctaagtagttttgaaagtttatttttagcaggtgaaagagctgatccggatacgataaaatgggctgaaaatttacttaaagttccagtgattgatcattggtggcaaactgaaacgagttgggcaattagctcgaattgtactggaattgaaatgatggaaactaaatatggctcagcttgtaaagctgttcctggttatgatg

SEQ ID NO: 307906 - DNA, 846 bp, Unknown
  Bacterial polypeptide expressing nucleotide sequence isolated from the Sargasso Sea
tacactcagttgtctttggtggatttgcttcaaatgagttagcaagcaggattgatgatagtaaagcaaaaattttaattaccgcttcttgtggatttgagcctggacgaactgttgaatatagacctttagttgatggagcattaaaacttgcaaaacacaaagttgaaaaagtaatcctatttcaaaggaatgattatgaagtaaaacttaactccccacttgaaattagttgggaggaagcacttgttaatgccaaaaataaagattgtgttgaaattggagcaaatgagtttgcctacattttatatacatcaggaaccacaggtattccaaaaggaatagttagagacgtaggaggtcatatagttgctcttaaatggacaatgaaaaacatttataatatcgatgagaatgatgtttggtggtcagcaagtgatattggttggattgtgggacactcatacattgtttacgccccattgtttaaaggatgtacgacagttttatttgaagggaaaccagttagtactcctgatgcaggagtattttggagaataatttcagagtataaaattaaatctttgtttacagctccaacagcatttagagctattaaaaaagaagacccaaaaggaaattttttttctaaatatgatttaagttcttttcaatctttatttctagcgggagaaagagctgatcctgatacaataaaatgggctgaaaatcttttaaatgttcccgtcatagatcactggtggcaaacagaaactagctgggctataagttcaaattgtgtagggatagaaatgcaaaaaacaaaagtatggttcagcatgtaaa

SEQ ID NO: 307907 - DNA, 765 bp, Unknown
  Bacterial polypeptide expressing nucleotide sequence isolated from the Sargasso Sea
aatgtctataatcattcacaaaaatacaaagattttagtgcaaggttttactggaaaaattggaagctttcatgctgaagaaatgattaagtatggttcaaacgttgttggtggagtaacacctggtaaaggtggtatgactcatttaaatcttcctgtttttaatactgttaaagaggctgtaaataaaacaggtgcatcaacatcaattttatttgttcctccagcatttgcagcagactctgccatggaagcggctgatgcgggtattaaaacttgtgttgctattactgacggcattccttctcatgatatggttaaaataaaaagatatatgagaagatatccaaaagataaaaaaatgggattagtcggtccaaattgtgcaggaataattagtcctggtaaatctatgttaggtattatgcctggtcatatttacaaagagggtaaaataggaatagttagtagatctggtacattgggatatgaagctgcacaacaacttaaagatttggaaattggtgtttcaacaagtgtaggtataggaggcgatcctataaatggaagttcttttagagatataattgaaaagtttgaaaatgatgatgaaactattgcagttttaatgataggtgaaataggtggcccacaagaagttgaagctggacaatttgctaaagaaaatatgagtaaaccagtaattgcttatatagcaggactaactgcacctaaaggtcgtgtaatggggcatgctggtgctat

SEQ ID NO: 307908 - DNA, 340 bp, Unknown
  Bacterial polypeptide expressing nucleotide sequence isolated from the Sargasso Sea
atgtctattttgattgataaaaatacgaaagttatttgtcaaggttttacggggactcatggtacttttcactcagaacaagctttaaaatatggaacaaaattagttggaggcgtgacacctaaaaaaggaggacaaaaacatttagatctccctgtttttaatactgtggcggaggcgaaaaagataactgatgcaaacgcaactatgatttatgtacctcctaaatttgctgctgatgccataatagaggcaataaatgctaaaattgaattgatagtatgtataactgaaggaatacctgtaatagatatgttaaaagtaaaaaagggaacttgca

SEQ ID NO: 307909 - DNA, 445 bp, Unknown
  Bacterial polypeptide expressing nucleotide sequence isolated from the Sargasso Sea
ttacctgtaaaggttggaattatatctagatcagggactttaacttatgaagcagtaaagcagacaacagatcttggctttggacaaacaagttgtatcggaataggaggtgatcctatacctggaaccagttttatagatgttctggatttattcgaaaaagataagtcaactgaggctattgtaatggtgggcgagattggaggaacagctgaagaagcagcagcagagtttatacaatctaatgtgactaagcctgtcgtatcttatatagcaggtgtaacagctcctcccggaaaaagaatggggcatgcaggggcaataatcgctggtggaaaaggaacagcagaggaaaaatttaaagcgttagaactggcaggtgtttatactgtaaagagtcctgcagaaataggaaaaggagtagctgaggttacaggatggtaga

SEQ ID NO: 307910 - DNA, 363 bp, Unknown
  Bacterial polypeptide expressing nucleotide sequence isolated from the Sargasso Sea
aatcaacatgtataggtataggtggtgatccaataaatggcacaaattttattgattgtttagatttatttttaaaagatgaggaaactaaatcaattttaatgattggtgaaataggaggatcagctgaagaagaagcagctgaatttgtaaaaaatcatgacataaaaaaacccatggttggttttattgcaggagttacagcaccaccgggtagaagaatgggacatgcaggggccataatatcaggtggtaaaggtggggccaaagataaaatcagaaaaatggaagattgtggcatagaagtagccacatccccttcagaaattggaaaaacattgttaaataaattgtccaattgaa

SEQ ID NO: 307911 - DNA, 370 bp, Unknown
  Bacterial polypeptide expressing nucleotide sequence isolated from the Sargasso Sea
gatgtctgtaattataaataaagaaactaaagtcatatgtcaggggtttacaggatcccaaggaacttttcattcagaacaagctattaagtatggcacaaatatggttggtggagttactcctaataaaggaggaactacccatcttaatcttccagtctttaatagtgtttctgaggctaaagataaaacgggagcagatgcttcagtaatatatgttccccctgcttatgccgctaatgcaattatagaggcaatggaaagtgaaatcgatttaatagtttgtataactgaaggcattccagttatggatatgatgaaagtaaaggacaaactatctaactctaaatcaagattgattggtccaaat

SEQ ID NO: 307912 - DNA, 456 bp, Unknown
  Bacterial polypeptide expressing nucleotide sequence isolated from the Sargasso Sea
gacatatttataaagaaggacgtgttggaataattagtaggtcaggaacattgggatatgaggcagctcaacaacttaaagatttaaatattggtatttcaacaagtgtgggtataggcggtgatccaattaatggaagttcatttaaagatattatagggaaatttgaagaagatgatgaaacagatgcaatactaatgattggtgaaattggtggaccacaagaagttgcagctggtcaatttgcaaaagataatatgaaaaaacctgtaatcgcctatattgctggtcttacagcgccaaaaggaagagttatggggcacgctggtgctatcgtgtcagcgtacggggagagtgcagttgaaaaagtagaaattttaagggaatttggtgttacaatatcaaaaaatccctcagtaatgggagacactgttaaagaagttttaactaaataaa

SEQ ID NO: 307913 - DNA, 613 bp, Unknown
  Bacterial polypeptide expressing nucleotide sequence isolated from the Sargasso Sea
aatgacagtattaattgataaaaatagtaagattattattcaaggttttacaggaaaaatgggctcatttcatgcagatgagatgattaagtatggttcaaatgtcgtaggtggagttacaccaggaaagggtggctctaagcacctaaatttgccagtgtttaatacagttaaagatgcagtaagtgaaacaggagctgatgcatcaatcttatttgtaccaccagcttttgcagctgactccgcaatggaagctgcagatgcaggaattaaaacatgtgttgcaattgtagatggaataccttctcacgacatgatcagaataaaaaggtacatgagaagatacactaaaagttctaaaatgacattagttggaccaaactgtgcgggaattattagtcctggaaaatcaatgttaggtataatgcctggtcatatttacaaagaaggtagaattgggattataagtagatcaggaacattgggatatgaggctgctcagcaacttaaaaatttaaacattggagtttcaactagtgttggtattggtggtgacccaataaatggaagttcatttagagatataattgaaaagtttgaaacagatgacgag

SEQ ID NO: 307914 - DNA, 367 bp, Unknown
  Bacterial polypeptide expressing nucleotide sequence isolated from the Sargasso Sea
tttggacaaagtagttgtgttggcataggaggggatcctgttccaggatctagtttcattgatatgcttggactattcgagtctgatcctgcaacagaggctattgtgatggtcggtgaaataggaggaacagcagaagaggcagcggcagaatttattcaaagtgaagtatcaaaacctgtcgtctcttatattgcaggtgttactgctccttcaggtaagagaatggggcatgcaggtgccataattgctggaggtaaaggaacagcagaagaaaaatttaaagcgctggaagctgccggagtacatacagtcagaagtccagctgaaataggttcaggtgtaggagaaataacagggtggtaaa

SEQ ID NO: 307915 - DNA, 766 bp, Unknown
  Bacterial polypeptide expressing nucleotide sequence isolated from the Sargasso Sea
aatgagtatattaattgatagaaataccccagtaattgttcaaggtataactggtaaaatggcccgctttcatactgaagacatggtgaagtatggtactaatgttgttggtggagtagttcctgggaaaggtggtatggaggtagaaggtctgccagtattcgatactgttgctgatgctgttgaaaatactggtgcagaagcaagcctagtgtttgttcctccgccttttgctgctgatagcataatggaagctgcagatgcgggaataaagtatagcgtatgtataactgacggtattcctgcgcaagatatgatacgagtgaaacgatacatgtatagatatccattagaaagacgcatggttttgactggtccaaattgcgcaggaacaattagtccaggcaaagcattacttggaattatgcccggtcatatttaccttcaaggaaatattggcatcgttagtcgctcaggtactctgggatacgaagctgctgctcagttaaaagcacatggtattggtgtttctacttcagttggtattggcggtgatcctataaacggttcatccttcaaagatattctgcaacgctttaaagatgatgatgaaactgatgttatttgtatgattggtgagataggtggaccacaagaagcagaggctgcagcatacttaaaggaacatattaagaaacctgttgttgcctatgtagctggcatgactgcaccaaaagggagaactatggggcacgccggtgcaatt

SEQ ID NO: 307916 - DNA, 409 bp, Unknown
  Bacterial polypeptide expressing nucleotide sequence isolated from the Sargasso Sea
tatgtcgattattattaataaaaatacaaaagttatatgccaaggctttactggatcacaaggaacatatcattctcagcaagctatagattatggaactcaaatggtcggaggagtaacacctggtaaaggaggatctacgcatttaggcctacctgtttttaattcagtcaaagaagctaaagatcatactcaagcagatgctaccgttatcttcgtccctgctaaatttgcaacgcaagcgattcatgaagccctagatgcaaatataaaaattattacatgtatcactgaaggtatccccgtgcttgatatggtggagataaaaaaaagaattcttgaacaaaaaacatattttatcggacctaactgcccaggcttggtaactcctggtgaatgtaagataaaa

SEQ ID NO: 307917 - DNA, 928 bp, Unknown
  Bacterial polypeptide expressing nucleotide sequence isolated from the Sargasso Sea
gtaattacaatgcttgcatgtggaagaattggagcagtacactctgttttgtttggtggctttgccgcaaatgaacttgctagcagaattgatgactcaaaagcaaaacttctagtaaccgcctcatgtggttacgaaccaggaagaactgttcattataaaccattagttaacaaagctctcgagctagcaaagcataaaccaagtaaatgtataatttttcaaagagaaaaagataaagccgagcttaatagtaaaatagatatcacttgggatgatgcacacaaagatgcaaaacctgctgagtgtgaaaagatgaatgctaatgattacgcttacatactttatacctcaggcaccacaggtctaccaaaagggatcgtaagagatattggcgggcacatagttgctctgaaatggacgatgaaaaatatttacaatattgatcaagatgatgtttggtggtctgcaagtgatattggatggatcgttggtcactcttatattgtctatgctccgcttttttacggatgcacgacagtattatttgaagggaaaccagttgggacccctgatgctggagttttttggagagtgatatcagaacataaagttaaatctcttttcacagctccaacagcaattagagctattaaaaaagaagatccaaatggtgaattctttaaaaaatatgatttaagtaaatttgataaactatttttagcaggtgaacgagctgaccctgataccattaaatggtttgaaaaattatctaactcacctgtaatagatcattggtggcaaactgaaaccagctgggcaataacatctgactgcactggtatcgagtcttttccagtgaaatacggttcagctttcaaacctgtacctggttatgatttaaaagttttaagttctgaagggtaag

SEQ ID NO: 307918 - DNA, 488 bp, Unknown
  Bacterial polypeptide expressing nucleotide sequence isolated from the Sargasso Sea
tggtaaatcaatgttaggaattatgccaggtcacatttataaggagggtagagttggaattattagtaggtcaggaactttaggatatgaagctgctcaacaaatgaaaaatcttaatattggcatttctaccagcgtaggaattggaggtgatccaattaatggaagttcatttagagatataattgaaaagtttgaaacagatgatgaaacagatgcgattttaatgattggggaaattggtggaccacaagaagttgcagctggtgaatttgcaaaaggaaatatgaaaaaacctgtaattggatatatagcaggactaactgcccctaaaggaagagtaatgggacacgctggagccattgtttctgcgtatggcgaaagtgcaattgaaaaagttgaaattttaaaagaatgtggggtaactatatcaaaaaatccctcagttatgggtgatacagttaagtctgtattagaaaaaatttaag

SEQ ID NO: 307919 - DNA, 377 bp, Unknown
  Bacterial polypeptide expressing nucleotide sequence isolated from the Sargasso Sea
gatgtcaattattatagataaaaatacaaaagtaatttgtcagggttttaccggatctcaaggtacttatcattcccaacaagcaattgattacggcactaaaatggtaggaggggtgactccaggcaaaggaggaacaactcatttagatttaccagtatttgatacagtgaaggaggcaaaagaacatacacaagcagatgcaactgttatctatgtcccggctaagtttgcaaccaaagctatacatgaagcacttgatgcagacattaaaattatcacatgtattacagaggggatcccagtgcttgatatggttgaaattaaaaaaagaattattgagcaaaaaacttattttataggaccgaactgtcccg

SEQ ID NO: 307920 - DNA, 940 bp, Unknown
  Bacterial polypeptide expressing nucleotide sequence isolated from the Sargasso Sea
gaacttgcaagtagaatagatgattctaaggcaaaacttttagttacagcttcatgtggttatgaacctggtagaactgttcactataaaccattagttaataaagctttagagcttgcaaatcataaaccagataaatgtattatttttcagagagaaaaagataaagcagagcttgattctaaaatagatattacttgggaagatgctcataaaaatgcgaaacctgcaaagtgtgagaaaatgaatgccaatgactacgcttatatactttatacatctggtactacaggtttaccaaaaggaatagtgagagatatcggtggtcatattgttgctttgaagtggactatgaaaaatatttataacatcaatcaagacgacgtatggtggtctgcaagtgatattggttggatagtaggtcactcttacattgtatatgcaccgttattttacggatgtactacagttttatttgagggaaaaccagtaggtaccccagatgctggtgttttttggagggttatatcagagcacaaagttaaatctcttttcacggctcctactgcaattagagcaattaaaaaagaggatcctaatggtgaattttttaagaaatatgatttaagtaagtttgacaaattgtttttagcaggtgagcgagcagatcctgacacgattaaatggtttgagaaattatctaactcacctgtgattgatcattggtggcaaactgaaactagttgggcaatcacatctgattgcactggaattgaatctttccctgttaaatatgggtctgcatttaaaccagtgcctggttatgatttgaaagttttaaattctgaaggtaaagaggttggtccaggaaaaatgggagacattgttgttaaacttccacttcctccaggaacttttccaacactttgggggtgctgat

SEQ ID NO: 307921 - DNA, 364 bp, Unknown
  Bacterial polypeptide expressing nucleotide sequence isolated from the Sargasso Sea
caatcaacatgtattggaataggtggtgatcccatcaatggaacaaattttatagattgtttagatttgttcttagatgatgatgaaactgaatcaattttaatgattggggaaattggaggttctgcagaggaagaggcagcagagtttatcaaaaatcataaaataaaaaaaccaacagttggatttattgcaggagtaacagcccctccaggtagaagaatgggtcatgctggtgctattatttctggaggaaaaggtggcgcagaagataagattaaaaaaatggaagattgtggaataactatggcaaactcgccatcaaaaattggaaaaacattattaaataaattgtctaattgaa

SEQ ID NO: 307922 - DNA, 648 bp, Unknown
  Bacterial polypeptide expressing nucleotide sequence isolated from the Sargasso Sea
aatgtctataataattcataaaaatacaaaaattttagttcagggttttactggtaaaattggtacttttcacactgaagaaatgattaagtatggctcaaatatagtcggtggtgttactcctggaaaaggtgggatgtctcatttaaatcttcctgtttttaatactgttaaagaggcagttgaacaaactggagcatcaacatctatactttttgtgccacctgcttttgcagctgactcagcaatggaggctgctgatgctggtataaaaacctgtgttgctatcacagatggtattccatctcatgacatggttaaaataaaacgttatatgagaagatattcaaaagataaaaaaatgggtttagttggtcctaattgcgcaggtataattagtccaggtaaatctatgctaggtataatgcctggccatatatataaggaaggtaaaataggtattgttagtagatcagggacattaggttacgaagcggcacagcaacttaaagatttaggtataggtgtatcaacaagtgtaggtataggaggagatcctatcaatggcagttcttttaaagatatcatagaaaaattcgaatcagatgacgaaacgatagcagttttaatgattggagaaatcggagg

SEQ ID NO: 307923 - DNA, 702 bp, Unknown
  Bacterial polypeptide expressing nucleotide sequence isolated from the Sargasso Sea
gaatgaaacaggagctgatgcatctattttatttgtacctccagcttttgcagctgattcagcaatggaagcagctgatgcaggaattaaaatatgtgtagctatagttgacggaataccttctcatgacatgatcagaataaaaaggtacatgagaagatatactaaaagttctaaaatgacattagtaggaccaaactgtgctggaattattagtcctggaaaatcaatgctgggaataatgccaggtcatatttacaaagaaggaagaattggaattataagtagatcaggtacattaggttatgaagcagctcaacaacttaaaaatttaaacataggtgtttcaactagtgtaggaattggaggagatccaataaatggaagttcatttagagatattattgaaaaatttgaaactgatgatgaaactgatgcaattttaatgatcggtgaaattggtggtccgcaggaagtggctgcgggagaattcgcaaaagaaaatatgaagaaaccggttattgcttatatagctggactgactgcaccaaaaggaagagtgatgggacatgcaggtgcaatagtttcagcttatggagaaagtgcaattgaaaaagttgaaattttagaagaatgtggaattacaatttctaaaaatccatctgttatgggtgatacagttaaatcagttttggaaaaaat

SEQ ID NO: 307924 - DNA, 837 bp, Unknown
  Bacterial polypeptide expressing nucleotide sequence isolated from the Sargasso Sea
gcctcttgtggttacgaacctggcagaacagttcattataaacctttggtaaacaaagcacttgaacttgcaagtcataaacctgacaaatgtataatttttcaaagagaaaaagacaaagcagaattgaatccgtctatggacattacttgggaagagtcacttaaagacgttaagccagctgattgtgaaaaaatgaatgcaaacgattatgcctacattctttatacttcgggcacaacaggattaccgaaaggtatcgtaagagatattggtggacacatcgttgctcttaaatggacgatgaaaaatatttacaacattgagcaagatgatgtgtggtggtcagcaagtgatattggatggattgttggtcattcttatatcgtgtatgccccactattttatggatgcacaactatcttgtttgaaggaaagcctgtaggaacgccagatgctggtgttttttggagagttatctcagaacataaagttaaatctcttttcacagctccaactgctataagggcaatcaaaaaagaagatcccaacggtgaattttttaaaaaatatgatttaagtaaattcgaaaaactatttcttgctggtgaaagagctgatccagatacgattaaatggtttgaaaaactctcaaactcacctgtaattgatcattggtggcaaacagaaacgagttgggcaataacatcagattgtacaggcatagagtcattcccagttaaatatggttcagctttcaaacctgttccgggttatgatttaaaagttttaaattcagaaggtaaagaagtcggccctggaaaaatgggagatata

SEQ ID NO: 307925 - DNA, 619 bp, Unknown
  Bacterial polypeptide expressing nucleotide sequence isolated from the Sargasso Sea
aaaacatgtgttgcaattgttgatggaataccttcccacgacatgatcagaataaaaagatatatgagaagatataccaaaagttctaaaatgactttggttggacctaactgcgcaggaattataagtccagggaaatctatgttagggataatgccaggacatatttataaagaaggaagaattggaatcataagtagatcaggaacattaggatatgaagctgctcaacaacttaaaaatttaaatattggagtttcaacaagcgttggaataggtggagatcctataaatggaagctcatttagagatataatagaaaagtttgagacagacgatgaaactgacgcaattttaatgattggtgaaataggtggtcctcaagaagtagcagcgggtgagtttgcaaaagaaaatatgaaaaaaccagttatagcatacattgctggattaactgctcctaaaggaagggtaatgggtcatgctggagcaatagtttcagcttatggagaaagtgcaattgaaaaagttgaaattttaaaagaatgtggaattacaatttctaaaaacccatctgttatgggagatacagtaaaatcagttttagaaaaaatgtaaa

SEQ ID NO: 307926 - DNA, 826 bp, Unknown
  Bacterial polypeptide expressing nucleotide sequence isolated from the Sargasso Sea
gctaacggtaattatgaaaagaaaccagttattgtacaaggtataacaggcaagtatggttcaactcatgccaaactaatgttagagtatggaacaaacattgtagcaggagttacacctggaaaaggaggacaaaaatttgaagataaaattccagtctataatacagtaaaagaagcagtagatgcaacaggagcagagatatcaatagtatttgttccagcaaaattcttcttagatgctgccaaagatgcattaaattcaggaataaaattactagttgccattccagaacatgttcctattagagatgcaatggaggtaatcgagcttgcaaaacaaaaagacgcaataatgattggaccaaacacaccaggtgttatagtgccaggattaatcaaggtaggaattatgcctgcaagtccattttcagcaggaaaagtagcagtattatcaaaaagcggcacactgctttatgaaatctcaaataatctaactagcgcaggctttggtcagaatatcacaatcggcattggaggagacccagttaatggaacacgtatgattgatgccttcgatatggtaaaagatgacccagaattggaagcaatggtagtggtaggagaaattggaggagattctgaagaaattttagcccagcacatcatagatatcggatttaagaaaccaattgttggatatatcgcaggacgacaggcaccaaaagaaaaacgcatgggacatgcaggcgccatagtcatgggaacatatggctcagccgaatcaaagatatccatgtttgcaaaggcaaacattcctgttgcaa

SEQ ID NO: 307927 - DNA, 739 bp, Unknown
  Bacterial polypeptide expressing nucleotide sequence isolated from the Sargasso Sea
aatgactgtattaattaataaaaatagtaagattattattcaaggttttacaggaaaaatgggctcttttcacgcagatgagatgattaagtatggctctaacgtagttggtggagttactccaggaaagggtggctctaagcacctaaatttgccggtgtttaatacagtgaaagatgcagttaacgagacaggagcagatgcatcaattttatttgtaccgccagcttttgcggcagactcagcaatggaagctgctgatgctggtattaaaacttgtgtagctattgttgatggaattccatctcacgatatgatcagaattaaaagatatatgagaaggtatacaaaaagttctaaaatgactttagtcggacctaattgtgcaggaattattagtcctggaaaatcaatgttgggtattatgccaggacatatttataaagagggaagaataggaattataagtagatcaggaacattaggttatgaagcagcccaacaactcaaaaatttaaacataggtgtatcaacaagtgtaggtattggcggagatccaataaatggaagttcatttagagatattattgaaaaatttgagacagatgaagagaccgatgcaatattaatgattggtgaaattggtggtcctcaagaagtagcagctggtgaatttgcaaaagaaaatatgaaaaaaccagtaatagcctacattgcaggtttacagctccaaaggtag

SEQ ID NO: 307928 - DNA, 399 bp, Unknown
  Bacterial polypeptide expressing nucleotide sequence isolated from the Sargasso Sea
cacaaacaacagaagtaggattaggtcaatcaacatgtgttggtattggtggagacccaatacatggtatggattttgtagattgtataaagttatttttagaagacgatgagaccgagggaatattaatgataggtgaaattggtggcgaggaggaagaaaatgcggcagaatttatttcaaattcaaaaagaaaaaaaccagtttcagcatttatagctggacaatcagcccctaaaggaaaacgtatgggtcatgcaggtgctatcgtttcaggatcaaaaggtacagcacattccaaaattaaatctttagaaaatgctggagttttggtgtcaaaatccccggcatcattgggaaaaactatgaaattagcaatgcaaaatgggaataattagt

SEQ ID NO: 307929 - DNA, 423 bp, Unknown
  Bacterial polypeptide expressing nucleotide sequence isolated from the Sargasso Sea
aatgtcagttttaattaataagaatacaaaagttatatgccaaggttttacaggctcacatggaacttttcattctgaacagtctataaaatatggaacaaatcttgttggaggagttacaccaaaaaaaggaggtcaaattcatttagaaagaccagtatttaatacagttaaagaggcaaaaaatcaaactggtgcaaatgctactatgatatatgttcctgctaaatttgcatcatccgcaattatagaagctatagaagcttccttagaacttattgtttgcataagtgaaggaatacctattttggatatgctaaaagtaaaaaaaaaattattaaattcgaactccagattaataggacctaattgtccaggaataattacaccagatgaatgtaaaattggcattatgccaggtaa

SEQ ID NO: 307930 - DNA, 921 bp, Unknown
  Bacterial polypeptide expressing nucleotide sequence isolated from the Sargasso Sea
gcaagtagaattgatgattctaaagcgaaacttttagttacagcttcatgtggttatgagccaggtagaactgttcactataaaccattagtaaacaaagctttagatcttgcaaatcataaacttaataaatgtattatttttcaaagagaaaaagataaagcagagcttgactcaaaaatagatattacttgggaagatgcacataaaaacgtaaaacctacagagtgtgaaaaaatgaatgccaatgattacgcttacattctttatacatctggaactacaggtttaccaaaaggaattgtaagagatatcggtggtcatattgttgctttgaaatggacaatgaaaaatatttataacataaatcaagacgatgtatggtggtcagctagtgatattggttggatagtgggtcactcttacattgtatacgctccattattttacggatgcactacggttctttttgaaggaaagccagtcggaactcccgatgctggagttttttggagaataatatctgagcataaagtaaaatctcttttcacagcccctacagcaatcagagcaattaaaaaagaggatcccaatggtgaattttttaagaaatatgacctaagtaaatttgataaattatttttagcaggtgagcgggctgatcctgatacaattaaatggtttgaaaaattatctaattcgccggtaatagatcattggtggcaaacagaaacgagttgggcgatcacttctgattgtactggaattgagtcttttccagtaaagtatggatctgctttcaaacctgttccaggttatgatttaaaagttttaaattcagatgggaaagaggttgggccaggaaaaatgggagacatagttgttaaacttccattacctccaggaacctttcctacgctt

SEQ ID NO: 307931 - DNA, 940 bp, Unknown
  Bacterial polypeptide expressing nucleotide sequence isolated from the Sargasso Sea
ttgtggtcagctagtgatattggttggattgttggtcattcttatatagtctatgcccctttatttaaaggatgcacaacagttttgtttgaaggtaaacctgtaggtacacctgatgcaggtgctttctggaaaattatttctgattataaagtaaaatctttatttacagctccaactgcatttagagcaattaaaaaagaagatcctgatggaaaatacttctctaaatacgatttgagtagttttgaaagtttatttcttgctggagaaagggcagatccagatacaatcaaatgggcagaaaatttattaaaagttccagtgatagaccactggtggcaaactgaaacaagttgggcaataagctcgaattgtacaggaattgaaatgatgaaaacaaaatatggttcggcttgtaaagcagtaccaggttatgatgtaaaaattataaaatctgatcatacattagcaaaaccaaatgaaatgggagacattgttgttaaactgcctttacctcccggaacatttccaactctttggaatgcagatcaaagatataaagaaaactatatgacaaattataatggttattaccaaacatatgatgcggggcatattgatgaagatggatatatttggatcatgtctagaactgatgatattatcaatgttgctggacacagattatccactggcgcaattgaggaagttttatctgagcataaatcagtagctgaatgcgcagtacttggaattgcagataaacttaagggacaactaccgattggtttggttgtattaaaagcaggcgtaaataaagatcatgaagaaatttcaaaagaatgtattaaaatggttagggaaaaaattggtcctgttgcggcattcaagattgctatagtaataaaaagacttcctaaaactagatctggtaaaa

SEQ ID NO: 307932 - DNA, 868 bp, Unknown
  Bacterial polypeptide expressing nucleotide sequence isolated from the Sargasso Sea
ttctgtggtcttcggtgggtttgcctcaaatgagcttgcaagcagaatagatgacagtaaagcaaaattattagtgacggcttcatgtggttttgaaccagggagaacggttgaatacaaacctcttgttgatgaagctataaaaatagccaagcacaaaattgaaaagatgattttattccaaagacctggtcatgaggttaaattaaatgctccaaatgagctcagttgggaagaagtagtctcgaatgctaaaaatgctgattgtgttgagatgaactccaatgagtttgcttatattttatatacttcaggaacaacaggaactcccaaaggcattgttagagatattgggggtcatattgttgctctcaaatggactatgaaaaatatttacaacattgatactgatgatatttggtggtctgcaagtgacattggttggattgtaggccactcctatattgtttatgctcctttatttaaaggatgcactacagttttgtttgaaggtaagccagtaggaactccagatgctggggctttctggaaaatcatttcagattataaagtaaaatctctttttacagctccaacagctttcagagctataaagaaagaagatcctgaaggtaaatttttctcaaaatatgatttgagtagttttgaaagcttattccttgctggagaacgagctgatccagatacgattaaatgggctgagaatttactaaaagttccagttattgatcattggtggcaaacagaaaccagctgggcaattagctcaaattgtactggtattgaaatgatggaaacaaaatatggttcagcctgtaaagctgtccctgggtatgatgtaaaaatc

SEQ ID NO: 307933 - DNA, 645 bp, Unknown
  Bacterial polypeptide expressing nucleotide sequence isolated from the Sargasso Sea
ctgcaatggaagcagcagatgcaggaattaaaacatgtgttgctattacagacggaataccttcacacgatatgatcaaaataaaaagatatatgagaagatatcttagatctcaaaaaatgactcttgttgggccaaactgcgccggtgtaattagtcctggaaaatctatgttaggcataatgccaggacatatttataaagagggaagagtaggaattataggaagatctggtactttaggctatgaggcagctcaacaattaaaaaatttgaatataggtgtttcaactagcgtaggtattgggggagatccaattaatggtagctcatttagagatattttagaaaaattcgaagaagatgatgaaacagatgcagtattaatgataggtgagattggcggaccacaagaagttaatgcaggaaaatttgctaaagaaaatatgaaaaaaccagtaattgcatatattgctggacttacagctcccaaaggaagagttatggggcatgcgggtgcaattgtttcagcttatggtgagagcgcaacagaaaaagttgaaattttaaaagattatggagtatcaatatcaaaaaatccatctgtgatgggagaaacggttaaaaaagctttagaaaaatgag

SEQ ID NO: 307934 - DNA, 580 bp, Unknown
  Bacterial polypeptide expressing nucleotide sequence isolated from the Sargasso Sea
gatatgatcagaataaaaagatacatgagaagatattcaaaaaatgaaaaaatgacattagttggtccaaactgtgctggcattataagccctggtaagtcaatgttaggtattatgcctggtcatatttataaagaaggtagagttggaattataagcagatcaggaactttaggatatgaagcagctcagcaaatgaaaaatcttaatattggtatttcaacaagcgtaggaataggaggtgatccaattaatggtagttcatttagagatataattgaaaagtttgaaacagatgatgaaacagatgcagttttaatgattggcgaaattggtggaccacaagaagttgctgctggagaatttgcgaaagaaaatatgaaaaaacctgtaattggatatatagcaggattaacagctccaaaaggaagagtgatgggacatgcgggagctattgtttctgcctatggtgaaagcgctatagaaaaagttgaaattttaaaagagtgtggtgtaacaatatctaaaaatccttctgttatggggaatactgttaaatctgtattagaacaaatttaat

SEQ ID NO: 307935 - DNA, 623 bp, Unknown
  Bacterial polypeptide expressing nucleotide sequence isolated from the Sargasso Sea
cattaaaagttgcgttgcgattgtagacggtattccctcacacgatatgattagaattaaacgttatatgagaagatatagtaaatccgaaaagatgagtttagttggtccaaattgtgctggaataattagtccaggcaaatcaatgttgggaataatgcctggtcatatatataaagaaggaagagttggaataattagtagatcgggaactttaggttacgaagcagcacaacagttaaaaaacttaaatattggtgtatcaacaagcgttggtattggaggcgatcctatcaatggcagttcttttaaagatataattggaaagtttgaagaagatgatgaaacagatgctgtattaatgattggtgagataggtgggccacaagaagttgcagcaggtaaatttgctaaagaaaatatgaagaaaccggttattgcctatatagcaggtttaactgctccaaagggtagagttatgggacatgctggagctattgtatctgcttatggagaaagtgctgtagaaaaagttgagattttaaaggagtatggaattactatttcaaaaaatccatcggtaatgggagatactgtaaaaggtgttcttagcaaatcttaaa

SEQ ID NO: 307936 - DNA, 370 bp, Unknown
  Bacterial polypeptide expressing nucleotide sequence isolated from the Sargasso Sea
aggacagacaacggcgctaggtataggtggagaccctataattggtacagatatgattgcggctctagaattatttgaaaatgatcctgaaactgatggaattgttatgattggagaaattggaggacaaatggaaaatgaagcagctcaatgggcaaaagacaatgtcacaaaacctatagttggtttcattgctggacagactgcacctccaggacgtcgaatgggtcatgcgggagcaatagtatctggtggtgatgaaacagctgaagctaaaaataaaattttagctgagtgtggaatctcagtcgcaaggtctgttgcagagattgggaataaaatgaaaacatctttaacattaaaagcttag

SEQ ID NO: 307937 - DNA, 319 bp, Unknown
  Bacterial polypeptide expressing nucleotide sequence isolated from the Sargasso Sea
agaacctgcaaattttttagatgtaggaggaggcgcttcaaaggaaaaagtttcagctgcatttaaactcatactttctgacaaaaatgttaaagctattttaataaatatttttggaggtatcatgcgctgtgatgttttagctcaaggagtagtagatgcagctaaagaaagtaaattgaatatacctctcgttgtaagattagcgggaacaaattttaccgaaggtaaagccatattagataaatctggtttaaagatattgtctgcttcagacttaaatgatgcagcaaaaaaaacagttgaggcaataaaataa

SEQ ID NO: 307938 - DNA, 375 bp, Unknown
  Bacterial polypeptide expressing nucleotide sequence isolated from the Sargasso Sea
tgcatatctgaaggaattcctgttagagatatgaaaaaagttaaaagcgctcttgataattcctcctcaactcttattggtcctaactgtcccggtttaataacagctgaagaatcaaaaattgggattactcctggctttatttgcaaaaaaggttccattggtattctttctcgatcaggaactttgacttatgaggcaattgaccaaattgttaatgttgggttaggaatgacaacagctgttggcattggaggcgatccaattattggatcaagtatgatagatatattgaagcattttgctaatgatgatgaaactaaaggtgttgttatgattggagaaattggtggtagcatggaaaatgaagctgct

SEQ ID NO: 307939 - DNA, 364 bp, Unknown
  Bacterial polypeptide expressing nucleotide sequence isolated from the Sargasso Sea
atgagtattctagttaacaaagataccaaattgattgttcaaggcttcacgggttctcaaggtacccttcattcagaacaatctatcgaatatggaacaaatattgttggcggcgttacacctggaaaaggaggtatggaacatttagggaaaccagtatttaattctgtgaatgaagctgttgaagaattagttccaaatgcatcaattatttttgtccccgcaaaattttgtaaggaatccataatagaatcagctgaagctggtattaaattaattgtctgcattactgagggcatccctacacttgacatgcttgaagtgaaaaaaagaattgatgatttaggagtaagactaatgacca

SEQ ID NO: 307940 - DNA, 729 bp, Unknown
  Bacterial polypeptide expressing nucleotide sequence isolated from the Sargasso Sea
aatgtctataatcattcataaaaatacaaagattttagttcaaggttttactggaaaaattggaagctttcatgctgaagaaatgattaagtatggttcaaatgttgttggcgggataacacctggtaaaggtggtatcactcatttaaatcttcctgtatttaacactgtcagagaagctgttgatcaaacaggagcatcaacatcaatattatttgtccctccagcatttgcagcagattctgttatggaagctgctgatgcaggtattaaaacttgtgtttctattaccgacggtattccttcacatgatatggttaaaattaaaagatttatgagaagatatccaaaagataaaaaaatgggattagtaggtccgaattgtgcaggaataattagccctggtaaatctatgttaggtattatgcctggccacatttacaaagaaggcaaaataggaatagttagcagatctggcaccttgggatatgaagctgcacaacaacttaaagatttggaaattggtgtttcaacaagcgtaggtataggaggcgatccaataaatggaagttcttttagagatataattgaaaagtttgaatatgatgatgaaactattgcagttttaatgataggtgaaataggtgggtcacaagaagttgaagctggacaatttgctaaagaaaatatgagtaagccggtaattgcgtatattgcaggacttactgc

SEQ ID NO: 307941 - DNA, 595 bp, Unknown
  Bacterial polypeptide expressing nucleotide sequence isolated from the Sargasso Sea
catggcagttataatagataaaaataccaaaattataatccaagggttcacaggtaagatgggtacatttcatgcagatgaaatgattaaatatggatcaaatgttgttggaggagtaactccaggtaaaggaggaacaaaacatttgaatctcccagtttttaatactgtaaaagaggctgttgaaagtacaaatgctaccgcctcaattttatttgttccgccagcatttgcagccgactccgctatggaagctgctgatgcgggtataagaacatgtgtagcaatagttgatggcatcccatcccatgacatgataaaaattaaaagatacatgagaaggtattccaaatctgagaaaatgagtttagtaggacccaactgcgcaggaataataagtcccggtaaatcaatgttaggtattatgcctggacatatttataaagaaggaagagttggaataattagcagatctggaactcttggatatgaagctgcacaacaattaaaagatcttaatattggaatttcaacaagtgttggtattggcggagatccaataaatggaagttcttttaaagatataattgggtaa

SEQ ID NO: 307942 - DNA, 658 bp, Unknown
  Bacterial polypeptide expressing nucleotide sequence isolated from the Sargasso Sea
ctttgtaccagcaaaatttgccaaatcagcaattatagaagctgctgaatctggcattaatttaattatttgcattacagaaggtgttccagttcttgatatggttgatgttgttaatgttcttaaatctcatcctgaagtgagattaatagggcctaattgtccaggggtaatttctcctggaaaggcaaaacttggaataatgccagcttcaattcatttagaaggaactgtaggcatagtttctagatcagggactcttacatatgaggctgtgaaacaaactacagatgcagacctaggtcaaagcacatgtattggtataggcggagaccctgttaatggaacttcatttatagatgcattggaaatgtttgaaaacgactctcaaactgaatcaatagtcatggttggtgaaataggtggaagcgcagaagaagaagcagctgaatatattagagataacattaaaaaaccagttgtttcatatatagctggtgtcactgctccaaaaggaaaaagaatggggcatgcaggtgcaataatttctggaggtaaaggaacagctcaagataaatttaaagctttagagtctgctggagtaggtgttgtaactgatttaaatctgattggttccagacttaaagaatctctttaa

SEQ ID NO: 307943 - DNA, 364 bp, Unknown
  Bacterial polypeptide expressing nucleotide sequence isolated from the Sargasso Sea
caatcaacttgtataggaattggaggagatccaattaatggtacgaactttatagattgtttaaagctttttttgcaggacgatgaaacaaaatctattgtgatgataggtgaaataggtggttcagcagaggaagaagctgccgaatttttaaaaagagaaaagataaagaaacctaccgtgggttttattgctggattaactgcacctccaggcagaagaatgggtcatgccggagctattatatcgggaggcaagggtggagctgaggaaaaaattgaaatcatgaagtctgctgatatcactatttcaaaatcgcctgcagatattggtaaaactctatttgataaactaaatagttgat

SEQ ID NO: 307944 - DNA, 860 bp, Unknown
  Bacterial polypeptide expressing nucleotide sequence isolated from the Sargasso Sea
aacacctgatgcaggagttttttggagaattatttctgaacataaagtcaaatctctttttactgcgcctactgctattagagctattaaaaaagaggatccaaatggtgaattttttaaaaaatatgatttaagcaaatttgacaaactttttcttgcaggggaaagagctgatccggacacaataaagtggtttgaaaaattatctaactctgctgtaattgatcattggtggcaaactgagactagttgggcaattacgtcagattgcactggaatagagacattccctgtaaaatatggttcagcttttaaaccagtaccaggttatgatttaaaagttttaaattctgagggaaaggaagttggagcaggaaaaatgggagatattgtagttaaacttccattaccacctgggacttttccgactttatggggtgctgataaaagatacaaggaaaattatatgacgacttacccaggatattatcaaacttatgatgctggtcatattgatgaggatggatatgtttggataatgtctaggacggatgatataatcaatgttgcaggacataggctttctactggagcaatagaggaagtgttagcagaacacccaaatgtcgctgaatgtgcagtaattggaattgctgataaacttaaagggcaactaccaataggattgctagccctcaaagcaggagttacaaaagaaaaaaaagaaataattgatgaatgcgtaaaaatggtgagagaaaaagttgggcctgtcgcagcatttaagatagctattgtagtaaaaagattaccaaaaactcgatctggtaaagtattaagaggaactgtaagaaaaattg

SEQ ID NO: 307945 - DNA, 493 bp, Unknown
  Bacterial polypeptide expressing nucleotide sequence isolated from the Sargasso Sea
attactccaggcgaatgcaagatgggtattatgccaggttatattcaccttccaggtaaagttggtgttatatctagatcaggtactcttacttacgaagctgttaaacaaacaaccgacttaggcttcggacaaacaagttgtgtaggaatcggaggagatccagtgcctggatccagctttatagacatattagatttatttcagaatgatcataaaacagaagcaattgttatggtaggagaaataggaggaactgctgaagaagctgctgctgagtttattcaatcaaatgtaacaaagccagttgtctcttatatagctggggtaactgctccagctggaaaaagaatgggacatgctggtgccataattgctgggggtaaaggaacagctgaagataagtttaaagctttagagaaagcaggagtgcatactgttaaaagccctgccgacataggaaagggtgtagctgaaataaccggatggtaaa

SEQ ID NO: 307946 - DNA, 445 bp, Unknown
  Bacterial polypeptide expressing nucleotide sequence isolated from the Sargasso Sea
gcaaaaaggttctattggtattctttctcgttcagggaccttgacttatgaggcaattgaccaaattgttaatgttggtttaggaatgactaccgctgttggaattggaggagatccaattattggatcaagtatgatagatatattgaaacattttgttgatgatgaagaaactaaaggtgttgtaatgattggtgaaattggcggtagcatggaaaatgaagcagccgaatggatcaaaagcaattttaataaaccagttgtatcttttattgcaggccaaactgcccctaaaggaaaaagaatgggtcatgctggagcaattatttctgaaggatctgaaacagcagatgctaaaattaaaattctaaaaaaatgtggggtttcagttgcaaaaacagtatctgaaatcggagaaacaatgttaaaactaatagaggaataa

SEQ ID NO: 307947 - DNA, 655 bp, Unknown
  Bacterial polypeptide expressing nucleotide sequence isolated from the Sargasso Sea
gagaaaactggtgcagaagcaagcctagtatttgttcctccaccctttgctgccgacagtataatggaagctgctgatgctggcatcaaatattgcgtgtgtataactgacggtattcctgcgcaagatatgatacaagttaagcggtatatgtatagatatccaaaagaaaaacgtatggtcctgactggtcctaactgcgctggtacaattagtccaggcaaggccttacttggaattatgcctggtcacatttacctgcaaggtaatgttggcatcgttggacgctcaggtaccttgggctatgaagctgccgcacagttgaaggcacatggtattggtgtatctacatctgtaggtatcggcggtgacccaattaatggttcatcttttaaggatattttgcaacgttttgaagaagatgacgatactcatctgatttgtatgattggtgagataggtgggccacaggaggcagaggctgcggcatacataaaagatcatgttaaaaagcccgttgttgcctatgttgcagggttaactgcaccaaaaggcagaactatgggacatgctggtgcaataatttctgcgtttggcgaaagtgccagcgaaaaagtggaaattttgtcagctgctggtgtgactgttgctccta

SEQ ID NO: 307948 - DNA, 298 bp, Unknown
  Bacterial polypeptide expressing nucleotide sequence isolated from the Sargasso Sea
atggctgtgttaatcgacgaaaaaactaaagtgatatgtcaaggctttaccggttcacaagggacatttcattccgagcaagccatagcgtacggaacaaaaatggtgggaggtgttactcctggaaaaggcggcggcgatcatttaggtttgcctgtattcaattccgtgcacgaagcaaaacatataaccaatgcagatgcttctgtaatttatgtacctccaccctttgcggcagactctattttggaagcaatagacgctcgaatggggctaattgtatgtattactgaaggta

SEQ ID NO: 307949 - DNA, 423 bp, Unknown
  Bacterial polypeptide expressing nucleotide sequence isolated from the Sargasso Sea
ggtctggcacgtggacatatgaggctgtgccccagaccacggctgttggcctcggtcaaactacttgcatcgggattggaggcgatccggttaacggaaccaattttatcgaatgtcttgaactttttatggcggactctgaaacggaaggggtggttatgattggtgaaatcggagggtctgctgaagaagccgctgctgagtatttgcagagccttggtgccaagcgaaaaccagtggtgggttttatagctgggactactgcccctccgggacggcgtatgggccatgctggggccatcgtggccggcggctcaggcggggctcaggccaaaatcgatgccctcaaaggagcgggagtccacgttgtcggctcgccagcggagattggtgtcgctatgcaggccgccgtgaaaaaataga

SEQ ID NO: 307950 - DNA, 577 bp, Unknown
  Bacterial polypeptide expressing nucleotide sequence isolated from the Sargasso Sea
atgcgggtcaagcgctatattgcggcgctacaagtccgacaagcgaatgcaattgattggcccaaactgcgcaggggtgatcagccccggcaaagccctgcttggcattatgccgggtcatatctaccaggagggggaggtgggcatcattggccggtctggcactttgggttacgaggcagcatctcagcttaaagccgaggggatcggcgtttcaaccagcgtcggtattgggggtgacccgattaatgggagctctttcaaggatcacctggcggctttcgaaaccgacccgcaaactcgcgtggtggtgatgatcggtgagatcgggggtcctcaagaggcagaagccgcccagtttgcccgtgatcacatgaacaagcccgtagtgggatatatcgccggcctgacagcacccaaaggccgaactatgggtcacgccggcgccattgtttcggcggctggagagtccgctgaggaaaaggtggaaatcctgcgccagtgcggggtcacggtggtagaacggccgtccgagtttggatctaccgtgagagaggtgttggcgacgatctcctga

SEQ ID NO: 307951 - DNA, 936 bp, Unknown
  Bacterial polypeptide expressing nucleotide sequence isolated from the Sargasso Sea
tgtgggtcattcatatattgtctatgctcctctatttaaaggttgcaccactgttttgtttgaaggaaaacctgttggcactcctgatgcaggagtattttggaaaataatttctgaatataaagtaaaatcactttttactgccccaactgcttttagagcaatcaaaaaggaagatcctgaaggaaaatttttttctaaatatgatttaagctcatttaaaaatttgttcttagcgggtgaaagagcagatcctgacaccataaaatgggctgagaaattattaaaagttccagtaattgatcattggtggcagactgaaactagttgggcaatcagtgctaattgcacaggaatagaaatgatgaaaacaaaatatggttcagcctgtaaagctgttccaggatatgacataaaaataattaaaccagatcaaaccttagctaaaccgaatgaaatgggagatattgttgttaagctaccgttgccaccgggaacttttccaacattatggaatgctgataagagatacgaagagacttatatgtctaattataaaggttattaccaaacttatgatgcaggacacattgatgaagatggatatatttcaattatgtccagaacggatgacattataaatgttgcggggcatagattgtcaacaggagcaattgaagaagtattatctgaacatcaatctgttgctgaatgtgcagtgattggaatttctgataaattaaaaggacagttgccaattggtttaattacattaaaagctggagttaataaagaaaatgagattataactaaagagtgtgtacaaatggttagagataaagttggaccagttgctgcatttaaagttgcaatagttgtaaaaagattgcctaaaacaagatcaggcaaaatattaaaggggaacagtaagaaaaa

SEQ ID NO: 307952 - DNA, 475 bp, Unknown
  Bacterial polypeptide expressing nucleotide sequence isolated from the Sargasso Sea
taagattggaatcatgccaggctttattcatcacaaaggttctgtaggcattatttcaagatcaggcactctgacttacgaggcagttcatcaaacttcgatatgtggccttgggcaaagcacctgcattggtataggcggtgatccaataaagggtctaaattttattgagtgcttgtcactctttgaagaagatccagaaacagagggtatcgtgatggttggcgaaattggtggctcagacgaagagaaggccgctgagtttattaaagagaatattagcaagcccgttgtcgcttatgtggctggcatttcagcacctcctgggaaaagaatggggcatgcaggagcaatcgttactggcaatgagggaacagctttaagcaaatacgaagccttgaatgatgccggagtttcaactactgattcacctgcattgattggcaaaatcatgaaagatttactcaatcgataa

SEQ ID NO: 307953 - DNA, 943 bp, Unknown
  Bacterial polypeptide expressing nucleotide sequence isolated from the Sargasso Sea
attgtaagagatataggtgggcatatagttgcactgaaatggacaatgaaaaatatttacaacattaatcaagatgatgtttggtggtctgctagtgatataggttggatagttgggcactcttatattgtttatgccccgctattttatggatgtactacaatattatttgaaggaaaacctgttggaaccccagatgcaggagttttttggagagttatttcagattataaagttaaatcattatttacagctccaactgccattagggcaattaaaaaagaagatcctgatggtaaattttttaaaaaatatgacatatcaaattttgacactttattcttagctggagaacgagctgatccagataccattaaatggtttcaaaaactttcaaacgctccagtcatagatcattggtggcaaacagaaacaagctgggcaattagttcgaactgtgcggggatagagaagtttccaattaaatacggttctgcttttaaacctgtaccaggttatgatttaagagttcttaacaacgaaggtaaagaaaataagccaggtcaaatgggtgatatagttgtaaaattacctttgccacctggaaccttccctactttgtggaatgcagatgaaagatataaaaaagtttacatgtcaacttataatggttattaccaaacttatgatgcgggacatattgatgaagatggttatgtttggattatgtctagaacggatgatattatcaatgtagccggtcatagattatctactggagcaattgaagaagttttagctgaacacaaaaatgtagctgagtgtgcagtggtaggaatagcagataaattaaaaggtcaactacctattggactgattgcattaaaggcaggagttaaaagggataataaagaaattaccaaagaatgtgtgggccttggtg

SEQ ID NO: 307954 - DNA, 529 bp, Unknown
  Bacterial polypeptide expressing nucleotide sequence isolated from the Sargasso Sea
gatgactttaataggacctaattgtgcgggagttataagtcccggcaaagcaatgctcggtatcatgcctggacatatatataaagagggtaatattggcattatagggagatctggtactttaggatatgaagcagcccagcaattaaagaatttaaatattggtatttcaacaagcgtaggaataggaggagatcctataaacggaagttcatttagagatattattgaaaaatttgaggaagacaaagaaacagaagcaattttaatgattggtgaaataggcggaccacaagaagttgctgcaggcaagtttgcaaaagaaaatatgaaaaaacctgtgatagcttatatagctggattaacagctccgaaaggaagagtaatggggcatgcaggcgctatagtatctgcatacggagaaagtgccatagaaaaagttgaaattttaaaacaatacggaatttcaatatcaaagaacccatctgtaatgggcgaaacagtcaaggcagctttagaaaataaataa

SEQ ID NO: 307955 - DNA, 895 bp, Unknown
  Bacterial polypeptide expressing nucleotide sequence isolated from the Sargasso Sea
agcaatacactcggttgtttttggaggatttgcatcaaatgaacttgcaagcagaatagatgacagcaaagctaaaattctagtcacagcatcatgtggttttgagccaggtaggacggttgaatacaagccattagtagatgaagcagtcaaactagcaagtcataagataagtaagatgattttatttcaaagaaaaggtcatgaggctaaattaaatgaacctaatgaaattagttgggacgaggcactagctgatgcaaaagatactgaatgtgtagagatgaattcaaatgagtttgcttacatactttatacctcaggcacaacaggaacacccaaaggtattgtaagggatatagggggtcacattgtagctttaaaatggacaatgaaaaatatctacaacattgatgaaagagatatttggtggtcagctagtgatattggttggattgtaggtcactcttacattgtttatgctcctttatttaaagggtgcacaacagttttgtttgaaggtaaacctgtgggtacacctgatgctggggctttctggaaaatcatatctgattataaggtaaaatctttatttacagctccaaccgcatttagagcaattaaaaaagaagatcctgatggaaaattcttctctaaatatgatttgagtagttttgaaagtttatttcttgctggtgaaagagcagatccagatacaattaaatgggcagaaaatttattaaaagttccagtgatagaccattggtggcaaacggaaacaagttgggcaataagctcaaattgtacaggaattgaaatgatgaaaacaaaatatggttcagcctgtaaagcagtaccaggttatgatgtaaaaattattaagtcagatcaaact

SEQ ID NO: 307956 - DNA, 355 bp, Unknown
  Bacterial polypeptide expressing nucleotide sequence isolated from the Sargasso Sea
gatgtcagtattagtaaataaaaatacaaaagttatttgtcaaggttttactggtaagcacggaacttttcattctgaacaagcaataagatatggaactaatttagttggtggagttacaccaaaaaaaggaggacaaaaacatttaaatcttccagtttttaatagcgttgaagaggcaaaaaataaaactggagcaaacgcaaccatgatatatgttccgcctgcatttgcaggtgaggcaataattgaagctatagaagcaaaaattgaattaattgtttgtattactgaaggcatacctgttttagatatgctcaaggtaaaaaaagaattaaagaggagctccctcaga

SEQ ID NO: 307957 - DNA, 319 bp, Unknown
  Bacterial polypeptide expressing nucleotide sequence isolated from the Sargasso Sea
atgtcagttttaataaataaaaatactaaacttatatgccaagggttcacaggcgctcatggaacatttcattctgaacagtcaataaaatatgggacaaatctagttggaggcgtaactccaggtaaaggaggacaaacacacttaaacaaacctgtttttaattctgtaaaagaagcaaaagataagactaatgcaaatgcaacaatgatttatgtccctgcaaaatttgctgctgcagcaataatcgaggcaattgaagctaagatcgaattgatagtttgtataactgaagggattccaatcttggatatttaaa

SEQ ID NO: 307958 - DNA, 485 bp, Unknown
  Bacterial polypeptide expressing nucleotide sequence isolated from the Sargasso Sea
agtaaatgaatgcaaattaggcattatgccaggatttatatgtgaaaaagggaatattggagttgtttcaaaatctggaactcttacctatgaagccattgatcaattagttaattctggcctaggacaaaccactgctataggtataggtggcgacccgataattggtacaacaatgaaagattgcctagaactttttgaaaatgattcagaaactgaaggagtcgtaatcataggcgagattggtgggcaaatggaaatcgaggccgcacattgggctaaaaaaaatatgtcaaaacccatagctggattcattgctggacaaacagctcctccaggaaagaggatgggacatgctggggctattgtttcaggcgggaatgacactgcaaaagctaaaatggaagttttagttgattgtggaatatctgtttcagaatcagtagcagatattggatcactaatgaaaactttaatgaattaaa

SEQ ID NO: 307959 - DNA, 905 bp, Unknown
  Bacterial polypeptide expressing nucleotide sequence isolated from the Sargasso Sea
ataccagtcggctcaaattctcgccgcgggcggcgtcaccgtgccccggggcatcgccgccaccaccgtcgaggaatgcgtcaaagccgcggaacaattgaagggagacgaggtcgtcatcaagtcccagattttggcgggaggaaggggtctaggaacgttcacgaacggcttccagggcggcgtgcatgtcatccccaagagccagaccgaagaatttgcgaaaaagatgatcggccagacgttggtgaccaaacagtccggcccggagggcaagcccgtcaacacggtcctgatggcggagaagatggacttggtgaacgagatgtactttgccattttgctagatagggccttcggcgggcctgtggtcatcgcttgtgcggagggcggcacttctattgaggacctcgcggaaaaataccccgaaaaaataaaaaaggtgccgattgacattgtggctggcatgaccgatcagcaagcgtcggagattgtcgatgcgttggagatctctggtagcaagcctgcagcaatcgaacaggtcaaggccttgtatggtgtatttagagactcggactgcaccatggtcgaggtgaatcctttagcggaggacagcaacggtactctgattgccgcggatgctaagctcggttttgatgataacactgccttccgccagaaagatatatttgcgcagcgcgaccactcgcaggaagatccgagggacgtcgcggcggagaagtgggatttgaactacatcggcctcgatggctcgatcgggtgcatggtcaacggtgctggactggccatggccacgatggacatcatccagatgcacggtgggtcgccggccaatttcctggatgtcggtggaagcgccaaaaaggaacagatcgtcgaggcct

SEQ ID NO: 307960 - DNA, 532 bp, Unknown
  Bacterial polypeptide expressing nucleotide sequence isolated from the Sargasso Sea
atggcaattttaattgatgaaaatacaagagttgttgtccagggattaacaggtcgagaaggccagttccatgcattaagaaatagagattatggtacaaacattgttgcaggcacaagaccaggtaagggtggtgaaaatatagaatccataccaatatttaatactgttgaagaagctgttaaagaggaaggagctaatgtagctatgacttttgttccacctgcttttgctaaggaggctgtactagaggcagcatttgctgggtgtgaattaattgtatgtattacagaaggtattccagcaaaagatgaagctgaaatgtatgacataatcaaaaaagaaacaaattcaaaattgctaggtccaaattgtccaggtttgatttctccaggtaaatcaaatgttggtattatgcctcatgaaattactaagcaaggaaacgttggtgttgtatcaagatcaggtacattgacttatcaagctgttcacgaattaacacaattagagatagggcagtcaacatgtatag

SEQ ID NO: 307961 - DNA, 700 bp, Unknown
  Bacterial polypeptide expressing nucleotide sequence isolated from the Sargasso Sea
actgggagcaacagcatctatattatttgtgccaccagctttcgcggcagattcagctatggaagctgctgatgctggaattaaaagttgtgttgcaattgttgacggaattccttcacacgatatgattaggatcaaacgttatatgagaagatatactaaatccgaaaaaatgagtttagttggtccaaattgtgcaggtataattagcccaggaaaatcaatgttaggtatcatgccaggacatatatataaagaagggagagttggaataataagtagatcaggaactttgggatacgaagcagcacaacaattaaaaaatttaaatattggtgtttcaacaagtgttggtataggcggagatcctattaatggaagttcttttaaagatattataggaaagtttgaagaagatgacgaaacagacgcaatattaatgattggagaaataggcggtccccaggaagttgctgctggaaaattcgtaaaagaaaatatgaagaaaccagttattgcctatgttgcaggtttaaccgcgccaaagggaagagttatggggcatgctggagcaatagtttcagcatatggagaaagtgcagtagaaaaagttgagattttaaaggaatatggaattactatttcaaaaaatccatcagttatgggagatactgtaaaaaatgttattagcaaatcttaa

SEQ ID NO: 307962 - DNA, 631 bp, Unknown
  Bacterial polypeptide expressing nucleotide sequence isolated from the Sargasso Sea
gcgggtattaggttttgtgttgcgattactgacggcattccatcacaagatatgattcgtgttaagcgttacatgcgtcgctacaaagcagaagaaaaaatggttttaacaggccccaattgtgcaggcacaattagcccaggtaaaagcatgatgggaatcatgccaggacatatttatatgccgggaaatgtgggtgttattggtcgttcaggaactttgggttatgaagctgcttcacaaatgaaggaaattggtattggtatttcaacaagtgtaggtattggcggtgatccaattaatggcagttcatttaaggatcatttagaaatgtttgaaaaagacgatgaaacaaaagctgttgtaattatcggcgagataggtggaccacaggaagttgaagctgcaatgtgggcaaaggaaaatatgtcaaagccggttgttggttatattgccggtttaacagcaccgaaaggacgtcgtatgggtcatgctggtgcgattatttctgcggttggcgaaagcgctgccgaaaaagttgagatactagaagaatgtggagtgagcgttgttcctaatccttcgtcatttgctcctatcatcaaagatgttttagataaagctagttaat

SEQ ID NO: 307963 - DNA, 328 bp, Unknown
  Bacterial polypeptide expressing nucleotide sequence isolated from the Sargasso Sea
catggacggagaaccagctaattttttagatgttggaggtgcggctaatgttgatacaattaaaaatggctttaaaattattctctctgaccctaacgtaaaatcagttttgattaatatttttggtggtatagttagatgtgacagagtagctaatggagtcattcaagctgttaaagaattaaatttaaatgttggtgttgtcgttagactccaagggactaatgcaaaactggcaaaacaaattttagatgaatcagatatagaacttattagcgctgaaacaatagatgaagctgctaaaaaagcagttggattggtatcataa

SEQ ID NO: 307964 - DNA, 385 bp, Unknown
  Bacterial polypeptide expressing nucleotide sequence isolated from the Sargasso Sea
aatgtcagttttagtaaataaagataccaaagttatatgccaaggattcacaggagcgcatggaacttttcattctgaacaatctattaaatatggaactaatctagtaggaggtgttactccaaaaaaaggtggacaggttcatttagaaagacccgtgtttaatacggttcaagaggcaaaaactgaaactggcgctaatgccaccatgatttatgttcctgcaaaatttgcagctgcagcaataattgaagcaattgatgcttctatggaattaattgtttgtataactgaaggaattccaattttagatatgttaaaagtgaaaaaaaaattatttaaatcaaattcaagattaatcggaccaaattgccctggaattatt

SEQ ID NO: 307965 - DNA, 369 bp, Unknown
  Bacterial polypeptide expressing nucleotide sequence isolated from the Sargasso Sea
tatgtcaattttaattaataaaaatacaaaagttatttgtcagggttttacaggatctcatggaacatttcattctgaacaagcaattaaatatggaacaaatttagttggaggagttacaccaaaaaaaggtggccaaaagcatttagataaacccgtttttaatactgtaaaagaagcaatagaagaaactagagctactgcaacaatgatatatgtccctgcaaaatttgcttctaatgctattattgaagcaatagaagcatcaatggaacttatagtctgtattactgagggcatccctgtattagatatgcttaaggtgaagaaaaagttgagtgtatcaaaaagtagattaattggtcccaa

SEQ ID NO: 307966 - DNA, 765 bp, Unknown
  Bacterial polypeptide expressing nucleotide sequence isolated from the Sargasso Sea
gatgataccagaggcagtggttgctatgctagcatgtgggagaattggagcaattcactctgttgtattcggtggttttgcctcaaatgaattagctagcagaattgatgatagtaaagctaaaattttaatcacagcatcatgtggttttgaacctggaagaacagttgagtatagacctctagtagatggggctttaaaattagcaaatcaccaagttcaaaaagtaatattatttcaaagaaaagatcataaggtaaaattaaataaaccattggaaataagttgggatgaagcactatctggagcagatgataaagattgcgttgagatgggtgccaatgattatgcttacatactttatacttcaggaaccactggtattccaaaggggattgttcgagatattggtggtcacatagttgctcttaaatggacaatgaaaaatatttataacattgatcaagatgatgtgtggtggtcagcaagtgatattggttggatagtaggacattcctatattgtctatgctccattattcaaaggatgtgcaacacttctatttgaaggcaaaccagtgggtactcctgatgctggagtattttggagaataatatcagaatataaaattaagtcattattcacagctccaactgcattcagagcaataaagaaagaagatccagagggtaagtttttttctaaatatgatttaagttcatttgaatcattatttttagcaggtgaaagagcagaccccgatac

SEQ ID NO: 307967 - DNA, 616 bp, Unknown
  Bacterial polypeptide expressing nucleotide sequence isolated from the Sargasso Sea
aacctgtgtcgcatagtagacgggataccctcacacgacatgataagaattaaaagatatatgagaagatattcaagagttcaaaaaatgacattgatcggacctaattgtgctggagtgattagtccgggtaaagctatgcttggtataatgcctggacatatttataaagagggaaaagttggaattattggcagatcagggactcttggatacgaagcagctcagcaaatgaaaaatttaggaattggtgtttctacaagtgttggaatcggaggagatcctataaatggtagttcattcaaagatattttagaaaaatttgaagaagataaggaaacagatgcagttttgatgataggagaaattggtggaccgcaagaagttgcagctggaaagtttgcaaaagaaaatatgaaaaaacctgttattgcatatattgcaggtttaacagctcctaagggcagggtcatgggacatgctggagcaattgtttcagcatatggagaaagtgctgtagaaaaagtcgaacttttacaagagtgtggagtaaccatctctaaaaatccctctgtaatgggagaaactgtaaaatcggtattaggaaaaaaataag

SEQ ID NO: 307968 - DNA, 399 bp, Unknown
  Bacterial polypeptide expressing nucleotide sequence isolated from the Sargasso Sea
aacaacttaaagatttggaaattggtgtttcaacaagtgtaggtataggaggtgatcctataaatggaagttcttttagagatataattgaaaagtttgaaaatgatgatgaaactattgcagttttaatgataggtgaaataggcggcccacaagaagttgaagctggacaatttgctaaagaaaatatgagtaaaccagtaattgcgtatatagcaggactaactgcacctaaaggtcgtgtaatggggcatgctggtgctattgtttcagcttatggtgaaagcgcaatagaaaaagttgaacttcttaaagagtgtggagttacaatttccaaaaacccttctgtaatgggtgaaacagtaaaaaaagtattagtagaaaataatttggattaat

SEQ ID NO: 307969 - DNA, 249 bp, Unknown
  Bacterial polypeptide expressing nucleotide sequence isolated from the Sargasso Sea
gatgtctgttcttgttgacaaaaataccaaggtcatttgccagggcttcactggaagtcaaggtaccttccattcggaacaggccattgcctatggcacccagattgtcggtggtgtgacaccgggcaaagggggatcaattcatttggatcttcctgttttcgatacggtcgctgacgcggtgaaaggcaccgacgctaatgcttcagtgatttatgtgccaccgccgttcgctgcagacgctattct

SEQ ID NO: 307970 - DNA, 415 bp, Unknown
  Bacterial polypeptide expressing nucleotide sequence isolated from the Sargasso Sea
ttctagatcaggaactctgacatatgaagcttttaaacaaactacagatgcgggtttaggtcaaagtacatgtattggtataggcggagatcctgttaatgggacttcattcatagatgcattggaaatgtttgaaaatgattctcaaactgaatcaatagtcatggttggtgaaataggtggaagcgcagaggaagaagcagctgaatacattagagataatattaaaaagccagttgtttcatacatagctggtgtaactgctccaaaaggaaagagaatggggcatgcaggtgcaataatttctggaggcaaaggaacagctcaagataaatttaaagcactagaatcagtcggagtaggggttgtaactgacttaaatttaattggctctagacttaaagaatctctttaa

SEQ ID NO: 307971 - DNA, 827 bp, Unknown
  Bacterial polypeptide expressing nucleotide sequence isolated from the Sargasso Sea
tgatatttggtggtctgcaagcgatattggatggatcgtaggtcactcttacattgtttatgctccattattttatggttgtacgacaattttatttgaaggaaaaccagtaggtactcctgatgcaggtgtcttctggagaattatttcagaacataaagtgaaatcactttttacggctccaacagcaataagggcaattaaaaaagaagatcctaacggcgatttttttaagaagtatgacttaagtaaatttgaaaaactatttctcgcaggtgagagagctgatccagatacgattaaatggtttgaaaaactatctggctcaccagtaattgaccattggtggcaaactgaaacaagttgggctattacatcagactgcacaggtatagagtcatttcctgttaagtatggatcagcattcaagccagtcccaggttatgatttaaaagtattaaattctgaaggtaaagaggtcgatccaggaaaaatgggagatattgtagtaaaacttcctttgcctccaggcacttttcccacactttggggcgcagacaaaagatataaagaaaattatatgtcaacttaccccggttattacttaacttatgacgcgggtcatatagatgaggatggttatgtttggatcatgtctagaacggatgatattataaatgttgcaggccatagattgtctactggagcaatagaagaagttttagctgaacataaagatgttgcggagtgtgctgtccttggaattgctgataaactaaaaggacaattacctattgggcttcttgctttaaaagctggagtttaaa

SEQ ID NO: 307972 - DNA, 888 bp, Unknown
  Bacterial polypeptide expressing nucleotide sequence isolated from the Sargasso Sea
agtggcattaaaatggactatgaaaaatatttacaatattaaaccggaagatgtttggtggtctgctagtgatattggttggatagttggacactcgtacatagtatatggcccattattttacgggtgtacgacagttttatttgagggaaaacctgtaggaacacctgacgcaggcgttttctggagaataatctcagaacataaggtaaaatctctttttactgcaccaacagcaataagagctataaaaaaagaagatcctaacggagaattttttaaaaaatatgatttaagtaagtttgacaaattatttcttgctggtgagagagctgaccctgatacaataaaatggtttgaaaaactttcaagttctcctgtaatagatcattggtggcaaacagaaacaagttgggcaataacatcaagctgtactggaattgaaaattttcccgtaaaatatggttctgctttcaaaccagtgccaggttatgatttaaaagttttaaattctgaaggtaaagaagtaggcccgggtaaaatgggagatattgttgtaaagctacctctcccgccaggaacttttccaactctttggggagcggataaaagatataaagaaaattatatgaccacctaccctggatattaccaaacttacgatgcggggcacattgatgaagatggctatgtttggatcatgtctagaacagacgacataattaatgttgcaggtcataggttatcaactggagctattgaggaagttttggctgagcatacaaatgttgctgagtgtgcagtaataggaatagctgataaacttaaaggtcaaatacctattggtttgctagcacttaaggcaggagttaccaaagacaaaaaaga

SEQ ID NO: 307973 - DNA, 163 bp, Unknown
  Bacterial polypeptide expressing nucleotide sequence isolated from the Sargasso Sea
atgagtattattgttaacaaaactaccaaagttatctgtcaaggttttaccggatctcaaggaacttttcattcgcagcaagccataatttatggaacaaatatggttggaggtgtaactcctggcaagggtggaactaaacatttagatcttccagtttata

SEQ ID NO: 307974 - DNA, 748 bp, Unknown
  Bacterial polypeptide expressing nucleotide sequence isolated from the Sargasso Sea
aaacaccttaatcttccagtttttaatacagttaaagaagctgtagaaaataccggggcaagtgcatccatattatttgttcctcctgcatttgcagcagactctgctatggaagcagctgatgctggtattagaacctgtgttgccatagttgacggaataccttcacatgacatgattagaattaaaagatatatgagaagatattctaaatctgaaaagatgagtttagtaggtcctaactgtgctggaataataagtcctggaaaatcaatgcttggaattatgccaggacatatttataaagaaggacgtgttggaataattagtaggtcaggaacattaggatatgaagcagctcaacaacttaaagatttaaatattggtatttcaacaagcgtgggtataggcggtgatccaattaatggaagttcgtttaaagatattatagggaaatttgaagaagatgatgaaacagatgcaatacttatgattggtgaaattggtggaccacaagaagttgcagctggtcaatttgcaaaagataatatgaaaaaacctgtaatcgcctatattgctggtcttacagcgccaaaaggaagagttatggggcacgctggtgctatcgtttcagcctacggggagagtgcagttgaaaaagtagaaatattaagggaatttggtgttacaatatcaaaaaatccctcagtaatgggagaaactgttaaagaagttttatctaaataat

SEQ ID NO: 307975 - DNA, 687 bp, Unknown
  Bacterial polypeptide expressing nucleotide sequence isolated from the Sargasso Sea
catctattttatttgtacccccggcttttgcagccgactctgcgatggaagcagcagatgctggaataaaaatatgtgtagcaatagttgatggaattccatctcacgacatgattagaataaagaggtatatgagaagatatactaaaagttcaaaaatgacattagttggaccaaactgtgctggaataataagtcctggtaaatcaatgctaggaataatgccaggacatatttataaagaaggaagagttggaataataagtagatcaggaacattaggctatgaagctgcccaacaactaaaaaatttgaatattggtgtttcaacaagtgtaggaattggaggtgacccaattaatggtagctcatttagagatataattgaaaagtttgaaactgatgatgagacagatgcaatattaatgattggtgaaattggtggtccacaagaagtagctgcaggagaatttgcaaaagaaaatatgaagaaaccagttattgcttatatagcaggattaactgcaccaaaaggaagagtgatgggtcatgcaggggcaatagtttcagcttatggagaaagtgctattgaaaaagttgaaattcttaaagaatgtggaattacaatttctaaaaatccatctgttatgggtgatacagtaaaatcagttttagaaaaaatgtaac

SEQ ID NO: 307976 - DNA, 402 bp, Unknown
  Bacterial polypeptide expressing nucleotide sequence isolated from the Sargasso Sea
aatgtcgattttagtaaatcaaaattcaaaggttttagttcagggttttactggtagtgaaggaacattccatgcttcacaaatgatagattatggaacaaatgttgttggaggtgttactcctggaaaaggaggttccacacatcttgataaaccagtttttaacacagtaagtgaggctgttgcctcaacaggagctaacgtctcaattatatttgtgcctcctgcatttgctgcagatgcaattatggaagcagctaattcaggaattaaagttattgtgtgtattactgaaggcattcccgtaaaggatatgatcaaggcaaaagactacattaatgattatgactgtacacttattggacccaattgtcctggaattatcacagcagatgaagctaa

SEQ ID NO: 307977 - DNA, 656 bp, Unknown
  Bacterial polypeptide expressing nucleotide sequence isolated from the Sargasso Sea
acctccaatgtttgcagcagatgctataatggaagcagctgagtcaggaataaaaacaatagtaaccataactgaaggaattccaattaatgatatgacaaaagttgtatcttatattaagggaaagaatatcaggttaatcggtcctaattgtcctggaataattactccagatgaagctaaaatcggtattatgcctggttttgtatttaaaaaaggaaatgtaggtatagtatcaaaatctggcacattaacatatgaagctgctgatcaagttgttaaatctggacatggaatttcaagtgcaattggagtagggggagatccaataattggaacaaccctattagactctattcaactatttatggaagatgacgatactgatttaatagttctaattggagagattggtggtcaattagaaattgatgcagcagaatggataaaaaataatggaaataaaaaacctgtagttggttttattgcaggggaaactgcaccaaaaggtagaaaaatgggacatgctggcgcaataattggtggaaaagatgatacagcatctgcaaagaaaagaataatgagagaatcaggtgttaatgtggttgactctccagcagacattggtaaaactgtaaatgaaatacttaaataat

SEQ ID NO: 307978 - DNA, 446 bp, Unknown
  Bacterial polypeptide expressing nucleotide sequence isolated from the Sargasso Sea
aatgtctatacttgtaaataaaaattcaagagttgtagtccaaggaataactggttcagagggtgagtttcataccaagcaaatgcttgattatggtacgaatattgtagccggtgttacccctggtaaaggaggacaatccgttttagatggtagcatcaatgtctatgattctgttgagcaatctatagaaaaaaccagtgccaataccgcgataatttttgtaccccctccctttgctgctgaagcaataattgaatcaagttatgcaggtatagaaaccattgtatgtatcactgaaggcgtaccaatacatgacatggttaaggtcaaacaaatagtgaaaagaaatcaaacaagattaatcggaccaaattgtccaggtattattacagtagatgaatgtaaacttggaattatgccagggtttatatgcaaaaaaggaa

SEQ ID NO: 307979 - DNA, 355 bp, Unknown
  Bacterial polypeptide expressing nucleotide sequence isolated from the Sargasso Sea
aagtgtaggaattggaggagatccaataaatggaagttcatttagagatataattgaaaaatttgaaacagatgatgagaccgatgcaatattgatgattggtgaaattggtggtcctcaggaagtagctgcaggagaatttgcaaaagaaaatatgaagaaaccagttattgcttatatagccggacttactgcaccaaaaggaagagtgatgggtcatgcaggcgcaatagtttcagcttatggagaaagtgcaatagaaaaagttgaaattttaaaagaatgtggaattacaatttctaaaaatccatctgttatgggtgatacagtaaaatcagttttggaaaaaatgtaa

SEQ ID NO: 307980 - DNA, 409 bp, Unknown
  Bacterial polypeptide expressing nucleotide sequence isolated from the Sargasso Sea
tcaggaactctcacatatgaggctgtgaaacagactacagatgcaggcctaggtcaaagtacatgtatcggtataggtggagatcctgttaatggaacttcatttatagatgcattggaaatgtttgaaaacgaccctcaaactgaatcaatagtcatggttggtgaaataggtggaagcgcagaagaagaagcagctgaatatattagagataatattaaaaagccagttgtttcatacatagctggtgtcactgctccaaaaggtaagagaatgggccatgcaggtgcaataatttctggaggtaaaggaacagctcaagataaatttaaagcattagagtcggcaggagtaggggtagtaactgatttaaatttgattggttccagactcaaagaatctctttaaa

SEQ ID NO: 307981 - DNA, 670 bp, Unknown
  Bacterial polypeptide expressing nucleotide sequence isolated from the Sargasso Sea
gcgattcggcagcccgggcaaagccatgtacggctacggtgtgaagctgatcgatgaggccacgggtgaagagctgacaggccccaaccagaagggcgtggtcgccatcgagggcccgctgccccccggctgcatgcagaccgtgtggcgcgacgacgcccgctttgtgaacacctactggaagagcatccccggccgcctcatctacagcacgtttgactggggcatccgcgatgcggatggctaccacttcatcctgggccgcacggacgacgtgatcaacgtggccggccaccgcctgggaacgcgagagatcgaggagagcattgcctcccaccccaacatcgccgaagtggcggtggtgggcgtggccgacagcctcaagggccaggtggccatggcgtttgccgtggtgcgcgacgcctcgggcctgaccgatgacgccgcacgcctcaagctcgaaggcgaggtgatgaagcaggtggatcaccagctgggcgccgtggcgcgaccgtcgcgcgtgtacttcgtgaccgtgctgcccaagacccgcagcggcaagctgctgcgccgcgccctgcaggccgtggccgagcggcgcgacccgggcgacctgacgacaatggaagacccggctgcgctgcagcaggtgaaggacctggtgggttga

SEQ ID NO: 307982 - DNA, 861 bp, Unknown
  Bacterial polypeptide expressing nucleotide sequence isolated from the Sargasso Sea
ctttacacatcaggaactacaggccttccaaaaggtattgttcgtgatattggtggacatatagttgcattaaaatggactatgaaaaacatttacaatatcaaaccagaagacgtgtggtggtccgctagtgatattggttggattgttggacattcttatatagtgtatggcccattattttatggctgtacgacagttttgtttgagggaaaaccagtgggaactcctgatgcaggggttttttggagagttatttcagagcataaagtaaaatctctttttactgcgccaacagcaataagagctataaaaaaagaggatccaaacggagaattttttaaaaaatatgatttaagtaaatttgataaactatttcttgctggtgaaagagccgaccctgatacaataaaatggtttgaaaaactttctaactcacctgtaatcgatcattggtggcaaactgaaacaagttgggcaataacatcaagttgcacaggaatagaaaattttcctgttaaatacggatcagcttttaaaccggtgcctggttatgatttaaaagttttaaattctgagggtaaagaagtaggtccaggaaagatgggtgatattgttgtcaagcttcctcttccgccaggaacttttccaactctttggggagcggataaaagatataaagagaattatatgactacttacccagggtattatcaaacttacgatgcgggacacattgatgaagatggttatgtttggatcatgtctagaacagacgacataattaatgttgcaagtcatagattatctactggagctattgaagaagttttggcagaacatccaaatgttgcagagtgc

SEQ ID NO: 307983 - DNA, 615 bp, Unknown
  Bacterial polypeptide expressing nucleotide sequence isolated from the Sargasso Sea
gtgagcaaggtattcctctcattatatgcataactgagggagtgccaactatggacatgcttgtggttaagaataagattgatcaactcggcattactttaattggacctaattgtccgggtattattactcccgatgaagcaaaacttggcatcatgccaggcgatattcataaaaaaggtcgtattggtattatttctagatcaggtactcttacatatgaggcagttaaacaaacaacagatttaggtcttgggcaaagttcatgtgtaggtatcggtggtgatccaatacctggatcttcattcattgatatgcttgcactcttcaatgatgatcccgatacagatgctattattatggtaggtgaaattggtgggaatgcagaggaagaagcagcgaaatacatatctaaccatgttaataaaccagtaatttcatatattgctggacagactgcaccatcaggtaaacgaatgggtcatgctggagcaattattgccggaggcaagggtactgctgaagataaaatgaaaacactgcaaagtgccggcgttcacgttgttgataatctccttgagattgggattagaactcaacaagttttggattaat

SEQ ID NO: 307984 - DNA, 840 bp, Unknown
  Bacterial polypeptide expressing nucleotide sequence isolated from the Sargasso Sea
agaattggagcaattcactctgttgtattcggtggttttgcctcaaatgaattagctagcagaattgatgatagtaaagctaaaattctaattacagcatcatgtggatttgagcctggaagaacagttgaatatagaccacttgtagatggagctttaaaattagcaaaacatcaagttgaaaaggtaataatatttcagagaaaagatcacgaggtaaaattaaataagccattagaaataagttgggatgaagcgctatctggggctaatgataaagattgtgttgagatgggtgcaaatgattatgcttatatcctttatacttcagggaccacaggtattccgaaaggaatagttagagatattggcggtcacattgttgctcttaaatggacaatgaaaaatatttataacattcatcaagatgatgtatggtggtcagcaagtgatattggttggatagtaggacattcctatattgtttatgctccattattcaaaggttgtacaactcttttatttgaaggcaaaccagtgggtactcctgatgctggagtattttggagaataatatcagaatataaaatcaaatctttgtttacagctccaacagcatttagggcaataaagaaagaagatccagaaggtaagtttttttctaaatatgatctaagttcatttgagtcattatttttagcaggtgaaagggcagatccagatacaattaaatgggctgagaatttacttaaagttcccgtaattgaccattggtggcaaactgaaacgagttgggcgataagttcaaattgtactggaatagaaatgcaagaaacaaaa

SEQ ID NO: 307985 - DNA, 631 bp, Unknown
  Bacterial polypeptide expressing nucleotide sequence isolated from the Sargasso Sea
aatgtctatattgattgatgaaaatactaaaataattgtccagggcttcactggtaaaataggaagttttcatgcgcaagaaatgattgattacggatctaacgttgttggaggtgttactcctggcaaagggggatcaacacatcttgaccttcctgttttcaataccgttaaagatgcagtaaaagaaacaggtgctgaagcaagtatcttatttgttccaccaagttatgctgcggactctgctatggaagcagctgatgcaggtatcaaagtatgtgttgcgataactgacggaataccctctcacgacatgattaaagtgaagaggtatatgcgaagatatgcaaaatctgaaaaaatgacgatgattggtcctaactgcgcaggtataattagccctggcaaatcaatgctgggcataatgcctggacatatttataaaaaaggaaatgttggcattgttggccgatcaggaacactgggctatgaagccgcatcacaaatgaaagagctagatattggagtttcaactagcgtaggcattggcggagatccgattaatggaagttcattcagggatgtactagctcggtttgaagaagatcctgataccgatattatattgatg

SEQ ID NO: 307986 - DNA, 581 bp, Unknown
  Bacterial polypeptide expressing nucleotide sequence isolated from the Sargasso Sea
agtaattatatctatgctagcttgtgctagaataggagctatacattctgttgtatttggtggttttgctgcagaagaactagctagtagaatttctgatgtaatgccaaaagtcgttatttctgctagttgtggtttagaacccaaaagaataattgactataaagaaattttagataaagctctatctcttacatctcataagcctttaaagcagattatatatcaaagagaacagcacttatgtaaattaagcttagaaaatgatatttcatggaatgaatttgttgacacctcttcctcaatcaattgtgtacctattgggtctaacgaaccattatatattttacatacatctggcactacaggaataccaaaaggaatagtaagaactaatggtggacatgctgttgctttattaaatagcatgaaaatgacttatgatatttctgaggatgatgttttttgggctgcatcagacgtaggatgggtagttggtcactcttacatagtttatgctccacttttactaggatgtagtactgtattatatgaaggtaagcctgttggaactcactgat

SEQ ID NO: 307987 - DNA, 376 bp, Unknown
  Bacterial polypeptide expressing nucleotide sequence isolated from the Sargasso Sea
gatgtcaattattataaataaagatactaaagtcatttgtcagggtattactggttctcaaggaacttttcattctcaacaagcaattaactatggtacaaatttagttggtggtgtcacacctggaaaaggaggcataaaataccttggtttacctgtgttcaacacggttcatgaggcggctgaatctactaaggcagacgcaactgtaatatatgtaccagcaaaatttgccactaaagcaattcacgaagctttagatgcaaagataaaaaccatagtttgtattacagaaggtattcctgttttagacatggttagaataaaacaaagaattattgatcagaagacaattttatcggccctaattgtcctg

SEQ ID NO: 307988 - DNA, 868 bp, Unknown
  Bacterial polypeptide expressing nucleotide sequence isolated from the Sargasso Sea
taccacaggtttaccaaagggtatagtcagagatattggaggacatatcgttgctttaaaatggactatgaaaaatatttataacattgatcaaaacgatgtttggtggtctgcgagtgatattgggtggatagtgggtcattcatacattgtctatgctccattgttttatggttgtactactattctttttgaaggaaagcctgttggtacacctgatgcaggcgtattttggagagtaatttcagaacataaagtgaaatcattgtttacagctccgactgctatcagagcaattaaaaaagaagatcctgaaggaaaatattttaaaaaatatgatttaagtaaatttgatacattgtttttagctggagaacgagccgacccagatactataaagtggtttgagaatttatcaaactcaccagtgattgatcattggtggcaaactgaaacaagttgggcaataacatctagttgcacaggtatagaaaaatttccagtcaagtatggatctgcatttaagcctgttccagggtacgatttaaaggttttgaattcagaaggaaaagaggtcggtccaggtaaaatgggagacatagttgtcaaacttcctcttccaccaggaacttttccaactttatggggtgctgacaaaagatacaaagaaaattacatgactaattatccaggttattatcaaacctatgatgcagggcacatagatgaagatggttatgtttggataatgtcaagaactgatgacataataaatgttgctggccacagactttcaacaggtgcaatcgaagaagttatggctgaacataaatcagttgcggaatgtgctgtaattgggattgcagac

SEQ ID NO: 307989 - DNA, 298 bp, Unknown
  Bacterial polypeptide expressing nucleotide sequence isolated from the Sargasso Sea
atgagcatacttattgattcaagcactaaagtgatttgtcagggatttaccggtggccaaggaaccctgcacagcgaacaggctattgcatatgggaccaagctggtgggaggagttactccaggaaaaggcgggactcagcatctcgacctaccagtttttgataccgtcgcggatgcggtaaacaatactggagcgaccgctagtgtcatctatgtgccagctggtttttgcaaggattctattctggaggcgcttgacgccggtatagagcttaaagtgtgtatcactgaaggca

SEQ ID NO: 307990 - DNA, 331 bp, Unknown
  Bacterial polypeptide expressing nucleotide sequence isolated from the Sargasso Sea
attgtatggaaataaaccagctaattttttggatgtaggaggtggagcatcaaaagaaaaagtttcagctgccctaaagataattctttctgataaaaatgttaaaggaatcctaataaatatttttggtggaataatgagatgtgatgttcttgctcagggagttgttgatgccgccaaagagattaatataagtgttcctttagtagtaagactagctggaacaaattttaaggagggaaaagaaatacttgataattctggtcttaaattaatttcagcagaaaatttagatgatgcagcaaaaaaaattgtagaggctataaagtaa

SEQ ID NO: 307991 - DNA, 711 bp, Unknown
  Bacterial polypeptide expressing nucleotide sequence isolated from the Sargasso Sea
aaggagggtcaaagcatttaaatttaccggtattcaatacagttaaagatgctgtgaatgaaacaggagctgacgcttcgattttatttgtaccaccagcttttgcagcagactctgcaatggaagcagctgatgctggtataaaaatatgtgtagcaatagttgatggaataccttctcacgacatgatcaggattaaaagatatatgaggagatatactaaaagttctaaaatgacactagttggaccaaactgtgcaggaattattagtcctggaaaatcaatgttagggataatgcctggacatatttataaagaaggtagaattggaattattagtaggtcaggaacattaggttatgaggctgctcaacaacttaaaaatttaaatataggtgtttcaacaagtgtgggtattggaggagatccaataaacggaagctcatttagagatattatagaaaaatttgaagcagatgatgagactgatgcaatattaatgattggcgaaattggtggcccacaggaagtagctgcgggagaatttgctaaagaaaatatgaagaagccagttgttgcctacatagctggattaactgcaccaaaaggaagagtgatgggtcatgcaggagcaatagtttcagcttatggtgaaagtgcaattgaaaaagttgaaattttaaaagaagtgtggaattacaatttctaaa

SEQ ID NO: 307992 - DNA, 444 bp, Unknown
  Bacterial polypeptide expressing nucleotide sequence isolated from the Sargasso Sea
tatgtcagttttaattaataaaaatacgaaagttatatgccaaggctttacaggatctcatggaacttttcattctgaacaggcaataaaatatggaacaaatttagttggtggagttacaccaaaaaaaggaggacaagttcaccttcaaagacctgtatttaatacagtcaaagaagccaaggaaaatacaggagctaacgcttctatgatttatgttccagcaaaatttgcaggaacagcaataattgaagcaatagatgcatctatagaattaataatttgtattacagaaggaattccagttctggatatgcttaaagttaaacaaaaattaactaaatctaattcaagattaattggtccaaattgtccaggtattataactccagatgagtgtaagattggtattatgcctggaaatattcataaaaaaggatcagt

SEQ ID NO: 307993 - DNA, 943 bp, Unknown
  Bacterial polypeptide expressing nucleotide sequence isolated from the Sargasso Sea
tatagttgctttgaaatggacaatgaaaaatatttataacattaatcaagatgatgtgtggtggtctgcaagtgacattggatggattgtaggtcattcttatattgtttatgcccctttattttacggatgtactacagttttatttgaaggaaaacctgtgggcactcctgacgcaggggttttttggagagtaatctcagaacataaagtaaaatctttatttactgcacctacggcaattagagcaattaagaaagaggatcctaatggagatttttttaaaaagtatgatttgagtaaatttgagaaactttttttagctggggaaagagctgatccagatacaattaagtggtttgaaaaactttctggctctccagttattgatcactggtggcaaactgaaactagttgggcaattacgtctgactgtacagggatagagtcttttccggtaaaatatggttctgcttttaaaccggttccaggttatgacttaaaagtattaaattctgatggtaaagaagttggtcctggtaaaatgggagatatagtagttaaacttcctttgcctcccggtacttttccaactctttggggggcagataaaagatacaaagaaaattatatgtccacctacccaggttattatttaacttatgatgcggggcatattgatgaagatggttatgtttggattatgtccagaacagacgacataataaatgttgcgggacatagactatcaaccggagcaattgaagaagttttagctgaacataaagatgtcgcagagtgtgctgtccttgggattgctgataaacttaaaggacaattgcctattggactgcttgctttaaagtctggtgttataaaagataaaaatgaaataatttcagaatgcgtaaaaatggtcagagataaagtgggtccagtagct

SEQ ID NO: 307994 - DNA, 529 bp, Unknown
  Bacterial polypeptide expressing nucleotide sequence isolated from the Sargasso Sea
aatgacactagttgggccaaactgtgcaggaattattagtcctggaaaatcaatgttaggaataatgcctggacatatatataaagaaggtagaattggaattattagtagatcaggaacattaggttatgaggctgcccaacaattaaaaaatttgaatattggtgtttcaacaagcgtaggaattggaggtgacccaattaatggtagctcatttagagatataattgaaaagtttgaaacagatgatgagactgatgcaatattaatgattggtgaaattggtggtccacaagaagtggctgcaggagaatttgcaaaagaaaatatgaagaaaccagttattgcttatatagcaggattaactgcaccaaaaggaagagtgatgggtcatgcaggggcaatagtttcagcttatggagaaagtgcaattgaaaaagttggaattttaaaagagtgtggaattacaatttctaaaaatccatctgttatgggtgatacagtaaaatcagttctagaaaaaaagtaa

SEQ ID NO: 307995 - DNA, 501 bp, Unknown
  Bacterial polypeptide expressing nucleotide sequence isolated from the Sargasso Sea
catgtcgatctacatcaacaaagacaccaaggtcatcacccagggcatcacgggcaagactggccagttccacactgaaaagtgccaggaatacgcgaacggcaagaacgctttcgtggcgggcgtgaaccccaagaaggccggcgagtcgatcttcaacatcccaatctacgcctccgtcaaggaagccgcccagcagactggcgccaccgtgtcggtgatctacgtgcctccagcaggcgccgcagacgcgatctgggaagccgtcgaagccgacctggacctggccatttgcatcaccgaaggcattcccgtcaaggacatgctgatggtgcgcaacaagatgaaggccaaggaagctgccggcggcaagaagacgctgctgctgggccccaactgccctggcctgatcacgcctgacgaaatcaagatcggcatcatgcccggtcacatccaccgcaagggccgtatcggcgtggtgtcccgttcgggcacgctgac

SEQ ID NO: 307996 - DNA, 625 bp, Unknown
  Bacterial polypeptide expressing nucleotide sequence isolated from the Sargasso Sea
gatgctgggaataaagtatagtgtatgtataactgacggtattcctgcgcaagatatgatacgagtgaaacgttatatgtatagatatccaatagaaaaacgcatggttttgactggtccaaattgtgcaggtacaattagtccaggagaagctttacttggaataatgcctggtcatatctaccttcaagggactgtcggtattgttagtcgctcaggtactttggggtacgaagccgctgaacagttgaaagcacatggtattggagtttctacatctgtgggtattggtggtgatcctataaacggttcgtcgtttaaagatattatgcaacgctttgaagaggatggtgatactcatatcatttgtatgatcggtgagataggtggtccacaagaagcagaggctgcagcatatataaaagaacacgttaagaaacctgttgttgcctatgtagcaggattaactgcaccaaaaggcagaactatggggcacgctggtgcaattatttctgcattcggtgaaagtgccagtgaaaaagtagagattttatcggcagcaggtgtcacggttgctccaaaccctgctgttattggtgatactattgctaaggttatgaagtaa

SEQ ID NO: 307997 - DNA, 691 bp, Unknown
  Bacterial polypeptide expressing nucleotide sequence isolated from the Sargasso Sea
agcatcaatattatttgttccaccagctttcgcggcagactcagcaatggaagctgctgatgctggaattaaaacatgtgttgcaatagtagacggaataccttctcacgatatgatcaaaattaaacgttatatgagaagatattcaagaactgaaaaaatgactttagtaggacctaattgtgctggagtgattagtcctggaaaagcaatgttaggtattatgccgggtcatatatataaagaaggaaaaattggaataattggaaggtctggtacattaggatatgaggcagcacaacaattaaaaaatttaaacattggtgtttcaacaagtgttggtattggaggtgatccaattaacggaagttcatttaaagatattttagaaaaatttgagcaagacgatgaaacagaagcagttttaatgattggcgaaataggaggaccacaagaagtagctgcaggaaaatttgcaaaagaaaatatgaagaaaccagttatagcttatattgcaggtttgacagcgccaaagggaagagtaatgggtcatgcgggcgcaatagtatcagcttatggagaaagtgctgttgagaaagttgagcttttaaaagaatgtggagttattatttctaaaaacccatcagttatgggtgaaactgtaaagttagctttaaatagtaaaacttaa

SEQ ID NO: 307998 - DNA, 853 bp, Unknown
  Bacterial polypeptide expressing nucleotide sequence isolated from the Sargasso Sea
gcgtcttgtggttacgaacctggtagaacagttcattataagcctctagttaacaaagcattagaacttgctagtcataaaccagacaaatgcataatttttcaaagagaaaaagataaagcagatctcaatccagctatggatattacttgggaagattctcttaaagatgttaagcctgctgattgtgaaaaaatgaatgctaatgattatgcgtacatcctttatacatctggcacaactggattacctaaaggtatagtaagagatattggtggacacatcgttgcgcttaaatggacgatgaaaaatatttataatatcaatcaagacgatatttggtggtctgcaagtgatattggctggattgtaggtcattcttatattgtttatgctccactattttatgggtgcacaacaattttatttgagggaaaaccagtaggaacaccagatgcaggagtattttggagagttatctcggaacataaagttaaatctctctttacagctccaactgctataagagcaattaaaaaagaggatcccaatggagaattctttaaaaaatacgatttaagtaaatttgaaaaactatttttagctggtgaaagagcagacccagatactattaaatggtttgaaaaactttcaaactcgccggtaattgatcattggtggcaaactgaaacgagttgggcaataacatctgattgtactggtatagagtcattcccagttaaatatggttcagcatttaaacctgttccaggttatgatttaaaagttttaagttcagatggtaaagaagttggcccaggaaaaatgggagatatagttgttaaacttcctt

SEQ ID NO: 307999 - DNA, 643 bp, Unknown
  Bacterial polypeptide expressing nucleotide sequence isolated from the Sargasso Sea
tatggaagctgctgatgcaggaattaaaagttgtgttgctatagttgatgggattccttctcacgatatgattagaattaaacgttatatgcgaagatatactagatctgaaaaaatgagtttagtgggcccaaactgtgctggaattataagcccgggtaaatcgatgttgggaattatgcctggtcatatatataaagagggacggattggaataataagtagatctggaactttaggatatgaagccgctcaacaattaaaaaatctaaatattggagtttcaacaagcgttggtattggtggagatcctattaatggtagctcttttaaagatattataggcaagtttgaagaagatgatgagacagacgctatattaatgataggtgaaattggtggaccgcaagaagttgcagctggtgagtttgcaaaagataatatgaaaaaaccagttatagcttatattgcaggtttaacagctccaaaaggtagagttatgggtcatgcgggagctatagtatctgcttatggtgaaagcgcagttgaaaaagttgaaattttaaaagagtatggaattacaatctcaaaaaatccatctgttatgggcgaaactgtaaaaagtgttcttagcaaatcttaa

SEQ ID NO: 308000 - DNA, 946 bp, Unknown
  Bacterial polypeptide expressing nucleotide sequence isolated from the Sargasso Sea
tttggggggtttgcagctaacgagttagcgagcagaattgatgattcaaaagctaaaataattatttctgcgtcatgtgggtatgaacctggaagaactgttcattacaaaccgttattaaataaagctatagaaattgcaaatcataaacctgaaaaatgtataatttggcaaagagaaaaagataaagcagaacttgatcctaaaagagatattgattggctggaatgtttaaaaggagctaaacctgccgaatgtgaaaaaatgaatgcaaatgattatgcttatattctttatacatcaggaactactggaactccaaaaggaatagttagagacattggtgggcacatagtagctttaaaatggacaatgaaaaatatttacaatattgatcaagatgatgtttggtggtctgcaagtgatatcggatggatagttggtcactcatatatcgtttatgctccactcttttatggatgtacgacagttttatttgaaggaaaaccagtgggcactcctgatgcaggtattttttggaaaataatatcagaatataaggtgaaatctttatttaccgctcctacagcaataagagctataaaaaaggaagacccagatggaaaattttttaaaaaatatgatttgtctaaatttgatactttatttttagcaggtgaacgtgcagatccagatacaattaaatggtttgaaaaactttctaatgctcctgttatagatcactggtggcaaactgaaacaagttgggccataagtgctaattgcgcaggaatagaaaaatttccaattaaatatggttctgcctttaaaccagttcctggttatgatttaaaagttcttaatagcgaaggtaaagaaaataaaccaggtcagatgggcgacatcgttgtaaaattacctttacctccaggaacttttccaactt

SEQ ID NO: 308001 - DNA, 357 bp, Unknown
  Bacterial polypeptide expressing nucleotide sequence isolated from the Sargasso Sea
catgcattggtattggaggagacccaatcaatggtacaaattttatagattgtttagatttatttttgaaagacgaaagtacaaaatcaattgttatgattggcgaaattggtggaagcgctgaggaagaggcagctgaattcatctctaaacatcaaataaaaaaaccaatggttggttttatcgccggtcttacagcacccaaaggtaaaagaatgggacatgcgggagcaattatttctggcgggaaaggtggagccaaagaaaagataaaaattttgcaaaaagcaggtattacaattacagagtcgcctgcagatattggaaaaaccttacttaataaattgtcactttaaa

SEQ ID NO: 308002 - DNA, 709 bp, Unknown
  Bacterial polypeptide expressing nucleotide sequence isolated from the Sargasso Sea
atgtctataattattcataaaaatactaaaattttagttcagggatttactggtaaaataggttcatttcacgcagaagaaatgattaaatacggctctaatgtagttggtggtgtgactcctggaaaaggaggtttgactcacttaaatcttcctgtttttaatacggttaaagaagcagttgaaaaaactggtgcttctacatcaatactttttgtgccacctacttttgcagctgactcagcaatggaagctgctgatgctggtattaaaacttgtgttgctattacagatggtattccatctcatgatatggttaaaatcaaaagatatatgagaagatactcaaaagataaaaaaatgggattagttggtcctaattgtgcaggtataatcagtcctggtaaatctatgttgggtataatgcctggtcacatttataaagagggtaaaataggaattgtaagcagatcaggaacacttggctatgaagcagctcaacaacttaaagatttagatattggtgtttctacaagtgtaggtattggtggagatcctattaatggtagctcttttagagacataattgagaaatttgaagctgatgacgaaacaatagccgttttaatgattggagaaataggagggcctcaagaagttgccacaggtcaatttgctaaagaaaacatgaataagcctgttattgcct

SEQ ID NO: 308003 - DNA, 838 bp, Unknown
  Bacterial polypeptide expressing nucleotide sequence isolated from the Sargasso Sea
aaaaataaagcaagtttaaactctaaaatggatataacttgggaagagtctcttaataatgtaaaacctgaaagttgtgttgagatgaacgcaaatgattacgcatatattttatatacatcgggtactacaggcttaccaaaaggaattgtgagagacataggtgggcatattgttgctttaaaatggactatgaaaaatatttataatattgatcaagatgatgtttggtggtcagcaagcgatattggatggattgtgggtcactcatacattgtatacgctccattattttacggttgtacaactattctatttgaaggaaaaccagttgggacacctgatgctggagttttttggagagtaatttcagaacataaagtaaaatcgttatttacagctccgaccgctataagagcaatcaaaaaagaagatcccgacggaaaattctttaaaaagtatgatttaagtaaattcgatacactatttttagcaggagaaagagctgatccagatactattaaatggtttgaaaatttatcaaactcaccagtaattgatcattggtggcaaacagaaacgagttgggcaataacgtctagttgcactggtattgaaaagtttcctgtaaagtatggctctgcatttaaaccagttccaggatatgatttgaaagttttaaactctgaaggaaaagaggtcggtcctggaaaaatgggagacatagttgtaaaacttcctcttcctccaggaacatttccaactttgtggggcgctgacaaaagatacaaagaaaattacatgacaaattaccctggttattatcaaacctatgatg

SEQ ID NO: 308004 - DNA, 466 bp, Unknown
  Bacterial polypeptide expressing nucleotide sequence isolated from the Sargasso Sea
aatgcctggaagtatacataaaaaaggatcagttggaattgtttcaagatcaggaactttgacttatgaggctgttgcgcaaacatctattaatggtatgggacaatcaacttgtatagggattggaggcgacccaataaatggtacgaattttatagattgcttagaactttttttaaaagataatgatacgaaatccatagttatgattggagaaattggaggttcagctgaagaagaggcgtccgagtttttaaaaaaagagaaaataaaaaagcctatggtcggatttattgctggtttgacagctcctccaggcaggagaatgggacacgcaggagcaataatatcaggtggaaaaggaggagcggaggacaaaattgaaatgatgaaatcagcaggaattactatatctaaatcaccagcagacataggtaaaactatgtatgataaacttaatagttga

SEQ ID NO: 308005 - DNA, 436 bp, Unknown
  Bacterial polypeptide expressing nucleotide sequence isolated from the Sargasso Sea
aggaagtataggaatagtttcaaggtctggaactttaacatatgaagctgtagatcaaactactgcatgtaaattaggacaaactacatgtgtaggaatagggggtgaccccgttcctggaactaattttatagacactttagagctttttttagctgacgaatccacgcaaggtattattatgattggagaaattggaggctcagctgaagaggaagcagcagaatttataaaaaggtcaaaaataaaaaagccaatggtaggttttattgctggattaagcgcgccggaaggcaaaagaatgggacatgcaggagcaataatatcagggggtagtgggggagctgaagataaaattgaagctctaaagtcagcaggagtatcgattgcttcttctccggctacaattggagaagagatgttaaaaattatatga

SEQ ID NO: 308006 - DNA, 873 bp, Unknown
  Bacterial polypeptide expressing nucleotide sequence isolated from the Sargasso Sea
cactctgtagtctttggtggatttgcatctactgaacttgcaagcagatttgatgatagtaaagcaaaactattagttactgcttcatgtggttttgaacctggaagaatagttgagtataaacctttagttgatgaagcaatcaaaatagcaaatcataaaatagagaagatgattttattccaaagaccaggtcacgaggtaaaattaaatgctcctcttgaaattagctgggatgaagttgtatctaatgcacaaccagctgattgtgttgagatgaactccaatgagtttgcgtatattttatatacctcaggcacaactggaactccaaaaggaatagtaagagatgttggtggtcacattgttgctttgaagtggaccatgaaaaatatttataatattgatgccaatgatgtctggtggtcagcaagtgatattggatggattgttgggcactcatatattgtttacgcaccattgtttaaaggatgcacaacagttttatttgaaggtaagccagttggaactccagatgctggagcattttggaaaattatttcagactataaagttaaatctttgtttaccgcaccaactgcatttagagcaattaagaaagaagaccctgagggtaagtttttttcaaagtatgatctaagtagttttgaaagtttatttttagcaggagaaagagctgatccagacacgataaaatgggctgaaaatttacttaaagttccagtgattgaccattggtggcaaactgaaacgagttgggcaattagttcaaattgtactggaattgagatgatggaaactaaatacggctcagcttgtaaagcagtaccaggctatgatgtaaaaatcatc

SEQ ID NO: 308007 - DNA, 348 bp, Unknown
  Bacterial polypeptide expressing nucleotide sequence isolated from the Sargasso Sea
tggatattatcaaacaatttggcgaagagcctgcgaattttttagatttaggaggcacagcaaataaagatagagtcataatgggctttaaaatcattcaatcggatccaaatgttaaatctatattgattaatatatttggtggtatcatacattgtgacatgattgctaatggaattgttgaggcagtaaaagaattagattttaaactacctttagttgttcgatttcaaggaacaaactcaagtgagggaagagatgtaattaataattctgatctaaaattaatttctattgatgattttacagaagcagcgaaaaaagtagtggatttggctaagggataat

SEQ ID NO: 308008 - DNA, 365 bp, Unknown
  Bacterial polypeptide expressing nucleotide sequence isolated from the Sargasso Sea
tattattgtaaatttagaaactaaagtaatttgtcagggcttcactggagctcagggaacatttcattctgaacaagcaattgcatatggtacaaatatggtaggaggtgtttcaccaggaaaaggtggaagtaaccatttagacttacctgtttacaatactgttgatgaggctgtttataatacaggtgctaatactagtgtaatttatgtgcctcctccatttgcagccgatgctatattagaagcaattgaagcaaatctagatttaattgtatgtataacggaaggaattccaatactagatatggttagagtaaaaaatgttttaaacaattctaaaagtaggttaataggaccaaact

SEQ ID NO: 308009 - DNA, 306 bp, Unknown
  Bacterial polypeptide expressing nucleotide sequence isolated from the Sargasso Sea
aatgtctattttagtaaataaaaatacaagacttatatgccaaggttttactggttctcaaggaacgtttcattctcaacaagcaatagcttatggtacaaatcttgttggaggtgttacaccaggtaaaggaggtaaaactcatttaaatttaccagtatttaactcagtttcagaggcagtcaaacaaacaaaagcaaatgcaactgtaatttatgttcccgctaaatttgcaactaaagcaattcatgaagccttggatgcaaatatagaactaattgtttgtattacagagggcattccagt

SEQ ID NO: 308010 - DNA, 790 bp, Unknown
  Bacterial polypeptide expressing nucleotide sequence isolated from the Sargasso Sea
gtctgcaagtgatataggctggatagttggtcactcttatattgtttacgctccgctcttttatggttgcacaactgttttatttgaaggtaagccagtaggaactcctgatgctggtgttttttggagaataatttcagaatataaagtaaaatcactttttactgccccaacagcaataagagcaattaaaaaagaagatcctgacgggaaattcttcaaaaaatatgatctatctaaatttgatactttgtttttagctggtgagcgtgctgatccagatacaataaagtggtttgaaaaactttcaagtgctcctgttattgatcactggtggcaaacagaaactagttgggcgataagcgcaaattgtgcaggaatagagaagtttccaattaaatatggttcagcttttaaaccagtgcccggttatgatttaaaagttttaaatagcgaaggaaaagaaaataaagcgggtcaaatgggtgacattgtagttaaattgcctttaccaccaggaacttttccaactctgtggaatgcagatgaaagatacaaaaaagtttatatgtcaacctatgatggatattatcaaacgtacgatgcaggtcatattgatgaagatggttacgtttggattatgtctagaacagacgatatcattaacgtagcaggccatagattgtctactggtgcgattgaggaagttttggcagaacataaaaatgttgcagagtgtgctgtaataggaattgctgacaaattaaaaggacaacttccaattggatta

SEQ ID NO: 308011 - DNA, 757 bp, Unknown
  Bacterial polypeptide expressing nucleotide sequence isolated from the Sargasso Sea
tcaaaacatttaaatttaccagtttttaatacagtaaaagaagctgtagaaacaactggagcatcagcttcaatattatttgttcccccagcctttgcagcagattctgcaatggaagcagctgatgctggtataaaaacatgtgttgccatagttgatggaataccatcgcatgatatgattagaataaaacgttacatgagaagatattctagagtgcagaaaatgactttagttggacctaactgcgcaggagtgatcagtccaggtaaagcaatgctcggaattatgccaggtcatatttacaaagaaggaagggtaggaattattggtagatcaggaactcttggttatgaagctgctcaacaaatgaaaaatctaggcattggaatttcaacaagtgttggaataggaggagatccaatcaatggaagttctttcaaagatattttagaaaaatttgaagaagacaaagaaacagatgcagttttaatgattggtgaaattgggggaccacaagaagttgcagctggaaagtttgcaaaagaaaatatgaaaaaaccagtgatagcttacattgctggtttaacagctccaaaaggtagagttatggggcatgcaggagctatagtttcagcatatggagaaagtgctgttgaaaaagtggagcttttaaaagagtgtggggttacgatttctaaaaatccttcagttatgggagaaactgttaaatcagttttagtaaaaaatagataaa

SEQ ID NO: 308012 - DNA, 483 bp, Unknown
  Bacterial polypeptide expressing nucleotide sequence isolated from the Sargasso Sea
aatcgatgttgggaattatgcctggtcatatatataaagagggacggattggaataataagtagatctggaactttaggatatgaagccgctcaacaattgaaaaatttaaatattggtgtttcaacaagcgtaggaattggcggcgatcctattaatggcagctcttttaaagatattataggaaaatttgaagaagatgatgagacagatgcaatattgatgataggtgaaattggtggaccacaagaggtcgctgcaggagagtttgcaaaagaaaatatgaaaaaaccagttatagcttatatagcaggtctaactgctccaaaaggtagagttatgggtcatgctggagctatagtttctgcttacggagagagtgcagtagaaaaagttgaaatattaaaagattatggaattactatttcaaaaaatccttcggttatgggtgatactgtaaagagtgttctaggcaaatcttaaa

SEQ ID NO: 308013 - DNA, 379 bp, Unknown
  Bacterial polypeptide expressing nucleotide sequence isolated from the Sargasso Sea
tatgtcaataatcattgataaaaatactaaagttatatgccaaggatttactggatcacaagggacttatcactctcaacaagctattgattatggaactcaaatggttggaggtgtaactcctggaaaaggaggaacaacacatttaggtttgcctgtatttaatacagttaaagaagcaaaagattatacacaagcagatgcaacggtaatttatgttccagctaaatttgcaacacaagctattcatgaggcattagatgcgaatattaaaattattacctgcattacagagggtattcctgtgcttgatatggtggagataaaaaaaagaattatagaacaaaaaacctattttataggacctaaattgtcctgg

SEQ ID NO: 308014 - DNA, 848 bp, Unknown
  Bacterial polypeptide expressing nucleotide sequence isolated from the Sargasso Sea
tattgattggctggatgctttaaaaggagcaaaaccaactgaatgtgaaaaaatgaattcgaatgattatgcttacatactttatacatctggaactacaggaactcctaaaggaattgtaagagatattggtggacatattgttgctttaaaatggacaatgaaaaatatctacaacattaatcaagatgatgtttggtggtctgctagtgatattggttggatagttgggcactcttatattgtttatgcccctttattttacggttgtactacagttttattcgaaggaaagcctgtaggaacacctgatgctggagtattttggagaataatttcagattataaagttaaatcattatttactgctccaacagctattagagcaattaaaaaagaggatcctgatggtaaattttttaaaaaatacgacctttcaaattttgatactctgttcttagcaggagagagagcggatccagatacaataaaatggtttgaaaaactttcaaacgctcctgttatagatcactggtggcaaacagaaacaagttgggcaataagttcaaattgtgctggaattgagaagtttccaattaaatatggttctgcattcaaaccagtaccaggttatgatttaaaagttcttaacagtgaaggaaaagaaaataagccaggtcaaatgggagatatagttgtaaaattaccattgccacctggaaccttccctactctatggaatgcagatgaaagatataaaaaagtttatatgtcaacttatgacggttattaccaaacatacgatgcaggacatattgatgaagacggttatgtttggataatgtcta

SEQ ID NO: 308015 - DNA, 687 bp, Unknown
  Bacterial polypeptide expressing nucleotide sequence isolated from the Sargasso Sea
tatgtcaattttagtcgatgaaaataccaaattattaattcaaggcctagggagagatggcagttttcaagcttcaaaaactctagaatatgggacaaatgtagttgcagctgtgcatcctggtaaagaaggaactaaatttgaaaataaagttccgtatttttcatcagtagaaaaagcagtccaaaaaactgaagctaatacaggtgtaatattcgttcctgcgccatttgctatggatgcaataattgaacaagttgatgcaggtataaacttaattgtatgtataactgagggtgttccagttttagatatgataaaaatcatgtcttatatagagaataagtcggtaagattaatcggttctaattgtccaggcctacttactccttctaccaaaactaaagtaggaataattcctggcaacatagtaaggcctggaaatattggagtagtttcaagatctgggacgctaacatatgaagccattgctcaactcgtgcaaaatggctttgggcaatctacatgtgttggcataggtggagatcctgttcacggtacgacttttacagatgttcttcagatgtttgaatcagataaagaaacagaagcaatagtacttataggagagataggtggtactagagagcaacttgctgctgaatatataaaaaaacatgttacaaa

SEQ ID NO: 308016 - DNA, 284 bp, Unknown
  Bacterial polypeptide expressing nucleotide sequence isolated from the Sargasso Sea
aatgtcaattttgataaataataaaacaaaagtaatttgccagggatttactggatctcaaggaacttttcattcacagcatgctattgaatatggaactaaactagtcgggggagtaacgccaggaaaaggaggcagcacccatttagatttaccagtttttgatagtgttaaagatgctgtagatcatcttgaacctgatgctactgtaatttatgttccagcaaaatttgctactaaagctattcatgaagctttggactctaatattaaaattattgttt

SEQ ID NO: 308017 - DNA, 807 bp, Unknown
  Bacterial polypeptide expressing nucleotide sequence isolated from the Sargasso Sea
aaatatctacaacattaatcaagatgatgtttggtggtctgctagcgatattggttggatagttgggcactcttatattgtttatgcgcctttattttacggttgtactacagttttattcgaaggaaagcctgtaggcacacctgatgctggagtattttggagaataatttcagattataaagttaaatcattatttactgctccaacagctattagagcaattaaaaaagaagatcctgatggtaaattttttaaaaaatacgacctttcaagttttgatactctgttcttagcaggagagagagcggatccagatacaataaaatggtttgaaaaactttcaaacgctcctgttatagatcactggtggcaaacagaaacaagttgggcaataagttcaaattgtgctggaattgagaagtttccaattaaatatggttctgcattcaaaccagtaccaggttatgatttaaaagttcttaacagtgaaggaaaagaaaataagccaggtcaaatgggagatatagttgtaaaattacctttgccacctggaaccttccctacattatggaatgcagatgaaagatacaaaaaagtttatatgtcaacttataagggttattaccaaacatatgatgcgggccacattgatgaagacggttacgtttggattatgtctagaacggatgatatcataaatgtagcgggtcacagattatctactggagcaattgaagaagttttagcagaacataaaaatgttgctgagtgtgcagtaattggaattgcagacaaattaaaagg

SEQ ID NO: 308018 - DNA, 613 bp, Unknown
  Bacterial polypeptide expressing nucleotide sequence isolated from the Sargasso Sea
ttgtgtagctattgttgatggaattccatctcacgatatgatcagaattaaaagatatatgagaaggtataccaaaagttctaaaatgactttagttggacctaattgtgcaggaattataagtcctggaaaatcaatgttgggtattatgccaggacatatttataaagagggaagaattggaattataagtagatcaggaacattaggttatgaagcagctcaacagctcaagaatttgaacataggtgtctcaacgagtgtaggtatcggaggagatccaataaatggaagttcatttagagatattattgaaaaatttgaaacagatgatgaaacggatgcaatactaatgattggagaaattggtgggcctcaggaagtagcagcaggagaatttgcaaaagaaaatatgaaaaaaccagtcattgcctacatagctggtttaacagctccaaaaggtagagttatgggtcatgctggagcaatagtttcagcatatggagaaagtgcaattgaaaaagttgaaattttaaaagagtgtggaatcacaatttctaaaaacccgtctgttatgggtgatacagtgaaatcagttttagaaaaattgtag

SEQ ID NO: 308019 - DNA, 409 bp, Unknown
  Bacterial polypeptide expressing nucleotide sequence isolated from the Sargasso Sea
tactctgacgtatgaagcagtaaaacaaactacggattacggtttcggccaatctacttgtgtaggtattggtggtgacccaatcccaggttctaacttcatcgacatcctgaaattattccaggaagacccacagactgaagccatcgttatgatcggtgaaatcggtggttcagctgaagaagaagctgctgcttacatcaaaaaacacgtgactaagccagttgtgtcttacatcgccggtgtaactgcacctgctggtaagcgcatgggccacgcaggcgccatcatctctggtggtaaaggtacagccgacgagaagttcgctgcactggaagacgcaggcgtgaaaaccgtgaagagcttagccgatatcggtaaagcactgaaagagctgactggctggtaa

SEQ ID NO: 308020 - DNA, 782 bp, Unknown
  Bacterial polypeptide expressing nucleotide sequence isolated from the Sargasso Sea
tcattctgtagtttttggaggatttgcctccaatgagcttgcaagcagaatagatgacagtaaagctaaaatattagtaactgcatcgtgtggttttgagcccggaagaacagttgagtacaaaccgcttgttgatgaagcaataaaaatagccaatcacaaaattgataaaatgattttgtttcaaagacctggtcatgaagttaaattaaatgcttcaaaagagatcagctgggaagaagttgtctccaattctaaagatgctgactgtgttgagatgaactcgaatgagtttgcctatattttgtacacatcaggtacaactggaacccccaaagggatagttagagacattggaggccacattgttgctctcaagtggactatgaaaaatatctacaacattgatacagatgatatttggtggtctgctagtgatattggttggattgttggacactcatacattgtctacgctccattatttaaaggatgcactacagttttatttgaaggcaagcctgtaggaactccagatgcgggagctttttggaaaatcatttcagattataaagtaaaatctctttttacagctccaacagcttttagagcaataaaaaaagaggatcctgaaggtaaatttttctcaaaatatgatttaagtagttttgagagcttattccttgctggagaaagagctgatccagatacaattaagtgggctgagaatttacttaaagttcctgtgatagatcattggtggcaaacagagactagttggg

SEQ ID NO: 308021 - DNA, 313 bp, Unknown
  Bacterial polypeptide expressing nucleotide sequence isolated from the Sargasso Sea
atgtcaatattaataaataagtctactaaagtaatatgccaaggctttactggctctcaaggaacatttcattctgaacaagctataaaatatgggactaatttagttggaggagtcactcctaataggggtggtgataatcacctaggtttgccagttttcaataccgtatatgaagctaaagaaaagacaaatgcagatgcttcagtaatatatgtaccaccagctttttctgcggatgctatattagaagctatagacgcaaaaattgaattaatcgtgtgcataactgaaggaattcctcagcatgata

SEQ ID NO: 308022 - DNA, 550 bp, Unknown
  Bacterial polypeptide expressing nucleotide sequence isolated from the Sargasso Sea
aatgtccatacttgtaaataaaagttcaaaagtagtcatccagggtattactggttccgaaggacagttccatggtgggcaaatgctggattatggaacaaacatagtatcaggtgttactccaggtaaaggaggaattaaaactttaaatgagagggtgcctgtttttaatagcgttgaggaggcagtagaaaagacagaggccaatacttccataatctttgtccctccacccttttcagctgaagctgtaatcgaggccagctatgccggtattgagctagtagtgtgtatcactgaaggcgttccggtgcaagatatggtaaaggttaaaaatgtgctaaagcgaaataatacgcgactcatagggcctaattgtcctgggataatcacggtcgatgaatgcaagctaggtattatgcccggttttatctgcaaaagaggaaatattggagttatttctaaatcagggacacttacttatgaggcaattgatcaattagtaaatgtgggactggggcaaactacagcgataggaattggtggcgat

SEQ ID NO: 308023 - DNA, 724 bp, Unknown
  Bacterial polypeptide expressing nucleotide sequence isolated from the Sargasso Sea
atggccgttattataaataaagatactaaaataatcattcaaggttttacaggaaagatgggaactttccatgctgaggaaatgattaagtatggatcaaatgtagttggaggagttacacctggtaaaggtggaacaaaacatcttgatcttccagtttttaatacagttaaagaagctgttgaaaatactgaagcaaccgcatccatattatttgttcctcctgcatttgctgcagattcagctatggaagcagcagatgccggcattagaacctgtgttgctattgttgacggaataccttcacacgacatgattaagattaaaagatatatgagaagatattctaaatctgaaaaaatgagtttggtaggacctaattgtgcaggaataataagtcctggaaagtcaatgctcggaattatgccaggtcatatctataaagaaggacgtgttggaataatcagtaggtcaggaacattgggatatgaagcggctcaacagttaaaagatctaaatattggtatttcaacaagtgtaggcataggtggtgatccaattaatggaagttcttttaaagatattattggtaaatttgaggaagatgtcgagacagatgcaatattaatgattggtgaaattggtggtccccaagaggttgcagctggtgaatttgcaaaagataatatgaaaaaacctgtaattgcttatatagcaggcctta

SEQ ID NO: 308024 - DNA, 925 bp, Unknown
  Bacterial polypeptide expressing nucleotide sequence isolated from the Sargasso Sea
tttgcagcgaatgacctagcaagtagaattgatgactctaaagcaaaaattttagttacagcttcatgtggttatgaacctggtagaactgttcactacaaaccattggttaataaagctttagaacttgcaaatcataaaccagataaatgtataatttttcaaagagaaaaagataaagcagagcttgattctaaaatagatattacttgggatgatgctcataaaaatgcaaaacctgcggagtgtgagaaaatgaacgctaatgaatacgcttacattctctatacgtctggtactacaggattaccaaaaggaattgtaagagatataggcgggcatattgttgctttgaagtggactatgaaaaatatttataacattaatcaagaagacgtatggtggtctgcaagtgatattggttggatagtaggacactcttacatcgtatatgctccgttattttacggatgtaccacagttttatttgagggaaaaccagtaggtaccccggatgctggtgttttttggagagtaatatcagagcacaaagtaaaatctcttttcacagctcctactgcaattagagcaattaaaaaagaggatcctaatggtgaattttttaaaaaatatgatttaagtaagttcgacaaattatttttagcaggtgaacgagcagatcctgacacaattaaatggtttgaaaaattatctaactcacctgtgattgatcattggtggcaaactgaaactagttgggcaatcacatctgattgcactggaattgaatcttttcctgttaaatatggatctgcatttaaaccagtgcctggttatgatttgaaagttttaaattctgaaggtaaagaggttggtccaggaaaaatgggagacatagtagttaaacttccactccctccaggaa

SEQ ID NO: 308025 - DNA, 361 bp, Unknown
  Bacterial polypeptide expressing nucleotide sequence isolated from the Sargasso Sea
atcacaactgctattggaattggtggtgacccaattattggaactactacaaaagaagcagttgaattgttaatcaatgatccagaaacagaatgtgtagttatgattggagaaattggaggtcaattagaagctgatgctgcaaaatggtacaaagaaagtggaagcaaaaaaccaatcgttggattcatcgctggtgaaactgctcctgcaggaagaacaatgggtcatgctggtgcaatcgttggtggttctgatgatacagctgctgctaagaaaagaatcatgagagaaaacggaattcatgtagtagattctcctgctgaaatcggtaaaaaagtaaaagaagttatgggataat

SEQ ID NO: 308026 - DNA, 370 bp, Unknown
  Bacterial polypeptide expressing nucleotide sequence isolated from the Sargasso Sea
aatgcttgcttgcgcaagaataggagctattcattcagtagtatttggaggttttgcttcaaatgaattagctgtaagaatagatgatgcaaaacctaaggccataatagcaggttcatgtggggttgaacctactggtataattccttataaacctttactcgataaagctattgatcaagcagaacattccccaaaattttgtgtgatttttcaaagagatgagttgcaagctcctttggttgtcggaagagactatgaatgggacgatttccaaaaggcctcaacagaaattctttgcgtaccagtattaggtagtgatccactgtatattttgtatacctctggtacaacaggtcagcccaaaggt

SEQ ID NO: 308027 - DNA, 481 bp, Unknown
  Bacterial polypeptide expressing nucleotide sequence isolated from the Sargasso Sea
gaggctaaagtcggaatcatgcctggatttgtattttctaagggtaatgttggtgttatttctaaatctgggacattgacttatgaagctgcagatcaagttgttaagcaaggatatggaatttcgacagctatagggattggaggtgatcctataataggaacaactactaaagatgcaattgaattgtttatgaatgacacagaaactgagtgtatcgttatgattggtgaaattggaggtcaacttgaggcagaagctgcaaaatggataaaaaggaatggtaataaaaaacctgtggttggatttattgcaggcgaaactgctcctaaagggagaactatggggcatgctggtgcaattgttggtggatctgaagatacagctcaagcaaaaaaaaatatcatgagtgaatgtggaattcatgttgttgactcgcctgctgatattggtaaaaaagtagcagaaattcttaaataat

SEQ ID NO: 308028 - DNA, 1148 bp, Unknown
  Bacterial polypeptide expressing nucleotide sequence isolated from the Sargasso Sea
agttagagatataggtggtcatatcgttgctctaaaatggacaatgaaaaatatttacaatattaatcaggatgatgtttggtggtcagcaagtgatataggatggatagttggtcattcatatattgtttatgctcccttattttatggctgcacaacagttttgtttgaaggaaaaccagtgggcactcctgacgcaggtgtcttttggagaataatatcagaatacaaagtaaaatctttatttacggctcctacagcaataagagctataaaaaaagaagatccagatggaaaattctttaaaaaatatgatttatctaagtttgatactttgtttttggccggtgaacgtgcggatccagataccattaaatggtttgaaaaactttctaatgctcctgtaattgatcattggtggcaaactgaaacaagttgggcaattagtgctaattgtgcaggaatagaaaaatttccaattaaatatggttctgcctttaaaccagttcctggttatgatttaaaagttcttaatagtgagggtaaagaaaataaaccaggtcagatgggtgatatcgttgtaaaattacctttgcctccaggaacttttccaactttatggaatgcagatgaaagatataaaaaagtttatatgtcaacatatgaaggttattaccaaacatatgatgctgggcatatcgatgaggatggctatgtttggattatgtctagaacggatgacatcataaacgtagctggtcatagattgtcaacaggtgctattgaagaagttttggcagaacataaaagtgttgcagagtgtgctgtaataggaattgcagataaattaaaaggacaactccctataggactgatagctttgaaagcaggcgttgatagagacaataaagaaattacaaaagaatgtgtagctttagttcgtgaaaaagtaggaccagttgctgcttttaaattagctatcgttgttaaaaggcttcctaaaacaagatcaggaaaagttttgcggggaacagttagaaaaattgcagatggagaaacctataaagtacctcccacaattgacgatcctgtaattttagatgaaattaaaaaagaccttaaagaaaataatatcctaaaaagttaaa

SEQ ID NO: 308029 - DNA, 676 bp, Unknown
  Bacterial polypeptide expressing nucleotide sequence isolated from the Sargasso Sea
tttgtaccccccagcctttgcggcagactccgcgatggaggcagctgatgcaggaataaaaacttgtgtagctattgtagatggaattccatcacacgatatgattagaattaaaagatatatgagacgatattctaaaacagagaaaatgactttagttggacctaactgcgctggaataatcagcccaggaaaatcaatgttaggaataatgcctggacatatttacaaagagggcagagttggaattataagccgatcaggtacattaggttatgaagctgctcaacaaatgaaaaatttagatataggaatttcaacaagtgttggtattggtggtgatcctattaatggaagttcatttagagatataattgaaaagttcgaagtagatgatgagactgatgcggttttaatgattggtgaaataggtggacctcaagaagttgcagctggggaatttgcaaaagaaaacatgaaaaaacctgttataggatatattgctggtttaacagccccaaaaggaagagttatgggtcacgctggagcaatagtctcagcttatggagaaagtgcaattgaaaaggttgaaattttaaaagattgtggtgttaccatatcaaaaaacccttctgtaatgggtgatactgtaaaatcagtcttggaaaaaatgtaa

SEQ ID NO: 308030 - DNA, 1450 bp, Unknown
  Bacterial polypeptide expressing nucleotide sequence isolated from the Sargasso Sea
agtagaattgatgacagtaaagcaaaaatattagttactgcttcatgtggttttgagccaggacgtacggtggagtacaaacctcttgtcgatgaagctataaaaatagccaatcacaaaattgaaaagatgattttgtttcaaagacctggtcatgaggttaaattaaatactccaaatgaggtcagttgggaagaagtagtcactaatgcacaggatgcagactgtgttgagatgaattccaacgagtttgcttatattttgtatacttcaggcacaaccggaacccctaaaggtatagtgagagatattggaggtcacattgttgctctcaaatggacaatgaaaaatatctataacattgatacagataatatttggtggtcagcaagtgacattggctggattgttggtcactcatatattgtatacgctcctttatttaaaggatgcactacagttttgtttgaaggtaagccagtaggaaccccagacgcaggagctttttggaaaataatatctgattataaagtaaagtctctttttacagctccaacagcttttagagcaatcaagaaagaggatcctgaaggtaaatttttctcaaaatacgatttgagtaattttgaaagcttgtttcttgctggagagagagctgatccagatacaattaagtgggcagagaatttattgaaagttccagtcattgatcattggtggcaaacagagactagctgggcaattagctcaaattgtactggaatagaaatgatggaaacaaaatatggttcagctgtaaaagctgttcctggatatgatgttaaaatcattaaaccagatcaatctttagctaaaccaaatgaaatgggagatattgttgtaaaactcccattgcctccaggtacatttccaacattatggaatgcagaccaaagatacaaagaaaactacatgtctaattatgacgggtattatcaaacatatgatgcaggtcatatcgatgatgatggttatatttggattatgtctagaactgatgacattattaatgtagcaggtcatagattatctactggtgccatagaagaagtgttgtcagaacatcaatctgttgctgaatgtgcggtacttggaatagcagataaattaaaaggccaattacctattggattagtagttttaaaatcaggtgttgataaagataatgaaactatatctaaagaatgtgtgcaaatggtaagagataaaatcggaccagttgctgcatttaaagttgtaattgttattaagagattaccaaaaactagatcaggaaaaattttaagaggaactataagaaaaattgcagatggtgttgattataaagtgccacccacaattgatgatccagcaattctaactgaaattacagaagatttaataaatcacaaaatcttaaataatggttaaa

SEQ ID NO: 308031 - DNA, 1405 bp, Unknown
  Bacterial polypeptide expressing nucleotide sequence isolated from the Sargasso Sea
atgtgttttgaacctggacgaactgttgaatacaaacctttggttgatgaagcaatcaaacaagctcatcataaaattagtaagatgattttatttcaaagaaagggtcacgaagttaaattgaatgcgccaatggagataagttggaatgaagcacacgctaatgccaaagatactgattgtgttgaaatgaattcaaacgaatttgcatacatactttatacctcaggcactacaggaactccaaaaggtatcgtcagagacattggaggtcacatcgttgcattaaaatggacgatgaaaaatatttataacattgatgcagatgatatttggtggtcagcaagtgatattggttggatcgtcggtcactcctacattgtctatgcaccattgttcaaaggatgcaccacagtattgtttgaaggtaaacctgtcggcacacctgatgctggagcgttctggaaaataatttctgactataaagtaaaatctttattcactgcaccaacagcttttcgagcaattaaaaaagaagatcctgaaggaaaattcttttctaaatatgatttgagtaaatttgaaagtttatttcttgctggggagcgtgctgatcctgatacaattaaatgggcagagaatttattaaaagttccggtaattgatcactggtggcaaactgaaacaagttgggcgatcagttcaaattgtactggtattgaaatgatgaaaacaaaatatggctcagcttgtaaagctgtgcctggttatgatgttaaaattataaaatcagaccaaactttagctaaaccaaatgagatgggagatattgtcgtgaagttacctttgcctcctggaacttttccaactctttggaatgcagatcaaagatataaagaaaattacatgtcaaattatgaaggttactatcaaacctacgatgctggtcacattgatgaagatggctacatctggattatgtctagaactgatgatatcatcaatgttgcgggtcatagattatcaactggcgcaatagaagaagttttgtcagaacatcaatcagttgctgagtgtgcagtgcttggcatagctgataaattaaaaggtcaattacctattggattaattgttttaaaagcaggagtagacaaagataatgagacaatctctaaagaatgtattcaaatggtgcgagataaaattggaccagtggctgcttttaaagttgcaatagttataaaaagacttccaaaaacaagatcaggtaaaattttaagaggaacaataagaaaaatcgctgatagtgttgagtataaaatgcctccaacaattgatgatccagctattttagatgagatcaaagaggatttaatcaaaaataatattataaaaagtgcttaaa

SEQ ID NO: 308032 - DNA, 806 bp, Unknown
  Bacterial polypeptide expressing nucleotide sequence isolated from the Sargasso Sea
aatgacagacatttatgaaattcttcgtggtaaaaaagatgcagacggtaattacgaaaagaaaccagttattgtacaaggtataacaggcaagtatggttcaactcatgccaaactaatgttagagtatggaacaaacattgtagcaggagttacacctgggaaaggaggacaaaaatttgaagataaaattccagtctataatacagtaaaagaagcagttgatgcaacaggagcagagatatcaatagtatttgttccagcaaaattcttcttagatgctgccaaagatgcattaaattcaggaataaaattactagttgccattccagaacatgttcctattagagatgcaatggaggtaatcgagcttgcaaaacaaaaagacgcaataatgattggaccaaacacaccaggtgttatagtgccaggattaatcaaggtaggaattatgcctgcaagtccattttcagcaggaaaagttgcagtattatcaaaaagcggcacattactttatgaaatctcaaataatctaacaagtgcaggttttggtcagaatatcaccataggcattggaggagacccagttaatggaacacgtatgattgatgcctttgatatggtaaaagatgacccagaattggaagcaatggtagtggtaggagaaatcgggggagattctgaagaaattttagctcaacatatcatagatatcggatttaagaaaccaattgtcggatatatcgcaggacaacaggcaccaaaagaaaaacgcatgggacatgcaggcgccatagtcatgggaa

SEQ ID NO: 308033 - DNA, 509 bp, Unknown
  Bacterial polypeptide expressing nucleotide sequence isolated from the Sargasso Sea
aatgtcagttttaattaacaaggacacaaaagtaatttgtcaaggtttcactggcgctcatggaacttttcattctgaacaatctattaagtatggaactaacttggttggtggagttactcctaaaaaaggaggtcaaattcatttggaaagaccagtatttaatactgttaaagaagctaaagatcagacaggtgcaaatgcaacaatgatttatgttcctgcaaagtttgcagcttcagcaattatagaggcaattgattcatctatagaattgattgtatgtataagtgagggaattccagttttagacatgcttaaagtaaaaagaagactttcgaactctaaatcgagacttattggtcccaactgtccaggtataataactcctgatgaatgtaaaattggaataatgcctggaaatattcataaaaaaggaacagtaggaattgtttctaggtcaggaacattaacttacgaggctgtagcccaaacctcagaaaatggcc

SEQ ID NO: 308034 - DNA, 529 bp, Unknown
  Bacterial polypeptide expressing nucleotide sequence isolated from the Sargasso Sea
aatgagtttagtaggtccaaattgcgcaggtataattagtccaggaaaatcaatgttaggaataatgcctggccatatatataaagagggaagaattggaataataagcagatcaggaacattaggatatgaggctgcacaacaattgaaaaatttaaacattggtgtttcaacaagcgtaggaattggtggcgatcctattaatggcagctcttttaaagatattataggaaaatttgaagaagatgatgagacagatgctatattaatgataggtgaaattggtggaccacaagaagttgcagcaggagagtttgcaaaagataatatgaaaaaaccagttatagcttatattgctggtttaacagctccaaaaggtagagttatgggtcatgcaggagctatagtatctgcttatggtgaaagtgcagtcgaaaaagttgaaattttaaaagagtatggaattacaatctcaaaaaatccatctgttatgggtgaaactgtaaaaagtgttcttagcaaatcttaa

SEQ ID NO: 308035 - DNA, 790 bp, Unknown
  Bacterial polypeptide expressing nucleotide sequence isolated from the Sargasso Sea
tatggaacaaacattgtagcaggagttacacctgggaaaggaggacaaaaatttgaagataaaattccagtctatgatacagtaaaagaagcagttgatgcaacaggagcagagatatcaatagtatttgttccagcaaaattcttcttagatgctgccaaagatgcattaaattcaggaataaaattactagttgccattccagaacatgttcctattagagatgcaatggaggtaatcgagcttgcaaaacaaaaagacgcaataatgattggaccaaacacaccaggtgttatagtgccaggattgatcaaggtaggaattatgcctgcaagtccattttcagcaggaaaagttgcagtattatcaaaaagcggcacattactttatgaaatctcaaataatctaacaagtgcaggttttggtcagaatatcaccataggcattggaggagacccagttaatggaacacgtatgattgatgcctttgatatggtaaaagatgacccagaattggaagcaatggtagtggtaggagaaattggaggagattctgaagaaattttagctcaacatatcatagatatcggatttaagaaaccaattgttggatatatcgcaggacgacaggcaccaaaagaaaaacgcatgggacatgcaggcgccatagtcatgggaacatatggctcagccgaatcaaagatatccatgtttgcaaaggcaaacattcctgttgcaaaaagaccaggcgaggtagcagtactattagccggaaaaatgaatagctaat

SEQ ID NO: 308036 - DNA, 454 bp, Unknown
  Bacterial polypeptide expressing nucleotide sequence isolated from the Sargasso Sea
aatgtccattttaattaacaaagataccagagtaatttgtcaaggatttactggatcaaacggtacatttcattctcagcaatctataaattatggaacaaatattgtgggaggagttacgccaaataaaggaggccaaattcacttaagcagaccagtttttaatacagttgctgaagcaaagaaggttacagatgcaaatgcgactatgatttatgttcctgctaaatttgctggagatgcaattattgaagctattgagtcatctattgaacttattgtttgcattacagaaggaattcctatcttagacatgttgaaagtaaagaatcacttattaaaatctaaatcaagattaattggacctaactgcccaggcattataactcctgatgagtgcaaattgggatcatgccaggaaatattcataaaaaaggttcagtcggaattgtat

SEQ ID NO: 308037 - DNA, 464 bp, Unknown
  Bacterial polypeptide expressing nucleotide sequence isolated from the Sargasso Sea
tatgcctggtttcatacatcaaaaaggttctataggaattatttccagatctggcaccctgacttatgaggctgttcatcaaacttctatgtgtggtctgggtcaaagtacttgtattggaatagggggcgatcccattaagggtctcaatttcattgaatgtctgtcactttttgaggaagatccagcaacagaaggaattgtgatggttggtgaaattggaggttcagacgaagaaaaggcagcagagttcatcaaagacaatatcactaaacctgttgttgcctatgtcgctggtgtttcagcaccaccggggaaaagaatgggtcatgccggagcaatcgttactggcaatgaaggcaccgcttcaagtaaatacaaagcactgaatgacgcgggagttaaaacaactgattccccagctttgattggtgaaatcatgaaagaattactcaatcaatgat

SEQ ID NO: 308038 - DNA, 456 bp, Unknown
  Bacterial polypeptide expressing nucleotide sequence isolated from the Sargasso Sea
aatgtctatacttgtaaataaagactcaaaagttgtagtccaagggataacaggttcagagggtgaatttcatgccaaacaaatgcttgattatggcacgaatattgtagctggtgttactccaggtaaaggaggacaatcagttatagatggtagcatcaacgtttatgattctgtcgagcaatctgtagaaaaaactagtgctaatacggcgataatttttgtacctccctcttttgctgctgaagcaataattgaatcaagctatgcaggtatagaaaccattgtgtgtatcactgaaggcgtgccagtgcatgacatgattaaggtcaaacaaataataaagagaaataaaacaagattaattggtcccaattgcccaggtattatcacagtagatgaatgtaaacttggaattatgccaggatttatatgcaaaaaaggaaatgttggagt

SEQ ID NO: 308039 - DNA, 559 bp, Unknown
  Bacterial polypeptide expressing nucleotide sequence isolated from the Sargasso Sea
aatgtcagttttaattgataaaaatacaaaaatattaatccaaggatttactggtaaaatgggtacttttcatgcagaagaaatgattaagtatggttcaaatgttgtaggaggagttactccaggcaaaggagggtctaaacatttaaacttaccagtttttaatactgttaaagaggcagtggaatctactggtgcttcagcttcaatattatttgttccaccagcttttgcggcagactccgctatggaggcagcagatgctgggataaaaacatgtgttgctatagtcgatggaattccatcacatgatatgattaaaataaaacgttatatgagacgatattctagagttcagaaaatgactttagttggacctaactgtgcaggtgtgattagtccaggcaaagcaatgcttggaataatgccaggacatatttacaaagaaggaaaagttgggattattggaagatcgggaacacttggatatgaggcagctcagcaaatgaaaaatttaggaattggaatttcgacaagtgttggaatcggaggagatcca

SEQ ID NO: 308040 - DNA, 1296 bp, Unknown
  Bacterial polypeptide expressing nucleotide sequence isolated from the Sargasso Sea
ccactccgttgtattcgggggctttgcagcaaacgaactagcaagcaggattgatgactctaaagctaaaatacttgttaccgcctcttgcggctatgaacctgggcgaactgttcattataaacctttagttaataaagcattagaattagctaatcataaaattaaaaagtgtataatttttcaaagagaaaaagatatagcagaattaaatcctgcgattgatattacctgggatgatgctcacaaagatgttaagcctgcagattgtgaaaaaatgaatgcaaatgattacgcctatattctttacacatcaggaactacgggtcttcccaaaggaatagttcgtgatataggaggacatatagttgcattaaaatggactatgaaaaacatttataatatcaaaccagaggacgtatggtggtctgctagtgatattggttggatagttggacactcctatatagtatatggtccattattttatggttgtacgacagttttgtttgagggaaaaccagtgggaactcctgatgcaggagttttttggagagtaatttcagagcataaagtaaaatctctttttactgcaccaacagcaattagagctataaaaaaagaggatcctaacggagaattttttaaaaaatatgatttaagtaagtttgataaactatttcttgctggtgagagagccgaccctgatacaataaaatggtttgaaaaactttctaactcacctgtaatcgatcattggtggcaaactgaaacaagttgggcaataacatcaagttgcacaggaatagaaaattttcctgtaaaatacggatcagcttttaaaccggtaccaggttatgatttaaaagttttaaattctgagggtaaagaagtagatccaggaaagatgggtgatattgttgtcaagcttcctcttccgccaggaacttttccaactctttggggagcggataaaagatataaagagaattatatgactacttacccgggatattatcaaacttacgatgcgggacacattgatgaagatggttatgtttggatcatgtctagaaccgacgacataattaatgttgcaggtcatagattatctactggagctattgaggaagttttagcagaacatccaaatgttgcagagtgcgcagtgataggaatagctgataaacttaaaggtcaaatacctattggattgctagcgcttaaagcaggagtaactaaagataaaaaagatattattagcgaatgcgtaaaaatggttagagaaaaagttgg

SEQ ID NO: 308041 - DNA, 384 bp, Unknown
  Bacterial polypeptide expressing nucleotide sequence isolated from the Sargasso Sea
taggacttggtcaaacaacttgtataggtataggtggcgatcctgtacatggtattaattttattgattgtcttgatctatttttaaaagatgaagaaacaaaaggaattttgatgataggagaaataggtggcactgcagaggaagatgctgcagaatttattttagattcttccataaataaaccaatgtcagcatttattgctggtgtttcagcacctaaaggtaagagaatgggacatgctggggctataatatcaggcaataaaggcacagcagaatcaaaaattgaagctttacggaaagctaatatagctgtggcaccatctccagctaaaatgggagaaacaatgttagttgaaatgcaaaaaaggtataattaaa

SEQ ID NO: 308042 - DNA, 363 bp, Unknown
  Bacterial polypeptide expressing nucleotide sequence isolated from the Sargasso Sea
gatggcaatactagttaatgaaaacaccagggtaatttgccaagggtttacagggtcacaaggtacatttcatagtgaacaggccatcgaatacggtacaaatatggtcggaggggtcactcctggcaaaggtggtttagaacatattgggttgcccgtttttaactcagttcatgaagcaaaaagtgctactggggcaaatgcaagcgtgatatacgtgccaccaccattcgccgccgactcgatcctggaagcattagacgctgaaatcgaacttatagttgcaattactgagggaataccagtcttagacatggttaaagttaagcgggcactggaaacctcaaaatcaactttaatcgg

SEQ ID NO: 308043 - DNA, 388 bp, Unknown
  Bacterial polypeptide expressing nucleotide sequence isolated from the Sargasso Sea
aatgtctgtcttaattaataaaaatacaaaagttatctgtcagggtttcacaggctcacatggatcttttcactcagaacaagcaattaagtatgggacaaacttagtaggtggagtaacgcctaaaaaaggtggtcaaatacatttagataggccagtgtttaacacagttaaagaagcgaaaaataaaactggagcaaatgctacaatgatttatgttcctgctaaatttgcttattctgctattattgaggcaatagaggcatctatagaacttatagtttgtatcactgaaggaatcccagttttggatatgttaaaaataaaaaaaaaattaagaaattctggttcaagattaataggtccaaattgtccaggaatcattacg

SEQ ID NO: 308044 - DNA, 1375 bp, Unknown
  Bacterial polypeptide expressing nucleotide sequence isolated from the Sargasso Sea
agttcaatataaacctctcgtagatgaagctttaaaattagcatctcacaaaattgaaaaactaatattatttcaaagaccagataatgaagtgaaattaaattctcctaacgaaattagttgggaggaagctttatcaaatgcgaaaaatgttgattgtgttgaaatgaatgcaaatgaatttgcatatattttatatacatcgggtacaacaggcattccaaaaggaatcgttagagacataggtggccatattgccgctcttaaatggacaatgaaaaatatttataatattgatcaagatgatgtttggtggtcagcaagtgatatcggttggattgttggtcattcttatattgtttacgcaccattgtttaaaggatgtacttcaattctttttgaaggtaaaccggtagggactccagatgcaggggctttttggaaaataatttctgaatataaagtaaaatctctattcactgcaccaactgcttttagagcaattaaaaaagaggatcccgaaggtaagtttttttctaagtacgatctaagttcatttgaaagtttatttctagctggagaaagagcagatccagatactattaaatgggcagaatctcttttaaaaattccagtaattgaccattggtggcaaactgaaacaagttgggcaataagttctaattgcactggtatagaaatgatgaaaacaaaatacggttcagcatgtaaagcagttccaggatatgatgttaaagttataaaaccagatcaaactttagctaaaccaaatgaaatgggagatattgtagtaaaacttcctcttcctcctggtacatttccaacattatggaatgctgatgatagatataaaaaaacttatatgacaaattacgaaggttattatcaaacctatgatgcaggtcatatagatgatgatggttatatttggattatgtcgagaaccgatgacattattaatgttgctggccacagactttcaactggtgcaatagaggaagttttgtcagaacatcaatcagttgcagaatgtgcagttattggaattgccgataaattaaaaggacaattaccaattggtttaatagctcttaaagctggagttaaaaaggataatgaaacaatatcaaaagaatgtattcaaatggttagagataaagttggcccagttgctgcttttaaaaccgcaatagttgtaaaaagattaccaaaaacaagatcaggaaaaatcttacgaggaacagttagaaaaatagccgataaagaggattataaaatgccagcaacgatcgacgatccagcaattttagatgaaataaagcaagatttgataaataataatattttaaaataa

SEQ ID NO: 308045 - DNA, 1219 bp, Unknown
  Bacterial polypeptide expressing nucleotide sequence isolated from the Sargasso Sea
cctgaagcagtaattggcatgttagcttgtggaagaattggtgcaattcattctgtggtatttggtggttttgcctcaaacgaattagcaagcaggatagatgatagcaaagcaaaagttttattaacagcttcatgtggctttgaaccaggtagaacagttcattataaaccgcttgtagatgaagctttaaaattagcatctcataaaattgaaaaactaatattatttcaaagaccagacaataaagttaaattaaatgctcctaaagaaattagttgggaagaagcattatcaaatgcaaaaaatgttgattgcgttgagatgaatgcaaatgagtttgcatatattttgtatacttcaggaacaactggaattccaaaaggaatcgttagagatattggaggacatattgctgctcttaaatggacaatgaaaaatatatataacattgaccaagatgatgtttggtggtctgctagtgatattggatggatcgttggtcactcttatatagtttacgctccattgtttaaaggatgtacgacagtactttttgaaggtaaaccggttggaactccagacgctggggctttttggaaaatcatttctgattataaagtaaaatcattatttactgcaccaactgcttttagagctattaaaaaagaagatcctcaaggtaagtttttttctaagtacgatctaagttcatttgaaagtttatttcttgctggagaaagagcagatcctgatacaattaagtgggcagaatctcttttgaatgttcctgtaattgatcattggtggcaaacggaaaccagttgggcaataagttctaattgtacaggaattgaaatgatgaaaacaaagtatggttcagcttgtaaagctgttccaggctatgatgttaaagttattaaacctgaccacagtattgctaagccaaacgaaatgggtgatatagttgtaaaacttccactgcctcctggtacatttccaactctatggaatgcagatgaaagatataaaaaaacatatatgacaaattatgagggctattatcaaacttatgatgccggtcatattgatgatgatggatatatttggattatgtctagaacagacgatattataaatgttgctggacatagattatcaactggagcaattgaagaagttttatcagaacatcagtctgtagcagaatgtgcagtta

SEQ ID NO: 308046 - DNA, 385 bp, Unknown
  Bacterial polypeptide expressing nucleotide sequence isolated from the Sargasso Sea
atgtcagttttagttgataaaaatacgaaagttatatgccaaggctttacaggatctcatggaacttttcattctgaacaggcaataaaatatggaacaaatttagttggtggagttacaccaaaaaaaggaggacaagttcaccttgaaagacctgtatttaataccgtcaaagaagccaaggaaaacacaggagctaacgcttctatgatttatgttccagcaaaatttgctggagcagcaataattgaagcaatagaagcatctatagaattaataatttgtattacagaaggaattccagttttggatatgcttaaagttaaacagaaattaactaaatctaattcaagattaattggcccaaattgtccaggtattataa

SEQ ID NO: 308047 - DNA, 686 bp, Unknown
  Bacterial polypeptide expressing nucleotide sequence isolated from the Sargasso Sea
catgactgtattagttgataaaaatagtaagataattattcaaggttttacaggtaaaatgggctcttttcatgcggatgagatgataaaatatggctcaaatgtagtcggcggagtaacaccaggaaaagggggctcaaagcatttagatttgccggtttttaatacagttaaagatgctgttaatgaaacaggagctgatgcgtctattttatttgtacctccagcttttgctgcagactctgcaatggaagcagcagacgcgggaataaaaatatgtgtagcaattgttgatggaattccatcccatgacatgattagaataaagaggtatatgagaagatatactaaaagttcaaaaatgacattagttggaccaaactgtgctggaataataagtcctggtaaatcaatgctaggaataatgccaggacatatttataaagaaggaagagttggaataataagtagatcaggtacattaggctatgaagctgctcaacaacttaaaaatttaaatataggtgtctctacaagtgtaggtattggaggtgacccgattaatggaagctcatttagagatataatagaaaagtttgaaacagacgatgagactgatgcaatattgatgattggtgaaattggcggtccacaagaagttgcagctggagaattcaaaagaaaat

SEQ ID NO: 308048 - DNA, 1171 bp, Unknown
  Bacterial polypeptide expressing nucleotide sequence isolated from the Sargasso Sea
ggaacaaccggtatacccaaaggcatagtcagagatataggtggtcacattgtagcattaaagtggactatgaaaaatatctataatattgatgaagatgatgtttggtggtctgctagtgatattggatggatcgtaggtcactcttatattgtttatgctccattgtttaaaggatgtaccactgttttatttgaaggtaagccagttggcacaccagatgccggtgttttctggagaataatttcggattacaaaattaaatctttatttactgcaccaacagcttttagagcaattaaaaaagaagaccctgaaggaaagtttttttctaaatatgatttaagttcatttaaatctttgttcttagctggagaaagagctgatccagatacaatcaaatgggcagaaaatttattgaaagttccagtaattgatcactggtggcaaacagaaacaagttggtcaattagcggtaattgtacgggtattgaaatgcagaaaacaaaatatggttcggctagtaaacctgtcccaggttacgatgtaaaaataattaaaccagataattctttggcaaaacctaatgagatgggagacatagttgttaaacttccattgcctccaggtacatttccaactctatggaatgcagatcaaagatataaagaaaattatatgactaactatgagggttattaccaaacgtatgatgcaggtcacattgatgaggatggttatgtttggattatgtcacgaacagatgatattattaatgttgcaggacacagattgtcaactggagcaatagaagaagtgctttcagaacatcaatctgtagctgaatgtgcggtcataggaattaaagatcaattaaaaggtcaacttcctattggtcttattgctttaaaagctggtgttacaaaagataatgaaactatatcaaaagaatgtattcaaatggttagagataaagttggtcctgttgcagcatttaaaagagcaattgtcgtaaaaagattaccaaaaacaaggtcaggtaaaatattaagaggtacagtaagaaaaattgctgataaagaagaatataaaatgccagcaacaattgatgatccagcaattttagatgaaataaaacaagatttaataaaaaataatattttaaattaat

SEQ ID NO: 308049 - DNA, 1117 bp, Unknown
  Bacterial polypeptide expressing nucleotide sequence isolated from the Sargasso Sea
tttgaagtggactatgaaaaatatttataacatcaatcaagacgacgtatggtggtcagcgagtgatattggttggatagtaggacactcttacatcgtatatgctccgttattctacggatgtactacagttttatttgagggaaaaccagtagggaccccggatgctggtgttttttggagggttatatcagagcacaaagttaaatctcttttcacagctcctactgcaattagagcaattaaaaaagaagatcctaatggtgaattttttaaaaaatatgatttaagtaagttcgacaaattatttttagcaggcgagcgagcagatcctgacacaattaaatggtttgaaaaattatctaactcacctgtgattgatcattggtggcaaacagaaacgagttgggcaatcacatctgattgcactggaattgaatctttccctgttaaatatggatctgcatttaaaccggtgcctggttatgatttgaaagttttaaattctgagggtaaagaggttggtccaggaaaaatgggagacattgttgttaaacttccactccctccaggaacttttccaacactttggggtgctgataaaagatataaagaaaattacatgtctacttaccctggttactatcaaacttatgacgcgggacacattgatgaagacggttatgtttggattatgtctagaacagatgatattataaatgttgctggtcatagattatcaactggagcaattgaggaagttttagctgagcataaagatgtagctgaatgtgctgtcataggtattgctgacaaattaaaagggcaactacccatcggcttactagctttaaaagctggtgttacaaaagataagaaagatataatcagcgaatgtataaagatggttagagaaaaagttggtcccgtcgcagcttttaaaatagctattgttgtaaaaagattacctaaaacaagatcaggaaaagttttaagaggaacagtaagaaagattgctgataatgaaccttataaaatgccggccacaatagatgatccagctatcttagatgaaataaaagctgacctagttgacaacaaaattttaaaactttaa

SEQ ID NO: 308050 - DNA, 805 bp, Unknown
  Bacterial polypeptide expressing nucleotide sequence isolated from the Sargasso Sea
aatggctgtaatcatagacaaaaatactaagataattgttcaagggtttaccgggaagatgggaagttttcatgctgaagaaatgattaaatatggatctaatgttgttggtggagttactccaggaaagggtggatcaaaacatcttgatcttccagtttttaacacagttaaagaagcagtgaaaagcactggagctacagcgtctatattatttgtgccaccagcttttgcagcagactctgccatggaggccgcagatgctggaataaaaagttgtgttgccattgtagacggaattccatcacacgatatgattaggattaaacgttatatgagaagatatactaagtcagaaaaaatgagtttagttggtccaaattgtgcaggtataattagtccaggaaaatcgatgttaggaataatgcctggtcacatatataaagagggaagagttggaattataagtagatcaggaacattaggatatgaagctgctcaacaattaaaaaacttaaacattggtgtttcaacaagtgtcggtattggtggtgaccctattaacggtagttcttttaaagatattattggaaagtttgaagaagatgatgaaacagacgctatattaatgataggagaaataggtggtccacaggaagttgccgcaggcaaattcgctaaagaaaaatatgaaaaaaccagttattgcttatattgcaggcttaactgccccaaaaggaagagttatgggtcatgctggtgcaatagtatctgcttatggagaaagtgcggtagaaaaagttga

SEQ ID NO: 308051 - DNA, 582 bp, Unknown
  Bacterial polypeptide expressing nucleotide sequence isolated from the Sargasso Sea
aatgtctgaacttggtttttacagatttgcaaaaaaggatccctcagaggtagccattattgggccaaatgaggaagctatttcccgcggagatttattaaaaaaagcgaatcaattatcccatgctttacgcaaattaggactcaataagggagataccgttgcaatagtcttaccaaattcgattgagtattacattgcttatatggcctgcttacaggtaggtttttacatggtccctattaactggcatcttgcgggtccagagattgcctacattctcgaagattctgaagcaaaagctttcattgcctcaggatctcatccagatatgagggatgcatgcttaaaggctgtatcctctataaattttgattcaaaacgatgtatcactattgatgacttggagggttttattcacttagatgaatttattgaaggtgaatccgatgctgatcccgaggaaagaactgcaggtcaagttatgaactacacctcaggaacaacaggcaaacctaagggagtcaaaagaagtttggtggaaggtgatccagatgacgtgttaagccatgtttgcaatga

SEQ ID NO: 308052 - DNA, 268 bp, Unknown
  Bacterial polypeptide expressing nucleotide sequence isolated from the Sargasso Sea
catggtaagagttaagaaagcattggccagttctaaatcgagacttattggacctaattgtccaggcataattacccccgatcaatgtaagattggtattatgccaggtcatattcatcaaaaaggttcagttgggattgtttcgcgatcgggtacattaacttatgaagcagttggacaaaagactgcatgtggtttaggtcaaacaacttgtataggtaaaagaggagaccccgtaaatggaactaatattattgattgtttagat

SEQ ID NO: 308053 - DNA, 632 bp, Unknown
  Bacterial polypeptide expressing nucleotide sequence isolated from the Sargasso Sea
tctggaacaacaggaactcctaaagggaatcgtaagagacattggtggtcatattgttgctttgaaatggacaatgaaaaacatctataacattaatcaagatgatgtttggtggtctgctagtgatattggctggatagttggacactcttatattgtttatgctccgttattttacggatgcacaacagttttatttgagggaaagccagttggaacaccagatgcgggggttttttggagaattatctctgagcacaaggttaaatctttatttacagcaccaactgcaataagagctataaaaaaagaagatcctgatgggaaatttttcaaaaaatatgacttatccaagtttgacactttgttcctagcaggagagagagcagatcctgatacgataaaatggtttgagaagctctctaatgctcctgttatagatcactggtggcaaacagaaacaagttgggcaattagcgcaaattgtgctggaatagaaaaatttcctatcaaatatggctcagcatttaaaccagtaccaggatatgatttaaaagttttaaatagtgaaggaaaagaaaataaagcaggtcaaatgggtgacattgtagttaagttgcctttaccaccag

SEQ ID NO: 308054 - DNA, 355 bp, Unknown
  Bacterial polypeptide expressing nucleotide sequence isolated from the Sargasso Sea
ctgtttggaattggaggagatccaattatcggttcaagtatgatagatatattgaaacattttgctaatgatgatgaaactaaaggtgttgtaatgattggagaaattggtggtagcatggaaaatgaagccgctgaatggatcaaagacaattttaataaacctgttgtatcatttattgcaggtcaaactgcgcctaaaggaaagagaatgggtcatgctggagcaatcatttcagaaggatctgaaacagctgatgctaaaattaaaattttaaaagaatgtggggtttcagttgctaaaacagtatctgaaatcggagaaacaatgttaaaaatgatagaggaaaaatgaa

SEQ ID NO: 308055 - DNA, 1371 bp, Unknown
  Bacterial polypeptide expressing nucleotide sequence isolated from the Sargasso Sea
aatataaacctcttgtagatgaagctctaaaattagcatctcacaaaattgaaaagctaatattgtttcaaagaccaaataatgaagtaaaattaaatactccaaaagaaattagttgggaagaagcattgtcaaatgcaaaaaatacagattgtgttgagatgggctcaaacgaatttgcttatattttatacacttcgggaacaactggtattccaaaaggaattgtaagagacataggtggtcacattgccgctttaaaatggacaatgaaaaatatttataatattgatcaagatgatgtctggtggtctgcaagtgacattggttggatcgttggtcattcttatattgtatatgctccattgtttaaaggatgtacaactgtgctatttgagggcaagcctgttggaactccagatgcaggtgccttttggaaaataatttctgactataaagtaaaatctctattcactgcaccaactgcttttagagctattaaaaaagaagacccagaaggtaaatttttttctaagtatgacttaagttcatttgaaagtttatttttagcaggagaaagagcagacccagacacaataaagtgggcagagtctctcttaaaagttccggtaattgatcactggtggcaaactgaaactagttgggcaataagttctaattgtacagggatagaaatgatgaaaacaaaatatggttctgcttgtaaagctgttccaggttatgatgttaaagttataaaaccagatcaaactttagctaagccaaatgaaatgggcgatatagttgtaaaactacctcttcctcctggaacatttccaactttatggaatgctgatgaaagatataaaaaaacttatatgacaaactatgaaggttattatcaaacttatgatgcaggtcacatcgatgaagatggatatatttggattatgtctagaactgatgacattataaatgtagctggccatagattatcaactggggctatagaagaagttttgtcagaacaccagtctgttgcagagtgtgcggttattggaattgctgacaaattaaaaggacaactgccaattggtttaatagctcttaaagctggagttcaaaaagataatgaaacaatatcaaaagaatgtattcaaatggtaagaaataaagttggaccagttgcagcatttaaaacagctattgttgtaaaaagattaccaaaaactagatctgggaaaattttaagaggtacggttagaaaaatagctgataaagaagagtataagatgccagcaacaattgacgatccagcaattttagatgaaattaaaggagatttaataaaaaataatattttaaaataat

SEQ ID NO: 308056 - DNA, 379 bp, Unknown
  Bacterial polypeptide expressing nucleotide sequence isolated from the Sargasso Sea
tatgtttatgggcgcaggattagctatggctacaatggatataataaaattatacaatggagctccgtcaaactttttagatgttggtggaggcgcctcaaaggaaaaagtatcatcggcactaaaaataattatgtctgataaaagtgttaaaggtgtattaataaatatttttggtggaattatgagatgtgatattttagctgaaggagtggttgatgctgctaaagagatgcaaattaaaattccaattgttgtaaggttagctggaactaactttgaggaaggtcaaaaaattttaaaaagctcaaatctaaaaataattcctgcgtttgatttatcagatgctgccaaaaaaattgtagaggaaattagataa

SEQ ID NO: 308057 - DNA, 397 bp, Unknown
  Bacterial polypeptide expressing nucleotide sequence isolated from the Sargasso Sea
tatgtcagttttagttaataaaaatacaaaagttatttgtcagggctttactggagctcacggaacattccattcagaacaagcaattaaatatggtacaaatatagttggaggtgttacaccaaaaaaaggaggacaaactcatttagaaagacctgtttttaatacagtgaaagaagcaaagaatgctacaggtgcaaacgcaacaatgatttatgttcccgcaaaatttgcagctgctgcaattattgaagcaatagaatgctcattagaacttattgtttgtattactgaaggaataccagttttagatatgctaaaggtaaaaacaaaattatccaattcaaagtcgagattaattggaccaaactgccctggaattattacaccgagatga

SEQ ID NO: 308058 - DNA, 124 bp, Unknown
  Bacterial polypeptide expressing nucleotide sequence isolated from the Sargasso Sea
aatggagttaagagcttctgaatgggatctaaactatgtatcccttgaaggaaacattggttgtttagttaatggagcaggcctcgcaatggcaactatggacattattaaattagctggagga

SEQ ID NO: 308059 - DNA, 517 bp, Unknown
  Bacterial polypeptide expressing nucleotide sequence isolated from the Sargasso Sea
ccccaactgtgcaggctcaataagcccaggaaaaagtatgatgggaataatgccgggacatatttattcacctggtaatgttgggcttataggtcgttccggaacattaggttatgaagctgcatcacaaatgaaagaggaaggtattggtatttcaacaagtgttggtattggaggcgatccaattaatggcagctcattcaaagaccatttagaattttttgaacaagatgatgaaacaaaagccatcgttcttattggagaaataggtggccctcaagaggtagaggcagcaatgtgggcaaaagataatatgaaaaaaccagttattggctacatagccgggttgacagcaccaaaaggccgtcgcatgggccatgcaggtgcaattatttcagctgttggtgaaagtgctgcagaaaaagttgagatattgcaggagtgtggtgtaagtgttgttccaaatccatcatcatttgcacccgttgttaaaggtgtattagataaagccagttaa

SEQ ID NO: 308060 - DNA, 364 bp, Unknown
  Bacterial polypeptide expressing nucleotide sequence isolated from the Sargasso Sea
aatgtcagttctagtaaacaaaaacactaaagtaatatgtcaaggttttacaggcactcacggaacatttcattctgaacaagctttaatgtatggaactaaattggttggcggcgtcactccaaaaaaaggtggtcaaaaacatttaaatttaccagtttttaatacagtccaagaagcaaaagataaaacttctgccaatgctacaatgatttatgtgcctcctaaattcgcaagcgcagctattttagaggcgatagaggccgaaatggaattgatcgtatgcataactgagggaataccagtaattgatatgttgaaagtcaaaaaaaatttaaaaaaaagcagatctagattaattggt

SEQ ID NO: 308061 - DNA, 1009 bp, Unknown
  Bacterial polypeptide expressing nucleotide sequence isolated from the Sargasso Sea
ttgttttatggttgtacaacaattctttttgaaggaaagccagttggcaccccagatgcaggtgtgttttggcgagtgatatcagaacataaagttaaatctctttttaccgctccaacagcaattagagcaattaaaaaagaagatccagaaggaaattattttaaaaaatatgatttatcacaatttgatacattgtttttagcaggtgaaagagcggacccagatactatcaaatggtttgaaaaactttcagggtcaccagtggtagatcactggtggcaaactgaaactagctgggcaattacatctagttgcaccggtatagaaaaatttccagtaaagtatggttcagcttttaaaccagtgccaggttatgatttaaaagttttgaattctgagggaaaacaagttggtcctggtaaaatgggagacatcgtcgtaaaattacctcttccgcctggaacattcccaacattatggggtgcagataaaagatacaaagaaaattatatgactaattatcctggttattatcaaacttatgacgcgggtcatattgatgaagacgggtatgtttggataatgtctagaacagatgatattattaatgttgctggacatagattgtctactggtgcaattgaggaagttttagcagaacacaaatcagtagccgagtgtgcagttataggtattgccgataaacttaaaggtcaactgcctataggattattagctcttaaggctggtgtttctcaaagtaatgaagaaataattaaagagtgtataggaatggttcgagagaaagttgggccggtggcagcttttaaaacagcaataatagttaaaaggcttcctaaaacaagatctggaaaggttttaagaggcacggtgagaaagattgctgataatgaaccttacaagatgcctgcaaccatagacgatccttcaatattagatgaaataaaagcagatttgattgaaaataaaatattaaaattgtaac

SEQ ID NO: 308062 - DNA, 1453 bp, Unknown
  Bacterial polypeptide expressing nucleotide sequence isolated from the Sargasso Sea
tgagttagccagtagaatagatgatagtaaagccaaaatactaattactgcttcatgtggctttgagcctggaagaacagttgagtatcgacccttagtagatggtgcattaaaacttgcaaaacatcaaattgaaaaagttattttgtatcaaagaaaaggtcatgaagtaaaacttaatgagcctcttgaaatcagttgggaagaatctttggttaacgctacagacaaagattgtgttgaaatgggatctaatgagttagcttatattttatatacttcgggaaccacgggtataccaaaaggaattgttcgagacattggaggacatatagttgctctaaaatggacaatgaaaaatatatataatattaatacggatgatgtttggtggtcagctagtgatataggttggattgttggacattcatatattgtttatgcccctctgttcaaaggatgtactactgttttatttgaaggaaaaccagttggcacaccagatgcaggtgcgttttggaaagtaatttcagattataaagttaaatcactttttacagctccaacagcatttagagcaattaaaaaggaagatcctgaaggtaaatttttctctaaatatgatcttgcttcatttaaatctctatttcttgcaggtgaaagggctgatcctgacacaattaagtgggcagaaaatttattgaaagtccctgtaattgatcattggtggcaaactgaaactagctgggcaataagttctaactgcacaggtattgaaatgcaaaaaactaagtatggctctgcatgtaaagctgttcctggatatgatgttaaagttataaaaccagatcaaagtttagctaagccaaatgaaatgggagacatagttgtaaaacttccattacctccaggaacttttccaacattgtggaatgctgacaaaagatatgaagaaaattatatgtctaactacaaaggatattatcaaacttatgatgcgggtcatattgatgaagatggctatatatggattatgtctagaacggatgacataattaatgttgcaggtcatagattgtccactggtgcaattgaagaagttttatcagaacaccagtcagttgctgaatgtgcggttataggaattaaagatcagttaaaaggccaattacccattggattaattgcattaaaagccggtgttacaaaagataatgagacaatttcaaaagaatgtattgaaatggtcagaaataaagttggaccagttgctgcttttaaaacagcaattgtagttaaaagactgccaaaaactagatctggaaaagttttaagaggaactgttagaaaaattgcagataaagaagaatataaaatgccagcaacaatagatgatcccactattcttgatgaaataaaggagaatttaattaataataaaattttaaaataa

SEQ ID NO: 308063 - DNA, 652 bp, Unknown
  Bacterial polypeptide expressing nucleotide sequence isolated from the Sargasso Sea
aatggaagctgctgatgcaggtattaaaacttgtgtggctattactgacggaattccttctcatgatatggttaaaataaaaagatacatgagaagatatccaaaagataaaaaaatgggattagtaggtccgaattgtgcaggaataattagccctggtaaatctatgttaggtattatgcctggtcacatttacaaagaaggtaaaataggaatagttagtagatctggcactttgggatatgaggctgcacaacaacttaaagatttggaaattggtgtttcaacaagtgtaggtataggaggcgatccaataaatggaagttcttttagagatataattgaaaagtttgaaaatgatgatgaaactattgcagttttaatgataggtgaaataggtggcccacaagaagttgaagctggacaatttgctaaagaaaatatgattaaaccggtaattgcatatatagcaggactaactgcacctaaaggtcgtgtgatggggcatgctggcgcaattgtttctgcttatggtgaaagcgcaatagaaaaagtagaacttcttaaagagtgtggagttacaatttccaaaaacccttctgtaatgggtgaaactgtaaaaaaagtattagtagaaaataatttgaattaa

SEQ ID NO: 308064 - DNA, 343 bp, Unknown
  Bacterial polypeptide expressing nucleotide sequence isolated from the Sargasso Sea
tatgtcaattattgttaacaaggatactaaagttatttgccaaggctttactggttctcaaggtacctttcattctcaacaggctatagaatatggaacaaaattggttggtggggtaactccaggtaaaggtggaaacaaacatttaaatttacctatttttaatactgttaaagaagctgttgatttaactgcagcagatgcaaccgttatatatgttccagcaaagtttgctacttcagcaattaatgaagcattagatgctaatttggaaattataatttgtataactgaaggaattcctgttcttgatatggtaaaaatcaagaaacgaatagttgaa

SEQ ID NO: 308065 - DNA, 684 bp, Unknown
  Bacterial polypeptide expressing nucleotide sequence isolated from the Sargasso Sea
catggcagttataatagataaaaataccaaaattataatccaagggttcacaggtaaaatgggtacatttcatgcagatgaaatgattaaatatggatcaaatgttgttggaggagtaactccaggtaaaggaggaacaaaacatttgaatctcccagttttcaacactgtaaaagaggctgttgatagtacaaatgctaccgcctcaattttatttgttccgccagcatttgcagccgactctgctatggaagctgctgatgcgggtataagaacatgtgttgcaatagttgatggcatcccatcccatgacatgataaaaattaaaagatacatgagaaggtattctaaatccgagaaaatgagtttagtaggacccaactgcgcaggaataataagtcctggtaaatcaatgctaggtattatgcctggacatatttataaagaaggaagagttggaataattagcagatctggcactcttggatacgaggctgcacaacaattaaaagatcttaatattggaatttcaacaagtgttgggattggtggagatccaataaatggaagttcttttaaagatataattggtaaatttgaagaagatgatgaaactgatgcaatactaatgattggagaaataggaggtcctcaagaggttgcagctggagaattgcaaaacaa

SEQ ID NO: 308066 - DNA, 379 bp, Unknown
  Bacterial polypeptide expressing nucleotide sequence isolated from the Sargasso Sea
caaactacagatgcaggcttaggtcaaagtacatgtattggtataggtggagaccctgttaatggaacttcatttatagatgcattggaaatgtttgaaaacgattctcaaactgaatcaatagttatggttggtgaaataggcggaagcgcagaagaagaagcggctgaatatattagagataatattaaaaaaccagttgtttcatacatagctggtgtcaccgctccaaaaggaaagagaatggggcatgcaggcgcaataatttctggaggcaaaggaacagctcaagataaatttaaagctttagaatctgctggagtaggtgttgtaactgatttaaatctgattggttccagacttaaagaatctctttaag

SEQ ID NO: 308067 - DNA, 435 bp, Unknown
  Bacterial polypeptide expressing nucleotide sequence isolated from the Sargasso Sea
tgggagttgtatctcgcagtggaactctgacttacgaagcagttcatcagcttacaatcctaggcatcggccaatcaagttgcgtagggataggaggggatcctatcattggaaccaactacgtagatattttgaacctctatgaagaagatccagatacagatatcatcgtattcataggtgaaattggtggaaccatggaacaagaagcagcggagtatattaaacaccatataactaaaccagtttgcagcttaatagtaggagcaaccgctccagcgggcaaacgaatggggcatgccggcgccataataacaggttcaactgccacagcagcttctaaggtagctgctctcaaagacgcagggtgtcatataatccctacccctgcagatattggagacgttgttgctaaagtactagcaaacaattaat

SEQ ID NO: 308068 - DNA, 337 bp, Unknown
  Bacterial polypeptide expressing nucleotide sequence isolated from the Sargasso Sea
ataaaactgcatggtcaagaacctgcaaattttttagatgtaggaggcggtgcatctaaagaaaaagttgcagctgcgtttaagataattttatcagataaaaatgtaaaaggaatactgataaatatttttggagggattatgaggtgtgatgtccttgcccagggaattgtagaggctgcaaaagaatccaaaataaatatacctcttgtagtaagacttgctggaaccaatgctaaagaaggaaaaaaaatattagatgaatctggattaaaaataatctctgctagcgatctaggggatgcagcaaaaaaaattgtaaaacaagtggaataaa

SEQ ID NO: 308069 - DNA, 799 bp, Unknown
  Bacterial polypeptide expressing nucleotide sequence isolated from the Sargasso Sea
aatgagtatattaattgatagaaataccccagtaattgttcaaggtataactggtaaaatggcccgttttcatactgaagacatggttaagtatggcactaatgttgttggtggagttgttcctgggaaaggtggtatggaggtaaagggtttaccagtgttcgatactgttgctgatgccgttgagaatactggtgcagaagcaagcttagtatttgttcctccaccctttgctgcagatagtataatggaagctgcagatgccagaataaaatatagcgtgtgtataactgacggtattcctgcgcaagatatgataagagtaaagcgatacatgtatagatatccactagaaaaacgcatgattttgactggtccaaattgtgcaggaacaattagtccaggcaaagctttacttggaattatgcccggtcacatctacctacaaggaaatgttggtattgtgagtcgctcaggtacccttggatatgaagccgctgctcagttgaaagcgcatggtattggtgtttctacttcagtgggtattggtggtgatcctataaacggttcgtcctttaaggatattctacaacgctttgaagatgatgacgaaactcatgtcatttgtatgatcggtgagataggtggcccacaagaagcagaggctgcagcatacttaaaggaacatattaagaaacctgttgttgcctatgtagccggaatgactgcaccaaaaggaagaactatggggcacgccggtgcaattatttctgcgtttggtgaaagtgcgagtgaaaaa

SEQ ID NO: 308070 - DNA, 403 bp, Unknown
  Bacterial polypeptide expressing nucleotide sequence isolated from the Sargasso Sea
atgtcaataattgtcaataaagatacgaaagttatttgtcagggatttacaggatcccaaggtacttttcattcagagcaagcaataaaatatggaacccaacttgttggaggtgtgacgccaaaaaaagggggaacctctcatcttggattgcctgtatttgatacagtaagtgaagcaaaagaaaaaactgataccaatgcatctgttatttatgtacctccacaatttgcagccgcagcaattgttgaagcaattgaaagtcagatagagttgataatatgtattacagaaggtatccctgtaatagatatgatgatggttaaagataaattaaaatcatctaagtcacgtttaattggaccaaactgtcccggtataattactcctgatgagtgcaaga

SEQ ID NO: 308071 - DNA, 1102 bp, Unknown
  Bacterial polypeptide expressing nucleotide sequence isolated from the Sargasso Sea
aaatatctataacattgatgaaggagatatctggtggtcagctagtgatattggttggatagttgggcattcatatattgtttatgctccattgttcaaagggtgcacaactgtattgtttgagggtaaacctgtgggtacacctgatgctggtgcattttggaaaattattgcagactataaagtaaaatcccttttcactgctccaacagcttttagagcaattaaaaaagaagatccagatggtaaatttttttctaaatatgatcttaataattttgaaagcttgtttcttgcaggtgagagagcagatcctgatacaattaaatgggctgaaaatttattaaaagttccagtgattgatcattggtggcaaactgaaactagttgggcaattagttcaaattgtactggtatagagatgatgaaaacaaaatatggttcggcttgtaaagcggtacctggttacgatgtaaaaattatgaaatcagatcaaactttagcaaaaccaaatgaaatgggagatatagttgttaagttaccattaccacctggaacttttcctactctttggaatgcagatgaaagatataaggataattatatgtctaattacgaaggttactatcaaacttatgatgcgggccatatagatgaagatggatatatatggattatgtcaagaactgatgacattataaatgtagcaggtcatagattatctactggtgcaattgaagaagttttatccgaacatcaatcagttgctgaatgtgctgttcttggagtcgctgataaattaaaaggtcaattacctattgggttaattgtattaaaaacaggtgttgaaaaagataatgaaactatatcaaaagaatgtattcaaatggttagagataagattggtccagtcgcagcttttaaagttgcaatagtaattaaaaggcttccaaaaacaagatcaggtaaaattttaagaggaacaataagaaaaattgctgataatgttcaatataaaatacctccaacaattgatgatcctgctattttagacgaaattaaagaggaattaattaaaactaaaattctaaaaagtgcttaa

SEQ ID NO: 308072 - DNA, 1183 bp, Unknown
  Bacterial polypeptide expressing nucleotide sequence isolated from the Sargasso Sea
atacctcaggcacaactggaactccaaaaaggaatagtaagagatgttggtggtcacattgttgctttgaagtggaccatgaaaaatatttataatattgataccaaagatatctggtggtcagcaagtgatattggatggattgttggacactcatatattgtttacgcaccattgtttaaaggatgcacaacagttttatttgaaggtaagccagttggaactccagatgctggagcattttggaaaattatttcagactataaagttaaatctttgtttactgcgccaactgcatttagagcaattaagaaagaagaccctaatggtgagtttttttcaaagtatgatctaagtagttttgaaagtttatttttagcaggagaaagagctgatccagacacgataaaatgggctgaaaatttacttaaagttccagtgattgaccattggtggcaaactgaaacgagttgggcaattagttcaaattgtactggaattgagatgatggaaactaaatacggctcagcttgtaaagcagtaccaggctatgatgtaaaaatcatcaaaccagatcaaactttagcaaaaccaaatgaaatgggtgacattgtagtgaaactccctttgcctcctggaacatttcctaccctatggaatgctgacaaaagatataaagaaaattacatgtccaattatgatggctactatcaaacttatgatgcaggacacattgatgatgatggttacatttggattatgtctagaacagatgacattataaatgttgcaggtcacagattgtctactggagcaatagaagaagttttatctgagcatcaatcagttgctgagtgtgctgtgttagggattgctgataaattaaaaggtcaattaccaattggcttagtcgttcttaaatctggagtggataaggataatgaaacaatttctaaagaatgtattcaaatggttagagctaaaattggtcctgttgctgcatttaaagtagcaattgttattaagagacttcctaaaacaagatcagggaaaattttaagggggacaattagaaaaattgctgacaatgttgaatacaaagttccaccaacaatcgatgatccagcaatattaagtgaaattaaagaagatttaatcagaaataaaattctagatggttaag

SEQ ID NO: 308073 - DNA, 389 bp, Unknown
  Bacterial polypeptide expressing nucleotide sequence isolated from the Sargasso Sea
aaaaaatttagatattggaatttctacaagtgttggaattggaggggatccaataaacggaagctcattcagagacataattgaaaaatttgagacagatgaggagacagatgctgtattaatgattggtgagataggaggtccccaggaagttgctgctggagagtttgcaaaagtaaatatgaagaaacctgtcattgcctacatagcaggattgacagcaccaaagggacgagtgatgggacacgcaggggcaattgtttctgcctatggagaaagtgcaatagaaaaagtagaaatattgaaagagtgtggaattacaatttcgaaaaatccatcagttatgggcgatactgtaagtagtgtattaaaaaaaattaataaatgag

SEQ ID NO: 308074 - DNA, 1441 bp, Unknown
  Bacterial polypeptide expressing nucleotide sequence isolated from the Sargasso Sea
aatagatgactcaaaagcaaaaataattatttctgcatcttgcggttatgaacctgggcgaactgttcactataaaccacttttaaataaagctattgaaattgcaaagcataaaccagaaaaatgtattatttggcaaagagaaaaagataaagcagagcttgatccaaaaaaagatattgattggctggatgctttaaaaggggcaaaaccaactgaatgtgaaaaaatgaattcaaatgattatgcttacatactttacacatctggaactacaggaactcctaaaggaattgtaagagatattggtggacatattgttgctttaaaatggacaatgaaaaacatttacaacattgatcaagatgatgtttggtggtctgctagtgatattggctggatagttggacactcttatattgtctatgctccattattttacggatgcacaacagttttgtttgaaggaaagccggttggaacaccagatgcaggagttttttggagaattatctccgaacataaagtaaaatcattatttacagcaccaactgcgataagagcgatcaaaaaagaagatcctgatggaaaatttttcaaaaaatatgatttgaccaaattcgatactttgtttttagctggagagagagcagatcctgatacaataaaatggtttgaaaagctctctaatgctcctgttatagatcactggtggcaaacagaaacaagttgggcaataagcgcaaattgtgctggaatagaaaaatttccaattaaatatggctcagcatttaaaccagtaccaggatatgatttaaaagttttaaatagcgaaggaaaagaaaataaagctgggcagatgggtgacattgttgtgaaattacctttgcctccaggtacattccctaccctttggaatgcagatgaaagatataaaaaagtttatatgtcaacttatgatggctattaccaaacttacgatgcaggacatgttgatgaagatgggtatgtttggatcatgtctcgtaccgacgatatcataaatgtagcaggtcatagattatctactggagccattgaggaagttttagcagaacacaaaaatgttgcggagtgtgcagtagtgggaattgcagataaattaaagggtcaacttcctattggactgattgcattgaaagctggagttaatagagataacaaagaaattacaaaagagtgtgtggctttagtcagagaaaaagttgggcccgttgctgcttttaaattagctattgttgttaagagattaccaaaaacaagatcgggtaaagttttaaggggaacagtaagaaaaattgctgatggtgaaacatataaagtgcctccaactattgatgatccagcaattttagatgagattaaaaaagaccttaaagataataatattttaaaaacttaa

SEQ ID NO: 308075 - DNA, 1354 bp, Unknown
  Bacterial polypeptide expressing nucleotide sequence isolated from the Sargasso Sea
gatggagctataaaacttgcaaaacataaaatagaaaaagttgttttttttcaaagagaaggtcatgagatcaatttgactgcaccattagagatatcttgggatgaggcactttcaaatgctaaagataaggattgcgttgagatgggatcaaatgattttgcttacatattatatacttctggaacaaccggtattccaaaaggaattgttagagatattggtgggcatatcgttgctcttaaatggacgatgaagaatatttacaatattgatgaaaatgatgtttggtggtcagcaagtgatattggatggatagtgggtcactcctatatagtatatgcacctttgtttaaaggatgcacaacagttttatttgaaggaaaacctgtaggcacacccgatgcaggagttttctggagaattatttcagattataaaataaaatctttattcacagcaccaacagcttttagagcaataaaaaaagaagatcctgagggaaagtatttttcaaaatatgatttaagttcttttgaatctttattcttggctggagaaagagcagatccagatacaattaaatgggcagaaaatttattaaatgttcctgtaattgatcattggtggcaaactgaaacaagttggtcaataagtggaaattgcactggaattgaaatgcaaaaaactaaatatggttctgcatgcaaaccagttccgggctatgatgttaaaattataaaacctgataatactttggcaaaacctaatgagatgggcgatatagttgtaaaacttccattgcctccaggaacttttcctacattatggaatgcagatcaaaggtataaagaaaattatatgtcaaattatcaaggctattatcaaacatatgatgcaggtcatattgatgaagatggatacgtttggatcatgtcaagaacagacgatattattaatgtagcaggtcatagattatcaacgggtgcgattgaggaagtcttatcagaacaccaatcagtagctgaatgtgcagtaattggaatcaaagaccaattaaaaggccaacttccaataggtttaattgccttaaaagctggcgtaacaaaggaaaatgaaattatttcaaaagaatgtattcaaatggtgagagataaagttggccctgttgccgcgttcaaaactgttattgttgttaaaagattgcctaagacaagatcaggtaaaatattaagaggcacagtaagaaagatagccgataaagaagagtacaaaatgccagcaaccattgatgatccagcaattttagatgaaataactgaaaatttagtgcaaaatggtattattaaataat

SEQ ID NO: 308076 - DNA, 1373 bp, Unknown
  Bacterial polypeptide expressing nucleotide sequence isolated from the Sargasso Sea
atataaaccactagtagacgaagctatcaaactagctaatcacaaaattgataaaatgattttgttccaaagaccaggtcacgaagtgaaattaaatgctccaaatgaagttagttgggaagaagttgtctctaatgcaaaaaatactgattgtgttgaaatgaattcaaatgaatttgcctatattctttatacctcaggaacaactggaacacctaaaggtattgtaagagatacaggaggtcacatagttgctcttaaatggactatgaaaaatatttacaatgtagatacaaatgatatttggtggtcagcaagtgatattggttggattgttggacattcctacatagtctacgctcctttattcaaaggatgcaccactgttttgtttgaaggaaagccagttggtactccagatgctggagctttttggaaaattatttcagactataaagtaaaatctcttttcacagcacctactgcttttagggcaattaagaaagaagatcctgaaggtaagtttttctcaaaatatgacctaagtaatttcgaaagcttatttcttgctggagaaagagcagatcctgatacaattaagtgggcagaaaatttactcaaagttcctgtaatcgatcattggtggcagactgaaactagttgggcaattagttcaaattgcactggaattgaaatgatgaagaccaaatatggatcagcgtgtaaggcagtcccaggttacgatgttaaaattattaaaccagaccaatcattagctaaaccaaatgaaatgggtgatatcgtagttaaacttcctttacctccaggaacttttcctacactttggaatgcagacaaaagatataaagaaaattatatgactaattatgaaggttactatcaaacatatgatgcaggtcacattgatgaagaaggttatatttggattatgtcgagaacagatgacattattaatgttgcaggacacaggttgtcaactggtgccattgaggaggttttatcagaacatcaatcggtagctgagtgcgcagtacttggtattgcagataaattaaaagggcaactacctatagggctagtagtgcttaaatctggagtagaaaaagataatgaaactatttcaaaagaatgtgttcaaatggtcagggataaaattggaccagttgcagcttttaaagtggtaattgttatcaaaagattaccaaaaacaagatctggaaaaatattaagaggaacaattagaaaaatagccgataaagttgaatataaaatacctccaactatcgatgatccagctattttaacagaaattaaagaggatctttttaaaaataatatactaaaagactaaa

SEQ ID NO: 308077 - DNA, 1166 bp, Unknown
  Bacterial polypeptide expressing nucleotide sequence isolated from the Sargasso Sea
tggtactccgaaggggatagttagagatattgggggtcatattgttgctctcaaatggactatgaaaaatatttacaatattgataatgatgatatttggtggtccgctagtgatattggttggattgttggacactcttatattgtctacgctcctttatttaaaggttgcactacagttttgtttgaaggtaaacctgtaggaactccagatgctggagctttctggaaaattatttcagactataaagtaaaatcattgtttactgctccaacagcttttagagctattaagaaagaggatcctgatggtaaatttttctcaaaatatgatttaagtagttttaaaagcttattccttgctggagaaagagctgatccagacacaattaaatgggctgagaatttacttaaggttccagtgattgatcattggtggcaaactgaaactagttgggcaattagctcaaattgtactggtattgaaatgatggaaacaaaatatggttcagcctgtaaagctgtccctggatacgatgtcaaaatcatcaaaccagaccaatctttagctaaaccaaatgagatgggggatatcgttgttaagctacctttgcctccagggacatttccaacattatggaatgcagatcaaaggtacaaagaaaattacatgtctaattatgaaggatattatcaaacatatgacgcaggtcatatcgatgataatggttatatttggataatgtctagaactgatgacattataaatgtagcaggtcatagattgtctacaggtgctattgaagaagtattatctgaacatcaatctgttgctgaatgtgcagtacttggaatagcagataaattaaaaggtcaattacctattggattagtagttttaaaatctggtgtagataaagataatgaaactatttcaaaagaatgtatcaaaatggttagagataaaattggaccagttgcagcttttaaagtggtaattgttatcaaaagattaccaaaaacaagatctggaaaaatattaagaggaacaattagaaaaattgccgataaagttgaatataaaatacctccaactatcgatgatccagctattttaacagaaataaaagaagatcttattaaaaataatatactaaaagactaaa

SEQ ID NO: 308078 - DNA, 379 bp, Unknown
  Bacterial polypeptide expressing nucleotide sequence isolated from the Sargasso Sea
atggttaacggagcaggcttagctatgggaacaatggatactataaaactctatgatggtgaaccagcaaactttctagatgtaggcggtacagcaactaaagagcgagtatctaaagcttttaaattaatactttccgatcagaatgttaaaggtattttgataaatatttttggcgggatagtaagatgcgatcttatagctcaaggaattatagatgcaataagagaaagaagtgtatctgtgccaatagtggttagattgcaaggcaataaatctgaagaaggtaaatcaatcctaaatgactctggtttaaatcttatcggagaagattcgcttcaagaagcatccaaaaaaatagttgagttagttaaatgag

SEQ ID NO: 308079 - DNA, 835 bp, Unknown
  Bacterial polypeptide expressing nucleotide sequence isolated from the Sargasso Sea
actggatctgaaggactatttcatgcacagcaaatgttagactatggttctaacgttgtttgtggagtaactcctggaaaaggtggtcaaactgttacagaaaaaaacttaccagtttttaatagcatcgaagaagcaaaaaaagagttttcaattgatgccacggtaatttttgtcccacctagatttgctgcaaatgcaattcttgaagcaattaatcaaaatattggtttaattgtttgtatatctgaaggaattcctgttctagatatgaaaaaagttaaaagtgcacttgataattcctcttcaactcttattggtcctaactgtcctggcttaataacagctgaagaatcaaaaattggaattacgcccggttttatttgcaaaaaaggttctattggtattctttctcgttcagggaccttgacttatgaggcaattgaccaaattgttaatgttgagttaggaatgactaccgctgttggaattggaggagatccaattatcggttcaagtatgatagatatattgaaacattttgctaatgatgatgaaactaaaggtgttgtaatgattggagaaattggtggtagcatggaaaatgaagccgctgaatggatcaaagacaattttaataaacctgttgtatcatttattgcaggtcaaactgcgcctaaaggaaagagaatgggtcatgctggagcaatcatttcagaaggatctgaaacagctgatgctaaaattaaaattttaaaagaatgtggggtttcagttgctaaaacagtatctgaaatcggagaaacaatgttaaaaatgatagaggaaaaatgaa

SEQ ID NO: 308080 - DNA, 546 bp, Unknown
  Bacterial polypeptide expressing nucleotide sequence isolated from the Sargasso Sea
ccatgttgaaggactcagattcgattctattgggtccaaattgtcctggcatcataacgcctgaagaaacaaagattggaatcatgcctggtttcattcatcaaaaaggctctgtaggaattatttccagatctggcaccctgacttatgaggctgttcatcagacttccatgtgtggcctcggtcaaagtacttgtattggaatagggggcgatcccattaagggtctaaatttcattgaatgtctgtcactttttgagaaagactcagcaacagaaggaattattatggttggtgaaattgggggttcagacgaagaaaaggccgcagagttcatcaaaaacaaaatcactaaacctgttgttgcctatgtcgctggtgtttcagcgccgccggggaaaagaatgggtcatgccggagcaatcgttactggcaatgagggtacagcttcaagcaaatacaaagctttgaatgacgcgggagtaaaaacaaccgattccccagctttgattggtgaaatcatgaaagaattactcaatcaatgat

SEQ ID NO: 308081 - DNA, 478 bp, Unknown
  Bacterial polypeptide expressing nucleotide sequence isolated from the Sargasso Sea
aatgtcagttttaataaataaaaatactaaacttatatgccaagggttcactggcgcccatggaacatttcattctgaacagtcaataaaatatgggacaaatctagttggaggcgtaactccaggtaaaggaggacaaacacacttaaataaacctgtttttaattcagtaaaagaagcaaaagataagactaatgcaaatgcaacaatgatctatgtccctgcaaaatttgctgctgcagcaataatcgaggcaattgaggctaagatcgaattgatagtttgtataactgaagggattccaatcttggacatgttaaaagtaaaagaaaaattatcaaactcagcttcaagactaattggaccaaattgcccaggaattatcactccagacgaatgtaaaattggtatcatgccaggaaatatccataagaagggatctgttggtatagtatcaagatcagggactctaacttat

SEQ ID NO: 308082 - DNA, 432 bp, Unknown
  Bacterial polypeptide expressing nucleotide sequence isolated from the Sargasso Sea
aggcaagtaaacacgatttagcttacataaaattagatggatctattggatgtatggtaaacggagcaggattagcaatggcaacaatggatataattaaactgcatggtcaagaacctgcaaattttttagatgtgggaggcggtgcatctaaagaaaaagttgcagctgcgtttaagataattttatcagataaaaatgtaaaaggaatactgataaacatttttggagggattatgaggtgtgatgtccttgcccaaggtattgtagaggctgcaaaagaaaccaaaataaatatacctcttgtagtaagacttgccggaaccaattcaaaagaaggaaaaaaaatattagatgaatctggattaaaaataatctctgctagcgatctaggggacgcagcaaaaaaaattgtaaaacaagtggaataaa

SEQ ID NO: 308083 - DNA, 800 bp, Unknown
  Bacterial polypeptide expressing nucleotide sequence isolated from the Sargasso Sea
aaaattaatgatgatggtatctgatgctggtggtgtagacatagaagatgtagctgagaaaacaccagaaagaattcaatatgtttattttgataacttagaagattttacaattagtgatagtcttcaaaataaattaaatttttctattaatgagtttacccaatttaaagaaattgtttcaaatttatgcaaggcctatgttgaaatagatgcatctttaattgaaattaatcctcttgttgtgacaaaagatgaaaaactaattcttttagatgctaaaattaatattgatgataatgctctgtatagacaggctgacattgaaaaattaaaagacacttcagaagaaaatgatttagaacttgaagcttctgaaaacgatatggtttacattaagctggatggaaagataggctgtatggttaatggagctggactggctatggcaactatggatatcattaaacaatttggaatggagccagccaattttttagatttaggtggtacagcaaataaagaaagggccattaaagctttcaagattattcaatcagataaaaatgtgaaatctgtctttataaatatttttggaggaatcatccattgtgatatgattgctaatggcatcattgatgcaattaaagaattagattttaaacttcctgttgttgttcgttttcaaggaacaaattctaaagagggaagagacattataaataattcatcattaggattaatttcaattgatgatttttcaaatgcagctcagaaagctgtggagttatcagaatagt

SEQ ID NO: 308084 - DNA, 655 bp, Unknown
  Bacterial polypeptide expressing nucleotide sequence isolated from the Sargasso Sea
aatgtcaattttagtaaataaaaatacaagactcatttgccaaggctttacgggctctcaaggaacatatcattcggaacaagcaatagcttatggtacaaatcttattggaggtgtgacaccaggcaaagggggtcaaacacatttaaatttaccagtattcaacacagttgatgaggcagtcaaacaaactaaagcaaatgcaacagtaatttatgtaccagctaaatttgcagctaaagcaatccacgaagctatagactcaaatattgaattaatagtttgtattacagaaggtattccagtcttagatatgattgaaatcaaaaaaagaattattgataccaaaacatatttaataggtcccaactgcccaggtttaattacaccttcagaatgtaagattggaatcatgccagggttcattcataaaaaaggtaaaattggtatagtgagtagatcaggaacattaacatatgaggctgtcgcccaaactaccgaagtcggattaggtcaatcaacatgtgttggcattggtggagacccaatacatggaatgaattttgtggattgtattaaattgtttttagaggatgatgagactgagggaattttaatgattggtgaaataggtggtgaggaagaagaaaatgca

SEQ ID NO: 308085 - DNA, 657 bp, Unknown
  Bacterial polypeptide expressing nucleotide sequence isolated from the Sargasso Sea
tatgtctatttttattgacgacgacactaggctcgttgtgcagggtatcactggccgcgatggatctttccatactagccagatgatggagtacggcactcgagtggtggcgggtgtcacaccgggtaagggcggtcaggatttcgcaggtcccggcggcgagaaggtcccgatctttaacgcgatggatgaagccgtgagtaagacgggtgcaaacacatccgtcgtttatgtgcccccggcttttgctgctgatgcgatactggaggctactgattcaggagtctctcttgtcgtagcgatcaccgaaggggttccggttctcgatatggctagggcacacgcgttcgcccgagataagggtgtccggattctcggcccgaactgcccgggccttatctcacctggaaaggccaaagttggaattctaccggcgcagatagttgcagaaggacccataggggtagtgtcccgttccggcacgctcacctacgaggcggtgtttcagctcacgagtgtcggattgggtcagacgacttgtgtaggtattgggggagaccctctgatagggaccaattttattgactgcctagaggccttcgaactcgatccgggtacggaagctgtggttatgattggggagataggggggacaga

SEQ ID NO: 308086 - DNA, 442 bp, Unknown
  Bacterial polypeptide expressing nucleotide sequence isolated from the Sargasso Sea
aatgtcaattataattaataaagacaccaaagttatttgtcagggttttacaggatctcaaggaacttttcattctaagcaagctattgattatgggactcaaatggttggaggggtaacacctggtaaaggaggcagtgttcatttaaatcttccagtctttaattctgttcaagaggctgttgatataactaaacctgatgctacagtaatttatgttccagcaaaatttgcaactaaggctattcatgaagctatagatgccaatattaaaattatctcttgcattactgaaggaattccagttttagatatggtcgaaattaaaaaaagaatcattgaaaaaaatatattttttatcggccctaactgtcctggtcttgttactccagaagagtgcaagattggtattatgcctggctttattcataaaaaagtaaaa

SEQ ID NO: 308087 - DNA, 634 bp, Unknown
  Bacterial polypeptide expressing nucleotide sequence isolated from the Sargasso Sea
tatgtcgatattagtgaataaaaatacgaaacttatttgtcaaggtttcactggttctcatggaacatttcattctgaacagtcaattttgtatggtactaatttagtagggggagtgacacccagaaagggaggccaaacacatcttggtaaaccagtatttgacacagtaaaggaagctaaagagaagactggtgcaaatgccaccatgatttatgttccagcaaagttcgcagcaaatgcgattattgaagcaatagaggcatcaattgaaattatagtttgtattactgagggaattccaattattgatatgttgaaggtaaaaaaatctttatctaaatccaattcaagattaattggacctaactgtcctggcataattacacctgatgaatgtaaaattggaatcatgcctggaaatatccataaaaaaggatcagttggaatagtctcaagatctggaacactaacctacgaggctgttgcacaaacaacagctaatggactaggtcaatcaacatgtatcggtattggaggagacccaatcaatgggacaaattttatagattgtttggatttattttttgaagatgaaagtacaaaatcaattgttatgattggtgaaattggt

SEQ ID NO: 308088 - DNA, 729 bp, Unknown
  Bacterial polypeptide expressing nucleotide sequence isolated from the Sargasso Sea
tgtttaatactgttgccgatgcagtgaaacaaactgaagcaaacgcaacagttatttatgtgcctgctaagtttgctgctaaagcaatccacgaggctttagatgcaaatattgaattaattgtttgtattacagaaggtattccagtcttagatatgattgatataaaaaaaagaattattaaaaataaaacatatttaattggaccaaactgtccaggattaatcacaccttccgaatgcaagattggaatcatgcctggcttcatccataaaaaaggtaaaataggaatagtaagtagatcaggaacattaacttatgaagctgttgcacagacaacagaggtaggattaggtcaatcaacatgcgttggtattggtggagatccaatacatggtatggattttgtagattgtataaagttatttttagaagacgatgagactgagggaattttaatgattggcgaaattggtggcgaggaagaagaaaatgcagcagaatttatttcaaattcaaaaagaaaaaaaccagtttcagcatttatagctggacaatcggcaccaaaaggaaaacgtatgggtcatgcaggtgctatcgtttcaggctcaaaaggtacagcacattccaaaattaaatctttagaaaatgctggagttttggtgtcaaaatccccggcatcgttgggaaaaactatgaaattagcaatgcaaaatgggaataattagt

SEQ ID NO: 308089 - DNA, 793 bp, Unknown
  Bacterial polypeptide expressing nucleotide sequence isolated from the Sargasso Sea
aatgatgatggtatctgatgctggtggtgtagacatagaagatgtagctgagaaaacaccagaaagaattcaatatgtttattttgataacttagaagatttcacaattagtgatagtcttcaaaataaattaaatttttctattaatgagtttaaccaatttaaagaaattgtttcaaatttatgtaaggcctatgtcgaaattgatgcttctttaattgaaattaatcctcttgttgttacaaaagatgaaaaactaatacttttagatgctaaaattaatattgatgataatgctctttatagacaggctgacattgaaaaattaaaagatacttcagaagaaaatgatttggaacttgaagcttctgaaaacgatatggtttacattaaattagatggaaaaataggctgtatggttaatggagctggactggctatggcaactatggacattattaaacaatttggaatggagccagccaattttttagatttaggtggtactgcaaataaagaaagagccataaaagctttcaagatcattcaatcagataaaaacgtgaaatcagtctttatcaatatttttggaggaattatccattgtgatatgattgctaatggcatcattgatgcaattaaagaattagaatttaaacttcctgttgttgtacgttttcaaggaacaaattctaaagagggaagagacattataaataattcatcattaggattaatttcaattgatgatttttcaaatgcagctcagaaagctgtggagttatcagaatag

SEQ ID NO: 308090 - DNA, 415 bp, Unknown
  Bacterial polypeptide expressing nucleotide sequence isolated from the Sargasso Sea
cctagcttatataaattagatggcagcattggatgtatggttaatggagctggtttagcaatggccactatggatataataaaattatatggagaagagccagcaaattttttagatgttggcgggggagcatcaaaagaaaaggtctcagcggctttcaaaataattttgtcagataaaaatgtaaaaggtatattaatcaatatttttggtggcataatgcgatgtgatgttctagctcaaggcgttgtagatgctgcaaaagaaatgaaaatcaatgttcctttggtagtcagactagctggtacaaattttaaagaaggtaaagaaatattagataattcaggtttaaaattaatatctgctgaaaatttagatgatgcagccaaaaaaattgttgaggcaattaagtaaa

SEQ ID NO: 308091 - DNA, 852 bp, Unknown
  Bacterial polypeptide expressing nucleotide sequence isolated from the Sargasso Sea
actctaaagttttagttcaaggatttactggaagtgaaggtacttttcactccgagcaaatgatagaatatgggacaaatgttgtttgtggtgttactccgggtaaaggaggctcaacccatttaaataagccagtatacaatagtgtacaagaagcagttattaatgaagacattaatacatctatagtttttgtacctcctgcatttgctgctgatgctataatggaagcagctgagtctggtatcaaaactattgtagcgataactgaaggaattcccgtttcagatatgactaaagttgtatcttatataaaaagaaagaatgttagacttattgggcctaactgcccaggaattataacacctgaagaagcaaaaattggtattatgccaggttttgttttccaaaagggaaatattggaattgtctcaaagtccggaacattaacatatgaagcagctgatcaggttgtaaaagctggttatggaatctcaaccgctattggagtagggggagatcctattatcggaactactttgctagattcagttcagctttttatgaatgatgaaagcacagatcttatcgtattaattggtgaaattggaggtcaattagaaatcgatgctgctaaatgggtagcagaaaatggaaataaaaaaccagttgttggattcattgctggtgaaactgctcctaaaggcagaaaaatgggtcatgcaggagcaattattggtggtaaagatgatactgcaacagctaaaaagagaataatgagagaatctggtatttctgtagttgattctcctgctgatattggaaaaactgtaaaacaaattttaaactaat

SEQ ID NO: 308092 - DNA, 892 bp, Unknown
  Bacterial polypeptide expressing nucleotide sequence isolated from the Sargasso Sea
aatgtctgtattaatagataaaaaaacaaaaataatagtacaaggtttcactgggaaaatgggaagtttccatgcagaagaaatgatcaaatatggcactaatgtagttggaggagttacacctggaaaaggtggaatgaaacatcttaaccttcctgtatttaatacagttaaagaagcagtcaaaaatacaggtgcatcagcatcaatattatttgttccaccagctttcgcggcagactcagcaatggaagctgctgatgctggaattaaaacatgtgttgcaatagtagacggaataccttctcacgatatgatcaaaattaaacgttatatgagaagatattcaagaactgaaaaaatgactttagtaggacctaattgtgctggagtgattagtcctggaaaagcaatgttaggtattatgccgggtcatatatataaagaaggaaaaattggaataattggaaggtctggtacattaggatatgaggcagcacaacaattaaaaaatttaaacattggtgtttcaacaagtgttggtattggaggtgatccaattaacggaagttcatttaaagatattttagaaaaatttgagcaagacgatgaaacagaagcagttttaatgattggcgaaataggaggaccacaagaagtagctgcaggaaaatttgcaaaagaaaatatgaagaaaccagttatagcttatattgcaggtttgacagcgccaaagggaagagtaatgggccatgcgggcgcaatagtatcagcttatggagaaagtgctgttgagaaagttgagcttttaaaagaatgtggagttattatttctaaaaacccatcagttatgggtgaaactgtaaagttagctttaaatagtaaaacttaa

SEQ ID NO: 308093 - DNA, 748 bp, Unknown
  Bacterial polypeptide expressing nucleotide sequence isolated from the Sargasso Sea
agctgagaaaacaccagaaagaattcaatatgtttattttgataacttagaggattttacaattagtgatagtcttcaaaataaattaaacttttctattaatgagtttaaccaatttaaagaaattgtttcaaatttatgtaaggcctatgtcgaaatagatgcttctttaattgaaattaatcctcttgttgtgacaaaagatgaaaaactaattcttttagatgctaaaattaatattgacgataatgctctgtatagacaggccgacattgaaaaattaaaagatacttcagaagaaaatggcttagaacttgaagcttctgaaaacgaaatggtttacattaagctggacggaaaaataggctgtatggttaacggagctgggctagctatggcaactatggatattattaaacaatttggaatggagccagctaactttttagatttagggggtacagcaaataaggaaagagccattaaagcttttaagatcattcaatcagataaaaacgtgaaatcagtcttcataaatatttttggaggaattattcattgtgatatgattgctaatggcataattgatgcaattaaagaattagattttaaacttcctgttgttgtgcgttttcaaggaacaaattccaaagaaggaagagatattataaataattcatcattaggattaatttcaattgatgatttttcaaatgcagctcagaaagctgtggagttatcagaatag

SEQ ID NO: 308094 - DNA, 910 bp, Unknown
  Bacterial polypeptide expressing nucleotide sequence isolated from the Sargasso Sea
aagaggagcagggaaatttttaaaaccatttaatacaaaaggtggagtacaaataacagaatcaattgatgatgcacaaaaaattgcaaaaggaatgatgggtaacatactgattacaaaacaaacaggtaaggaaggaaagttagtaaatagaatttatttagaagctggatgtgaaattgatagggaatattatttaagtattcttcttgataggaatcaatcaaaattaatgatgatggtatctgatgccggtggagtagacatagaagatgtagctgagaaaacaccagaaagaattcaatatgttaattttgataacttagaagattttacaattagtgatagtcttcaaaataaattaaatttttctattaatgagtttaaccaatttaaagaaattgtttcaaatttatgtaaggcctatgtcgaaatagatgcttctttaattgaaattaatcctcttgttgtgacaaaagatgaaaaactaattcttttagatgctaaaattaatattgatgataatgctctgtatagacagactgacattgaaaaattaaaagatacttcagaagaaaatgatttagaacttgaagcttctgaaaacgatatggtttacattaaactagatggaaaaataggctgtatggttaatggagctggactggcaatggcaactatggatattattaaacaatttggaatggagccagccaattttctagatttaggtggtacagcaaataaagaaagagccattaaagctttcaagataattcaatcagataaaaacgtgaaatcagtcttcataaatatttttggaggaattatccattgtgatatgattgctaatggcatcattgatgcaattaaagaattagaatttaaacttcctgttgttgtacgtttt

SEQ ID NO: 308095 - DNA, 487 bp, Unknown
  Bacterial polypeptide expressing nucleotide sequence isolated from the Sargasso Sea
agataataatattaaaatcatagtatgtattactgaggggatacctatcttagatatggttgaaataaagaaaagaattatagaaaaaaatattattttaattggtccaaattgcccaggtattgttaccccagaagaatgtaaaataggaattatgccaggattcattcataaaaaggggaaaatcggtatagttagtagatcaggaacattaacttatgaagctgtttggcaaacttcagaaattggacttggtcaaacaacctgtataggtattggcggagatccagttcatggcttgaattttatagactgtttgaaactttttttagaagatgatgagactgaaggaatattaatgatcggagaaataggcggctcagcagaggaagaagcggcagaatttatttccaaatcctctataaaaaaacccatttcagcttttatcgcaggtatttcagctcccaaaggtaagagaatggggcaa

SEQ ID NO: 308096 - DNA, 677 bp, Unknown
  Bacterial polypeptide expressing nucleotide sequence isolated from the Sargasso Sea
agacgtgagcatgatatttgtgcctgcaaaatttgcagctgatgcaatgaaatcagcaattgaatctgagattggactgattgtttgtattacagaaggggtcccagtacaagacatgatcgaagtaaaagccatgttgaaaggctcagattcgatactgttgggtccaaattgtcctggcatcataacgcctgaagaaacaaagattggaatcatgcctggttttatacatcaaaaaggctctgtaggaattatttctagatctggcactctgacttatgaggctgttcatcagacttcaatgtgtggcctaggtcaaagtacttgtattggaatagggggggatcccattaagggtctaaatttcattgaatgtctgtcactttttgaaaaagatccagcaacagaaggaattgttatggtcggtgaaattggagggtcagacgaagaaaaggctgcagagttcatcaaagatagtatcactaaacctgttgttgcctatatcgctggtgtttcagcgccgccggggaaaagaatgggccatgccggagcaatcgttactggcactgagggtactgctttaagcaaatacaaagctctgaatgacgcgggagtaaaaacaaccgactcaccagctttgattggtgaaataatgaaagaattactcaatcactgat

SEQ ID NO: 308097 - DNA, 721 bp, Unknown
  Bacterial polypeptide expressing nucleotide sequence isolated from the Sargasso Sea
catccaaagaaagcaggaacagacgttgatggagtacccatctacgcaaacgttgcagaggcagttgaaacaaccggcgcaacagctagttgcatcttcataccagccgctggcgtacgtgacgctgtcatggaagcagctgaaggcggagtcaaatttattgtcgctgttactgaaggcgtgccagcacacgacgaagcgatcttttataaccaactcaaacgcgactatcccgatgtacaactgcttggacccaactgcccaggaatcataagtccaggaaaatgcaatattgggattactgccggccacatcgccaaacccggcggacctgtaggaatcgtcagcagatcaggcaccctgacgtatcaagcactgtacgaactcaaacaaaaagatattggagtaaccacatgtgtaggtataggaggagacccagttccaggcactagcttcattgattgcttagaagcctttgaagccgacccagagaccaaagccatcatgatgataggcgaaataggcggatccgcagaagaagaagccgcagaatatatcaaagaccacgtcacaaaaccggtgtcaagctacatagcaggcgtaacagcccctccggggaagaaaatgggacacgcaggtgcaattgtgtccggcggaaaaggaacagctaaagcgaaaatggaagcattagaagcagcaggagttcgagtcggaaacaacc

SEQ ID NO: 308098 - DNA, 865 bp, Unknown
  Bacterial polypeptide expressing nucleotide sequence isolated from the Sargasso Sea
aatgacagtattaattgacaaaaatagtaagattattattcaaggttttacaggaaaaatgggcacttttcatgcagacgagatgattaagtatggttctaatgtcgttggtggagttactccaggaaagggtggctctaagcacttaaatttgccggtttttaatacagtgaaagatgcagttagcgaaacaggagcagatgcatcaattttatttgtaccaccagcttttgcagcagactcagcaatggaggcagcggacgcaggaattaaaacgtgtgtagcaattgtagatggcataccttcacatgatatgatcaggattaaaagatatatgagaagatataccaaaagttctaaaatgactttagttggacctaattgtgcaggtattattagtcctggaaaatcaatgttgggtataatgccgggacatatttataaagaagggagaattggaattattagtagatcaggaacattgggatatgaagctgctcaacaactcaagaatttaaatattggagtttcaacaagtgttggaataggtggagatcctataaatggaagttcatttagagatataattgaaaagtttgaaaccgatgatgaaactgatgcaattttaatgattggtgagattggcggccctcaagaagtagcagcaggagagtttgctaaagaaaatatgaaaaaaccagttattgcatacatcgctggattaactgctcctaaaggaagagtgatgggtcatgctggagcaatagtttcagcttatggagaaagtgcaattgaaaaagttgaaattttaaaagagtgtggaattacaatttctaaaaacccatctgttatgggagatacagta

SEQ ID NO: 308099 - DNA, 541 bp, Unknown
  Bacterial polypeptide expressing nucleotide sequence isolated from the Sargasso Sea
atgtcagtattaataaataaaaatacaaaagttatttgtcagggcttcacaggatctcatggcacattccattctgaacaagctatagagtatggcacaaatcttgttggtggagtaactcctaaaaaaggaggccaaaaacatttagaaagacctgttttcaatacagtattagaggcaaaaaatgaagtaggtgcagatgctactatgatttatgttccagcaaaatttgcagctgctgcaatcattgaggcaattgatgcatcaatagatcttatagtttgtataacagaaggtattccaattcaggatatgcttaaagtaagacaaagtttagctaactcaaatagtcgtcttattggtccaaactgtccaggaataattacacctgacgaatgtaaaattggaataatgccaggaaatattcataaaaggggaacggttggtatcgtatctagatcaggaaccttaacatatgaggcagtagcgcaaactactgaaaatggccttggtcaatcaacttgcattggtataggaggag

SEQ ID NO: 308100 - DNA, 469 bp, Unknown
  Bacterial polypeptide expressing nucleotide sequence isolated from the Sargasso Sea
aaaagatctaaccgaggaagatcctctagaacttcaagcagcagagcatgatatgaattacgttaagcttgatggctctattggatgtatggttaatggagcaggactggcgatggcgaccatggatatcatcaagcaatttggtgaagagccagcaaattttttagacttagggggaacggctaataaagatagagttattatgggttttaagacaattcaatcagatccaaatgtgaaatcaattttaatcaatatctttggaggcattattcattgtgacatgatagccaatggtattgtggaagctgtaaaggagctcaattttaaacttccccttgtggttcggtttcaaggaactaatgctagtcaaggcagagatgtaattaacaactcctccttaggtttaatttctattgatgattttactgaagcagcaaaaaaagtagtagagcttgctaaggaataa

SEQ ID NO: 308101 - DNA, 590 bp, Unknown
  Bacterial polypeptide expressing nucleotide sequence isolated from the Sargasso Sea
aatgagtattattattaataaaaaaactaaagtgatttgtcagggttttactggttctcaaggaacttttcattctgagcaggccattaaatatggaactcaaatggttggaggagtaactcctggtaagggaggcacaaaccatttaaaccttccagtttttaatagtgttcaagaagctgttaaaataacaggtgctaatgcaactgtaatttatgttccagctaagtttgctacaaaagcaattcatgaagctttagatgtaggaattgaaataattgtatgtattacagaaggtattccagttttagatatggtcgaaattaaaaaaagaactgttgaacaaaaaacaaaatttattggtccaaattgtccaggtattgtaactcctggagaatgcaaaataggtattatgcctggatttattcataaaaaaggaaagatagggatagttagtcgttcgggaacgttaacttatgaagctgtttggcaaacatctcaagttggattaggacaaacaacatgtgttggaattggtggagatccagtacatggaatgaattttatagattgtataaatttatttctaa

SEQ ID NO: 308102 - DNA, 834 bp, Unknown
  Bacterial polypeptide expressing nucleotide sequence isolated from the Sargasso Sea
ttttacttgataggtcaacctgtaagaatataataatgtattcaactgaagggggtatggatattgaatctgtagcagaaaaaactcctgaattaatttataccgaaataatagaccctaagattggaattttaccttttcaagctagaaaagttgcattcaatttaggtttaagtggaaatgcttttaaagaaatgataaaatttattacatctttatataatgcgtatttaaaatctgatgcctcattatttgaaattaatcctgttcttaagacttctgacaataaaattattgcagtagactctaaagtttcaattgatgataactctttatttagacaaaaagaaatttcaaatttaagagactttagagaggaaaaccccattgaagttgaggcaaataatgctggattgagttatgttgatcttgatggcaacgtcggttgtatggtaaatggcgctggtttagcaatggctacaatggacctaattaagcaagctgggggtgatcctgcaaatttcttagatgttggtggaactgcagattcttctcgagtagaaactgcatttaaattaatcctaaaagatgtaaatgttaaggctattttagtaaatatttttggaggtattgttagatgcgatagagttgctgagggaattgttaaagcttttactaatttaaaagactctataaatgtccctattatagtaagacttcaaggtactaattcagataaagcaaaaaagataattgactcatctggtttaaatgtaatttctgcaattggttttcaggaagcagctgaaaaggtaaataaagctattaattaaa

SEQ ID NO: 308103 - DNA, 521 bp, Unknown
  Bacterial polypeptide expressing nucleotide sequence isolated from the Sargasso Sea
gccaaactgtcctggagtaataaccccagaagcttgtaaaataggcatcatgccaggccatatccataagcgtggatctgttggagtggtatcaagatcgggcactttaacatatgaagccgtgaagcaaacctctgatgttggcttaggacaatcgtcatgtattggaattggaggagatcctgtaaaagggacagaacatatagatgtgcttgaatggtttttgagagatgatgaaacagaaagcatcattatgataggagaaataggtggatccgctgaagaggaagccgcccaatttctaaaagatgaggcaaaaaaagggcgaagtaaaccaactgcaggttttatcgcaggtcggacggcaccacccggtaggagaatgggtcacgctggagctatagtggcgggcggcaaaggcggggctgaagataaaatcgaagccatgcaatcagccggtataattgtcgcggaaagtccaggaagtttaggtgaggcagtgttgaaagcaatagggtaaa

SEQ ID NO: 308104 - DNA, 793 bp, Unknown
  Bacterial polypeptide expressing nucleotide sequence isolated from the Sargasso Sea
atgctagagtatgggacaaatatagttgcaggagtaactcctggaaaaggggggatgacgcatctaggaattccagtttataactcagtttccgaagcaatgaataaatcggaaataaatacctcaataatatttgttcctccgatgtttgctgctgatgcaataatggaagcggttgagtctaatattaagacaattgttgctataactgaaggaatccctacagctgatatgattagagtaaaagcttacattaagaataaaggtgttgtgttaataggtccaaattgtcctggtataataactccagatgaagcaaaggttgggattatgcctggcttcgtatttaaaaagggtagagttggaattgtttcaaaatcgggaactctaacatatgaggcagcagatcaagttgttaaatctggttacggaatttcaacagccataggggtaggtggggatcctataataggaacaacccttttggattctataaagctttttatggatgatcctgaaacggatattattgttctaataggagaaattggaggacaattagaaatagaggctgctaactgggtaaagtcaaatgggaataaaaagcctgtagttggttttattgcaggggaaactgctccaaaagggaggaagatgggccatgctggagctataattggaggaaaagatgatactgcatctgctaaaaagagtattatgagagattgtgggatatctgtagtagattctcctgcagaaataggttctaacgttcaaaaaatattaaactaac

SEQ ID NO: 308105 - DNA, 825 bp, Unknown
  Bacterial polypeptide expressing nucleotide sequence isolated from the Sargasso Sea
gcagctattacggacgattaaaccgagagtacggaacccaagtcgtagcaggaacacacccaaaaaaaggcggtacagaatttgagggtgtaccaatattctctagtgtcgctgaagcagtcaatgaaacaggggcgacagcaagctgtattttcattcccgcagctggcgttaaaggagcagttctcgaagccgccgaaggaggtgtcaaattcatcgttgctatcactgaaggcgtaccagctcacgatgaagcattcttctttaaccaactaaaacacgaataccctgacgtacagcttctaggacctaattgccctggaatcatcagtccaggtaaatgcaacattggcattacagcaggtcatatagctaaaccaggaggccctgtaggaatagtaagcagatccggaacattaacgtaccaagcgttgtatgaactgaaacaaaaagatatcggtgtaactacatgcgtcggtattggaggcgaccctgtacccggtacaagcttcattgattgcctccgtgcctttgaagctgacccagaaacgaaagctgtgatgatgatcggtgaaataggaggatcggctgaagaggaagctgcagactttataaaagagcatatgacaaagccggtgtcgagctacatagccggtgttaccgcgcccccaggaaagaaaatgggccatgccggagcaatcgtctcaggtggcaaaggaactgcgcaagcaaaaatggaagcattagaatccgctggagtaagagtcggccaaaaccctacagaagccggagagctcatggccgagatagtggccacactctgat

SEQ ID NO: 308106 - DNA, 428 bp, Unknown
  Bacterial polypeptide expressing nucleotide sequence isolated from the Sargasso Sea
agtttcaagatcaggaactttaacttatgaagcagtagctcagactacagaaaatggattaggacaatcaacttgtattggaattggaggtgatcctatcaatggtacaaattttatagattgtctagatctatttttaaacgacgcggatacccaatcaattttaatgattggtgaaataggaggttctgctgaggaagaggctgcagaattcgttaaaaatcataaaattaaaaaaccaatagttggatttattgcaggaattactgctcccccaggaaggagaatgggccacgcaggtgcaataatttctggcggcaaaggtggtgccgaagataaaatcaaaaaaatggaagaatgtggcattacaattgctaaatccccatcaataattggtaaaactttgtttaataaactgtctaattgaa

SEQ ID NO: 308107 - DNA, 604 bp, Unknown
  Bacterial polypeptide expressing nucleotide sequence isolated from the Sargasso Sea
aattttgatagataaagatgcaagtttgattgaaattaatcctttaattattacaaaaaatgggaaacttatttgcttagatgcaaaaatgaactttgatgataatgcaatttatagaagaccagaaattttagatttaagagatttaaatgaggaagaacctaccgaagtagaggcaagcaaacatggtttggcttatataaagttagacggatctattggttgcatggtcaacggggcaggtctcgcaatggctactatggatataataaaattgtatggaaaagagccagcaaacttcttagacgtaggtggtggagcatcaaaagaaaaagtctcagctgctttcaagctaatactgtctgataaaaatgtgaaaggaattttaataaatatttttggaggcattatgcgatgtgatgttcttgccgaaggagtagttaatgctgccaaagaagttaatttatctgtgcctcttgtagtaagattggcaggaacaaattttaaagaaggaaaaaaaatattagatcaatcaggtctcaaaatattatcagctacagatttgaatgatgcagcaaaaaaaattgttaaagcaattgaataa

SEQ ID NO: 308108 - DNA, 485 bp, Unknown
  Bacterial polypeptide expressing nucleotide sequence isolated from the Sargasso Sea
aagaacggatgtggcgggcatgcgcgacttgtcggctgagccagcgtcggaaaggaaagcgagggaagcaggactatcgtatgtaaaactcgatggcaacgtcggctgctgtgtaaacggagccggcttagcgatggcgaccatggatctcgtaaaatattacggaggagagccagcgaattttctcgacatcggagggtcttcgaatccagataaggttgtctcagcactcgaaataatcacctccgatccgaatgtgagggtcatactctttaatatctttggaggcataacccgatgcgatgatgtagcgaatgggatcgtggaggccacgaagcgcatcgatattcagcagccgattgtaattcgtcttacggggaccaacgaagaactcggtctcaagatcctccaagaagcgggcttctctgcctacacgtcgatggacgacgtagtggagaaggctgtagatctcgcgaagggataaa

SEQ ID NO: 308109 - DNA, 553 bp, Unknown
  Bacterial polypeptide expressing nucleotide sequence isolated from the Sargasso Sea
atgtcagttttagttaataaagataccagattaatttgccaaggttttacaggttctcatggaacatttcattcagaacaagcgatcaaatatggaacaaaacttgttggaggtgtaacaccgaaaaaaggaggacaaaaacatttaggtcttccagtttttaacacagtgaaagaagcgaaagaaaatgaaggtgttaatgcatcaatgatatatgtgcctgcaaaatttgcagctgctgcgatcattgaggcaattgatgcatcaattgaactaattgtttgtattactgaaggtatacctattcaagatatgcttaaagtgaaaaaaaaattatttaaatcaaattgtagattaataggaccaaactgtcctggaattataacgcctgatgaatgcaaaattggcattatgccaggtaatattcataaaaaaggttctgttggcattgtatctagatcagggacattaacttacgaagctgtatctcaaacaactgaaaatggcttaggtcaatcaacttgtattggtattggtggagatcctaattaat

SEQ ID NO: 308110 - DNA, 348 bp, Unknown
  Bacterial polypeptide expressing nucleotide sequence isolated from the Sargasso Sea
caatggatataattaaattatatggtaaagaaccagcaaattttttagatgttggaggaggtgcctctaaagaaaaagtttcagctgcctttaaaataatcttatcagataaaaatgttaaagggattttgatcaatatttttggaggtatcatgagatgtgatgttcttgctcaaggcgtagtggacgcagcaaaagaaataaatattaacgttcctttagttgtcaggttggctggtacaaattttcaggaaggaaagaatatattagataattcagatttaaaattgatttctgctgaaaaccttgatgatgctgcaaaaaaaattgtagaggcaataagataaa

SEQ ID NO: 308111 - DNA, 438 bp, Unknown
  Bacterial polypeptide expressing nucleotide sequence isolated from the Sargasso Sea
aattgcgaattggagagatcccagtcaggaagacgataaggagcgaaaagctaaagaatttgacctcaactacgttaccttagaaggtaatattgcttgtatggttaacggcgcaggcttagcgatggctactatggacataataaagttgactggaggggaaccagcaaattttttggatgttggtggggggacaaccgctgagagagtagctgaagcttttaaaattattgtttcggacaataaaattaaggcaatccttgtaaatatctttggcggaatagttagatgcgatctgatagctgagggagttatcgccgcagtaaaagaagttgggataagcgtaccagtagtagtgcgtctagagggtacaaacgtcgacgcaggcaaaaaaatgcttagcgagagtggcctggacatattaagcgcacacaattt

SEQ ID NO: 308112 - DNA, 744 bp, Unknown
  Bacterial polypeptide expressing nucleotide sequence isolated from the Sargasso Sea
aggcacttaccattctcaacaagcaattgattatggaactaagatggttggaggtgtgactccaggaaaaggaggaacaactcatttagacttaccagtatttaatactgttaaggaggcaaaagatcatactcaagcaaatgcaaccgtcatttatgttccagctaagtttgcaactaaagccatacatgaagcacttgatgcagacataaaaataattacctgcattactgaaggtattcctgttcttgatatggtggaaattaaaaaaagaattattgaacaaaaaactcacttcataggccctaattgtccaggtttagtaacaccaggtgaatgtaagattggaattatgccaggctttattcatcaacctggaaaaattgggatagttagtagatctggaactttaacttatgaagcggtgtggcaaacttcccaagttggtttaggtcaaacaacatgcgtaggtattggaggcgatcctgttcatggcatgaattttattgattgccttgatttgtttttaaaagatgagtcaacaaaaggaatactaatgattggtgaaataggaggaactgcagaagaggatgcagctgaattcatatcaaaatcaagcatcaaaaaaccaatgtcagcatttattgctggagtatcagcaccaaaaggcaagagaatgggccatgctggtgccataatttctggtaataaaggcacagcacaatcaaaaattgatgctttgga

SEQ ID NO: 308113 - DNA, 409 bp, Unknown
  Bacterial polypeptide expressing nucleotide sequence isolated from the Sargasso Sea
cttaacttatgaagcggtagctcagacaacagaaaatggacttggtcaatcaacatgtatagggattggtggtgatccgattaatggaacaaattttattgattgtttagacttatttttgaatgataatgaaacagagtctatattaatgattggtgaaattggaggctcagcagaggaagaagctgcggaatttgtaaagagtcacaaaataaaaaaacctatggtaggatttattgcaggaattacagctccaccaggcagaagaatgggacatgcaggggcaattatttcaggtggaaaaggcggagcagaagataaaattaaaaaaatggaggaatgtggtattaccgtagctaaatccccctcaataattggtaaaactttatttaataaactgtctaattga

SEQ ID NO: 308114 - DNA, 379 bp, Unknown
  Bacterial polypeptide expressing nucleotide sequence isolated from the Sargasso Sea
gtaaacggcgctggccttgccatggcaacgatggatatcattaagctttacggtgcagaacccgcaaacttcttagatgttggcggcagcgccacaaccgagcgtgtgactgcagcctttaaaattataacagctgacccgaatgttaaaggcatcctggtcaatattttcggcggtatcatgcgctgtgatgtgattgccgagggcgtcgttcaagcggccaaggatattaatcttgaagtgccattggtggtccgcctcgagggcaccaaggtcaatgagggaaaagccatcattaatggcagtgggctcaatgtaattgccgcaaatgatttggatgatgccgcccaaaaaattgttaaagcagtgaaaggctagg

SEQ ID NO: 308115 - DNA, 822 bp, Unknown
  Bacterial polypeptide expressing nucleotide sequence isolated from the Sargasso Sea
atgtcagttttggtaaataaaaatactaaagtaatatgtcagggatttaccggcactcatggaacttttcattctgaacaagctataaactatggaactcaactagtaggaggggttactcccaaaaagggaggtcaaaaacatcttggtctacctgtttttgataccgtaattgaagcaaaagaaaaaacaggagcaaacgccacaatgatttatgttcccccaagatttgctgcggcagcaatattagaagcgatagatgcaaacttggatttaatagtttgtataacagaaggtataccagtttttgatatgatgaaggttaaacaaactttattaaaaagcaaaagcagattaattggaccaaactgtcctggaataataactcccgaagaatgtaaaattggaataatgccaggcaatattcacaaaaagggttcagtgggaatagtttctagatcaggaacacttacttatgaagctgttgcccaaacatctcaaaatggtttgggacaatcaacatgcattggtattggtggcgaccctataaatggaacgaattttatcgattgtcttgaactcttcctaaaagataatgatactcattctatagttatgataggtgaaattggtggttcagctgaagaagatgcagcagaatttttgaaaaagtcaaaagtaaaaaaacctacagttggctttgttgccggtttaacggcacctccaggcagaaggatgggtcatgctggcgcaatcatatcaggtggaaaaggaggcgcagaagataagatcgaatttatgaaatctgcgggaatcactata

SEQ ID NO: 308116 - DNA, 513 bp, Unknown
  Bacterial polypeptide expressing nucleotide sequence isolated from the Sargasso Sea
tatgtcggttttaatcaataaaaatacaaaagttatttgtcagggttttacaggatctcatggaacattccattcggagcaagcaattaaatatggtacaaatttggttggaggcgttacaccaaataaaggaggacaaactcatttagaaagacctgtttttaatacagtaaaagaagcaaaagatgttacagatgcaaatgcaactatgatttatgtgcctgcaaaatttgcagcagccgcaattattgaagcaatagaatcttctatagaactcattgtttgtattactgaaggaataccagttttagatatgctgaaggtaaaaaaaaaattaactaattctaagtcaagattaattggaccaaactgccccggaatcattacaccagatgaatgtaaaattggtataatgccaggaaatattcataaaaaaggatctgtaggcatagtttcaagatcaggcacattaacttacgaagcggttgcccaaactacagaaaatggattagg

SEQ ID NO: 308117 - DNA, 502 bp, Unknown
  Bacterial polypeptide expressing nucleotide sequence isolated from the Sargasso Sea
atgtctattctggttaataaaaaaacaaaagtaatttgccaaggttttactggagctcacggcacttttcattcagaacaagcaatttcgtatggcactaatttagttggaggtgtaacacctaaaaaaggtggtcagacacatttgggtaagccagtttttaatactgttaaagaagctgtggaaaaaacaaaagcaaatgcaacaatgatttatgttcctgcaaaatttgcttcttcagcaattatcgaagctattgaaagtgaaattccattaatagtttgtattacagaaggtattccagttttagatatgattagtgtaaaagaaaaaatttctaaatctaaatctcgacttatcgggccaaattgtccaggaattattacacctgatgaatgtaaaataggaatcatgccaggaaatattcataaaaaaggttcatgtggaattatttctagatctggaacacttacctatgaagctgttgctcagaccagtcaaa

SEQ ID NO: 308118 - DNA, 446 bp, Unknown
  Bacterial polypeptide expressing nucleotide sequence isolated from the Sargasso Sea
tcctaccgaagtcgaagctagcaagcatgatctttcgtacattaaattaaatggtcaaataggttgtatggtaaatggggcaggtctggcaatggcgacgatggatattattaaattgtatggatctgaaccagcaaactttcttgatgttgggggcggcgcttctagggaaaaagtttcagcagctttcaaaattatattatctgatagtaatgtgaaaggaatacttattaatatttttggaggtattatgaggtgtgatgttttagcacaaggagttgtagatgcagcaaaagaaactaatttatcgataccattagtagttagattagccggaactaatgaggaatcaggtaaagaaatattaaaaaaatctaatcttaaaattatttctgcaaatgatttaaaagatgcagcaaaaaaaattatagagaaaacaaaataga

SEQ ID NO: 308119 - DNA, 628 bp, Unknown
  Bacterial polypeptide expressing nucleotide sequence isolated from the Sargasso Sea
cgaggcaatagatgcttctatggagctaattgtttgtataactgaaggaataccaattttagatatgctcaaggttaagcagaaattatcgggatctaattcccgattaataggacccaactgtcctgggattataactccagacgaatgcaaaattggaataatgcctggaaatattcataaaaaaggatcagtaggaatagtttcaagatcgggaactttaacttatgaagctgtagctcaaacaacagcaaacggtttaggccaatcaacctgcataggtattggtggagaccctattaatggaacaaattttatcgattgtttagatttatttttgaatgatcctgaaactgagtccattttaatgataggtgaaattggtggaatagcagaagaagaagcctctgattttattaaaaatcataaaattaaaaaaccaatggttggatttattgcgggagttactgctccaccaggtcgaagaatgggtcatgcaggtgccataatatcaggaggaaaaggcggcgcttcagaaaaaataaaaacaatggaagatgccggtattacaattgcaaaatcaccagcagatatcggaaaaactctgttaaacaaattgtctaattga

SEQ ID NO: 308120 - DNA, 516 bp, Unknown
  Bacterial polypeptide expressing nucleotide sequence isolated from the Sargasso Sea
aatgtcagttttagttaacaaaaaaactagattaatttgccaaggttttaccggcactcacggaacatttcattctgaacaagcaataaaatatggcactaatctagttggtggcgtgacaccaaaaaaagggggtacaaaacatttagatttaccagttttcaatactgtagaagaagctaaaaaaaatactaatccaaatgccacaatgatttatgttcccccaaaatttgcggcaaatgcaataatagaggcaatagaagcaaaaatagaattaattgtttgtataactgaaggcattccaattaatgatatgttaaaagtaaagggtgaactgtctaaaagtaaaagtagattaattggacctaactgcccaggaataataactcctgaagaatgtaagatcggtatcatgcctggaaatattcataaaaaaggctcagtcggaattgtttctagatcaggaactttaacctacgaagccgttgctcaaacgagtaaaaataaaatgggtca

SEQ ID NO: 308121 - DNA, 472 bp, Unknown
  Bacterial polypeptide expressing nucleotide sequence isolated from the Sargasso Sea
atgtctgtgctagttaataaaaatacaaaagtaatttgtcagggttttacaggttctcatggaacttttcattctgaacaagctattaagtatggaacaaatttagtaggcggtgtaacaccaaaaaaaggtggtcaaaaacatcttgataaaccagtgtttaattctgtggctgaagctaaagcagaagttggcgcagatgcaacaatgatttatgttccagctaaatttgctgcatttgcaattattgaagcaatagaagcgtcagttgaattaatagtgtgtattactgaaggcattccaattcaagatatgattaaagtaaagcaaaaattaaagggatctaaaagtagactgataggacctaattgccctggaattataactccagaagaatgtaaaattggaataatgccaggaaatattcataaaagaggatcagttggaatagtatctagatctggaactctga

SEQ ID NO: 308122 - DNA, 418 bp, Unknown
  Bacterial polypeptide expressing nucleotide sequence isolated from the Sargasso Sea
gatctttcatatattaaattagatggcagcattggatgtatggttaatggtgctggattggctatggctacaatggatatcatcaagttatatggagaagagccagcaaacttcttagatgttggaggaggagcatcaaaagaaaaagtttcagctgcattcaaaataattctttcagataaaaacgttaaaggaattttaattaatatttttggagggataatgagatgtgatgttcttgctcaaggagtagtagatgccgcaaaagaaataaatattaaggtcccattagttgtaagacttgcaggaacaaattttaaagagggaaaaaaaattttagattattcaggcttgaaattaatatctgcagataacttagatgatgctgcaaaaaagatagttgaggctatcaaataga

SEQ ID NO: 308123 - DNA, 856 bp, Unknown
  Bacterial polypeptide expressing nucleotide sequence isolated from the Sargasso Sea
ggaagaataggagccattcattcagtagtatttggaggtttcgcagcaaatgaattagcaagtaggatagatgattcaaaagcaaaaataataatttcagcttcttgtggctatgaaccaggtcgaactgttcattataaaccacttttaaataaagcaattgagattgcaaaccacaaacctgaaaaatgtattatttggcaaagagaaaaagataaagcagaacttgatccaaaaaaagatattgattggctggatgctttaaaaggagcaaaaccaactgaatgtgaaaaaatgaattcgaatgattatgcttacatactttatacatctggaactacaggaactcctaaaggaattgtaagagatattggtggacatattgttgctttaaaatggacaatgaaaaatatctacaacattaatcaagatgatgtttggtggtctgctagtgatattggttggatagttgggcactcttatattgtttatgcacctttattttacggttgtactacagttttattcgaaggaaagcctgtaggcacacctgatgctggagtattttggagaataatttcagattataaagttaaatcattatttactgctccaacagcaattagagcaattaaaaaagaggatcctgatggtaaattttttaaaaaatacgacctttcaaattttgatactctgttcttagcaggagagagagcggatccagatacaataaaatggtttgaaaaactttcaaacgctcctgttatagatcactggtggcaaacagaaacaagttgggcaataagttcaaattgtgctggaattgagaagtttccaattaaatatggttctgcat

SEQ ID NO: 308124 - DNA, 526 bp, Unknown
  Bacterial polypeptide expressing nucleotide sequence isolated from the Sargasso Sea
gatgtcggttttagtaaataaagagactagattaatttgtcagggtttcacgggtaaacatggaacatttcattctgagcaggcaattaaatatggaacaaaattagttggtggagttacaccaaaaaaaggtggggaaaaacacctaggtcttcccgtttttaatactgtaaaagaagccaaagactctgaaggtgtaaatgctacaatgatttatgttccagcaaaatttgctgcagcagcaattattgaagcaatagatgcttcgatcgaacttattgtttgtataacggaaggaataccaattcaagatatgttaaaggtaaagcaaaaattatcacaatcaaaatctagactaataggtccaaactgtcctggaattataactcctgatgagtgtaagattggaattatgccaggcaatattcataaaaaaggatctgtaggtatagtttctagatcgggaactttaacttacgaagctgtcgctcaaactactgaaaatggccttgggcaaatcacatgt

SEQ ID NO: 308125 - DNA, 634 bp, Unknown
  Bacterial polypeptide expressing nucleotide sequence isolated from the Sargasso Sea
aatgtctgtattagttaacaaaaatacaagggttatttgtcaaggatttacaggttcacatggcacatttcactcagaacaatcaatcaaatacggaacaaatttagtaggtggcgtaacaccaaaaaaaggaggtcaaactcatcttgatagacctgtttttaatacagttctcgaagctaaaaatgctacggatgcaaatgctactatgatttatgttccagctaaatttgcagcaagtgctatcatggaagctatagatgccaatatagatcttattgtttgtataactgaaggaattccagttcttgatatgttaaaagttaaaaaatatttatcaaaatctaaatcaagattaattggtccaaactgcccaggtataattacacctgatgaatgtaaaattggaattatgccaggtaatattcataaaaaaggatctgtcggtatagtttctagatctggaactttaacttacgaagctgtagcacaaacaacaaaaaatgggctgggacaatcaacatgcataggtattggaggtgatcctattaatggaactaattttatagattgtcttgatttatttctaaaagatcctgacacggagtctatattaatgattggtgaaataggt

SEQ ID NO: 308126 - DNA, 322 bp, Unknown
  Bacterial polypeptide expressing nucleotide sequence isolated from the Sargasso Sea
gaagaaccagctaactttttggacgtaggtggtggagcatcaaaagaaaaagtttctgcagcttttaaaataattttgtcagacaaaaatgtaaaaggaattttaataaatatttttgggggtattatgaaatgcgatgttcttgctcaaggagtagtggatgcagctaaagaaactaaaattcatgtaccattagtagttagattggctggcactaacttcgaacagggtcaaaaaattttagatagttcaggtttaaaaataatttcggcgtctgatttatctgatgccgcaaaaaaaattgttgaagaaataagataaa

SEQ ID NO: 308127 - DNA, 712 bp, Unknown
  Bacterial polypeptide expressing nucleotide sequence isolated from the Sargasso Sea
attaaatacggaacaaatttagtaggtggagtaacaccaaaaaaaggaggtcaaattcatcttgatagacctgtttttaatacagttctagaagctaaaaatgctacagatgcaaatgctactatgatttatgttccagctaaatttgcagcaagcgctatagtagaagctatagatgccaacatagatcttattgtttgtataactgaaggaattccaattctcgatatgctaaaagttaaaaaatatttatcaaaatctaaatcaagattaattggtccaaactgcccaggtataattacacctgatgaatgtaaaattggaattatgccaggtaatattcataaaaaaggatctgtcggtatagtttctagatctggaactttaacttacgaagccgttgcacaaacaacggaaaatggtctgggacaatcaacatgcataggtattggaggtgatcctattaatggaactaattttatagattgtcttgatttatttctaaaagatcctgacacagagtctatattaatgattggtgaaataggtggctccgctgaagaagaagcatctgaatttgttaaaaatcataaaattaaaaaacctatggttggatttattgctggggttacagcacctccaggaaggagaatggggcatgctggagccataatatctggaggtaaaggcggtgcagatgataagattaaaa

SEQ ID NO: 308128 - DNA, 505 bp, Unknown
  Bacterial polypeptide expressing nucleotide sequence isolated from the Sargasso Sea
cctggcattattacaccagatgaatgtaaaattggaattatgccaggaaatattcataaaaaaggaacagtcggaatagtttcaagatctggaactttgacttacgaagctgtagctcaaacttctgtaaatggtatgggccagtcaacctgtataggaattggtggagatccagttaatggaacaaattttattgactgtttagagctttttttaaaagatgaagagaccaaatcaatagtgatgataggtgaaataggaggttctgcagaagaagacgctgcagaatttctaaagagggaaaaaatcaaaaaacctatggttggttttatagcaggattaacagctcctccaggaagaagaatgggacatgccggcgcaatcatttcaggaggtaaaggaggcgcagaagacaaaatagaagtaatgaaatctgctggaattactatttcaaaatcaccagctgatataggcaagacactttatcaaaaacttaatggttgat

SEQ ID NO: 308129 - DNA, 851 bp, Unknown
  Bacterial polypeptide expressing nucleotide sequence isolated from the Sargasso Sea
ggcaattcttgttgattcggaaacccgtttacttgttcagggccttggccgagatggaagttttcaagcaagtagaacccttgcatatggcacaaacatggtcgcggcagtgcaccctggccgcaatggacaaaagttcgaaaacaatgtcccattcttttcacaagtagcggatgcagtagaccaaacaggggcaaacaccggaatcatatttgtccccgcaccgtttgctatggatgcgataattgaacaggtcgatgcagggctggaactcgttgtctgcatcacagaaggtgtcccggtaatcgacatggtgaaggtcatggcctacatcaaagataaaccaacgcgattaatcggatcaaactgcccgggcgtattgagtcctggatataaagccaaagtaggcatcatccccagcaatatcgtaaaacccggtaatgtaggtgtcgtctcgcggtctggaactcttacctacgaagcaattgcacagttggtccaacatggaatgggtcaatccacatgcgtcggaatcggtggagaccctgtgcacggaacaacattcactgatgttcttgaactatttgaagctgataaggaaaccgaagctatcgttttgataggtgaaattggaggcacgcgcgaacaactggctgccgattacatcaaaaaacacataaataaacctgtcgtagctgcgattgctggccaatcagctccagctggaaagcgtatggggcacgcgggagccattatcaccggcaaggcagctatggcttctgaaaagatcaaaacactcgcggaagccggggtacatatcgctgaatcgcctgcattaatcggtgcaaaaa

SEQ ID NO: 308130 - DNA, 649 bp, Unknown
  Bacterial polypeptide expressing nucleotide sequence isolated from the Sargasso Sea
tttaaagatatggtaaagtttgtgatttcattatataaagcatatgtgggctcagatgcatctctatttgaaattaacccggtgctaaaaacatctgatgataaaattgttgctgttgatgctaaggtgactctagatgataatggtctttttcgacacaaagaatttgaggctatgcgagatttaagtgaggaaaatcctgtagaagttgaggcaagagaagtaggtttaaattatgttgatcttgatgggaatgtaggttgtatggtgaatggcgcaggacttgcaatggcaacaatggacttaattaagcaagcaggaggtgaaccagcaaactttcttgatgtaggtggaacagcagatgccaatagagttgaaacggcttttcgattgattctaaaagacccaaaggtgaaagcaatcctggtaaatatttttggcggtatagtaagatgtgaccgagtagcccaagggattgttgatgcgtataaaaatttaggagattccattaaggttccaattattgtgcgacttcagggaacaaattctgatatagcaaaagagcttatcgattcctctggactaaatgttttgtctgccactgcctttcaagaagcagcagataaagttcaagaaacacttctttaaa

SEQ ID NO: 308131 - DNA, 797 bp, Unknown
  Bacterial polypeptide expressing nucleotide sequence isolated from the Sargasso Sea
aatgtcagtcttagtagataaaaatacaaaagtcatatgccaaggttttacgggtaagcatggaacttttcattccgagcaagcgctaaaatacggaacaaggttagtcggaggtgttactccaaaaaaaggaggtcaaaaacatttagacttacctgtttttgatactgttcaagaagcaaaagaaaaaacatctgcagatgctacaatgatttacgtaccgccaaaatttgcaggtgcagctattattgaagccatagaggcgaaattaaaattaattgtttgtattacagaaggtatacctgttttagatatgcttcgagtaaaacaagttttaaagaagagcaagtcaagattaattggccctaattgccctggtatcattacaccagacgaatgtaaaattggaattatgccaggaaatatacataagaaaggaacagtcggtatagtttcaagatctggaactttgacctatgaagctgttgctcaaacttctgaaaatggtataggtcaatctacttgtataggaattggtggtgatccaattaacggaacaaattttattgactgtttagagctttttttaaaagatgatgaaactaaatcaatagttatgataggtgaaataggtggttcagcagaagaagaggctgcagaatttttaaggaaagaaaaaataaaaaaacctatggttggttttattgcaggacttacagctcctccaggaagaagaatgggacatgctggagcaatcatttcaggaggtaaaggagctgctgaagataaaatagagg

SEQ ID NO: 308132 - DNA, 959 bp, Unknown
  Bacterial polypeptide expressing nucleotide sequence isolated from the Sargasso Sea
tggaggaagaggagcaggaaaatttttaaaaccatttaatacaaaaggtggagtacaaataacagaatcaattgatgatgcacaaaaaattgcaaaaggaatgatgggtaacatattgattacaaaacaaacaggtaatgagggaaagttagtaaatagaatttatttagaagctggatgtgaaattgatagggaatattatttaagtattcttcttgataggaatcaatcaaaattaatgatgatggtatctgatgctggtggtgtagacatagaagatgtagctgagaaaacaccagaaagaattcaatatgtttattttcataacttagaagattttacaattagtgatagtcttcaaaataaattaaatttttctattaatgagtttaaccaatttaaagaaattgtttcaaatttatgtaaggcctatgtcgaaatagatgcttctttaattgaaattaatcctcttgttgtgacaaaagatgaaaaactaattcttttagatgctaaaattaatattgacgataatgctctgtatagacaggctgacattgaaaaattaaaagatacttcagaagaaaatgatttagaacttgaagcttctgaaaacgatatggtttacattaaactagatggaaaaataggctgtatggtaaacggagctgggctagctatggcaactatggatattattaaacaatttggaatggagccagccaattttttagatttaggtggtacagcaaataaagaaagagccattaaagctttcaagattattcaatcagataaaaatgtgaaatctgttttcataaatatttttggaggaatcatccattgtgatatgattgccaatggcatcattgatgcaattaaagaattagattttaaacttccctgttgttgtacgttttcaaggaacaaattctacagagggaagagacattataaataat

SEQ ID NO: 308133 - DNA, 483 bp, Unknown
  Bacterial polypeptide expressing nucleotide sequence isolated from the Sargasso Sea
aagaaattgaaaaactaaaagatacttcagaagaaaacgaattagaactagaagcttctgaaaatgaaatggcttacataaagcttaacggaaaaattggatgtatggttaatggagctggtttggctatggcaacaatggatataattaaacaatttggaatggaaccagcaaacttcttagatttgggtggtactgcaaataaagaaagagcagttaaagcttttaaaattattcaatcagatataaacgtaaaatcagttttcattaatatttttggtggcattattcattgtgatatgattgctaatggcattattgatgcaattaaagaattagatttcaaacttccagtcgtagtgagatttaaaggaaccaattcacaaaaagggagagacattattaataattcatcgctaggattaatttcgattgatgatttttcaagtgcagctcaaaaggctgtagagctttcagagtaat

SEQ ID NO: 308134 - DNA, 589 bp, Unknown
  Bacterial polypeptide expressing nucleotide sequence isolated from the Sargasso Sea
atgtcaattataattcataaagatacaaaagtcctttgccagggctttactggctcgcaaggaacttatcattctaaacaagctattgattatggaacttgtatggtaggaggtgtaacgcctggcaaaggaggaagcactcacttaaatcttccagtttttaatacagtgcaagaagctgttagtaaaactaaaccagatgccacagttatttatgtgccagcaaagtttgctactaaagctattcacgaagctttagatgcaaatattaaaattattacatgtataactgaaggaattcctattctagatatggtagaaattaaaaaaagaattattaagcaaaatgtatattttattggaccaaattgcccaggtttagttactgcagatgaatgcaagattggcattatgcctggtttcattcataaaaaaggtaaaattggaattgttagccgttcaggaacacttacatatgaagcagtatggcaaacatctgaaatcggccttggtcaaacaacctgtgttggtattggtggagatcccattcaaggtatgagctttattgattgtatagatctttttttac

SEQ ID NO: 308135 - DNA, 484 bp, Unknown
  Bacterial polypeptide expressing nucleotide sequence isolated from the Sargasso Sea
gaatgtaagattggaataatgcctggcaacatacataaaaagggatctgttggtatagtttctaggtcaggaactttaacttatgaagcagttgctcaaacaacagcaaatggactaggacaatctacctgcataggtatcggtggtgatccaattaatggaacaaactttatagattgtttagatttatttttaaatgatcctgagacagagtctatattaatgattggagaaataggaggatcggcagaagaagaagcatcagaatttattaaaaataataaaataaaaaaaccaacagtagggtttgtagcaggtcttacggcaccaagtggtagaagaatggggcacgccggcgctatcatttctaagggcaaggggggcgcaaaagaaaaaattgaaattatggaagatgctgggataactgtagcaaaatctccagcagaactgggaaaaacgcttttgaataaattgtcactttaaa

SEQ ID NO: 308136 - DNA, 679 bp, Unknown
  Bacterial polypeptide expressing nucleotide sequence isolated from the Sargasso Sea
aaaaattattaaacctttcaattttacacaagaacaaaaaaaaatagctaacaaattaattaattcaatctataaaattttaatagataaagatgctatcctcatagaaataaatccacttattgtaacaaaaaaaggaaaaattttatgtttagatgcaaaaataaattttgatgacaacgctctttttagaaggccagaaatacttaaactgagagatttgaatgaagaggaaccagcagaagttgaagctagtaaattcgatttgtcatacataaaattaaatggttcgataggatgcatggtaaatggtgccggattagctatggcaacaatggatataattaagctttacggagaagaaccagcaaattttttagatgtagggggcggtgcaagtaaagacaaagtaaaagcagctttaaaacttataattgatgacaaaaatgtaaaggggattttaataaatatatttggaggaattatgagatgtgatgttctagcccaaggagtagtcgatgctgcaaaagagtcgagtataaatatacctttggtagtaaggttggctggtacaaactttaaagaaggtaaaagtatacttgataaatcaggtttagaaatactttccgcagaagatttaaacgatgcggctcaaaaaatagttagggctataaaataa

SEQ ID NO: 308137 - DNA, 772 bp, Unknown
  Bacterial polypeptide expressing nucleotide sequence isolated from the Sargasso Sea
atggatatagaagaagttgcaaacaaaacaccaaataaaataattactactaaagtagattttgaaaaagaaatttcagatgcaagttgtgaaaatattataaaaatatttaatttaaataatgaaaataaaagtgaagcagtaaaattaattaaatctatatacaaaatgtttgttagtacagatgctagtatggttgaaataaatccactaattttgactaaagacaaaaaaataatttgtttagatgcaaaaattaattttgatgacaatgcattatttaaacataaagaaattgccgaacttagagatttgaatgaagaagaaccaacagagacggaagctaataaacatgatttagcttatataaaattagatgggagtatcggatgtatggtaaatggcgcaggattagctatggcaacaatggatataattaaattatatggtgaagaaccagcaaattttttagatgtgggaggaggtgcatcaaaagagaaagtttctgcagcttttaaaatcattttgtcagataaaaatgtaaaaggaatcctgataaatatttttgggggtattatgaaatgtgatgtgttagcacaaggtgtagttgatgcagctaaagaaattaaaattcatgtaccgttagtcgttagacttgccggtactaattttgaaaaaggtaaaaaaattttagataattccggtttaaaaataatttcagcatccaatttatcagatgcagcaaaaaaaattgttaaagaaataaaataaa

SEQ ID NO: 308138 - DNA, 505 bp, Unknown
  Bacterial polypeptide expressing nucleotide sequence isolated from the Sargasso Sea
tgcccgggcgtcatcaccccgggtgagtgcaagatcggcatcatgccaggccacatccacaagccgggcaaggtgggcattgtctcccgctccggcaccctgacctatgaagcggtcaagcagaccacggacgagggcttcggccagtccacctgcgtcggtatcggtggcgaccccatcccgggttccaacttcatcgacatcctggagatgttccagaatgatccgcagaccgaagccatcgtgatgatcggcgagatcggcggcaacgccgaggaagatgcggcggcctacatcaaggcccatgtcaccaagccggtggtctcctacatcgcgggggtcaccgccccggctggcaagcgcatgggtcatgcgggcgccatcatcgccggtggcaaaggcaccgcggccgagaaatttgccgccctagaagatgccggcgtgaaaaccgtgcggtcgctcgccgatatcggcaaggccctgcgtgaagtaaccggctggtaag

SEQ ID NO: 308139 - DNA, 616 bp, Unknown
  Bacterial polypeptide expressing nucleotide sequence isolated from the Sargasso Sea
aatgtcgattcttattaataggcacacacgtttaatttgtcagggtattactggatcacaaggaacgtatcattctgaacaagcaatagcatatggtactaatgttgttggaggagttacccctggtaaaggtggtcaaacccacttggaattacctgtctttaatacggtaaaagaagctgtcgatgaaacaaacgctaatgcaacagtaatatatgtgcctgcaaagtttgcggcaaaagctatacatgaagctcttgactcaaaaattgaattaatagtttgtattacagagggtatcccagttttagatatgattgaaataaagaaaagagtattaaatcagaaaacatttttagttggcccaaattgtccaggccttataacacccgaagaatgtaagataggaatcatgccaggatttattcataagaaaggtaaaattggaatagttagtcgatcaggtacattaacatacgaggcagttgcacaaacaacagaagttggacttggacaaacaacttgtgttggaataggaggagatccgattcacggtatgaattttatagattgtttaaaattatttttggatgatgatgagactgaaggaatttta

SEQ ID NO: 308140 - DNA, 853 bp, Unknown
  Bacterial polypeptide expressing nucleotide sequence isolated from the Sargasso Sea
atgactgtacttgtagataaaaaaagtaaaataattattcaaggttttacagggaaaatgggctcttttcatgcagatgagatgataaaatacggctcaaatgtagttggtggagtaacaccaggaaaaggaggttctaagcatttagatttaccggtatttaacacagttaaagatgctgttaatgaaactggagccgatgcctcaattttatttgtacccccagcttttgcagccgattctgcgatggaagcagcagacgccggaataaaaatatgtgtagcaatagttgatggaataccttctcacgacatgatcagaataaaaaggtacatgagaagatacactaaaagttctaaaatgacattagttggaccaaactgtgctggaattattagtcctggaaaatcaatgctaggaataatgccaggtcatatctataaagaaggaagagttggaattattagtagatcaggaacattaggatatgaagctgcccaacaattaaaaaacttgaatattggtgtttcaacaagtgtaggaattggaggcgacccaattaatggcagctcatttagagatataattgaaaagtttgaaacagacgaagagaccgatgcagtattaatgattggtgaaattggtggtccacaggaagtagctgcaggagaatttgcaaaagaaaatatgaagaaaccagttatagcctacatagctggattaactgcaccaaaaggaagagtgatgggtcatgcaggagcaatagtttcagcttacggtgaaagtgcaattgaaaaagttgaaattttaaaagagtatggaattacaatttctaaaaatccatcggttatgg

SEQ ID NO: 308141 - DNA, 406 bp, Unknown
  Bacterial polypeptide expressing nucleotide sequence isolated from the Sargasso Sea
tataaaattagatggtagcattgggtgcatggttaatggtgcaggactagcgatggctacaatggatataattaagctttatggtgaagagccagcaaattttttagatgtaggaggtggagcttctaaagaaaaagtttcagcagcatttaaaataattttatcggataaaaatgttaaaggaattcttataaatatttttggaggcataatgagatgcgatgttcttgctcaaggagttgtggatgctgcaaaagagattaaaattaaagttcccttagttgttagattagcaggaactaaatttaaagaaggtaaaaaaatattagacaattctggtttaaaaattatatctgcttcaaatttgtctgatgcagcaaaaaaaatagtgcaggcgataaaatag

SEQ ID NO: 308142 - DNA, 820 bp, Unknown
  Bacterial polypeptide expressing nucleotide sequence isolated from the Sargasso Sea
atgtcagtattagtaaataaaaatacaaaagttatatgccaaggatttaccggaactcatggaacttttcactctgagcaggcaataaaatatggaacacaattagtaggaggggttacacctaaaaaaggtgggcaaaaacatcttgaccttcctgtttttaatacggtcattgaagcaaaagaaacaactgaagcaaatgcgacaatgatatatgtccccccaaaatttgctgcagctgcaatattggaagcaattgatgcaaacttagacttaatagtttgtataactgaaggaatcccagtttttgatatgatgaaggttaaaaaagctttatcaaaaagtaaaagtagactaataggacctaattgccctggaataataactcctgaggaatgtaagattggaataatgccaggtaacattcataaaaaaggttctgtaggaattatatcaagatcaggtacgcttacatatgaggcagtagcccagacatctcacaatggcttaggacagtccacatgtattggtataggaggtgatcccattaatggaacaaattttattgattgtctcgaactttttctcaaagacgatgatactcattccattattatgattggtgaaattgggggttcagctgaagaagaagcagcagaatttttaaaaaaatcgaaaattaaaaaacccacagtaggttttgttgctggactgacagctccaccaggtagaagaatggggcatgctggcgcaattatatcaggtggcaaaggtggcgcagaaggcaagattgaagttatgaaatccgccaggaatcacg

SEQ ID NO: 308143 - DNA, 749 bp, Unknown
  Bacterial polypeptide expressing nucleotide sequence isolated from the Sargasso Sea
aatgtcagtattagtaaacaagaatacaaaagtgatttgccaaggctttactgggacgcatggtacatttcattcggaacaatccataaaatatggaactcaattagttggaggcgttaccccaaaaaaaggcggacaaaaacatttaggtttaccagtttttaattctgttttagaggccaaaaaaactacaaaagctgaagcaacaatgatttatgttcctccaaaattcgcagcagatgcaataattgaagctatcgatgctaaaattgctttaatagtctgtattacagagggaattccaatcatggatatgttgaaagtaaaattagcgcttaaaaatagtgaaagtcgacttattggaccaaattgtcctggaatcataaccccagatgaatgtaagataggaatcatgcctgggagcatacataaaaaaggatctgttggtatagtgtcacgatcaggaactttaacttatgaagcagtagcacaaacaagcgcaaatggactaggtcaatctacttgtattggtattggaggagatcctatcaatggcactaacttcatagattgcttggagttatttttgaaagatgacgaaactgattctattttgatgattggggaaataggcggcaaagcagaggaggaggctgctgattttatcaaaaaatcaaaagttaaaaaacctatggttggttttattgctggattgacagcaccgccaggtagacgaatgggtcacgctg

SEQ ID NO: 308144 - DNA, 751 bp, Unknown
  Bacterial polypeptide expressing nucleotide sequence isolated from the Sargasso Sea
aatgtcagtactagttaataaaaatactaaattaatttgccaagggtttactggaagccatggaacctttcactctgagcaagcaattaaatatggaacaaatttagttggaggagttacaccaaaaaaggggggccaaactcacttagaaaagcctgtatttaatactgttaaagaggcagtggatgaaactggagctaatgcaactatgatttatgttcctgctaaatttgcctctgctgcaattattgaggcaattgatgcaaagttagaactaattgtttgtatcactgagggcataccagttttagatatgataaaagttaaaaagaaactgagtaaatcaaattcaaggttaattggaccaaactgcccaggtataattacaccaaatgaatgtaagattgggataatgccaggcaatatacataaaaaaggtactgttggaattgtttctagatcaggcactttaacttatgaggcggttgctcagacgacagaaaatggtttgggacaatcaacttgtatcggcattggtggagaccctataaatggaacaaattttattgattgtttagatctattcttaaaagatgatgaaacaaaatcaattttaatgattggtgaaataggtggttcagcagaagaagaagcagctgattttattaaaaatcatgaggtaaaaaaaccaatggtaggctttatagctggcgtgacagctcctccaggaagaagaatgggacatgcagga

SEQ ID NO: 308145 - DNA, 565 bp, Unknown
  Bacterial polypeptide expressing nucleotide sequence isolated from the Sargasso Sea
aatgtcagttcttgtaaataaaaatactaaattaatatgtcaaggatttaccggaacacacggaacctttcactctgaacaatcaataaaatatggtacgcaattagttggcggtgttactcctaaaaaaggtggtcaaaagcatctgggtcttccagtttttaacactgtaatagatgcaaaggaaaaaacaggagcaaacgcaacaatgatttatgttccaccaaagtttgcagctgaagctatattagaagcaattgatgcaaatttagagttagtagtttgtataaccgagggaatcccagttattgatatgatgagggttaaacaggcattatcaaaaagtaaaagtagattaataggacctaactgtcctggcataattacgcccgatgaatgtaagattggaatcatgccgggtaacattcacaaaaagggatctgtgggaattgtgtcgagatcgggtacgcttacttatgaagcggttgctcaaacatcgcaaaatggtcttggacaatcaacctgtattggtattggtggcgacccaattaatggtacaaacttt

SEQ ID NO: 308146 - DNA, 607 bp, Unknown
  Bacterial polypeptide expressing nucleotide sequence isolated from the Sargasso Sea
atggctatttggatagaagaggatgcaaaggttttggttcaaggtataaccggtaaacaaggaatgtttcacgctggaaagatggtagaatatggaaccaacttggttggaggatgtactcctggaaagggaggacaaagtgtacaattagatggtcacgattatccggtattcaacactatgagtgaagcgattactgctactgacgctgatgctaccgtaatttatgtcccaccaccatttgctggtgaagcaattatggaagctgctgatgcctttgaacgtatcaaaggtactggcgtaataatctgtattactgaaggtatcccaactctagatatggtgaaagcaaccgcttatgtcgaaaaccgcgaaaatatcagattgattggaccaaattgtcccggaataattactccaggagaatacggtggagcaaaattagggattatgcccggacacattcatgcaaaaggaaggattggaatcgtttcaaagtcaggaacactgacctatgaggctgttgctcaaacgatgagcatagatgaaggtcaatccacatgtattggaattggtggtgacccagtaaatggtactggattcatag

SEQ ID NO: 308147 - DNA, 580 bp, Unknown
  Bacterial polypeptide expressing nucleotide sequence isolated from the Sargasso Sea
attccagttctagatatgttaaaagttaaaaaacatttactaaaatctaaatcagatttaataggtccaaactgcccaggtataattactccaggtgaatgtaaaattggaattatgccaggcaacattcataaaaaaggaacagtaggcatagtttctagatctggaactttaacctatgaggctgttgcacaaacaacagaaaatggactgggacaatccacatgtataggtattggtggcgatcccattaatggaactaattttatagattgtcttgatttatttttaaatgatcctgaaacagagtccatattaatgattggagaaataggtggttctgctgaagaagaagcatctgaatttgttaaaaatcataaaataaaaaaacctattgttggatttattgcgggtataacagctccaccaggaagaagaatgggtcacgctggagccataatatccagggggaaaggtagtgcagaggaaaaaattaaaactatggaaaatgctggaattactatagccaaatcaccagcagatattggaataactctttatcaaaaattgtcactttaaa

SEQ ID NO: 308148 - DNA, 622 bp, Unknown
  Bacterial polypeptide expressing nucleotide sequence isolated from the Sargasso Sea
gtgagattgaaattaattgtttgcatcacagaaggtattcccgtgatggatatgatgaaagttaaagataaattaagctcttcatcttcaagattaattggtcctaactgtccaggaataattacgcccgatgagtgcaaaataggcatcatgccagctcacattcataaaaaaggtaatgtaggtattgtctcgcgctcaggaactctcacttatgaggctgtatatcaaacaacagtagcaggcttgggtcaatctacatgtattggtataggaggagatccaataaatggtactaattttattgactgtttagatttattcctttctgatcaagaaactgcgtcaataattatgattggcgaaattggaggatcagcagaagaggaagctgctgaatttttaaagaaacaaacaataaaaaaacctacagtgggctttattgctgggacttcagctccaccaggcagaagaatggggcatgctggtgcaattgtttctggtggtaaaggtggagcagacgacaaaattgaagcaatgaaagaagccggtattaaaatttcaaattccccagccgcactagggtcgactttacttgaggtattgaagaatcaaatctaaa

SEQ ID NO: 308149 - DNA, 715 bp, Unknown
  Bacterial polypeptide expressing nucleotide sequence isolated from the Sargasso Sea
gctgcttggaatgaaaacttttcaagctagaaaattagcatatggacttggtttaaagggtgcttcttttaaggaagcatgctcaatttttatgaatatgtatctatgctaccaatctactgattcatcacttaccgaaataaatccattaattcaaaccagtgataaccacattatcgcattggattcaaaatttaattttgatggaaacgctctttttcgacaaaaagagatttctgatatgagagatttatctgaagaagacgaaatggaagttgaggctggaaaattcaatctgaactatataaaattagatggtaatgtaggttgtatggtaaatggtgcaggtttggcaatggcaactatggatatcattaaactagctggcggtgatccagcaaattttttagatgtgggcggcactgctagtgctgaaaccgttaaaaatgggtttcgtattatactatcagataaaaatgttaaggctatcctaatcaatattttcggtggaattgtaaggtgtgaccgtgttgctaatggcgttgtacaagcagttaaagaattaggtttagaagtgcctgttgtggtcagattagaagggacaaatgctaaagaagcacaatctatacttaagagttcaggagtatcaatcatcccagcagagggaatgaaagatgcagcaaccaaagtagtcagcgcagctttaggttcatag

SEQ ID NO: 308150 - DNA, 484 bp, Unknown
  Bacterial polypeptide expressing nucleotide sequence isolated from the Sargasso Sea
caaagcaaaataggtatcatgcctggtgcaatacataaaagaggtggaattggaattgtctcaagatcaggaactttgacttatgaggctgtaagccagattacccgtgttggactaggtcaatcaacctgcattggaataggcggggacccagttaatgggactaattttattgattgtctgagtttatttgaacaggatgagcagactgaagcaatagtcatgattggtgaaattggaggagatgcagaagaacaagcagctgattatgttagaaataatgtaactaagccaattgtcagtttcattgcaggacaaactgctccccccggacgtcggatgggacacgccggtgccatcatttctggaggacatggaacggcagaagaaaaaatgaatgctttaagagaagctggaatacatgtgattaactcacttgatgaaattggaaataagatgcttgaagctttggtaaaagcatgaa

SEQ ID NO: 308151 - DNA, 514 bp, Unknown
  Bacterial polypeptide expressing nucleotide sequence isolated from the Sargasso Sea
taatattgatgataatgctctgtatagacaggctgacattgaaaaattaaaagacacttcagaagaaaatgatttggaacttgaagcttctgaaaacgatatggtttacattaagctggatggaaaaataggctgtatggttaatggagctggactagctatggcaactatggatattattaaacaatttggaatggagccagccaattttttagatttaggtggtacagcaaataaagaaagagccattaaagctttcaatatcattcaatcagataaaaacgtgaaatcagtcttcataaatatttttggaggaattatccattgtgatatgattgctaatggcatcattgatgcaattaaagaattagaatttaaacttcctgttgttatacgttttcaaggaacaaattctaaagaaggaagagatattataaatagttcatcgttaggattaatttcaattgatgatttttcaaatgcagctcagaaagctgtggagttatcagaatag

SEQ ID NO: 308152 - DNA, 619 bp, Unknown
  Bacterial polypeptide expressing nucleotide sequence isolated from the Sargasso Sea
ttttttaatttatttaaatgttttataagaactgatgcttcgcttgctgaaataaatccgttagtacttacaaatgacagcaaaatagttgctctagattgcaaactaaactttgatggcaatgcactatatagacaaaaagatatattatcattgagagataccaatgaagaagatcccactgaattagaagctgataaattcgacttaaactacataaaactcgatgggaatgtaggatgtatggtcaatggagcaggtttagctatggcaacaatggacattataaagatatcaggaggagagccagcaaattttttagatgttgggggaactgcatctgcagatactgttaaaaatggatttaaaatcatactttctgataaaaatgtaaaagcaatccttattaacatttttggaggtattgttaggtgcgatagagtggcaaatggcgttgtcgaagctgttaaggaacttggactagatgttccggttgtcgttaggcttgaaggtacaaattccgaagaggctaaaaaaatattagctaggtccaaactatcaattattcctgcttcagatatgaaggacgcagctttgaaagttgtgaaatccatttaaa

SEQ ID NO: 308153 - DNA, 838 bp, Unknown
  Bacterial polypeptide expressing nucleotide sequence isolated from the Sargasso Sea
aatgtcagttttagttaacaaagatactaaagttatttgtcaagggtttactggtactcatggatcatttcattcagagcaagctttaaaatatggaaccaaacttgtcggtggagttacaccaaaaaaaggaggacaaacacatttagatctacctgtttttaatacagttgaagaagcaaaaaataaaacgtctgctaatgctacaatgatttatgttccgccaaaatttgcaggagcagcaattatagaagctatagaagcaaaaatagaactgatagtttgtattacagaaggaatacctgttttggatatgatccaagttaaaaaaatcttaaataaaagtagctcaagattgatcgggcctaattgccccggtattatcactccagaagaatgtaagataggaattatgcctggaaatattcataaaaaaggttctgtaggtatagtttccagatcaggtactttaacatacgaggccgtagctcaaacatcgtcaaatggtatgggccaatctacttgtattggcattggtggagatccaattaatggaacaaactttatagattgccttgaactttttttgaaagatgatgaaacaaaatcaattgtaatgattggtgaaatcggagggtctgcagaagaggaagctgcagagtttttaaaaagagaaaaagtaaaaaaaccaatggtcggatttattgccggtttgaccgcccctccaggaagaagaatgggacatgctggagccataatatctggaggcaaaggtggagctgaagataaaatagatatcatgaaatctgctggaataactatctcaaaatcacctgca

SEQ ID NO: 308154 - DNA, 604 bp, Unknown
  Bacterial polypeptide expressing nucleotide sequence isolated from the Sargasso Sea
aatgtcggttttagttaacaaaaatacaaaagttatttgtcaaggctttaccggatcacatggaacatttcactctgaacaagccataaaatatggaactaatttagttggtggtgtaacaccaaaaaaaggtggtcaaaagcatttggacaaacctgtttttaattccgttttagatgccaagaatagtgttggagctgatgcaacaatgatttatgtgccagctaaatttgctgcaaatgcaataatagaggcaatagaagcatctattgaattaatagtttgtattacagaggggattccgattttagacatgcttaaagtaagaaaaaaattagacggatcaaatagcagattaatcggacctaattgcccaggaataataactccagatgagtgtaaaattggtataatgcctggaagcattcacaaaagaggaacagttgggattgtatctagatctggaaactttacatacgaggcagttgcacaaactacagaaaatggcttagggtcatctacgtgtatcggtattggcggtgattcgattaatggtacaaattttatagattgtttagatttatttttaaatgatgatgaaaca

SEQ ID NO: 308155 - DNA, 346 bp, Unknown
  Bacterial polypeptide expressing nucleotide sequence isolated from the Sargasso Sea
aatggatataattaagctctatggagaagaaccagctaattttttagacgtaggtggaggagcatcaaaagaaaaagtttcagctgcatttaaaataattctttcagataaaaatgttaaaggaattttaattaatatttttggtggaataatgagatgtgatgtactcgcacaaggtgttgtcgatgctgtaaaagagattaatataagcgttcctctagttgtaagattagctggaactaattttaaagaaggaaaaatgatacttgattcctctggcttaaagttgatatcagcagaaaacttagatgatgcagcaaaaaaaattgttgaggctataaagtaa

SEQ ID NO: 308156 - DNA, 848 bp, Unknown
  Bacterial polypeptide expressing nucleotide sequence isolated from the Sargasso Sea
gactgtactcgtagacaaaaatagtaagataattattcaaggttttactggtaatatgggctcttttcatgcagatgagatgataaaatatggttcaaatgtagtaggtggcgtaacaccaggaaaaggaggttccaagcatttagatttaccagtatttaatacagttaaagatgctgtgaatgaaacaggagctgatgcatctattttatttgtacccccagcttttgcagcagactcagcaatggaagcagcagatgctggaataaaaatatgtgtagcaatagttgatggaataccttctcacgacatgatcagaataaaaaggtacatgagaagatatactaaaagttctaaaatgacattagtcggaccaaactgtgctggaattattagccctggaaaatcaatgttaggtataatgccaggtcatatttacaaagaaggaagagttggaattattagtagatcaggtacattagggtatgaggccgctcagcaactcaaaaatttaaatataggtgtttcaacaagtgtaggaattggaggagatccaataaatggaagttcatttagagatataattgaaaagtttgaatcagatgatgagaccgatgcaatattaatgattggtgaaatcggtggccctcaggaagtagctgcaggagaatttgcaaaagaaaatatgaagaaaccagttattgcctacatagctggattaactgcaccaaaaggaagagtaatgggtcatgcaggggcaatagtttctgcatatggtgaaagtgcaattgaaaaagttaaaattttaaaagagtgtggaattacaatttctaaaaatccatctgtta

SEQ ID NO: 308157 - DNA, 514 bp, Unknown
  Bacterial polypeptide expressing nucleotide sequence isolated from the Sargasso Sea
ctaattgccccggggattataacaccaaatgaatgtaaaattggaattatgccaggtaacatccataagaaaggaagtgtaggaatagtttctagatcaggaactttaacttatgaagctgttgctcagacttctgcaaatgggatgggccagtcaacttgtattggaattggtggagatccgataaatggaacaaatttcatagactgtcttgaactttttcttaaagatgaggaaactaaatcaatagtaatgataggagaaataggtggttctgcagaggaagaagcagcagaatttttaaagagagaaaaaattaaaaaaccaatggttggctttattgccggcctaactgcaccaccaggtcgcagaatgggtcatgcaggagcgatcatttcaggtggcaaaggaggcgcagaggacaagattgaaattatgaaatctgccgaaattactatttcaaaatcaccagctgatataggtaaaacactttatcaaaaacttaatggttgat

SEQ ID NO: 308158 - DNA, 556 bp, Unknown
  Bacterial polypeptide expressing nucleotide sequence isolated from the Sargasso Sea
agaaatcattgaacaaaatatatattttattggccctaactgtcccggtcttgttactccagatgagtgtaaaattggtattatgcctggatttattcataaaaaaggtaaaattggaatagtcagccgttcaggaacccttacatatgaagcagtttggcaaacatcacaaataggccttggtcaaacaacctgtgtgggtattggaggagaccctattcatgggatgagctttatagattgtatagatctttttttacatgatgaagaaacagagggaatcttaatgattggagaaataggaggatctgcagaagaagatgccgctgaatttattaaaaaatcttctattaagaagcctacttcagcttttattgcaggcattactgccccaaaaggaaaacgcatgggacatgctggagctattatatcaggtaataaaggaactgctgagtctaaaattaaagcactagaagaatcaaatgttttaatagccccttcacctgctgaacttggtgaaactatgttaaaagcgatgcaaaaaagctatacttaa

SEQ ID NO: 308159 - DNA, 845 bp, Unknown
  Bacterial polypeptide expressing nucleotide sequence isolated from the Sargasso Sea
tagcaaagagtctagaatcctttgtcaggggatcacaggctcccaaggctcattccatgccgaacagtgtattgagtatggttcaaatattgtagcaggagtgactccaggaaaaggcgggtcaactcatcttgatgttccagtttttaactcagttgctgaagccaaagcagatctagaaatagatgtcagtatgatatttgttccggcaaaatttgcagcagatgcaatgaaatcagcaattgaatctgaaataggacttattgtttgtattaccgagggagtccctgttcaagatatgattgaagttaaagccatgctgaatggctctgattctataatattaggcccaaattgtcctggcatcataacgcctcatgaaaccaagattggaataatgcctggcttcattcatcaaaaaggttctgtaggcatcatttcaagatcgggcacactgacttacgaagctgttcatcaaacttcaatgtgtggccttgggcaaagcacctgcattggcataggcggtgatccaatcaagggtctaaactttattgaatgtttgtcgctctttgagaaagatccagaaacagagggaattgtgatggttggcgaaattggcggttcggacgaagagaaggccgcagagttcatcaaagaaaatattagcaagcctgttgtcgcttatatagctggggtttcagcgcctcctggtaaaagaatgggccatgcaggagcaattgttactggcaaagagggaactgctttaagcaaatatgaggccttgaatgacgctggagttgcaactacagattcgcctgcattgattggtaaaatcatgaaagatt

SEQ ID NO: 308160 - DNA, 607 bp, Unknown
  Bacterial polypeptide expressing nucleotide sequence isolated from the Sargasso Sea
tatgtcaattttagtaaataaagactcaaagattattgttcagggtataacagggactgaaggttcctttcatgctggacagtgtttagaatatggtggaaatgttgttggaggagttacgcctggaaaaggtggtcaaacagctttagaaggaaaagttcctgttttcaattcttgccaagatgcggttagagaaactggcgccaatgtatctcttatttttgttcctccagcatttgcagcggatgcaataatggaggctgctgatgcaggaattgcattggttgtttgtattacagagggtattcctgtgcaagatatgatcacagttagtgattttcttaagaaaacggatacaagattaattgggccaaactgtcccggtcttttaacgccaggtgaagctaaggtaggaataatgcctgggtttattgcacaaaaaggaagtgttggtgttatttccaaatctggaacacttacatatgaagctgttcatcaaatatgtaagcaaggtatgggccaatctacttgtgtaggtataggtggagatcctattattggaactgcaatgatagatttattagaattgtttgaaaatgatcctgaa

SEQ ID NO: 308161 - DNA, 619 bp, Unknown
  Bacterial polypeptide expressing nucleotide sequence isolated from the Sargasso Sea
attaaaattattacctgcattactgagggcattcctgtgcttgacatggtcggagataaaaaaaagaattattgaacaaaaaacttattttatagggcctaattgtcctggattagtgacacctggtgaatgtaaaatcggaattatgccaggctttattcataagcctggaaaaataggaatagtaagcagatcaggtacactgacttatgaagcagtatggcaaacatcagaagttgggcttggacaaacaacctgtgttggtattggtggagatccagtacatggaatgaattttatagattgtcttgatttgtttttacaggatgatgaaacaaaaggaattttaatgataggtgaaatagggggtacagctgaagaggatgctgcagattttatatctaaatcaataataaaaaaaccgatgtcagcatttattgccggtgtatcagccccaaaagggaagagaatgggtcatgccggagctataatctctgggaataaaggaactgcacagtcaaaaattgatgctttgcagtcagccaatatagctgtagcaccctctcctgctaaaatgggtgaaacaatgttatcagagatgcaaaaagggtataattaa

SEQ ID NO: 308162 - DNA, 745 bp, Unknown
  Bacterial polypeptide expressing nucleotide sequence isolated from the Sargasso Sea
atgtcaattattattaataaaaaaactaaagtcatttgtcagggatttactggatcacaaggtacatttcattcaaaacaagcaatagattatggtacaaaaatggtaggtggagtgactccaggaaaaggtggctctattcatttaaacttacctgtatttaattcagtcaaagaagcagttgaaaaaactaaaccggatgcaacagtaatttatgtaccggcaaaatttgctacagaggctattcatgaagctttggattctgatattaagataataacatgcattactgaaggaattccaattcttgatatgatagaaataaaaaaaagaataattaagcaaaatatattttttattggacctaactgtcctggtctagtgactccagatgagtgtaaaattggtattatgcctggctttattcataaaaaaggtaaaattggtatcgttagtcgttcaggtacacttacttatgaagctgtttggcaaacatcagaaattggacttggccaaacaacttgtgtgggaattggaggagatccaattcatggcatgagttttattgattgtattgatctttttttaaaagataaggatacagaaggaatattaatgattggtgaaataggaggtaccgctgaagaagatgcagcagaatttattctaaaatctcctataaaaaaacctatggctgcttttattgcaggagtctctgctccaaaaggaaagcgcatgggtcacg

SEQ ID NO: 308163 - DNA, 646 bp, Unknown
  Bacterial polypeptide expressing nucleotide sequence isolated from the Sargasso Sea
cattttagaagcattgacacaggaattgaacttattgtttgcataactgaaggtataccagtggcagatatgattagggttaaaagagcccttaaaggctcttcctctcgactgattggtcctaattgtcctgggataattagcccttcagcgtgcaagattgggattatgcctggacatattcataataggggggtcgtgggagttatttcacggtctgggacccttacatatgaggcggtagcacaaactagccttgctgggctcgggcagtctacgtgtgtaggtataggaggcgacccgataaaagggacagagcacatagatgttttggaacttatgttaaaggaccccgaaacagaggccattataatgattggcgaaataggaggttcagcagaagaagaggcggccgattttatcaagcacgaggcaaagtctgggaggatcaaacctatagccggattcattgcaggccgtacagcaccaaaaggcagacggatgggacatgcaggagcaattgttgctggaggcaagggtggagctgaagataaaattgaagctatgaaagcggcgggaatagttgtcgcagaaagtccagccgagctcggcacggctgtattaaaagctatgagtaatggataaa

SEQ ID NO: 308164 - DNA, 856 bp, Unknown
  Bacterial polypeptide expressing nucleotide sequence isolated from the Sargasso Sea
agtaacaatgatacaaaactaatagtacaaggtattacaggtagccaaggcttatttcatgcaacccaatgtagagaatatggaactaatgtagttggaggtgtaactcctggaaaaggtggaacacaagtcgaaggttttgatgtttttaattcagttgctgatgctaggaaaacaacaggtgctaatactagtctaatttttgtacctgctgctttcgcccctgatgcaatccttgaagcagaagatgcagggattgaacttataatttgtataacagaaggaattccaacaaacgatatggttagtgtaaaaaaagttattgattcatcttcatctattttaattgggccgaactgcccaggaataataacacctggtcaagcaaaagttggaattatgcctggatatattcacaaagaaggaagaattggaattatttctaaaagtggaactctgacttatgaggctgtttggcagctaactcaattaggcattggtcaatctagttgtgtaggcattgggggagatcctataattggttcaactttcattgatattttagatttattcaataaagatgatgataccgatggtgttatcatgataggtgaaattggtggtagtgcagagcaagaagcagcttattggataaaagataactttaaaaaacctgttgcagcatttatagctggtgcaactgcccctaaaggtaaaagaatgggacatgctggtgcaattgtatctggtagctctggttctgcagaagagaaaaaaactgttctagaatcagttggaattaaagtttctcctagtcctgcagaaatgggtgaaacattaaaatcacttttttagt

SEQ ID NO: 308165 - DNA, 772 bp, Unknown
  Bacterial polypeptide expressing nucleotide sequence isolated from the Sargasso Sea
atgagtgttttggttagcaatgagtctagaatcctttgtcaggggatcacaggctcccaaggctcattccatgctgaacagtgtattgagtatggttcaaatattgtagcaggagtgactccaggaaaaggggggtcaactcatcttgatgttccagtttttaactcagttgctgaagccaaagcagatctagaaatagatgtcagtatgatatttgttccggcaaaatttgcagcagatgcaatgaaatcagcaattgaatctgaaataggacttattgtttgtattaccgagggagtccctgttcaagatatgattgaagttaaagccatgctgaatgactctgactctatactattaggcccaaattgtcctggcatcataacgcctgatgaaaccaagattggaatcatgcctggcttcattcatcaaaaaggttctgtaggcatcatttcaagatcgggcacactgacttacgaagctgttcatcaaacttcaatatgtggccttgggcaaagcacctgcattggcataggcggtgatccaatcaagggtctaaactttattgaatgtttgtcgctctttgagaaagatccagaaacagagggaattgtgatggttggcgaaattggcggttcggacgaagagaaggctgcagagttcatcaaagaaaatattagcaagcctgttgtcgcttatatagctggggtttcagcgcctcctggtaaaagaatgggccatgcaggagcaattgttactgcaaagagggaac

SEQ ID NO: 308166 - DNA, 502 bp, Unknown
  Bacterial polypeptide expressing nucleotide sequence isolated from the Sargasso Sea
atgtcaattattataaataaagatactaaagttatttgtcagggtattactggttctcaaggaacttttcattcccaaaaagcaattaactatggaacaaatttagttggaggtgtcacacctggtaaaggaggaacaaaacaccttggtttacctgtgttcaacacggtacaagaggcagttgaatctactaaagcagacgcaacagtaatatatgtgccagcaaaatttgctactaaagcaattcacgaagctttagatgcaaagataaaaactatagtttgtattacagaaggcgtccctgttttagacatggttagaataaaacaaagaattattgatcagaagacaaattttattggtcctaattgtcccggaattattaccccagatgaatgtaaaattggtataatgcccggattcattcataaaaaaggaaaaattggtattgttagtagatcgggcactttaacttatgaagctgtatggcaaacaactaaag

SEQ ID NO: 308167 - DNA, 473 bp, Unknown
  Bacterial polypeptide expressing nucleotide sequence isolated from the Sargasso Sea
agcgttaaaagatttaagtgagaaaaatgagatggaattagaagcatcaactaacgatatgaattatataaaacttaatggagaaattggttgtatggttaatggagctggtttagcaatggcaactatggatataataaaacaatttggaaaggagcctgcaaattttttagatttaggaggcaccgcaaataaagaaagagcaattaaaggttttaagattattcaatctgataataatgtgcagtcagtttttgttaatatatttggaggtattattcattgtgatatgattgcatctggaattattgaagcagttaaagagttacattttaatttgccgatagtagttagattccaaggaactaatgcatcagaaggaagggatattataaataattctaaattaaatatcatctcagtagatgattttactgaagctgcaaaaaaagcagttgagctatcagcctgat

SEQ ID NO: 308168 - DNA, 570 bp, Unknown
  Bacterial polypeptide expressing nucleotide sequence isolated from the Sargasso Sea
ttttagatatgaccaaagtttataattatataaagcaaaaagactgtaaattgataggaccgaattgtcctgggattataactcctgatgaagcaaaagttggaattatgcctggatttgtttttaaaaaaggtagagtaggtttagtttctaaatcaggtacactgacatatgaagctgcagatcagatagttaaagaaggttttggaatttcaacagcaattggtataggtggtgatccaataattggcactacagttgaagatgctgttaagttcttttttgaagacgatgagacagattgtattgtaatgattggtgaaatcggtggtcaattggagaacaatgctgctcaatggataaaaaaatcaaaaatcaaaaagcctgtaataggatttatagctggtgaaactgcgccaaagggaagaaccatggggcatgcgggtgctatagtaggtggcaaagatgatactgctgctgcaaagaaaagtattttaaaagaatgtggagtacatgttgccgattctcctgctgatataggtaaatttgttaaaaaatatattaattaaa

SEQ ID NO: 308169 - DNA, 378 bp, Unknown
  Bacterial polypeptide expressing nucleotide sequence isolated from the Sargasso Sea
tggttaatggtgcaggcttagcaatggcaacaatggatataattaaattacatggagaagagccagcaaattttttagatgttggtggcggagcatcaaaagaaaaagtttcagcagcatttaaaataattttatcagacaaaaatgtaaaaggaattttgataaatatatttggtggtataatgagatgcgatgttcttgctcaaggagttgtagatgctgcaaaagaaattaaaattgaagttccgttagttgtaagattagcaggaactaaatttgaggaaggaaaaaaaatattagataattcaggtttagaaattatatctgcctcagacttatctgatgcagcacaaaaagtagttgattctattaaataaa

SEQ ID NO: 308170 - DNA, 913 bp, Unknown
  Bacterial polypeptide expressing nucleotide sequence isolated from the Sargasso Sea
gaatatcaagcaaagcaacttttgctagattttgatctacctatattaaatagtaagttttatattaacaaccttaataatattgaaaaagatttaaaaaaactgaatggacctccatgggttgttaaatcacaaatccatgcaggaggaagaggagctggttttttcaaaaaatcagttaacaataaaggaggagttcagattgcaaaagatatagatcaaacggttactttagcaaatgcaatgatgactaatacattagttaccaaacaaactggcgcagagggaaaaatagttaatagaattttaattgaagaaagttgctatataaaaaaagaattttatctcagtttaattattgatagaaatacttcaaaattaatgttgatgatatcttccgctggaggtgttaacatagaggaagttgctgaaaaaaaccctaataaaattcacacttttttatttgaaaattttgatgaaataatattaaatgaaaaattatatgagcagctagaaataacctcgaatcaatataaagaattaaaatctatcattaaaaaacttgccttagcttttagatcattagatgcttccacaattgaaataaacccaatggttttgaatgaaaaaggaaaatttgttttgttagatgctaaaataaccatagatgataatgcattatttcgtcagcctaatatagctaacttaaaggatatttctgaagaagatcctttggagctacaagcttctaaaaacggtatgaattatgttaaacttcaaggctcaataggctgtatggttaatggcgcaggattagctatggcaacaatggatatgtttaaactttttggtcatgaacctgctaattttttggatttaggtggaacggcaaataaagaaagagccattcaag

SEQ ID NO: 308171 - DNA, 637 bp, Unknown
  Bacterial polypeptide expressing nucleotide sequence isolated from the Sargasso Sea
cttgagtatctggataaatgaagccagcaaggtcctagttcagggaattacgggaggccagggaacattccacgccactcgaatgacggagtacggaacagatgtcgtaggaggggtcacgcctggtaagggcggtcaagtggtcgatctccctggtaggtctgtccctgtctacgatgccatggggcaagccgtttccgaaactgatgctgatgttagcgtaatctatgttccagcgagattcgcagcagcagcaattatcgaggccgctgatgctttcaacgaaaccaagggcgagggattgattgtatgcattacagagggaattcctactcttgatatgattcgatgcgtaggacacatttcggaaatgcctggaatcaggcttattgggcccaattgtccaggaatcataacccccggagaaaatggtggttgcaaggtgggaatcatgccaggatacatccacgccaagggaagaataggcatcatctcaaagtccggtacactaacttacgaggctgtagctcaaaccatgagtgtaggagagggccagaccacatgcataggtatcggaggggatccgattagtggaaccggattcatagactgccttgccgcctttgaggaggaccca

SEQ ID NO: 308172 - DNA, 676 bp, Unknown
  Bacterial polypeptide expressing nucleotide sequence isolated from the Sargasso Sea
tatttatgttccagctaagtttgcaactaaagccatacatgaagcacttgatgcagacataaaaattattacctgcattactgaaggcattcctgttcttgatatggtgcaaattaagaaaagaattattgaacaaaaaactcacttcataggccctaattgtccaggtttagtaacaccaggcgaatgtaagattggcattatgccaggctttattcatcaacctggcaaaattggaatagttagtagatctggaacattaacgtatgaagctgtttggcaaacttcccaagtaggtttaggtcaaacaacatgtgtaggtatcggaggtgatcctgttcatggtatgaactttattgattgccttgatttgtttttaaaagatgaggcaacaaaaggaatactaatgattggtgaaatagggggaactgcagaagaggatgcagctgaattcatatcaaaatcaagcatcaaaaaaccaatgtcagcatttattgctggagtatcagcacccaaaggaaagagaatgggtcatgctggtgccataatttctggtaataaaggcacagcacaatcaaaaattaatgctttggagtcggctaatatttcggtagctccatcacctgccaaaatgggtgaaacaatgttaactgaaatgcaaaaaaggtataattaa

SEQ ID NO: 308173 - DNA, 499 bp, Unknown
  Bacterial polypeptide expressing nucleotide sequence isolated from the Sargasso Sea
atgtcaataatcattgataaaaatactaaagttatatgccaaggatttactggatcacaagggacatatcactctcaacaagctattgattatggaactcaaatggttggaggtgtaactcctggaaaaggaggaacaacacatttaggtttacctgtatttaatacggttaaagaagcaaaagattattcacaagcagatgcaaccgtaatttatgttccagctaaatttgcaacacaggctattcatgaggcattagatgctaatattaaaattattacttgtattacagagggcattcctgtgcttgacatggtggagataaaaaaaagaattattgaacaaaaaacctattttataggacctaattgtcctggattagttacacctggtgaatgtaaaatcggaattatgccaggttttattcataagccgggaaaaataggaatagtaagcagatcaggcacgttgacttatgaagccagtatggcaaacatca

SEQ ID NO: 308174 - DNA, 390 bp, Unknown
  Bacterial polypeptide expressing nucleotide sequence isolated from the Sargasso Sea
ttggatgtatggttaatggcgctggacttgccatggctacaatggatataataaaacaatttggtgaagagccggcaaattttttagatttaggaggtacggcaaataaagatagagtaattatgggctttaaaatcattcaatcagattcaaatgtaaaatctatattgattaatatttttggtggcatcatacattgtgacatgattgctaatggaattgttgaggcagtaaaagaattagattttaaattacctttagttgttcgatttcaaggaacaaatgcaagtgagggaagagatgtaattaataattctgatttaggattaatttctattgatgattttacagaagcagcaaaaaaagtagtagatttggctaaaggataat

SEQ ID NO: 308175 - DNA, 922 bp, Unknown
  Bacterial polypeptide expressing nucleotide sequence isolated from the Sargasso Sea
gccgccgagttcatgctctccaaaccgcatggtcagccccgcagaccccgccccgaggggctcgaggtcggcacgctcctgctcgccgccggcgtcgatatcgcccacgagtactacctcgccatcacgacagaccgcgacacccgccgcaacgtgctcatcgccagcgccgagggcggcgtcgagatcgagcaggtcgccgaggacaaccccgcagccatcctcaaggagcccatccacccggtcttgggcctccagccccaccaggcacgccgcctcgcgttcgagctcggcttcaagggcaaggccgtcggccaagcgaccaagatcatgctcagcctcgccaagctcttcgacgcgaaggactgctccatcgccgagatcaaccccctgatcatcacgcccgccagcgacgagcaccccgacggccaggtcctcgccatcgacgccaagttcaacttcgacgacaacgcactcttccgccagaaggacctcgtcgccctcgacgacggcagcgagaccgaccccgccgagcagcgcgccgaggccgccggcctcagctacatcaagctcgacggcaacatcggctgcctcgtcaacggcgccggcctcgccatggcgaccatggacaccatcaagcaccacggcggcgaccccgccaacttcctcgacgtcggcggcagcgcgagcaaggaggccgtcaccgaggccttccgcatcatcctcggcgatcccaaggtcgagggcatcctcgtcaacatcttcggcggcatcatggattgcagccgcatcgccggcggcgtcgccgaagcggccaaggagatcggcttcaaggtcccgctcgtcgtccgcctcgaaggcaacaacgccgagaagggacgcgagatcctgaccgaagcttccgcagaactcccgacgatgc

SEQ ID NO: 308176 - DNA, 665 bp, Unknown
  Bacterial polypeptide expressing nucleotide sequence isolated from the Sargasso Sea
aatgagcatatttgttaataaaaaaactaaattaatttgtcagggttttactggttctcatggcacatttcattctgagcaatctttagcatatggaacaaacttggtaggtggagtaacaccaaaaaaaggaggacaaacacatcttggtaaaccagtttttaatactgttaaagaagcagttgaaacgactaatgcaaatgcaacaatgatatatgttccagcaaaatatgcagcatcagcaattaatgaagctatagaaagtgatatacctttaattgtttgtattaccgaaggaataccgattttagatatgattaaagttaaacaaaaacttaaaaattctcgatcaagacttataggacctaactgccctggaataattactccaaatgaatgcaaaattggaataatgccaggaaatattcataaaaaaggtaccgttggaatcgtgtcaagatctggaacacttacttatgaggcagtagctcagacaacagaacttggacttggtcaatcaacttgtattggaattggtggtgatccaattaatggaacaaactttattaattgtttagaagcttttctaaaagattctggtaccgaatctattttaattattggagaaataggtggcaatgatgaggaggaagcagctgaattta

SEQ ID NO: 308177 - DNA, 529 bp, Unknown
  Bacterial polypeptide expressing nucleotide sequence isolated from the Sargasso Sea
aatgtcagttttagttaataaaaatactagattaatttgccaaggttttactggatcacatggaacatttcattccgagcaagcaattaaatatggaacaaaattagttggtggagtcacaccaaaaaaaggtggacaaaaacatttaggactccctgtttttaatacagtaaaagaagcaaaagaatctgaaggtgctaatgctacaatgatttatgttcctgcaaaatttgcagcagctgcaattattgaagcaattgaagcatcaattgaactcattgtatgcatcacagaaggtattcctattcaagacatgctcaaagtaaaacaaaaattattaaaatcaaattcaaggttaattggtcctaactgcccaggaattataactcctgatgagtgcaagattggtattatgcctggaaatattcatcagagaggatcagttggtattgtctctagatctggcacattgacatatgaagcggttgcacaaacaactgaaaatggacttggtcagtcaacatgtatt

SEQ ID NO: 308178 - DNA, 804 bp, Unknown
  Bacterial polypeptide expressing nucleotide sequence isolated from the Sargasso Sea
aatatggaacacaaatggttgggggtgtaactcctggaaaaggaggaacaagacatttaaatcttccagtttttaatactgttaaagaagccatagatcaaactaacgccaacgcaagtgttatttatgttcctgcaaaatatgcaacaaaagcaattcatgaagctttagatgctagaattgaaaccattgtatgcattacagaaggcattccagttttagatatggttgaaattaaaaaaagaattatcgaacaaaacacaaaatttattggcccaaattgcccaggtattgtaactccagaagaatgtaaaataggtataatgcctggatttattcataaaaaaggaaatattggtatagttagtcgatctggaactttaacttatgaggctgtttggcaaacatctaaagctggtctgggacaaacaacatgtgttggaattggtggagatccagttcatggaataaattttatcgattgtattaatttgtttcttaaagataaagatacagaaggtattcttatgataggtgaaataggcggtactgctgaggaagatgctgcagaatttataaattcctcaaaaataaaaaagccaatttctgcttttatagctggtaaatctgcccccaaaggaaaacgaatgggtcatgcaggtgcaattatttcaggaaacaaaggtacagctcaatccaaaattaatgcattagaaaaagctaatgtatttatagcgccatccccatcccttttaggcgaaactatgttaaaagcaatgcaggatggaggtaataaaatttaat

SEQ ID NO: 308179 - DNA, 790 bp, Unknown
  Bacterial polypeptide expressing nucleotide sequence isolated from the Sargasso Sea
aatgagtattctagttaataaaaactcaaaagtcatagttcaaggctttacaggttctgagggaacttttcatgctactcaaatgctagaatatgggactaatgttgttggtggtgtaacaccaggaaaagggggactatcacatttagagaaacctgtcttcaatactgtttatgatgcaaaaaaaaatacaggggctaacgtttcaataatttttgttccaccagcatttgctgctgatgcaattttagaatcaatagattctgaagttgaagttatagttgcaatcactgaaggtatacctgtaaaagatatgattaaagtcaaagcagctttaaaaaataaaaaaagtactttaataggcccaaactgtccaggaattataacacctgatgaagcaaaagttggaattatgcctggttttgttttcaaaaaagggaatattggaatagtatctaaatcagggactttaacatatgaagcagctgatcaagttgtaaaagcaggttatggtatatctacagctattggtattggaggagatcctattgttgggacctcaaccttagacgctataaaattatttatggatgacaatgatacatcaggtatagttatgattggagaaattggtggaaattatgaagcagaagcatctaaatggataaagaaaactggcaacaaaaagcctgttgttggttttattgctggtcaaacggcaccaaaaggtaaaagaatgggtcatgctggcgcaataataggggggaaggatgatactgctgaagcaaaa

SEQ ID NO: 308180 - DNA, 779 bp, Unknown
  Bacterial polypeptide expressing nucleotide sequence isolated from the Sargasso Sea
ggttggtggagttactccaaaaaaaggaggaacagagcacttagggttgccggtatttgatacagttaaagaagccaaagataaaacggatgcgaatgccactgtaatttatgttccgcccccatttgccgcaaaagcaattttagaggcaatagatagtgagatgaacctaatagtttgtataacagagggaattcctgttatggacatgctagaggtcaaagataaattaagatcttccaaatcacgtctcattggccccaattgtccgggaattataactcctgatgagtgcaagattggtataatgccagcacatattcatcaaaagggaaatgttggaattgtatctaggtctggaacactaacttatgaggcagtttatcaaacaactgtggaaggccttggacaatccacctgtattggaatagggggcgatccagtgaatggaaccaactttattgattgtttggaacttttcttatccgatccagaaactgagtcaataatcatgattggtgaaattggtggttcagctgaggaagaagcagctgaatttttgagaaaagaaaaggtaaaaaagccaaccgttggatttattgcgggaacgtcagcccctccaggaagaagaatgggacacgctggagcaattgtatctggaggtaaaggtggagcagaagataaaattgaagccatgaagagtgctgggattcaaatttcaaattctccagcagctttaggatcaactttacttgaggtattaaagaatcaaaactaaa

SEQ ID NO: 308181 - DNA, 775 bp, Unknown
  Bacterial polypeptide expressing nucleotide sequence isolated from the Sargasso Sea
tttagtaggtggtgttaccccaaacaaaggcggacaaacgcatttaaatcttccgatattcaatactgtaaacgaggcaaaaaataaaactggtgctaatgctacaatgatttatgtgccaccaaaatttgcaggtaatgcaatcatagaggctgttgaagctgaaattgaattaatagtatgcataacagaagggataccaatacttgatatgctaaaagtaaaaaaaaaattaattaaaagtggttcacgtctaattggaccgaattgtcctggcattattaccccagaagaatgcaaaataggtattatgcctggtagtattcataaaaaaggaagtgttggaattgtatctagatcaggtacattgacttatgaagctgtggcacaaactacggctaatggaatgggccaatcaacttgtattggtattggaggggacccaattaatggtacaaattttattgattgcttagaactttttttaaaagatgatcaaactagatcaatcgtcatgataggagaaattggtggaaaagccgaggaagaagctgcttcttttataaaaaaagaaaaaataaaaaaaccaatggttggttttattgcaggtctaaccgcgcctccaggaagaagaatgggacatgcaggtgcaattatttctggcggtaaaggaggcgctgaagataaaattgaatttatgaaatcagctgggataactatatcaaaatctccagcagatataggcaaaacattatttgacaaacttaacagttga

SEQ ID NO: 308182 - DNA, 774 bp, Unknown
  Bacterial polypeptide expressing nucleotide sequence isolated from the Sargasso Sea
taacaccaggaaaaggaggctctaagcatttagatttaccggtatttaatacagttaaagatgctgtgaatgaaacaggagctgatgcatctattttatttgtacccccagcttttgctgccgactcagcaatggaagcagctgacgccggaattaaaatatgtgtagctatagttgacggaataccttctcacgacatgatcagaataaaaaggtacatgagaagatacactaaaagttctaaaatgacattagttggaccaaactgtgctggaattattagtccaggaaaatcaatgttaggtataatgccaggtcatatatataaagaaggaagagtcggaattattagtaggtcaggaacattaggctatgaagctgcccaacaactaaaaaacttgaatattggtgtttcgacaagtgttggaattggaggtgatccaattaatggtagctcatttagagatataattgaaaagtttgaaacagatgaagagaccgatgcaatattaatgattggtgaaattggtggcccacaggaagtagctgcaggagaatttgcaaaagaaaatatgaggaaaccagttatagcatacatagctggattaaccgcaccaaaaggaagagtaatgggtcatgcaggagcaatagtctcagcttatggagaaagtgcgattgaaaaagttgaaattttaaaagagtgtggaattacaatttctaaaaacccatcagttatgggtgatacagtaaagtcagttctagaaaaaatgtaat

SEQ ID NO: 308183 - DNA, 733 bp, Unknown
  Bacterial polypeptide expressing nucleotide sequence isolated from the Sargasso Sea
ttatcaagaccagtttttaatactgtaaaagaagcaaaaaaagaaactggtgcaaatgcttctatgatttatgttcctgctaaatttgctgcatctgcaatcatagaagcacttgatgctgatattgaattaatagtttgtataactgaaggaataccagttttagatatgttgagagttaagaaaaaattagcaaactctaattcaaggttaattggcccaaattgcccaggaattattaccccagaagaatgtaaaattggaataatgcccggcaatattcataaaaaaggttctgttggaattgtatcaaggtctggaactttaacttatgaagccgtggcacaaacaactgaaaatggattaggtcaatcaacatgtattgggattggtggcgatccaattaacggaaccaattttatagattgcctggatttgtttttaaatgataaggaaacaaaatctatattaatgataggtgaaataggtggagtagctgaggaagaagcagcagaattttttaaaaaccacaaaataaaaaaacctacggttggttttatagcaggaattactgctcctccaggaagaagaatgggtcacgcaggagcaataatttctggaggtaaaggcggagccgaagacaaaataaaaaaaatggaagattgtggcataacaattgcaaaatcgcccgcagaaattggaaaaacattattaaacaaattgtctaattgaa

SEQ ID NO: 308184 - DNA, 388 bp, Unknown
  Bacterial polypeptide expressing nucleotide sequence isolated from the Sargasso Sea
ataggatgtatggtaaacgtgcagggattagcaatggctacaatggatatcataaagctttatggtgaagagcctgcaaattttttagatgtaggaggtggagcatcaaaagaaaaagtttctgctgcattcaaaattattttatcagataaaaatgttaaaggaatattgataaatatttttggtggaattatgagatgtgatgtacttgcgcaaggtgttgtagatgcagcaaaagaaattaaaattaaagttccgttagtagtgagattagcaggaacaaactttgaagaaggaaaaaagatattagagaattctggtttaaaaattatatctgcaaatgacttatcagatgctgcaaaaaaagttgtagaggcaataaaataat

SEQ ID NO: 308185 - DNA, 606 bp, Unknown
  Bacterial polypeptide expressing nucleotide sequence isolated from the Sargasso Sea
aatgagtattttagtaaatgatcagacaagggtattagttcaaggatttaccggctcccaggctacattacactcagaacagtccattgaatatgggaccaacatagttggtggggtaacccctggcaaaggaggaacgacccatttaaacaagccagtattcaatagtgttgcagatgcagtcaaagccgaggaaccaaatgcagcattaatttttgtaccagctcctttttgcaaggattctattttagaagcagccgattcaggtatagagttaatcatttgcattactgaaggtgtgccaacgcttgatatgttgattgtgaagaaaaaaattgatgagcttggattgcgattaattggacctaattgcccaggtatcatcactcccaatgaggcaaagcttggaattatgccgggcagcatccataaaaagggtaaagttggcatcatttcaaggtctggaactttaacctatgaggccgtaaaacaaacaacagaccttggttttggacaaagctcttgcgtagggatcggtggtgaccccattccaggatcttcctttattgatatgttggaattattcaatgacgatgaggaaacaga

SEQ ID NO: 308186 - DNA, 560 bp, Unknown
  Bacterial polypeptide expressing nucleotide sequence isolated from the Sargasso Sea
aatgtctgttcttataaataaatctacaaaagttctttgtcaaggattcactggaagtcaaggtacatttcattcagaacaagctattacttatggaacgaatatgataggaggggtcacacctggcaaaggaggttcaaagcatcttggattgcctgtttttaatacagttttagaggctgtaaacgaattagatgttgatgcatctgtcatatatgtccctccccgttttgcggctgactcaatacttgaagctatagatgctaaaatacctctcataatttgtattactgaaggtattcctgtacaggacatgattaaggttaaaaaatttttaagtaactctaaaagcagattggttggacctaattgtcctggaataattactcctggagaatgtaaaatagggataatgccaggacatatccacttacctggtaaaattggaattgtttctagatctggaactttaacatatgaggccgttgcacaacaacggatgttgggtaggtcaatcacttgtataggtatagggggagatcccactaatggaacaaatt

SEQ ID NO: 308187 - DNA, 703 bp, Unknown
  Bacterial polypeptide expressing nucleotide sequence isolated from the Sargasso Sea
aatgtcaattttagtagataaaaataccaaagtaatttgccagggttttacaggaaaacatggtacttttcattcagaacaagctttgaagtacaaaactaaactggttggaggtgttacaccaaaaaaaggtggtcaaaaacatttagacctacctgttttcaactcagttgaagaagctaaaagtcaaacaggcgcaaatgcaactatgatatatgttcctccaaaatttgctggagctgctataatagaggcaatagaggccgaaatggagttgattgtttgtataactgagggaattccagtcttagatatgttgagagtgaagcaaatcttagaaaaaagtaaatcaaggttaattggacctaactgtccaggcataattacacctgaggaatgtaaaattggaattatgccaggaaacattcataaaaaaggatcagtgggcattgtttctaggtccggcactttaacttatgaggcagttgctcaaacatcatcaaatgggatgggtcaatctacctgtattggaatcggtggtgatccaattaatggaacaaattttattgactgtttagaattatttttaaaagatgaggagacaaaatcgatagtaatgattggagaaataggtggatcagctgaggaagaagcggcagaattcctgaaacgagaaaagatcaaaaaaccaatggttggattt

SEQ ID NO: 308188 - DNA, 874 bp, Unknown
  Bacterial polypeptide expressing nucleotide sequence isolated from the Sargasso Sea
gttgagtattttaattgataaagataccaaagtaatttgtcagggttttactggtagtcaagcaactcaacactgtattcagtgcatagattatggcactcaattggtaggaggagtgactccaggaaagggagggcaaacacacctagatttacctgttttcaattctgttaaagaggcagtcagtcaaaccgaagcaacggccactattatttttgttccagctcgtttttgcaaggcttcaatacttgaagctgcggaatcagggatatctttaataatatgtattactgaaggaatccctacaattgatatgcttgaggttaaagttagatgtgacaatctgggagtaaggctaataggacctaattgtcctggaatcattactccaggcgaatgcaagatggggattatgcctggtgatattcatcttccaggtaaagttggagtgatatctagatcaggcactcttacttacgaagccgtcaaacaaacaactgacttaggctttggacaaacaagttgtgtgggaattggaggagatccagtgcccggatcaagttttatagacatattagatttattccaaaatgatcataaaacagaagcaattgttatggttggagaaataggaggaaccgcagaagaagccgctgctgagtttatccaatcaaatgtaacaaagcctgtggtttcctatattgccggggtaacagctccagcgggaaaaagaatggggcatgctggtgccataattgcggggggtaagggaacagctgaagataagtttaaagccttagaggcagccggagtctacactgttaaaagccccgcagacataggaaagggtgtagctgagataacgggatggtaa

SEQ ID NO: 308189 - DNA, 376 bp, Unknown
  Bacterial polypeptide expressing nucleotide sequence isolated from the Sargasso Sea
aatggtgcaggcttagccatggctactatggacatcataaaacttgctggcggagaacccgcaaatttcttggatgtaggtgggacagcaagctcagagacagtaaaaaatggattcagaattattttatctgacaaaaatgtaaaatcaattttaatcaatatttttggtgggattgtcagatgcgaccgtgtagccaaaggcgttgtggaggcagttaaagagttggggctaaacgtcccgatcgtagtccgcttgcaagggacaaatgctgaagaggctaaaattatattaaagaaaagtaacgtttcagtcatcccggctgatggaatgaaggatgcagcagagaaagctgtgatcaaaacaaaaaattaaa

SEQ ID NO: 308190 - DNA, 556 bp, Unknown
  Bacterial polypeptide expressing nucleotide sequence isolated from the Sargasso Sea
aatgtcaattttaataaacaagagcacaaaagttatatgccagggatttacaggtacccatgggacttttcattctgaacaagcaataaaatatggaacacaattagtaggcggtgtaactccaaaaaaaggaggtcagaaacaccttggtcttcctgtttttaattcagtcatagaagcaaaagaaaaaactggagctaatgccacaatgatttatgtgcctccaaaatatgcagcagccgcaatattagaagcaatcaatgcaaatttggatttaattgtatgtatcacagaaggaataccagttattgatatgatcaaagttaaacaatctctatctaaaactagcagtagattaattgggccaaactgtcctgggataataactcctaacgaatgtaaaataggaataatgcctggaaacattcataaaaaaggatcagtgggaattgtgtcaaggtctggaacactcacttatgaagcggttgcacaaacttcaaaaaatgggcttggacaatcgacatgcattggtattgggggagatccaattaatgga

SEQ ID NO: 308191 - DNA, 788 bp, Unknown
  Bacterial polypeptide expressing nucleotide sequence isolated from the Sargasso Sea
aaatatggtactaatcttgtaggcggcgttactcccaaaaaaggaggacaagttcatttagaaagacctgtatttaatactgttcaagatgctaagaatgcaacaggtgctaatgcaactatgatctatgttcctgctaaatttgctgcggcagccataatagaggcaattgatgcttcaatggaattaattgtttgtatcactgaaggaattccaattttagatatgttaaaagttaaacagaaattacttaaatcaaattcaagattaataggaccaaattgtcctggaattattacaccagacgaatgtaaaattggaatcatgcctggcaacatacataaaagaggatctgttggtattgtttctaggtcaggaactttaacttatgaagcagtagctcaaacgacagaaaatggactaggacaatctacttgtgtaggtattggcggggacccaatcaatggaacaagttttattgattgtttagatttatttttaaaagaccctgaaactaaatcaattttaatgataggagaaataggaggctctgcagaggaagaagcatctgattttcttaaaaatcataaattaaaaaaacctactgtgggatttgtagctggacttaccgctcctcctggaagaagaatgggtcatgctggggctataatatcaaagggaaaaggtggagcagaacaaaaaattaaaattatggaagaagcagggataacagttgcagaatcacctgctgaattaggcaaaacactcttaaacaaattgtcacttta

SEQ ID NO: 308192 - DNA, 811 bp, Unknown
  Bacterial polypeptide expressing nucleotide sequence isolated from the Sargasso Sea
tatgtcgatattagtgaataaaaatacaaaacttatttgtcaaggtttcactggttcccatggaacatttcattctgaacagtcaattttgtatggcactaatttagtcggaggagtgacaccccgaaagggaggccaaacacatcttggtaaaccagtatttgatacagtaaaggaagctaaagaaaagactggtgcaaatgccactatgatttatgttccagcaaagtttgcagcaaatgcgattattgaagcaatagatgcatcaattgaaattatagtttgtgttactgagggaattccaattattgatatgttgaaggtaaaaaaatctttatctaaatccaattcaagattaattgggcctaactgtcctggcataattacacctgatgaatgtaaaattggtatcatgcctggaaatatccacaaaaaaggatcagttggaatagtttcaagatctggaacactcacttacgaggctgtagcacaaacaacagctaatggactaggtcaatcaacatgcatcggtattggaggagacccaatcaatgggacaaattttatagattgtttggatttatttttgaaagacgaaagtacaaaatcaattgttatgattggtgaaattggtggaagtgccgaggaagaggcagctgaatttatctctaaacatgaaataaaaaaaccaatggttggttttattgctggcctcacagcacccaaaggtaaaagaatgggacatgctggagcaattatttctggtgggaaaggtggagctaaagaaaagataaaaatttgcaaaaagcag

SEQ ID NO: 308193 - DNA, 537 bp, Unknown
  Bacterial polypeptide expressing nucleotide sequence isolated from the Sargasso Sea
aatgtcaattttagttaacaaaaacacaaaagttatttgtcaaggttttaccggtggccaaggtacatttcactctgaacaagctattgcttatggtactaatatggttgggggtgtgacaccaggtaaaggtggtacgaggcatttagatttaccagtatttaatacagttaaagaagctaatgagaatttagaaatagatgcttcagttatttatgttcctccaccatttgctgcagactctataattgaagcaattgatgcaaaaataccattaataatttgtataacagagggtataccagttcaggatatgataagcgtaaagaattttctgaaagattctacttcaagacttataggcccaaattgtcctgggataattacacctggagaatgtaaaattggtattatgcctgggtcaattcataaaccaggaaaaataggaattgtatctagatcagggacattgacctatgaagccgttgatcaaacaactgctgtgaatttaggacagtcgacttgtgttggcatagg

SEQ ID NO: 308194 - DNA, 694 bp, Unknown
  Bacterial polypeptide expressing nucleotide sequence isolated from the Sargasso Sea
ttttaaaattagtgatagtcttcaaaataaattaaatttttctattaatgagtttaaccaatttaaagaaattgtttcaaatttatgtaaggcctatgtcgaaatagatgcttctttaattgaaattaatcctcttgttgtgacaaaagatgaaaaactaattcttttagatgctaaaattaatattgatgataatgctctgtatagacaggctgacattgaaaaattaaaagatacttcagaagaaaatgatttggaacttgaagcttctgaaaacgatatggtttacattaagcttgatggaaaaataggctgtatggttaacggagcgggactggctatggcaactatggatattattaaacaatttggaatggagccagccaattttttagatttaggtggtacagcaaataaagaaagagccattaaagcttttaagatcattcaatcagataaaaatgtcaaatcagtcttcataaatatttttggaggaattatccattgtgatatgattgcgaatggcatcattgatgtaattaaagaattagaatttaaacttcctgttgttgtacgttttcaaggaacaaattctaaagaaggaagagatattataaataattcatcattaggattaatttcaattgatgatttttcaaatgcagctcagaaagttgtggagttatcagaatag

SEQ ID NO: 308195 - DNA, 631 bp, Unknown
  Bacterial polypeptide expressing nucleotide sequence isolated from the Sargasso Sea
aatgtcggttttggtaaataaaaatactaaagtaatttgtcagggatttactggctcacacggaacatttcattcagagcaggctataaaatatggaaccaatcttgttggtggagttacgccaaagaaaggtggacaaaaacatttagacagaccagtttttaatagcgttttagaggcaaaaaatgaagtaggagcggatgcaactatgatttatgtacctgctaaatttgcagcagcagcaatcattgaagctattgatgcatcagttgaactaattgtttgtataacagagggtattccaattcaggatatgcttaaggtcagacaaaaattaagtggatctagtagcagattaattggacctaattgtccaggaataatcacaccagatgaatgtaaaattgggattatgccgggaagtattcacaaaagaggaagtgttggaattgtatcaaggtcaggaacattgacatatgaagcagtagcccaaacaactgaaaatggacttggtcaatcaacttgtattggtattggtggtgatcctattaatggaacaaattttatagattgtttagatttatttttaaatgactctgaaacagaatctattttaatgataggtgaaatt

SEQ ID NO: 308196 - DNA, 628 bp, Unknown
  Bacterial polypeptide expressing nucleotide sequence isolated from the Sargasso Sea
atgtctgtactagtaaataaaaatacaaaattgatttgtcagggttttaccggtgctcaaggaactttccattctgaacaagcaataaaatatggaactaatttagttggaggagttactccaaaaaaaggaggtcaaactcatttaggtagaccagtttttaatactgtgaaagaagctaagattgatactggttcaaatgctacaatgatttatgtgccagcaaaatttgctgcaagcgcaataatcgaagctatagaagcgtcaatggaactaattgtgtgtataacagagggaattcctgtactagatatgttaagggtcaaaagaaaacttttaaattctagctcaagattaataggacctaactgccctggaataataactcctggtgaatgtaagataggaataatgccaggaaacattcataaaaaaggatcggttggtattgtatcaaggtcagggactttaacgtacgaggctgttgctcaaactactgaaaatgggctgggacaatcaacttgtataggtataggtggagatccaataaatggtactaattttattgattgtctagaattatttttaaatgatgatgaaacaagttcaatattaatgattggagaga

SEQ ID NO: 308197 - DNA, 619 bp, Unknown
  Bacterial polypeptide expressing nucleotide sequence isolated from the Sargasso Sea
aatgtcagttctagtaaataaaaatactaaattaatatgtcagggcttcactggttcccatggaacttttcactcagagcaagcattaaaatatggtactcagctagtgggtggagttactcctaaaaaaggaggtcaaaaacatctgggacttccagtatttaacactgtcgaggaagcaaaagcggtaacaaaagctaacgctacaatgatttatgtaccacctaaatttgcagcctctgcaattatagaagcgatttatgctaaaattgaattaattgtgtgtattacagaaggtattcctgtaatagatatgttaaaagtaaaaaaaattttgagaggaagtgctagcaggttaatcggacctaattgtcctggtataataactccaaatgaatgtaaaattggaattatgcctggtagtattcataaaaaaggatcagtaggaattgtatctagatcaggcacgcttacctacgaggctgttgcccaaacttctgtaaacaatctaggccaatcaacttgtattggtatcggcggagatccgattaacggaacaaactttatagattacttagagttatttttgaaggatgacgaaaccaagtcaattgttatg

SEQ ID NO: 308198 - DNA, 937 bp, Unknown
  Bacterial polypeptide expressing nucleotide sequence isolated from the Sargasso Sea
tttagttactcctcagacaccaccagaaggtaaaaaagtaaataaagttttggttgcagaagatgtttattatgctggagattctgaaccaaaggagttttacgtgtcagttttattgaatcgaacgagtggaaaaaatatgataatgtactcaactgagggtggaatggatattgaatcagttgcagctaacacaccacatttgattttttatgaagaaattgacccagcgatgggtcttattccttttcaagctcgcaaagttgcttttaatttaggactcaagaataaagcttttaaatcaatgataaaatttataactaatttatacaatgcatatgttggatctgatgcaacattatttgaaattaacccagtccttaaaacttcagatgacgagataattgcagttgatgcaaaagtaagtattgacgataacgccatgttccgacataaggactaccataaattaagggatttagaggaagaaaatcagatagaggttgaagctgacaaagcaggtttaaattatgttgatttagatggtaacgtaggttgtatggttaatggtgctggtctagcgatggctactatggatttgataaaacaatcaggcggttctcctgctaattttttagatgttggagggacagctgatgctaaaagagttgaacttgcttttcgtcttattttaaaggatccaaatgtaaaagctattttggttaatatttttggtggtatagttcgatgtgatagggtagcgcagggtattattgatgcatacaagaatattggagataatataaaggtgcctatcattgttagattacaaggaacaaattcagattctgcaaaaactctaattcaaaattcaaacttggatgttatagcggctactgcatttgaagaggcagcaatgaaagtcaagaagtattaa

SEQ ID NO: 308199 - DNA, 584 bp, Unknown
  Bacterial polypeptide expressing nucleotide sequence isolated from the Sargasso Sea
aatgtcagtattagtaaataaaagtactaaagtaatatgtcagggtttcactggaaaacatggaacttttcactcagagcaagctataaagtatggaactcaattagttggaggcgttactccaaaaaaaggaggacatacgcatttaaatttaccagtttttaatactgttcaggaagcaaaagataaaaccttagcagatgctactatgatctatgtcccaccaaattttgctggagctgcaattatagaagcaatcgaagcaaagattgcactgatagtatgtattactgaagggataccagtcatagatatgcttaaagtaaaaaaaattttaagcaaaagcgattcacgattaattggaccaaattgtcctggtattatcactcctgatgaatgtaaaattggaatcatgccaggaagcattcataaaaaaggatcagttggaattgtttctcgatctggaacattgacatacgaagctgttgcccaaacatctgcaaataatatggggcaatcaacttgtattggcattggaggagatcctattaatggtactaatttcatagattgtttaaaacttt

SEQ ID NO: 308200 - DNA, 775 bp, Unknown
  Bacterial polypeptide expressing nucleotide sequence isolated from the Sargasso Sea
aggtgcacaaggaaaaaaagtccttaaagtttatatagaacaagcttgtgaaataaaaaaagaattttatttaggtattgtcctagataggtccaaaggaaagtttgtcatgatggcttctacagaaggtggcatggatattgagaaagttgcagaggaaactccaggaaaaatatataagataattatagacccatcagaaggaataaaagattatcaaatcagacaactaggctttaatttactcatacctagggaggcttttaaaagtttttcaaaacaagttaatttgttatctaagttggcgagtgaaaaagattttactttagtggaaattaaccctttaatcttaacgaatcaaaatgaagtaatggcattagatgccaaagtaaatattgatgataatgctttattcagaaatcaagacttaaaggatcttcttgatgaaacagaagtagatccaaaagaattagaagctgagaaatatgatcttagctatgttaaacttgacggaaaaataggttgtatggttaatggagctggattagcaatggcaaccatggatataataaaattaaaaggttcttcgccagctaattttcttgatgtaggcgggggtgcttccaaagaaaaagttaaaggagcttttcaaataattatttctgataaagatgtagaggcaatattggtaaacatttttggagggataatgagatgtgatattatcgcagagggaattgtcgaagcagcaaaagaaattaatctaaataaacca

SEQ ID NO: 308201 - DNA, 864 bp, Unknown
  Bacterial polypeptide expressing nucleotide sequence isolated from the Sargasso Sea
aatgtcagttttagttaataaagatactagattaatttgccaaggttttactggatcacatggaacattccattccgagcaagcaattaaatatggaacaaaattagttggtggagtcacaccaaaaaaaggtggacaaaaacatttaggactccctgtttttaatacagttaaagaagcaaaagaatctgaaggtgctaatgccacaatgatttatgttcctgcaaaatttgcagcagctgcaattattgaatcaattgaagcatcaattgaactcattgtctgcatcacagaaggtattcctattcaagatatgcttaaagttaaacaaatattaacgaagtcaaattcaagattgattggcccaaattgcccaggcattataactcctgatgaatgcaagatcggtattatgcctggtagtattcataaaaaaggatctgtaggtatagtctctagatcaggtacacttacttatgaagccgttgcacaaacaacagaaaatggtcttggccaatcaacttgtattggaattggtggggacccaatcaatggcacaaattttatagactgtttagatttatttttaaatgatgaagaaacagagtcaattttaatgattggtgaaataggaggtgctgcagaggaggaagctgcagaattcataaaaaaccataaaataaaaaaaccaatagttggtttcatagcaggagtgacagctccacctggtagacgaatgggtcatgctggagcaattatctctggtggtaaaggtggtgcacaagataaaataaaaaaaatgcaagattgtggcataactatcgcaaactcaccttcgaaaattggaaaaactctctttgataa

SEQ ID NO: 308202 - DNA, 433 bp, Unknown
  Bacterial polypeptide expressing nucleotide sequence isolated from the Sargasso Sea
ggtatagtttctagatcaggcacgttgacgtatgaggcagtcgctcaaaccactgaaaatggtttaggccagtctacttgtataggtataggtggagatcctataaatggaactaattttatcgattgtttagatttatttttaaatgatgatgaaacagagtcgattttaatgattggagaaattggaggttctgctgaggaagatgcttcagaatttattaaaaatcacaaaataaaaaaaccaattgtgggttttattgccggaattactgctcctccaggcagaagaatgggacatgcgggagcaataatttctcaaggaaaaggtggagcagaggataaaattaaaaagatggaagattgtggtataactatagcaaactcaccatcaaaaattggagaaacattattcaataaattgtctgattgaa

SEQ ID NO: 308203 - DNA, 310 bp, Unknown
  Bacterial polypeptide expressing nucleotide sequence isolated from the Sargasso Sea
ggatataatcaagttatacggtcaagaaccagcaaattttttagatgttggcggaggggcatcaaaagaaaaagtttcagctgcatttaaaataatattatcagataaaaatgtgaaaggaattttaataaatatttttgggggaatcatgagatgtgatgttcttgcacaaggggttgttgatgctgcaaaagaaattaaaattaatgttccattagttgtaaggttagcaggaacaaaatttgaagaaggaaaaaaaattctagataattcaggattaaaaattatatctgcagcagacttatctgat

SEQ ID NO: 308204 - DNA, 538 bp, Unknown
  Bacterial polypeptide expressing nucleotide sequence isolated from the Sargasso Sea
attaattcttttggatgccaaaattactttagacgataattcattgtttcgtcaccctgaattgttagcgcttaaagacttaagtgaagaaaatgagatggaattggaggcttcaaacaatgatatgaattatataaaacttaatggcgaaattggttgtatggttaatggggcaggtttagctatggcaactatggatataattaaacaatttggcaaggaacctgcaaattttttagatttaggaggtaccgcaaataaagaaagaacaattaaaggttttaagattattcaatctgatcataatgtgaagtcagtccttgttaatatatttggaggcattattcattgtgatatgattgcatctggaattattgaagctgttaaagagttgcattttaatttgccaatagtagttagattccaaggaactaattcgtcagagggcagagatattataaataattctaaaacaaatatcatttcagtagatgattttactgaagctgcaaaaaaagcagttgaactatcagcctga

SEQ ID NO: 308205 - DNA, 589 bp, Unknown
  Bacterial polypeptide expressing nucleotide sequence isolated from the Sargasso Sea
aatgtcagttcttgttaataaagatacaagagttatttgccaaggctttactggatcacatggaacatttcattctgaacaagcattaaaatatggtacaaatttagttggaggggttacaccaaaaaaaggtggtcaaaagcacttaaacctacctgtttttaatacagtcaaagaagcaaaggattctgagggtgcgaatgctactatgatctatgttcctgcaaaatttgctgcaactgctataattgagtctatagatgcctcaattgaattaattgtttgtattactgagggaattccaatccaagatatgcttaaagtaaaacaaaaattgtctaaatcgaaaagtagattaataggtcctaactgcccaggaattataactcctgatgaatgtaaaattggcattatgcctggaagtattcacaaaaaaggatcagttggtatagtttctagatcaggtacgttgacgtatgaggcagttgctcaaaccactgaaaatggtttaggccagtctacttgtataggcataggtggagatcccataaatggaacaattttattgattgtttgggattatttttaa

SEQ ID NO: 308206 - DNA, 759 bp, Unknown
  Bacterial polypeptide expressing nucleotide sequence isolated from the Sargasso Sea
acccaaaaaaaggtggcctaaaacatttaggtttaccagtctttaatactgtaaaagaagccaaaaatgaagagggtgctaatgcaacgatgatatatgttcctgcaaaatttgcagctgcagcaatcgttgaagcaattgaagcatcaattgaacttatagtttgtataaccgaaggaatccctattcaagatatgattaaagtaaaacaaaaattgttaaattcaaactctagattaattggtccaaactgcccaggaattataacacctgaagagtgcaagattggtattatgcctggcaatattcataagaaaggatctgttggcatagtttctagatcaggtactttaacttatgaagcagttgcacaaacaaccgaaaatggacttggacaatcaacctgtattggtattggtggcgatcctatcaatggtactagttttattgattgtttagatttgtttttaaaagatccagatacccagtctattttaatgattggagaaattggtggtacttcagaagaggatgcatcagattttattagaaatcataaaattaaaaaaccaatggtcggctttattgctggactaacagctccaccaggaagaagaatgggccatgcaggggctataatttcaagaggtaaaggcggagctgaagataaaataaaaataatgcaagatgctggtataacgattgcagaatcaccagcagaaataggtaaaactttatttaacaaattgtcactttaaa

SEQ ID NO: 308207 - DNA, 403 bp, Unknown
  Bacterial polypeptide expressing nucleotide sequence isolated from the Sargasso Sea
gatgggaatgtaggctgtatggtaaatggcgctggattagcaatggcgactatggatataatcaaattagcaggtggcgatcctgcaaactttcttgatgttggtggcgcagctagcgccgagactgtaaaaaatggatttaaaatcatactttctgataaaaatgtaaaagctatcttaataaatatttttggtgggattgttagatgcgatcgtgtagctaatggagtaattaaagcagttgaggagcttggacttcaggtgcctgtcgttgtaaggcttgaagggacaaatgctgaggaagcgaaatctatccttaaagaatcaggtttgtcaataattccagctaacgacatgcaggatgctgcccaaaaagttgtagcatctgctactaaatcttagg

SEQ ID NO: 308208 - DNA, 606 bp, Unknown
  Bacterial polypeptide expressing nucleotide sequence isolated from the Sargasso Sea
tatgtcagttttagttaataaaaatacgaaagttatatgccaaggctttacaggatctcatggaacttttcattctgaacaggcaataaaatatggaacaaatttagttggtggagttacaccaaaaaaaggaggacaagttcaccttcaaagacctgtatttaatacagtcaaagaagccaaggaaaatacaggagctaacgcttctatgatttatgttccggcaaaatttgcaggaacagcaataattgaagcaatagatgcatctatagaattaataatttgtattacagaaggaattccagttctggatatgcttaaagttaaacagaaattaactaaatctaattcaagattaattggtccaaattgtccaggtattataactccagatgagtgtaagattggcattatgcctggaaatattcataaaaaaggttcagtaggaattgtttcaagatcaggaactttaacatacgaagcagttgcacaaaccagtgaaaatggattggggcaaacaacatgcattggtattggaggagatcctattaatggaacaaacttcatagattgtttggatttatttttaaatgatgaggaaacaaa

SEQ ID NO: 308209 - DNA, 340 bp, Unknown
  Bacterial polypeptide expressing nucleotide sequence isolated from the Sargasso Sea
tattataaaactttatggagaggaacctgcaaactttttagatgtaggaggaggagcatcaaaagaaaaagtttcagctgcttttaaaataattttgtccgataaaaatgttgaaggaattttaataaatatttttggaggaataatgagatgtgatattttagcccaaggtgttgttgatgctgctaaagaaatcaaaattaatgttccgctagttgtaagactagcaggaactaattttaaagaaggtaaaaaaatattagacaattctggtttaaaaattatttctgcatcggatttatctgatgcagcaaaaaaaatagttaaagaaataaggtaa

SEQ ID NO: 308210 - DNA, 643 bp, Unknown
  Bacterial polypeptide expressing nucleotide sequence isolated from the Sargasso Sea
atgtcagttttagttaataaagaaacaagattaatttgccaaggttttactggttctcacggaacatttcattctgaacaagcaatcaaatatggaacaaaattagttggcggggttacaccaaaaaagggtggacaaaaacatttaggattacctgtttttaattctgtgaaggaagccaaagattctgaaggagcaaatgctacaatgatttatgttcctgcaaaatttgcggcagctgcaattattgaggcaattgaagcttcaattgaacttattgtttgtataactgagggtattcctattcaggatatgttgagagtaaaacaaagattattaaaatcaaaatcaagattgattggtccaaactgtccaggaataataacacccgatgaatgtaagattggtattatgcctggaaatattcataaaagaggaagtgtaggtattgtttctagatcaggtacattaacttatgaagcggttgctcaaacaactgaaaatgaacttggtcaatcaacttgtattggtattgggggtgatcctattaacggtactaattttatagattgtttggatttatttttaaatgatgatgaaacggaatcaatattaatgataggtgaaattggaggcactgcag

SEQ ID NO: 308211 - DNA, 631 bp, Unknown
  Bacterial polypeptide expressing nucleotide sequence isolated from the Sargasso Sea
atgagtatacttgttaataaaaattcaaagatcattgtacagggttttactggctctgagggtacatttcattcagaacaaatgattgattacggaactaatgttgtaggcggtgttacacctggaaaaggtggtaaaacccatttagaaaaacctgtttttaatactgttaaagacgcagtagaagaaacaggtgcaaatacttcaataatttttgtacctgcaggttttgctgctgatgcaattcttgaagctgcagatgccggaattgaagttattgtagctattactgaaggaatacctgtttctgacatgtcaagagtctattcctacataaaagataaaaactgtactcttatcggtcctaattgccccggaattataacacctaatgaagcaaaagttggtattatgccaggatttgtttttaaaaaggggagagtaggtctagtttcaaaatctggaactttaacttacgaagctgctgatcaaatttctaaagctggttatggaatttcaactgctattggaattggaggtgatccaataattggtactacagtaaaagaagcagtccaatatttcttcaatgaccccgaaactgattgtgttgtcatgatggagaaatagg

SEQ ID NO: 308212 - DNA, 601 bp, Unknown
  Bacterial polypeptide expressing nucleotide sequence isolated from the Sargasso Sea
aatgtcaattttggttaataaaaatacaagacttatatgccaaggatttactggggctcatggcacgtttcattccgaacaagcaattaaatatgggacaaatttagttggaggagtaactccaaaaaaaggagggcaaacacatctagatagaccggtatttaatacagttaaagaagctaagaaaacaaccaatgcgaatgcaactatgatttatgttccagctaaatttgcatcttcagcaattatagaggcaattgatgcctccatagaacttatagtttgcattactgaaggcattccaattctagatatgcttaaagttaaaaagtatttgtctaattcaaattcaaggctgattggcccaaattgtcctggtataataacaccggatgagtgcaaaattggaattatgccaggaaatattcataaaaaaggaagtgttggaatagtttctagatctggaacattaacgtatgaagcggtagcacaaacaacagaagttggattaggtcaatctacatgtgtaggaataggaggtgatccaatcaacggaactagttttatagactgcttggatttatttctaaatgacgaagat

SEQ ID NO: 308213 - DNA, 376 bp, Unknown
  Bacterial polypeptide expressing nucleotide sequence isolated from the Sargasso Sea
ttaatgggagctgggttagcgatggcaacaatggatataataaaagcgtttggagaagaaccggctaattttcttgatgttggaggtggagcatctaaagaaaaagtttcagcagcattaaaaataattttatcagacaaaaatgtaaagggaattttaataaatatatttggtggaataatgagatgtgatgttttagctcaaggagttgttgaagcagcaaaagaaataaagattcaggttcctttagtagtaagattggcaggcacgaactttgaagaaggaaaaaaaatattagataaatctaatctaaaaattatttctgcagaagatttatccgatgcagcaaaaaaaattgtaaaggccattaaataaa

SEQ ID NO: 308214 - DNA, 703 bp, Unknown
  Bacterial polypeptide expressing nucleotide sequence isolated from the Sargasso Sea
atgtcagtgcttataaataaagaaaccaaggttatttgtcagggatttacaggaacccacggaacatttcattctgaacaggctttaaattatggcaccaaacttgttggtggtgttacaccaaaaaaaggtggacagaaacatttaggtcttccggtatttaataccgttattgaggctaaggaaaaaactggtgcaaacgcaacaatgatttatgtccctcccaagttttctgccgatgcaataattgaagctattaatgctgatctagatctaatagtttgtataactgagggcattccaataatagatatgattaaggtcaaacaagaattaataaaaagtaaaagtaaattaatcggtccaaattgcccaggtataataactcctgaggaatgtaaaattggtattatgccaggtaatattcataaaaaaggctctgttggaattgtttccaggtcaggtacactgacttatgaagctgtcgctcaaacatcccacaatggtttaggtcagtccacttgtattggaattggtggagaccctattaatggtacaaattttatagattgtcttgaactttttctcaaagatgatgacactcattcaatcataatgataggggaaattggtggttcggctgaggaagaagcatctgaatttttgaaaaaatctaaaattaaaaaacctacagtcggattta

SEQ ID NO: 308215 - DNA, 706 bp, Unknown
  Bacterial polypeptide expressing nucleotide sequence isolated from the Sargasso Sea
actgttgaggatgctattgaagaaactggtgcaaatacagcaatgaccttcgtaccaccaccatttgccaaagatgcagttttagaggcagcatatgcaggttgtgagttaattgtttgtattactgaaggtattccagcaaaagatgaggctgaaatgtatgatcttttgaaacaaaaaacatcttcaagattattaggtcctaactgtccaggtttaatttctccaggcaaatcaaatgttggaattatgccgcatgaaattacaatggaaggcaaagttggtgtagtgtcaagatctggaactttaacttatcaagcagttcttgaattgacaaatctcaacatcggtcaatcaacttgtataggcattgggggtgaccctgttcctggtacctcattcatagatgttttagatgcttttcagaacgatattcaaactgaagcaattgtaatgattggagaaataggcggaagtgctgaagaggaagctgctgagtttattaaagataatgttactaaaccggttgtttcatatattgctggacttacagctcctcccggtaaaaagatgggacatgcaggcgcaattgtttctggaaataagggtactgcgagtgctaaaattgaagcacttactgatgctggtgcaaatgttgtgaaaaaccctaccagaattggccaagcaattaaggatgtaatatgaa

SEQ ID NO: 308216 - DNA, 889 bp, Unknown
  Bacterial polypeptide expressing nucleotide sequence isolated from the Sargasso Sea
atgactgtattaattgataaaaacagtaagataattattcaaggatttactggtaaaatgggctcttttcatgcagatgagatgataaaatatggttcaaatgtagttggcggagtaactccaggaaagggtggttctaaacacctaaatttgccagtgttcaatacagtgaaagatgctgttaatgaaacaggagcagatgcatcaattttatttgtaccaccggcttttgcagcggactctgcaatggaagcagctgactctgggattaaaacctgtgtagcaattgttgatggaataccttctcacgacatgatcagaataaaaaggtacatgagaagatacattaaaagttctaaaatgacattagttggaccaaactgtgctggaatcattagtccaggaaaatcaatgttgggcataatgccaggtcatatttataaagaaggaaaagttggaattattagtaggtcaggtacattgggttatgaggccgctcaacaacttaaaaatttaaatataggtgtttcaacaagtgtaggaattggaggagatccaataaatggaagttcatttagagatataatagaaaagtttgaaacagatgatgagaccgatgcaatattaatgattggtgaaattggaggtccccaggaagtagctgcaggagaattcgcaagagaaaatatgaagaaaccagttattgcatatatagcaggattaactgcaccaaaaggaagagtgatgggtcacgcaggagcaattgtctcagcttatggtgaaagtgcaattgaaaaagttgaaattttaaaagagtgtggaattacaatttctaaaaatccatctgttatgggtgatacagtaaaatcagttctagaaaaaatataat

SEQ ID NO: 308217 - DNA, 424 bp, Unknown
  Bacterial polypeptide expressing nucleotide sequence isolated from the Sargasso Sea
caatatgatctagcctatattaaattagatggaaaaataggatgtatggtcaacggcgctggtcttgcgatggcaacaatggatattattaaattatatggagaagagcctgcaaactttttagatgtgggtggtggagcttcgaaagaaaaagtttcagcagcatttaaaataattttatcagataaaaatgttaaaggtatattaataaatatatttggaggaataatgagatgtgatgttcttgcaaaaggattagttgaagcagcaagagaaattaaaataaatgtaccactagtaattagattggctggaactaattataaagaaggtaaaaaaatattagataattctggactaaaaattatttcagcatcagatcttggagatgcggcagaaaaagtagttaaggcaataaaataaa

SEQ ID NO: 308218 - DNA, 808 bp, Unknown
  Bacterial polypeptide expressing nucleotide sequence isolated from the Sargasso Sea
tatggttctaacattgttggtggggtaacacctggtaagggtggtatgactcatttaaatcttcctgtttttaatactgttaaagaagctgtagatcaaacaggagcatcaacatcaattttatttgtcccaccagcctttgcagcagactcagcaatggaagctgctgatgcaggtattaaaacgtgtgtggctattacggacggtattccttctcatgatatggttaaaataaaaagatatatgaggagatatccaaaagataaaaaaatgggattagtaggtccaaattgtgcaggaataattagccctggtaaatctatgttaggtattatgcctggtcacatttacaaagaaggtaaaataggaatagttagtagatctggcactttgggatatgaagcagcacaacagcttaaagatttggaaattggtgtttcaacaagtgtaggtataggtggtgatcctataaatggaagttcttttagagatataattgaaaagtttgaaaatgatgacgaaactattgcagtattaatgataggtgaaataggtggcccacaagaagttgaagctggaaaatttgcaaaagaaaatatgagtaaaccagtaattgcgtatatagcaggactaactgcacctaaaggtcgtgtgatggggcatgctggcgcaattgtttctgcttatggtgaaagcgcaatagaaaaagtagaacttcttaaagagtgtggagttacaatttccaaaaacccttctgtaatgggcgaaactgtaaaaaaagtattagtagaaaataatttgaattaat

SEQ ID NO: 308219 - DNA, 802 bp, Unknown
  Bacterial polypeptide expressing nucleotide sequence isolated from the Sargasso Sea
tttcattccgagcaagcaatcaaatatggaaccaatcttgttggtggagtcacaccaaagaagggaggacaaaaacatttaaatcttccagtttttgataccgttgaggaagcaaaaaataaaacagaagcaaatgctactatgatatatgttccgccaaaatttgcggcattagcaattacagaagcaatagatgcaaacatggaattgatagtctgtatcacggaaggaataccagttattgatatgattaaagtaaaacaaagattattgaaaagcaaaagcagacttataggacccaactgcccaggaataataacgcctgatgaatgtaagattggtatcatgccaggaaacattcacaaaaaaggcactgttggaatagtttcaaggtctggaacgctaacttacgaagctgtagctcaaacaacagcaaatggaatgggacaatcaacatgcattggtattggtggtgatccaatcaatggaacaaattttattgattgtttggaattatttttaaaggacaacgaaacacaatcaataataatgataggcgaaattggtgggtcagcagaagaagaggcatctgaatttttgagaaagtcaaaaataaaaaaaccaacagttggttttatcgctggattgacagctcctgctggaaaacgcatgggtcatgctggagcaataatttctggtggcaaaggtggagcagaaagcaaaattgaaacgatgaaattggctggaattactgtttcaaagtcaccagcagacattggcaagacactttatcaaaaactaa

SEQ ID NO: 308220 - DNA, 799 bp, Unknown
  Bacterial polypeptide expressing nucleotide sequence isolated from the Sargasso Sea
tgcttttatttctagcgctgaaggtggtgtaatattgaagaggtggcaaaaaataatttctgaaaaagttataaccacaaaaattaacttatctacaaaagttaatgaaacggacattgaaaaaataataaaacctttcagcttgtccgaaaaatctaaaaaacaggctttcaaacttattcaatcaatttatagaattttaattgataaagacgctaatcttattgaagttaatccacttattttaacaaaaaatgaggatttgatttgtcttgatgctaaaattaattttgatgataatgcgttatatcgtcatcctgatattttatctttaaaagatcctaatgaagaagacccgattgagaccgaggcaaagaaacatgatttggcttatattaagttagatggaaaaattggctgcatggttaatggtgcaggacttgcaatggcgactatggatattattgaattttatggatctaaaccggctaactttcttgatgtaggaggaggagcttcaaaagaaaaggtttcggcggcatttaaaattatattatctgataaaaatgttagtggagttctaattaatatttttggtggaatcatgagatgtgatgtacttgcacaaggagtagttgatgcagcaaaagaaactgagttatccgtaccgctggtagtgagattagccgggaccaatgtagagcttggtaaaaaaattttagaaaaatctaatttaaaaattatatctgcaaacaatttagaggatgcagcaaaaaaaattataaaggcaacaaaataa

SEQ ID NO: 308221 - DNA, 663 bp, Unknown
  Bacterial polypeptide expressing nucleotide sequence isolated from the Sargasso Sea
tttgtctttaaagattgatggaaatacaaaagtaattgttcaaggaataaccggaaaagaaggcggatttcatgcgctaagatgccttgagtatggcacaaatattgttgcaggagtaactccaggtagaggtgggcaaatttttaatgattcaataaaagtatatgattctatgaaagaagctgcagttgaaactggagctaatacatctttgatttttgttccagctccatttgcacctgatgctattttggaagctatttattcgggaatcaaaacagttatatgtattacagaaggaatacctgtgaacgagatgatcaaaatttataaaattgctcatgatctaagagttactttgattggaccgaattgccctggactaatcaacccatctgagaaatgtaaaattgggataatgcccggagatatttttatgcctggcagaataggtgtagtttcaagaagtggaactttaacttacgaggctgttgatcaattaacaaaaagcggtattgggcaatctttatgcgtaggaatcggaggagatccaattgtagggacaacattcattaatgtattagattatttcatcaaagatgaagaaactgatgggatagtttttattggtgaaattggaggtacaaaagaacaagaagctgc

SEQ ID NO: 308222 - DNA, 692 bp, Unknown
  Bacterial polypeptide expressing nucleotide sequence isolated from the Sargasso Sea
aatgtcagttttggtcaacaaagatacaaaagtaatctgtcaaggttttactggcacacacggaacttttcattctgagcaagccttgaaatatggaacacaattagttggtggagtaacaccaaaaaaaggtggtcaaaaacatttaaatttacctgttttcgatactgtacaagaggcaaaagacaaattatcagctaacgcaacaatgatatatgttccaccaaaatttgccagtgctgcaataatagaagctatagaagcaaaaatagaattaatagtgtgtatcaccgaaggtattccagttttagatatgctaaaagttaaaaagatattgaacaatagtagttcaaaattaataggacctaattgtccaggtataattactcctgatgaatgtaaaatagggattatgccaggtaatattcataaaaaaggaacagtaggaatagtttcaaggtctggaacattaacttatgaagctgtagcccaaacatctgctaatggtatgggtcagtccacatgcattggaatagggggagaccctatcaatggtacaaattttatagattgtttagaactttttttaaaagacgatgatacaaaatcaattgttatgatcggagaaataggaggttcagcagaagaggaagcagctgaatttttaaaaaaagagagagtcaagaaaccaa

SEQ ID NO: 308223 - DNA, 679 bp, Unknown
  Bacterial polypeptide expressing nucleotide sequence isolated from the Sargasso Sea
tatgtcgatattagtgaataaaaatacaaaacttatttgtcaaggtttcactggttcccatggaacttttcattccgaacagtcgattttgtatggtactaatttagtcggaggagtgacaccccgaaagggaggccaaacacatcttggtaaaccagtatttgatacagtaaaggaagctaaagaaaagactggtgcaaatgccactatgatttatgttccagcaaagtttgcagcaaatgcgattattgaagcaatagatgcatcaattgaaattatagtttgtgttactgagggaattccaattattgatatgttgaaggtaaaaaaatctttatctaaatccaattcaagattaattgggcctaactgtcctggcataattacacctgatgaatgtaaaattggtatcatgcctggaaatatccacaaaaaaggatcagttggaatagtttcaagatctggaacactcacctacgaggctgttgcacaaacaacagctaatggactaggtcaatctacatgcatcggtattggaggagacccaatcaatgggacaaattttatagattgtttggatttatttttgaaagacgaaagtacaaaatcaattgttatgattggtgaaattggtggaagtgccgaggaagaggcagctgaatttatctctaaacatgaa

SEQ ID NO: 308224 - DNA, 781 bp, Unknown
  Bacterial polypeptide expressing nucleotide sequence isolated from the Sargasso Sea
gttggtggagtaacaccaggaaaaggaggttcgaaacatttaaatttaccggtatttaatacagttaaagatgctgttaatgagacaggagccgacgcttcaattttatttgtgccaccagcttttgcagcagactctgcaatggaagcagctgatgctggaataaaaatatgtgtagcaatagttgatggaataccttctcacgacatgatcagaattaaaagatacatgaggagatatactaaaagttctaaaatgacactagttggaccaaactgtgcaggaattattagtcctggaaaatcaatgttaggaataatgcctggacatatctataaagaaggtagaattggaattattagtagatcaggaacattaggttatgaggctgcccaacaactaaaaaatttgaatattggtgtttcaacaagtgtaggaattggaggtgacccaataaatggaagttcttttagagatattatagaaaaatttgaaacagatgatgagactgatgcaatattaatgattggcgaaattggtggtccacaagaagttgctgctggtgaattcgcaaaagaaaatatgaagaaaccagttatagcttatatagctggactaactgcaccaaaaggaagagtaatgggtcatgcaggagcaatagtttcagcttatggtgaaagtgcaattgaaaaagttgaaattttaaaagagtgtggaattacgatttctaaaaatccatctgttatgggtgatacagtaaaatcaattctagaaaaaatgt

SEQ ID NO: 308225 - DNA, 520 bp, Unknown
  Bacterial polypeptide expressing nucleotide sequence isolated from the Sargasso Sea
tatgtcaataatcattgataaaaatactaaagttatatgccaaggatttactgggtcacaagggacttatcactctcaacaagctatcgattatggaactcaaatggtcggaggtgtaactcctggaaaaggaggaacaacacatttaggtttgcctgtatttaatacagttaaagaagcaaaagattatacacaagcagatgcaactgtaatttatgttccagctaaatttgcaacacaagctattcacgaggcattagatgctaatattaaaattattacctgcattacagagggcattcctgtgcttgacatggtggagataaaaaaaagaattattgaacaaaaaacctattttataggacctaattgtcctggattagtaacacctggcgaatgcaaaatcggaattatgccaggttttattcataagccaggcaaaataggaatagtaagcagatcaggcacacttacttatgaagcagtatggcaaacatcagaagttgggcttggtcagaca

SEQ ID NO: 308226 - DNA, 858 bp, Unknown
  Bacterial polypeptide expressing nucleotide sequence isolated from the Sargasso Sea
aatgagtattcttttagataaaaataccaaagtaatttgtcagggttttactggaggacaagctactcaacattgtattcagtgtattgattacggaactcagttggtaggtggtgtgactccgggaaaaggtggtcaggagcatttagatttgcctgtattcaatactgttaaagaagccgtagatgcaacgggtgccactgcaagtctaatctttgtgccagcgaaattttgtaagtcttcgattttagaagcagctgaatcaggtatttcactaattgtctgtatcactgaaggtattccaactatagacatgcttgaagttaaagtacgttgtgatcaaatgggagtaaggttaattggcccaaactgtccggggattatcacacctggtgagtctaaaatgggtatcatgcctggtgatattcatcttcctggtaaggtaggcattatctccagatcagggactttaacttatgaggcggtcaaacaaacctctgatcttggctttggtcaaacaagttgtgtgggtatagggggagaccccatacctggaacaagctttatagatgtattagagcttttccaagatgatcaatctacggaggcaattgtaatggttggagaaatagggggtactgctgaagaatcagctgctgagtttattcagtcaaatgttacaaagccagttgtgtcatatattgcaggtgtgactgctcctcctgggaaaagaatgggtcatgcgggggccatcattgcaggtggaaaaggaacagctgaagataagtacaaagcactggaatccgcaggtgtatatacggtaaaaagtcctgcagatattggaaaaggaattgctga

SEQ ID NO: 308227 - DNA, 805 bp, Unknown
  Bacterial polypeptide expressing nucleotide sequence isolated from the Sargasso Sea
atgtctatacttgtaaataaaaattcaagagttgtagtgcaaggaataactggttcagagggtgagtttcataccaaacaaatgcttgactatggtacgaatattgtagccggcgttacccctggtaaaggaggacaatctgttttagatggtagcatcaacgtttataattctgttgagcaatctgtagaaaaaaccagtgctaatactgcaataatttttgtaccccctccttttgctgccgaagcaataattgagtcaagttatgcaggtatagaaacaattgtgtgcatcactgaaggcgttccagtacatgacatgattaaagtcaaacaaataatgaaaagaaatcaaacaagattaattgggccgaactgcccaggtattattacagtagatgaatgtaaacttggaattatgccaggttttatatgcaagaaaggaaatatcggagttgtttctaaatctggaacccttacatatgaagcaatagatcagcttgtaaatgcaggactgggccaaactactgctattggtataggtggagacccaatcattggaaccacaatgcaagactgcctaaacctttttgaaaatgatccagaaacagagggagttgttattattggagagattggtgggcaaatggaaatagaagcggctcattgggcaaaaaaaaatatgtctaaaccaatagctggtttcattgctggtcaaaccgcacctccaggaaaaagaatgggacatgctggtgcgattgtttcaggaggaaatgatacagcagaggcaaaagtcaaggtgtgaa

SEQ ID NO: 308228 - DNA, 523 bp, Unknown
  Bacterial polypeptide expressing nucleotide sequence isolated from the Sargasso Sea
ggcccaaactgtcccggaatcattactcccggagaaagtaaaataggaatcatgcctggcgcaatccatcaaaaaggaaaaattggtattgtctcaagatcagggacattgacttatgaggcagtaggccagattacaaatgttggcttaggtcaatcgacatgtattggaataggcggtgacccagttaatggaacaaactttattgactgtttgagtttgtttgaaaaggatgagcagactgaagcaatagtcatgataggagaaattggaggggatgcggaagaaaaggctgctgattacgcgagaaacaatgtgaaaaagccaattgtaagtttcattgcaggtcaaactgctcccccaggacgtcgaatgggacacgctggtgcaatcatttctggaggacatggaacagcaaaagaaaaaaagaatgcattaagggaagcagggattaatgtaataaactcacttgatgaaattggtattaagatgcttgaggcgttgggaaatcataaagtttaag

SEQ ID NO: 308229 - DNA, 595 bp, Unknown
  Bacterial polypeptide expressing nucleotide sequence isolated from the Sargasso Sea
gaaatagatgcatctctaatcgaaattaatcctctagttgtaacaaaagactcaaaactaatattactagacgctaaaattaatattgatgataatgcattgtttagacagccagaaattgaaaaactaaaagatatatcagaagaaaatgaattagaactcgaagcttctaaaaatgatatggtttatataaaacttgatggaaaaattggctgtattgttaatggagctggtttagctatggctacgatggatattataaagcaatatggaatggaaccagctaactttttagatttaggtggtactgcaaatagagaaagagcgataaaagctttcaaaatcattcaatcagataaaaatgtaaaatcagtatttataaatatttttggaggaattattcattgtgatatgattgctaacggtattatagatgcaataatagaattagattttaaacttccagttgtaatacgtttcaagggtacaaattctaaagaaggaagagatattatcaataattcatcactgagattaatttcaatagatgatttttcaaaagcagctcaaaaagctgtagagttatcagaataat

SEQ ID NO: 308230 - DNA, 495 bp, Unknown
  Bacterial polypeptide expressing nucleotide sequence isolated from the Sargasso Sea
ttacacctgatgaatgtaaaattggaattatgcctggaaatattcataaaaaaggaactgttggtatcgtttctagatctggaactttaacttatgaagctgttgcacaaacaacacaaaatggcttagggcaatcaacatgtataggaataggtggtgatcctattaatggaactaattttatagattgtcttgatttatttttaaaagatccagatacagaatctatattaatgatcggtgaaataggtggttcagctgaggaagaagcatctgaatttgttaaaaatcacaaaattaaaaaaccaatagttggatttattgcaggtattacagcacccccaggaagaagaatgggtcatgcgggggctataatatctggtggaaaaggtggtgcagaagataagattaaaactatggaaaatgctggtattactatagcaaaatcacccgcagatattggaagaacactatataataaattgtcgctttaaa

SEQ ID NO: 308231 - DNA, 877 bp, Unknown
  Bacterial polypeptide expressing nucleotide sequence isolated from the Sargasso Sea
atgtcaattttggtagataaaaatactaaagtcatatgtcagggttttacaggaacgcatggtacttttcactccgaacaagcaataaaatacggaactaaattagtaggaggggttacaccaaaaaaaggaggtcaaaaacatcttggtcttggcgtttttaatacagttgccgaagcaaagggaaaaacaggtgcaaacgctacaatgatttacgtacctcctaaatttgctgctggagcaatattagaggctattgatgcgaaactagatttaatagtttgtataacagaaggcatacctgtttttgatatgatgaaggtcaaacaagctttatctaaaagtaaaagcaggctaataggacctaactgtcctggcataataacaccaggtgaatgtaaaattggtataatgccaggcgatatacataaaaaaggttccgtaggaattgtatcaagatcaggtacacttacttatgaggctgtagcccagacatcacaaaatggtctaggacaatccacatgcattggtattggtggtgatcctatcaatggaacgaattttgttgattgtcttgatctctttcttaaagataaagatacacattctatagttataattggggagattggtggttcagccgaggaagaagcggcagaatttttaaaaaaatccaaagtaaaaaaacctacagtcggttttgttgctggattaacggcacctcctggaaggagaatgggtcatgctggggcaattatatcaggtggaaaaggtggagcagaagataaaatagaacttatgaaatctgcaggaattactatttcaaattctccagcagatattggtaaaacgctatataaaagacttaaaagttaaa

SEQ ID NO: 308232 - DNA, 754 bp, Unknown
  Bacterial polypeptide expressing nucleotide sequence isolated from the Sargasso Sea
atgtctgtactagtaaataaaaatactaaagttatttgtcaaggttttacaggtaaacacggaacttttcattctgaacaagcaataaaatatggaactaaactagttggaggagttacaccaaaaaaaggaggcgagaaacatttaggtctcccagtttttaatactgtagaagaagcaaaagatcaaactgctgctactgcaactatgatatatgttcctcctaagtttgcagcaaatgcaataatcgaggcagtagaggcaaaaatagaattaatcgtatgtatcactgaaggtatacctgtattagatatgttaaaagtaaaaaaagaattaaaaaaaagctcatcgagattaatcggaccaaattgtccaggaattataactccagatgaatgtaaaattggaattatgcctggtaatattcataaaaaaggtacggtaggtattgtctcaagatctggaacattaacctatgaagctgttgcacaaacctctgttaatggaatgggccaatcaacatgcataggaataggaggagatccaataaatggaacaaactttattgattgtttagagctatttttaaaagacaatgaaactaaatctattgttatgattggagagattggggggtctgcggaagaggaagctgctgaatttcttaaaagagaaaagactaaaaaacccatggtggcttttatagctggtttaacagctccccctgaagaagaatggggcatgctggagccat

SEQ ID NO: 308233 - DNA, 471 bp, Unknown
  Bacterial polypeptide expressing nucleotide sequence isolated from the Sargasso Sea
gtataatgccaggccacattcatttgcctggttctgttgggattgtttcaagatcgggaaccctcacatacgaggcagttgctcagacaacaacggtaggcatagggcaatcgacttgcatcggtattgggggagacccagtcaatggtactaatttcatcgactgtttggatttgtttctcaaagacaaaaagaccgaatccatcataatgattggcgagattggtggttccgctgaagaagaagcgtcagatttcatcagaaagagcaaagttaaaaaaccgatggtggggtttatagcgggagttacggctccccccggacgaagaatgggacatgctggagctattatcgcaggaggaaaagggggagccggggataaaatggaggcaatgcggctggcaggaatcaaagttgcgcaatcgcctgcagccctgggatccactatgttggaagctattgatggataga

SEQ ID NO: 308234 - DNA, 428 bp, Unknown
  Bacterial polypeptide expressing nucleotide sequence isolated from the Sargasso Sea
aatgtcagtgcttattaataaacatacaaaagttatatgccaagggtttacaggtaaacatgggacctttcattctgagcaagctctaaagtacggaacaaaactagtcggtggtgttacccctaaaaaaggtggtcagagacatttgagtctaccagtttttaataacgttcatgaggcaaaagaaaaaacatttgcaaacgcaactatgatttatgttcctccgaaattcgccgccgctgctataatagaggctatcgaagctcaaatggaactaatagtttgtataactgaaggaatcccagttttagatatgttaaaagtaaaaaagattttaaatcaaagtaaatcaagattaattggacctaattgtccgggaattataactcctaatgaatgtaaaattggaataatgcctggaaatattc

SEQ ID NO: 308235 - DNA, 534 bp, Unknown
  Bacterial polypeptide expressing nucleotide sequence isolated from the Sargasso Sea
aatgtcagttttagtaaataaaaatactagattaatctgtcaaggatttacaggatcccatggaacatttcactctgagcaagcaattaaatatggaacaaatttagttggaggagtaacaccaaaaaaaggtggtcaaaaacatttaggccttccagtttttaatacaatgaaagaggcaaaagaatctgaaggagctaatgcaacaatgatatacgtcccagccaaatttgcagcctcagcaattattgaagcaatagatgcatctatagaactgatcgtatgtataactgaaggaattcctattcaggacatgttaaaagttaaacagaaattaaataattcaaaaagtagactgattggtcccaactgcccaggaatcataactcctgatgagtgtaaaatcggcattatgcctggcagcattcataaaaaaggaacagttggaatagtttcaagatcaggaactttaacttatgaagcagtagcgcaaacaacagaaaatgggctaggacagtcaacttgcattggaat

SEQ ID NO: 308236 - DNA, 805 bp, Unknown
  Bacterial polypeptide expressing nucleotide sequence isolated from the Sargasso Sea
tatgtcaattttaattaataaagatacaaaagttatttgccaaggttttactggttctcacggaacttttcactcggagcaagcaataaaatatggaacaaaattagtaggaggagtaactccaaaaaaaggtggtcaaaaacatttagataaacctgtttttaatactgttcaagatgcaaaaaaagaaactggtgctacagcaacaatgatatatgttccagcaaaatttgcagcaaatgcaattatcgaagcaatagaatcatcaatggaactcattgtatgtataactgaaggaataccagttttagatatgcttaaagttaaaaaaaaattaaataattcaaaaagcaggctcattggaccaaattgtcctggaataataacacctgaagaatgcaaaataggaataatgcctggcaatattcataagaaaggatctgttggaattgtttcgagatcaggaactttgacttatgaagctgttgctcaaacttctgaaaatggacttggccaatcaacttgcataggcattggtggagatccaattaatggaacaaattttgttgattgtttagatttatttttaagtgatgatgatacgaagtctatattgatgataggagaaataggtggaacagcagaagaagatgcttcggaatttttaaaaaatcataaaattaaaaaaccagtagttggctttatagctggaattacagcacctaaaggaagaaggatgggacatgcaggggcaatcatttcaaaaggaaaaggaggagcaaaagataagataaaaaaaatggaa

SEQ ID NO: 308237 - DNA, 595 bp, Unknown
  Bacterial polypeptide expressing nucleotide sequence isolated from the Sargasso Sea
atgtctgtcttaattaataaaaatacaaaagttatctgtcagggtttcacaggctcacatggatcttttcattcagaacaagcaattaagtatggaacaaacttagtaggtggagtaacgcctaaaaaaggcggtcaaatacatttagatagacctgtgtttaacacagttaaagaggcgaaagataaaactggtgcaaatgctacaatgatttatgttcctgctaaatttgcatcttcagcaattattgaggcaatagattcatcagtagaacttatagtttgtatcactgaaggaatcccagttttggaaatgttaaaaataaaaaaaaaattaagaaattctagttcaagattaataggtccaaattgtccaggaataattactcccaatgaatgtaaaattggaatcatgcctggaaatattcataagaaaggttctgttggtattgtttctagatcgggtactctaacatacgaagctgttgcacaaactactgaaaatggtctaggtcaatcgacttgtattggtattggtggagatcctattaatggaacaagctttattgattgtttagatttattcttaaatgatc

SEQ ID NO: 308238 - DNA, 389 bp, Unknown
  Bacterial polypeptide expressing nucleotide sequence isolated from the Sargasso Sea
tattggttgtatggttaccggggcaggattagcaatggcaactatggatataataaaattatatggagaggaacctgcaaactttttggatgttggaggtggagcatcaaaagaaaaagtttctgctgcatttaaaataattttgtctgataaaaatgtaaaaggaatattgataaatatttttggtggtataatgaggtgtgatgtattagcacaaggcatggttgatgcagctaaagaaatgaatattcatattccgctagttgttagacttgcaggtacgaattttaaagagggaaaaaaaatacttgataattcgggactcaaattaatttcagctgaaaatttagaggatgctgcaaaaaaaatagttaaggctattagttaat

SEQ ID NO: 308239 - DNA, 712 bp, Unknown
  Bacterial polypeptide expressing nucleotide sequence isolated from the Sargasso Sea
tgatgcagtcaaacaaactaaagcaaacgcaacagtaatttatgtgcccgcaaagtttgctgctaaagcaattcacgaagctttagatgcaaatattgaattaattgtatgcattacagaaggcattcctgtcttagatatgattgatataaaaaaaagaattatcaacaatcacacatatttgataggccctaactgtccaggactaattacaccttctgaatgcaagattggaatcatgcctagcttcatccataaaaaaggtaaaataggtatagtgagtagatctggaacattaacctatgaagcagttgcacaaactacagaggtaggattaggtcaatcaacatgtgttggcattggtggagatccaatacatgggatgaattttgtagattgtataaagttatttttagaggatgatgagaccgaaggcattttgatgattggtgaaattgggggcgaagaagaagaaaatgcggcggaatttatttcaaattcaaaaataaaaaaacctatttcagcatttatagctggacaatcggcacctaaaggaaagcgtatgggtcatgcaggcgctattatttcaggctcaaaaggtactgcgagctctaagattgaatctttagaaaatgctggagttttggtatcaaaatcaccagcctcactgggaaaaacaatgaaattagcaatgcaaaatgggaataattag

SEQ ID NO: 308240 - DNA, 855 bp, Unknown
  Bacterial polypeptide expressing nucleotide sequence isolated from the Sargasso Sea
ttatcccaaggctttactggaaagatgggacttttcatgcagaggaaatgataaattatggatcaaatattgtgggtggtgtcacacctggaaaaggagggcaaaaacatctagatagacctgtgtttaatactgttaaagatgctgtaaagcatactggtgcaacagcatcaatattatttgtgccaccggcttttgctgctgattcagctatggaagcggcagatgcaggtattaaaacttgtgtagctatagttgacggtattccatctcatgacatgattagaattaaaagatatatgagaaggtattctaaaaatgaaaaaatgactttggttggcccaaattgtgcaggaattattagtcctgggaaatcaatgttaggaattatgccaggccatatttataaagaaggaagagttggtgttataagtaggtcaggtacattaggttatgaggcagctgaacaaatgaaaaatttagggattggaatttcgacgagtgtcgggataggaggcgatccaattaacggaagctcatttagagatataattgaaaaattcgaaacagatgatgaaacagatgcaattttaatgataggtgaaattggaggtcctcaagaagtatcagcaggggaatttgcaaaagaaaatatgaacaaaccagttatcggatatattgcaggacttacagcaccaaagggaagagtaatgggtcatgctggtgcaatagtttcagcttatggtgaaagtgcaattgagaaagttgagatattaaaagaatgtggagttactatttctaaaaatccgtcagttatgggtgatactgttaaatcagtgcttgaaaaaatgtaaa

SEQ ID NO: 308241 - DNA, 761 bp, Unknown
  Bacterial polypeptide expressing nucleotide sequence isolated from the Sargasso Sea
aatgtctgtattagttaacaaaaatacaagggttatttgtcaaggatttacaggttcacatggcacatttcactcagaacaatcaatcaaatacggaacaaatttagtaggtggagtaacaccaaaaaaaggaggtcaaactcatcttaatagacctgtttttaatacagttctcgaagctaaaaatgctacggatgcaaatgctaccatgatttatgttccagctaaatttgcagcaagtgctataatagaagctatagatgcaaatatagatcttattgtttgtataactgaaggaattccagttcttgatatgctaaaagttaaaaaatatttatcaaaatctaaatcaagattaattggcccaaattgtccaggaataattactcctgatgaatgtaaaattggaattatgccaggaaatattcataaaaaaggtactgttggcatagtttctagatctggaactttaacttatgaggctgttgcacaaacaacggaaaatggtttagggcaatcaacatgcataggtattgggggcgatcctattaatggaaccaattttatagattgtattgatttatttttaaaagatcctgacaccgaatctatattaatgattggtgaaataggtggttctgctgaagaagaagcatctgaatttgttaaaaatcataaaattaaaaaacctatggtgggatttattgctggagttacggctcctccgggaaggagaatggggcatgctggagccataatat

SEQ ID NO: 308242 - DNA, 467 bp, Unknown
  Bacterial polypeptide expressing nucleotide sequence isolated from the Sargasso Sea
tatgcctggtaatattcataaaaaaggatctgtaggtatagtctctagatcaggtactctcacatatgaagccgtgccccaaacaacagaaaatgggcttggccaatctacttgtattggaattggtggagatccaataaatggtacaaattttatagactgtttagatttatttttaaatgatgaagaaactaaatcaattttaatgataggtgaaattggaggttctgccgaagaagaagcagcagaattcgttaaaaaccataaaatcaagaaaccaatagttggatttattgcaggtgttacagctcctcccggaagaagaatgggccatgctggggctattatttcgggtggaaaaggtggagcacaagataaaataaaaaaaatggaagattgcggtataactattgctaactcaccttcaaaaattggcaaaactcttttcgataaattgtctaattgaa

SEQ ID NO: 308243 - DNA, 660 bp, Unknown
  Bacterial polypeptide expressing nucleotide sequence isolated from the Sargasso Sea
aattaaatgacagtcaatttaaacaatttgaaaatattgtaagtaaattaggtaacgcttttattgaattagatgcagaatcaattgaaataaatcccttagcccttacaaaatcaggtgaattagttcttttagatgccaaaattactttggatgataattctttatttcgtcaccctgaattgttagcgttaaaagatttaagtgaagaaaatgagatggaattagaagcatcaactaatgatatgaattatataaaacttaatggagaaattggttgtatggttaatggagcaggtttagctatggcaactatggatataatcaaacaatttggaaaggaacctgcaaattttttagatttgggaggcaccgcaaataaagaaagaacaattaaaggttttaagattattcaatctgatcataatgtgaagtcagttcttgttaatatatttggaggtattattcattgtgatatgattgcatctggaattattgaagcagttaaagagttgcattataatttaccaatagtagttagattccaaggtactaatgcatcagagggaagggatattataaataattctaagataaatatcatttcagtagatgattttacagaagctgcaaaaaaagcagttgaattatcagcctgat

SEQ ID NO: 308244 - DNA, 583 bp, Unknown
  Bacterial polypeptide expressing nucleotide sequence isolated from the Sargasso Sea
aatgtcagttttagttaataaaaatactagagtgatttgtcagggctttacaggcactcatggtacttttcattctgagcaagcgataaaatatggaacaaacttggttggaggagttacgccaaaaaaaggaggacaaatacatttaggtaaaccagtatttaattctgttaaagatgcaaaagaagctacaaatgcaaatgcaacaatgatttatgttccagcaaaatttgcagcatcagcaattatagaagccatggatgcatcaatagatttaatagtttgtataactgagggaataccgattttagatatgcttaaaattaaagaaaaattaaaaaaaactaaatcaagattgattgggccaaattgtccaggaattataacgcctgatgaatgtaaaattggaattatgcctgggaatattcataaaaaaggatcagtaggaatagtatctagatctggaacattaacttatgaagcagttgcacaaacaagtataaacggtcttggccagtctacttgtattggtataggtggagatcctattaatgggactaattttatagattgccttgattta

SEQ ID NO: 308245 - DNA, 327 bp, Unknown
  Bacterial polypeptide expressing nucleotide sequence isolated from the Sargasso Sea
atggacaagagccagcaaattttttagatgttggtggaggagcttcaaaggaaaaagtttcagcagcttttaaaataattttatctgacaaaaatattaaaggaattttgataaatatattcggaggaataatgagatgtgatgttcttgctgaaggagtagtaaatgcagctaaagagataaatattaatgttccacttgttgtaaggcttgctggaacaaaatttgaagaaggaataaaaattttgaataactccggtctagatattattcccgcatctgatttatctgatgctgctaaaaaaattgtagaggcaataaaataat

SEQ ID NO: 308246 - DNA, 573 bp, Unknown
  Bacterial polypeptide expressing nucleotide sequence isolated from the Sargasso Sea
aatgtcagttttagttaataaaaataccagattaatttgccaaggttttactggttctcatggtacctttcattctgaacaagcaattaaatatggaacaaaattggttgggggtgttacaccaaaaaaaggtggtcagagacatttgggattaccagtttttaataccgttaaagaagcaaaagagttggagggagcaaatgctacgatgatttatgttccagctaaatttgcagcctctgcaataattgaagctatcgatgcatcaatagaacttattgtttgcataactgaaggaattccaattcatgacatgattaaagttaaacaaagattattaaaatcaaactgcagattgataggacctaactgtccaggaattataacgcctgatgagtgtaaaattggaattatgccaggaaacatccataaaagaggatctgttggtatagtttctagatctggtacattaacttatgaagctgtggatcaaacaagtgataatggtttaggacagtcaacttgtataggaataggtggtgatccaataaatgggacaaattttattgattg

SEQ ID NO: 308247 - DNA, 334 bp, Unknown
  Bacterial polypeptide expressing nucleotide sequence isolated from the Sargasso Sea
taaattgtatggtaaagaaccagcaaactttttagatgttggaggtggagcatctaaagaaaaagtatctgctgcactaaagattattctctcagacaaaaatgttaaaggaattttaataaatatttttggaggaattatgagatgcgatgttcttgctcaaggggtagttgatgccgctaaagaaattaatattaatgttccacttgttgtaagattggcaggaacaaattttaaagaaggaaaagaaatattagataattctggagtaaaattaatttcagcagaaaatttagatgacgcagcaaaaaaaatcattaaagcagtgaaataa

SEQ ID NO: 308248 - DNA, 435 bp, Unknown
  Bacterial polypeptide expressing nucleotide sequence isolated from the Sargasso Sea
tgagtagatcaggaacattaacttatgaagctgttgcacaaacaacagaggtaggattaggtcaatcaacatgtgttggtattggtggagatccaatacatgggatggattttgtagattgtataaagttatttttagaagacgatgagaccgagggaattttaatgattggcgaaattggtggtgaggaagaagaaaatgcagcagaatttatttcaaattcaaaaagaaaaaaaccagtttctgcatttatagctggacaatcggctccaaaaggaaaacgtatgggtcatgcaggtgctatcgtttcaggctcaaaaggtacagcacattccaaaatcaaatctttagaaaaggctggagttttggtgtcaaaatccccagcatcattgggaaaaactatgaaattagcaatgcaaaatgggaataattagg

SEQ ID NO: 308249 - DNA, 475 bp, Unknown
  Bacterial polypeptide expressing nucleotide sequence isolated from the Sargasso Sea
acagttaaaagatctaacggaggaagatcctctagaacttcaagcagcagaacatgatatgaattacgttaagcttgatggctctattggatgcatggttaatggagcaggactggcgatggcgaccatggatatcatcaagcaatttggagaagagccagcaaattttttagacttaggggggacggccaataaagatagagttattatgggttttaagaccattcaatcagatccaaatgtgaaatcaattttaatcaatatctttggaggcattattcattgtgacatgatagccaatggtattgttgaagctgtaaaggaactcaattttaaacttcctctagtggttcggtttcaaggaactaatgctagtcaaggcagagatgtaattaacaactcctcccttggtttaatttctattgatgattttactgaagcagcaaaaaaagtagtagagcttgctaaggaataa

SEQ ID NO: 308250 - DNA, 473 bp, Unknown
  Bacterial polypeptide expressing nucleotide sequence isolated from the Sargasso Sea
attacttgacgagagtgaggtagaccctaaggaattggaggctgaaaaatatgaacttagctatgtgaaacttgacggcaagatcggttgtatggttaatggggcaggacttgcgatggcaactatggacattattaaacttaagggttcctctcctgcaaactttcttgacgtaggtggaggtgcttctaaagaaaaggtaaaaggagcattcaaaataattatttcggataaagatgttaaggcaatattagttaatatctttggaggaataatgagatgcgatataattgcagagggtattgtagaagcagttaaagaaattaatttagaaaaacctctagtggttagactagaaggaactaacgtagaaaagggaaaaaaaatattagaaaactcaggtcttgatataatagcagccactgacttagaagaagctgcagaaaaaatagtaaaagtggtggagggttaat

SEQ ID NO: 308251 - DNA, 496 bp, Unknown
  Bacterial polypeptide expressing nucleotide sequence isolated from the Sargasso Sea
atttttagacatccagaaatttttaaattaagagatttaaacgaagaggatcctgccgaaataaaagccagcgagcatgatttggcatatattaaattggatggctcaataggttgtatggtgaatggagcaggtttagcgatggcgactatggatataattaaactttatggcgaagaaccagctaactttttagatgtaggaggcggagccagcagagaaaaagtttgtgcagcttttaaaattttattggcagacaaaaatgttaaaggtgttttaataaatatttttggtggaataatgaggtgtgatgtgctggcacaaggagttgttgaggcagccaaagagataaagataaaagttccgctagttgtacgtatagcaggtattaattttaaagaaggaaaaaaaattttaaacgaatccaatttaaaaattttatatgctgacaatttaaatgatgcagccaaaaaaatagtggaggctattaaataac

SEQ ID NO: 308252 - DNA, 683 bp, Unknown
  Bacterial polypeptide expressing nucleotide sequence isolated from the Sargasso Sea
aatgtctattttagttaacaaagatacgaaggttatctgccaaggatttactggaacccacggaacgtttcattcagagcaagctttaaaatatggaacaaaacttgtaggaggtgttactcccaaaaaaggtgggcaaaaacatttaaatcttcctgtatttaatacagttcaagaggcaaaagaaaaaactttagcgaatgctacaatgatttatgtccctccccaatttgctggttctgcgattattgaagctattgaggcaaatattgaactgatcgtatgtataaccgaagggataccagtaattgatatgattaaagtaaaaaaagttttaaaagatagttcctcaagattaattggacccaattgtcctggtataattactccagaagaatgtaaaataggtatcatgcctggaagtattcataaaaaaggatcagttggaatagtttccagatctggaacactaacttatgaggctgtggcacaaacctcgtcaaatggaatgggtcaatcaacttgtattggcataggtggagatccaatcaatggaactaatttcattgattgtctagaattattcttaaaagatgaagaaacaaaatcaattattatgataggagaaatcggcggttcagcggaggaagaagctgctgattttattaaaaaagaaaagataa

SEQ ID NO: 308253 - DNA, 379 bp, Unknown
  Bacterial polypeptide expressing nucleotide sequence isolated from the Sargasso Sea
atggtgaatggagctggtttagcaatggcaacaatggatataataaaattatatggaaaagagccagcaaattttctggatgtaggtggaggggcttctaaagaaaaagtctcagcagcgtttaaacttattctttcagataaaaatgttaaaggaattttaataaacatttttgggggaattatgagatgtgatgtattagcccaaggagtggttgatgctgctaaggaaactaaattacaagttcctttagttgttcgattagctggtacaaattttcaagaaggaaaaaaaattttggatcaatctaatttaaagatactatctgcttcagacttaaatgatgctgcaaaaaaaattgttaatgcgataaaataaa

SEQ ID NO: 308254 - DNA, 620 bp, Unknown
  Bacterial polypeptide expressing nucleotide sequence isolated from the Sargasso Sea
tgaagcttatttagaattaattgtttgtattactgagggaataccagttcttgatatgattaaggtcaaaaaaaaattacttaattcaaaatcaagattaatcggtcccaattgtccagggataattactcctgatgaatgcaagatcggaataatgccaggtaatatccataaaaagggttctgttggtattgtatcaagatccggaactttgacctacgaggctgtcgcacaaactacagagaatgatttgggacaatcaacatgtataggtataggtggtgatccaattaatggcacaaattttattgattgcttagatttatttttaaaagatgaggaaactaaatcaattttaatgattggtgaaataggtggatcagctgaagaagaagcagctgaatttgtaaaaaatcatgaaataaaaaaacccatggttggttttattgcaggagttacagcaccaccgggtagaagaatgggacatgcaggggccataatatcaggtggtaaaggtggggctaaagataagatcaaaaaaatggaagattgtggcatagaagtagccacatcaccttcagaaattggaaaaacattgttaaataaattgtccaattgaa

SEQ ID NO: 308255 - DNA, 718 bp, Unknown
  Bacterial polypeptide expressing nucleotide sequence isolated from the Sargasso Sea
aatgtcgattttagtgaataaacagacaaaagttatttgtcaaggctttacaggaaagcatggaacatttcactctgaacaatcattaagatatggaacaaaattagttggaggcgtcacacctaaaaaaggagggcaaaaacatttagaattaccagtattcaatacagtccaagaagcaaaagaaaaaacttctgcagatgctaccatgatttatgttccaccaaaatttgctgcagcagcgattattgaagcaatagaagctgaaatcaaattaatagtatgcatcactgaagggatacctgttttggatatgctcaaggtaaaacaaattttgagcagaagcacctcaagattgatcggacctaattgtccaggaattatcactccagaagagtgtaaaattggtattatgccaggaaatattcataaaaaaggaacagttgggatagtttcaagatctggaacattaacttatgaggcagtggcgcaaactactgcaaacaggatgggtcaatccacttgcataggaataggcggtgatccgataaatggaacaaattttatagattgtttagaactttttttaaatgatgacgaaactcaatcaatagttatgattggagaaattggaggctcagctgaggaggaggcagctgaatttttaaaaagagagaagattaaaaaacctatggtcggttttatcgcaggattgaca

SEQ ID NO: 308256 - DNA, 769 bp, Unknown
  Bacterial polypeptide expressing nucleotide sequence isolated from the Sargasso Sea
gtgggtgttacacccaaaaaaggtggcactaaacatcttggtctacttttttttaatactgtagctgaagcaaaagaaaaaacatcagcaaatgcttcaatgatttatgtacctccaaagtttgcggctgcagcgatcattgaggcaattgatgcagaaattgatttaattgtttgtataactgagggcataccaatttttgatatgatgaatgtaaaaaaaaaaattataaatagcaaaagtagacttatcggacctaattgcccaggaataattacaccagaggaatgtaagattggaataatgccaggctcgattcataagaaaggatctgtgggtattgtttcgagatcaggtacattaacttatgaagcggtagctcaaacaactaaaaatggtttgggtcaatcaacttgtattgggataggaggagatcctattaatggaacaaattttattgactgtttagatctttttttaaaagacaaggacactcattctatcgttatgattggagaaattggcggttcagcagaggaagaagctgcagaatttttaagaaagtctagggtaaaaaaacctacagttggtttcatagctggattgacagccccgccaggaagaagaatgggacatgctggcgcaataatatcaggtggtaaggggggcgcagaagacaaaatagaggttatgaaatcagcagatattacaatatcaaaatctccagctgatatcggaaaaactatttatgaaaaacttaataactaaa

SEQ ID NO: 308257 - DNA, 658 bp, Unknown
  Bacterial polypeptide expressing nucleotide sequence isolated from the Sargasso Sea
atgtcaattttagtcaacaaaaatacaaaagtcatttgtcaaggttttactggtggccaaggtacatttcactctgaacaagctattgcttatggtactaatatggttgggggcgtgacaccaggtaaaggtggtacgaggcatttagatttaccagtatttaatacagttaaagaagctaatgagaatttagaaatagatgcttcagttatttatgttcctccaccatttgctgcagactctataattgaggcaattgatgcaaaaataccattaattatttgtattactgagggtataccagttcaggatatgataagagtaaagaattttctgaaggattctacttcaagacttataggaccaaattgtcctggtataattactcctggagaatgtaaaattggtattatgcctgggtcaattcataaaccaggaaaaataggaattgtatctagatcagggacattgacctatgaagctgttgatcaaacaactgctgtgaatttaggacagtcgacttgtgttggcataggtggtgacccattaaatggaacaaactttatcgactgtttagatttatttttgtcagatgaacaaactgaagcaattttaatgataggtgaaattggaggttctgcagaagaagaagctgctg

SEQ ID NO: 308258 - DNA, 886 bp, Unknown
  Bacterial polypeptide expressing nucleotide sequence isolated from the Sargasso Sea
tatgtcaataatcattgataaaaatactaaagttatatgccaaggatttactggatcacaagggacttatcactctcaacaagctattgattatggaactcaaatggttggaggtgtaactcctggaaaaggaggaacaacacatttaggtttgcctgtatttaacacagttaaagaagcaaaagattatacacaagcagatgcaacggtaatttatgttccagctaaatttgcaacacaagctattcatgaggcattagatgcgaatattaaaattattacctgcattacagaaggtattcctgtgcttgatatggtggagataaaaaaaagaattattgaaaaaaaaacctattttataggacctaattgtcctggattagtgacacccggtgaatgtaaaatcggaattatgccaggttttattcataaaccaggcaaaataggaatagtaagcagatcaggcacgctgacttatgaagcagtatggcaaacatcagaagttggacttggtcagacaacctgtgttggtattggtggagatccagtacatggaatgaattttatagattgtcttgatttgtttttacaggatgacgatacaaaagggattttaatgataggtgaaataggaggaacggctgaagaggatgctgcagaattcatatctaaatcaataataaaaaaaccgatgtctgcatttattgcaggtgtatcagccccaaaagggaagagaatgggtcatgctggagctataatatctggtaataaaggaactgcgcaatcaaaaattgatgcgttgaaatcagctaatattgctgtagcaccctctcctgctaaaatgggcgaaacaatgttatcagagatgcaaaaagggtataattaa

SEQ ID NO: 308259 - DNA, 874 bp, Unknown
  Bacterial polypeptide expressing nucleotide sequence isolated from the Sargasso Sea
gatgagcattatagtcaataaggactctaaggttttagttcaaggatttactggtagtgaaggtacttttcactctgagcaaatgatagaatatggaacaaatgttgtttgtggtgttaccccaggtaaaggtggcacaaaacatttaaataagccagtttataatagtgtacaagaagcggttattaatgaagatattaatacatctataatttttgtacctcctgcatttgctgctgatgctataatggaagcagctgagtcaggaataaaaacaatagttactataactgaaggaataccggttaacgatatgacaaaagttgtatcttatattaagggaaagaaaataagattaattggtcctaattgtcctggtataattactccagatgaagctaaaataggtattatgcctggttttgtatttaaaaaagggaatgtaggtatagtatcaaaatctggtacattaacatatgaagctgcggatcaggttgttaaatctggatatggaatttcaactgcaattggagtagggggagatccaataattggaacaactctattagactctgttcagctatttatggaagatgatgaaacagatgttatagttctaattggagagattggtggtcaattagagattgatgctgctaaatggataaaaaataatggaaacaaaaagcctgtagttggttttattgcaggggaaactgcacccaaagggagaaagatgggacatgctggtgcaataattggtggaaaagatgatacggcatcagcaaagaagagaataatgagagaatcaggtgtgaatgtggttgactctccagcagacattggtaaaactgtaaatgaaatacttaaataa

SEQ ID NO: 308260 - DNA, 877 bp, Unknown
  Bacterial polypeptide expressing nucleotide sequence isolated from the Sargasso Sea
atgtcagttttagttaataaaaacacaaagttaatttgccaaggttttacgggtagtcatggaacctttcattcggagcaagcaattaaatatggaacaaatttagtcggaggggttacaccaaaaaaaggtggtcaaactcatctagatagaccagtatttaatacagtaaaggaagcagtcgataaaactggtgccaacgcaactatgatttatgttcctgcgaaatttgcatctgcagcaatcatagaagccattgaagctaacttagaattaattgtttgtatcactgagggaataccagttcttgatatgattaaggtcaaaaaaaagttacttaattcaaaatcaagattaatcggtcccaattgtccagggataatcactcccgatgaatgcaagatcgggataatgccaggaaatatacataaaaagggttctgttggtattgtatcaagatccggaactttgacctacgaggctgtcgcacaaactacagaaaatgatttggggcaatcaacatgtataggtataggtggtgatccaatcaatggcacaaattttattgattgcttagatttatttttaaaagatgaggaaactaaatcaattttaatgattggtgaaataggtggatcagctgaagaagaagcagctgaatttgtaaaaaatcatgaaataaaaaaacccatggttggttttattgcaggagttacagcaccaccgggtagaagaatgggacatgcaggggccataatatcaggtggtaaaggtggggccaaagataagatcaaaaaaatggaagattgtggcatagaagtagccacatcaccttcagaaattggaaaaacattgttaaataaattgtccaattgaa

SEQ ID NO: 308261 - DNA, 874 bp, Unknown
  Bacterial polypeptide expressing nucleotide sequence isolated from the Sargasso Sea
atgagtattatagttaataaaaactcaaaagttttagttcaaggttttacgggaagtgaaggcacatttcactctgaacagatgattgaatatggtaccaatgttgtatgtggagtgactcctggaaaaggtgggacaaaacatttagataggcctgtttataatagtgttgcagatgcattaaataatgaggatataaatacatcaataatttttgtacctccaatgtttgctgctgatgctataatggaagctgctgaatcaggtattaagactattgtaaccataacagaaggaataccagtaaacgatatgacaaaagttgtatcttatattaaagggagaaatattagattaattggccctaattgtcctgggataattactcctgaggaagctaaaattggtattatgcctggttttgtatttaaaaaagggaacgtaggtatagtatcaaaatctggtactttaacatatgaagctgctgatcaagttgttaaatctggatatggaatatcaactgcaattggagtagggggtgacccaataattggaacaactcttttggactctgttcagttgtttatggaagatgaagaaactgatgtaatagttcttattggagaaataggtggtcaattagaaattgatgctgcaagatggataaaagataacggtaataaaaaaccagtagttggatttattgcgggggagactgctccaaaaggtagaaaaatgggacatgctggtgcaattatcggcggtaaagatgacactgcatctgcaaaaaaaagaataatgagagaatcaggtgttaatgtggttgattctcctgcagatataggtaaaaccgtaaatcaaatacttaactaat

SEQ ID NO: 308262 - DNA, 877 bp, Unknown
  Bacterial polypeptide expressing nucleotide sequence isolated from the Sargasso Sea
atgtcagttttaattaataaaaatacgaaactaatatgtcaaggctttacaggttcgcacggaacttttcattctgaacaggcaattaaatatggaactaatctagtaggtggagttacaccaaaaaagggtggtcaaaaacatttagatagaccagtttttaatactgtgaatgaagcaaaaaaagaaacaggtgcaaatgcatctatgatttatgtacctgcaaaatttgccggatcagctattattgaagcaatagattcagaaattgaacttattgtatgtataactgaaggtattcccgtattagatatgcttaaagtaaaaaaaaaattatcagaatcaaaaagcagattaataggcccaaattgtccaggaataattacacctgaagaatgtaaaataggaataatgccaggaaaaattcacaaaaaaggttcagttggaattgtttcaaggtcaggaactttaacttatgaagctgtagcacaaactactgagattggattaggccaatcaacctgtataggcattggaggagatccaatcaatggaacaaattttattgattgtttagatctttttttaaatgatgaggaaactgaatcaattctaatgattggtgaaattggtggaacagacgaagaaaatgcatctgaatttttaaaaaatcataaagtaaaaaaacctgttattggctttatagctggaattacagcgccaccaggaagaagaatgggtcatgcgggagctataatttcaggtggaaaaggtggagccaaagagaaaataaaaaaaatggaagaatgtggtattactatcgctaaatctccatcagaaataggaaaaacattatttaatcaattgtctaattgaa

SEQ ID NO: 308263 - DNA, 877 bp, Unknown
  Bacterial polypeptide expressing nucleotide sequence isolated from the Sargasso Sea
atgtctattttaatagataaaaatacaaaagttatttgccagggttttactggaaagcatggaacttttcattctgaacaagcaataaaatacggaacccaattagtaggaggtgttactccaaaaaaaggaggtcaaaagcatttaaatcttccagtttttgatacggtaaaagatgcaaaaaacaaaactggtgctacagcgacaatgatttatgtccctgctaaatttgctgcttctgcaataattgaagcaatagatgcagaaatagaactaatagtttgtattaccgaaggtgtgccggttttagacatgataagagtaaaaaatcttcttaataaaagtaaaagtagattaattggccctaactgcccaggaattataacaccaggtgaatgtaaaattggtatcatgcctggagacattcatacaaaaggcaaagttggaattgtttcaagatccggtactctaacctacgaggctgtagcacaaactacggaaaatggtttgggccaatctacgtgtattggtattggtggcgatccaataaatggaacaaactttatcgactgtctcgaattattttttaatgatccagatacagagtcgatcataatgattggtgaaataggtggttcagcggaagaagaagcctctgaatatattaaaaaatctaaaatcaaaaaacctatagttggttttattgctgggcttactgctcctccaggaagacgcatgggtcatgcaggagctataatatcaggaggacaaggtggcgcagaaaataaaattgcactcatgaagtcggcaggaatcactatttcagattccccagcagatataggaaaaactttatataaaaaactaaatagttaaa

SEQ ID NO: 308264 - DNA, 877 bp, Unknown
  Bacterial polypeptide expressing nucleotide sequence isolated from the Sargasso Sea
aatgtcgatattagtcaataaaaatacaaaagtaatttgtcagggttttacaggtactcacggaactttccattcagaacagtctataaaatatggaacaaaattagttggaggtgtcactccaaaaaaaggtggacaaaaacacttaagtcttccagttttcaacacagttcaagaagcaaaagataaaacagaagcaaatgcgacgatgatctatgttcctccgaaatttgctgctgaagcaatcttagaggcaattaattcaaagatagaacttatagtttgtattactgagggaatacctgttttggatatgctaaaagtaaaaaaagaattatcaagaagcaactcaaggcttataggaccaaattgcccaggaataattactcctgaagaatgtaaaattggaatcatgccaggtaacattcataaaaaaggaacagttggaattgtttcaagatcgggaacattaacttatgaagctgttgcacaaacttcatctaacggcatggggcagtccacttgtataggaattggtggagatcccatcaatggaacaaatttcatagattgcttagaactttttttaaaggacaatgatactagatctatagttatgataggagaaattggcggttcagctgaggaagaagcagcggaatttttaaaaaaagagaaaataaaaaaacctatggtaggctttatagcaggtttaaccgcccctcctgggagaaggatgggacatgcaggcgctattatatcaggcggaaaagggggagcagaggacaagatagagaccatgaaatctgcaggaatcactatcgcaaactcgccagctgatattggtaagacacttttgctaaaacttaatggttaa

SEQ ID NO: 308265 - DNA, 877 bp, Unknown
  Bacterial polypeptide expressing nucleotide sequence isolated from the Sargasso Sea
atgtcagttttagtaaacaaaaatacaaaagttatttgccaaggttttactggaaaacatggaacctttcactctgaacaagctttaaaatatgggactaaattagttggtggtgtcacaccaaaaaaaggtgggacaaaacatcttgggcttccagtttttaatactgtagctgaggcaaaagaaaaaacatcggcaaatgcaacaatgatttatgtgcctccaaagtttgctgctgcagctattatagaagcaatagatgcagaaatggatttaatagtttgtataactgagggcataccaatttttgatatgatgaatgtaaaaaaagaaattataaatagcaaaagcagacttataggacccaactgcccgggaataataacacctgaagaatgtaagattggaataatgccaggctcgattcacaagaaaggttctgtaggtattgtttcaagatcaggcacattaacttatgaggcggtggctcaaacaaccaaaaatggtttaggtcaatcaacttgtattggtattggaggcgatcccatcaatggaacaaattttattgactgtcttgatctttttttgaaggataaagatactcactctattgttatgattggagaaattggtgggtcagcagaggaagaagctgcagaatttttaaaaaagtctaagataaaaaaacccacagttggttttatagctggattgacagccccaccaggcagaagaatgggacatgctggcgcaataatatcaggtggaaaaggaggcgcggaagacaaaatagaggttatgaaatcagcagatataacgatatcaaaatctccagctgatataggaaaaactatttatgaaaaacttaataattaaa

SEQ ID NO: 308266 - DNA, 865 bp, Unknown
  Bacterial polypeptide expressing nucleotide sequence isolated from the Sargasso Sea
atggctgtaataatacagaaaaacaccaaaatattaattcaagggttcacaggcaaaatgggaacttttcatgccgaagaaatgattaaatatggatctaatgtagtggggggcgtaacaccaggaaagggtggaacaaagcatctaagtcttccagtttttaatactgttaaagaagcagttaaagatactggggcaacagcatcaattttatttgttcctcctgcttttgcagctgattctgccatggaagctgcagacgctggaattaaaacatgtgtcgctatagttgatggaataccctcacatgacatgattagaattaaaagatatatgagaagatattcaaaagtagaaaagatgagtttagtaggaccaaattgcgctgggattatcagtccaggtaaatctatgttaggaattatgccggggcatatttataaagagggaagagtaggaattataagcagatctggaactttgggatatgaagctgctcaacaacttaaaaatttaaatattggtgtatcaacaagtgtaggaattggaggagatccaattaatggaagttcttttaaagatataataggtaaatttgagcaggatgacgaaacagatgttattttgatgattggtgaaattggaggaccacaggaagtagcagcgggaaaatttgcaaaagaaaatatgaaaaaacctgtagttgcttatattgcaggtttgacagcgcccaaaggaagagtcatgggacatgcaggtgcaatagtatcagcatacggagaaagtgcagtagaaaaagttgaaattcttaaagaatttgggattacaatttcaaaaaatccttccgtaatggggaaacagttaa

SEQ ID NO: 308267 - DNA, 802 bp, Unknown
  Bacterial polypeptide expressing nucleotide sequence isolated from the Sargasso Sea
tatgtctgttttagtaaacaaaaatactaaagtaatttgtcaaggatttactggttcacatggaaccttccattctgaacaggctataaaatatggaacaaatttagttggtggggttacaccaaaaaaaggaggtcaaaaacatttagatagaccagtttttaatactgtaaaagaggcaaaaaatgaagttggtgcagatgcaactatgatttatgttccagcaaaatttgctgctgccgcaattattgaagcaattgattcttcgattgaacttattgtttgtataacagaaggaatacccattcaggacatgcttaaagtaagacaaaaattaaaaaattctaaaagcagactgattgggcctaattgcccaggaattattactccaggtgaatgcaaaattgggattatgccaggaaatattcataaaagaggtacagttggtattgtttcaagatcaggaactttaacatatgaggcagtagctcaaacaacagaaaatggacttggtcaatctacttgcattggaattggtggtgatccgataaatgggacaaattttatagattgtttggatttattcttaaatgatggcgaaactcagtcaattttaattattggcgagataggaggaacagctgaggaagatgctgcagaatttataaaaaatcacaaaattaaaaaaccaatagttggatttattgcaggaattactgctcccccaggaagaagaatgggccatgcaggagctataatttcaggtggaaaaggcggtgcagaagataaaataaaaaaatga

SEQ ID NO: 308268 - DNA, 895 bp, Unknown
  Bacterial polypeptide expressing nucleotide sequence isolated from the Sargasso Sea
atgaccgtccttatagataaaaatacaaaaatattaatacagggatttactggtaaaatgggatctttccatgctgaggaaatgattaagtatggctcaaatattgtgggaggagtaacgccaggcaaaggtggattaaaacatttaaaccttcctgtctttaatactgttaaagaagcagtcactcaaacaggtgcatctgcttcaattttatttgtgccacctgcttttgcagcagactcagctatggaagctgcagatgctggaattaaaacatgcgttgcaatagttgacggaataccatctcatgacatgattaaaataaaaagatatatgagaaggtattcaagagtcgacaaaatgacattgatcggacctaattgtgcaggcgttattagtccgggaaaagcaatgttaggaataatgcctggacatatatataaagaaggtcgtgtcggtattattggaagatcaggaacactcggatatgaagccgcacaacaattaaaaaatttaaatattggtgtatcaactagtgtaggtattgggggagatccaattaatggaagttcttttaaagatattttagaaaaatttgaaaaagatgaagaaacagatgcagtgcttatgattggcgaaataggcggtccgcaagaagttgcagcaggaaaatttgccaaagaaaatatgaaaaaaccagttatagcttacatcgcaggtttaaccgctccaaaaggtagagtgatgggccatgcaggggcaattgtgtctgcgtatggagagagcgctgttgaaaaagttgagctattaaaagaatgtggagttactatttctaaaaatccctcagttatgggagaaacagtaaaagcagctttaaatggcaaaacgacttaaa

SEQ ID NO: 308269 - DNA, 865 bp, Unknown
  Bacterial polypeptide expressing nucleotide sequence isolated from the Sargasso Sea
tctggtgaatcaggaaactaggatcctttgtcaaggcatcacaggttcccaaggctcattccatgcggaacagtgtattgaatacggttcaaatattgtcgcgggtgtgactccaggaaaaggcggatcaactcatcttgatgttcctgtctttaattcagttgctgaagcgacatccgaagtagaaatagatgtcagcatgatatttgtgcctgcaaaatttgcagctgatgccatgaaatcagcaattgaatcagaaattggactgattgtttgtattacagaaggggtcccagtccaagatatgatcgaagtcaaagccatgttgaagggctcagattcaatactattggggccaaattgtcctggcatcataacgcctgaagaaacaaagattggaattatgcctggtttcatacatcaaaaaggttctataggaattatttccagatctggcaccctgacttatgaggctgttcatcagacttctatgtgtggtctgggtcaaagtacttgtattggaatagggggcgatcccattaagggtctcaatttcattgaatgtctgtcactttttgaggaagatccagcaacagaaggaattgtgatggttggtgaaattggaggttcagacgaagaaaaggcagcagagttcatcaaagacaatatcactaaacctgttgttgcctatgtcgctggtgtttcagcaccaccggggaaaagaatgggtcatgccggagcaatcgttactggcaatgaaggcaccgctttaagtaaatacaaagcactgaatgacgcgggagttaaaacaactcattccccagctttgattggtgaaatcatgaaagaattactcaatcaatga

SEQ ID NO: 308270 - DNA, 874 bp, Unknown
  Bacterial polypeptide expressing nucleotide sequence isolated from the Sargasso Sea
gttgagtattttaattgataaagataccaaagtaatttgtcagggttttactggtggtcaagcaactcaacactgtattcagtgcatagattatggcactcaattagtaggaggagtgactccaggaaagggagggcaaacacacctagatttacctgttttcaattctgttaaagaggcagtcagtcaaaccgaagcaacggctagtattatttttgttccagctcgtttttgtaaggcttcaatacttgaagctgcggaatcagggatatctttaataatatgtattactgaaggaatccctacaattgatatgcttgaggttaaagttagatgtgacaatctgggagtaaggctaataggccctaattgccctggaattattactccaggcgaatgcaagatggggattatgcctggcgatattcatcttccaggtaaagttggagtgatatctagatcaggcactcttacttacgaagccgtcaaacaaacaactgacttaggctttggacaaacaagttgtgtgggaattggaggagatccagtgcccggatcaagttttatagacatattagatttattccaaaatgatcataaaacagaagcaattgttatggttggagaaataggaggaaccgcagaagaagccgctgctgagtttatccaatcaaatgtaacaaagcctgtggtttcctatattgccggggtaacagctccagcgggaaaaagaatggggcatgctggtgccataattgcagggggtaagggaacagctgaagataagtttaaagccttagaggcagctggagtctacactgttaaaagccccgcagacataggaaagggtgtagctgagataacgggatggtaa

SEQ ID NO: 308271 - DNA, 874 bp, Unknown
  Bacterial polypeptide expressing nucleotide sequence isolated from the Sargasso Sea
aatggctgttctcgttgataatagtacaaaggtaatttgccagggtctgactggttctcaaggtacatttcattctgaacaagcaattgcgtatggcactagaatggtgggaggggtcacgcccggtaagggggggactaaacatcttggattacccgtttttgatacggtagcggaggcaaaagaaaaatcaggcgcagatgtttctgtaatttatgttccgccttttgcagcagcagaggcaattctggaggcgatagaggcggaaattgagttagtcgtttgcattactgaaggcataccagtaatggatatggttcgtgtaaaagacaaacttcaaaaatctagaacgcgcctaattggtcccaactgtcccggaataataactccaggagaatgtaaaataggaataatgcctggtcatatacataagcgcggaaaaattgggatagtatcaaggtcgggaaccttaacttatgaggccgttcatcagacgactaaagttggattggggcagtcaacttgcataggtatcggaggagatccggttaatggaaccaactttattgattgtttggagttgtttttatctgactctgaaactgagggcataattatgattggtgagattggtggatctgcagaggaagatgcatcccaatttattcgaggtaatagtataaagaaaccgatggcaggttttatagcaggaattactgctccacctggaagaagaatgggccatgctggagcgattattgatgggggtaaaggtgcggcaggagataaaatagaggcaatgaagtctgcaggaatagtcgtatctgaatcacctgctaagttgggtgaaactatgctaagtataatagcctaa

SEQ ID NO: 308272 - DNA, 877 bp, Unknown
  Bacterial polypeptide expressing nucleotide sequence isolated from the Sargasso Sea
aatgtcagttttagttaacagaaatacaaaggtaatttgccaaggttttacaggttctcatggaacatttcactctgaacaagctataaaatacggtacaaatttagttggaggagtcactcctaaaaaaggtggccaaaaacatttggatctcccagtttttaatactgtaaaagaagcaaaagattcagagggcgcaaatgcaactatgatctatgttcctgcaaaatttgctgcagcagctataatagaggctatagatgcctcaatagaattaattgtttgtataactgagggaattcctatccaagatatgattaaggtaaaacaaaaattatctaaatcaaaaagtagattgataggtcccaactgtccaggaattattacacctgatgaatgtaaaattggtattatgcctggaagtattcacaaaaagggatcagttggaatagtttctcgttctggcacattaacatatgaagcagttgcacaaactactgaaaacggtttaggccaatctacctgtataggtataggtggagatcctataaatggtaccaattttattgattgtttagatttatttttaaatgatgaagaaactgagtcaattttaatgattggagagattggaggttctgctgaggaagaggcttcagactttataaagaatcacaaaattaaaaaaccaatagtgggttttattgcaggaataaccgcacctccagggagaagaatgggccatgctggagcaataatttctggaggcaaaggtggcgctgcagataaaataaaaaagatggaggattgtggaataactatagcaaactcaccttcaaaaattggaaagacattattcaataaattgtctgattga

SEQ ID NO: 308273 - DNA, 889 bp, Unknown
  Bacterial polypeptide expressing nucleotide sequence isolated from the Sargasso Sea
atggctatattaattacaaaggaatcaaaaattatcattcaaggttttacaggaaagattggaacattccatgctgaagagatgattgaatatggaacaaatgttgttggtggagttactcccggcaaaggtggccaaacacatcttgatagacctgtttttaataccgttaaagaggctgttaaagagactggagccgattcaagcattcttttcgtacctcctgcctttgctgctgattcagctatggaagctgctgatgctggcataaagacattagttgctattacagatggtatccctgctcatgacatgatcaaggttaagcgatatatgcgacgatataaaaatgaagatagaatgacaatggttggaccaaattgtgctggagtcattagcccaagcaaatgtatgttgggtataatgcctgggcatatttacaaagagggaaatgttggtgttataggccgatcaggaacattaggttatgaagctgcgcaacaaatgaaaaacctaggaattggtatttcaacaagtgttggaattggtggtgatccaattaatggaagttcgttcaaagaccatttagcgaaatttgaacaagacgacgaaactaaagtcattttaatgattggtgaaattggcggacctcaagaagctgaggcggcagagtttgcaaaagcaaatgtaactaaaccagttattgcctatattgcagggttaacagcacctaaaggtaaacgaatgggacatgctggagcaattgtaagctcaaaaggtgagtctgctgctgataaagtagagattcttcaagcggctggaattacgatagcaaaaaatccatctgtgattggcgatacagtagaatcagtgttaaagtctctctaga

SEQ ID NO: 308274 - DNA, 877 bp, Unknown
  Bacterial polypeptide expressing nucleotide sequence isolated from the Sargasso Sea
catgtcaatattagttaataaaaatacaaaagtaatttgtcaaggttttacaggatctcatggcacatttcactccgaacaagcaattaaatatggaacaaatttggtaggtggtgttactccaaaaaaaggaggacaaacacatcttgatcggcccgtttttaatactgttgaagaagcaaaaaaagaaactggtgctaatgcaagcatgatttatgttccagcaaaatttgctgcatcagctataattgaagcaattgaatcttctatagaaattatagtttgtgtaactgagggtatacccgtgcaagatatgcttcaagttaagttaaaattaaataattcaaagagtaggttaataggacctaattgccctggaataattactcctgacgaatgtaaaattggaattatgcccggtattattcacaagaaaggtagcgtgggaattgtatcaagatctggtactttaacttatgaagcggttgcacagactactgaaaatgggttaggtcaatcatcgtgtattggaatcggtggagatccaataaatggaacaagttttattgattgtttggatttattcttaaaagacgatgaaaccaaatcaattttgatgatcggagaaataggcggaacatcagaagaggaagcttctgaatttttaaaaaaccacaaagttaaaaaaccaatcgttggttttattgctggaattactgctccacctggaagacgaatgggtcatgctggagctattatctcaggaggcaaaggaacagctcaagataaaataaataagatgaaggaatgtggaattactatcgcaaaatcacctgcagaaataggcaaaacattattaaataaattgtctaattga

SEQ ID NO: 308275 - DNA, 649 bp, Unknown
  Bacterial polypeptide expressing nucleotide sequence isolated from the Sargasso Sea
atgtcagtaattgtaaataaagatacgaaagttatttgtcagggttttactggttctcaaggtacatttcattcagaacaagcaatcaagtacggtaccaaaatggtaggtggagtaacaccaaaaaaaggaggaacccaacatcttggattacctgtattcgatacagtaaaagaagctaaagaaaaaacacaagctaacgcttccgttatttatgtaccgcctccatatgctgcgaaggcaatccttgaagcaatagatagtgagattgaacttattgtttgtatcactgaaggtattccagtcatagatatgtttaatgttaaagacaaattaagatcatcttcatccagacttattgggcctaattgtccaggaattataacaccggatgagtgtaaaataggtattatgcctgcacatattcacaaaaaagggaatgtgggaattgtatcaaggtctggtacccttacatatgaggctgtttatcaaaccacagttgagggtttaggtcagtcaacatgtataggaatcggaggcgatccagttaatggtactaactttattgactgtttagaactatttttgtctgatccagagactaagtcaataattatgattggtgaaattggaggatcagcagaagaag

SEQ ID NO: 308276 - DNA, 683 bp, Unknown
  Bacterial polypeptide expressing nucleotide sequence isolated from the Sargasso Sea
tgccaacgctacaatgatatacgttccaccgaaatttgctgcctcagcaattatagaagcaataaatgcgaatttagatttaatagtttgtataaccgagggtattccagttatggacatggtaaaagtcaaacaatctttaaaaaaaagtaaaagtagattaatcggtccaaattgtcctggaataataacacctgatgaatgcaaaattggtattatgccaggtaacattcataaaaaaggtactgtaggaattgtatctagatctggaacacttacctacgaagcagtagctcaaacttcgttaaatggtctaggacaatctacttgtattggcatcggaggcgatccaatcaatggaacaaattttattgattgtttagatttatttttaaaagacgaagatactcattcaattgtaatgataggtgaaattggaggttcagccgaagaggagtctgcagaatttttaaaaagatctaaaattaagaagccaacagtaggttttgtcgctggactaactgctccagctggaagaaggatgggacacgctggcgcaataatatctggtggcaaaggtggcgcagaagataaaatagaagtgatgaaatctgctggaattaccatatcaaagtccccagctgatattggaaaaactcttttcacaaaactaaaaatttaaa

SEQ ID NO: 308277 - DNA, 850 bp, Unknown
  Bacterial polypeptide expressing nucleotide sequence isolated from the Sargasso Sea
atgacggagtacgggacagatgtcgtaggaggggtcacccctggtaagggtggccaagtggtcgatctccctggtcggtctgtccctgtctacgataccatggggcaagccgtttccgaaaccgatgctgatgttagcgtgatatacgttccagcgagattcgcagcagcagcaattgtcgaggcagccgatgccttcaacgaaatcaagggcgagggattgattgtatgcattactgagggaatccctactcttgatatgattagatgcgtagggcacatttcggaaatgcccggaatcaggcttattgggcccaattgtccaggaatcataactccgggagaaaatggtggttgcaaggtgggaatcatgccaggatacatacacgctaagggaagaataggcatcatctcgaagtctggtacactaacctacgaggcagtagctcaaacaatgagtgtgggagagggtcagaccacgtgcataggtatcggaggggaccctatcagtggaactggattcatagactgtcttgccgcttttgaggaggacccagagaccgaggccgttgtgatgatcggagagatcggtgggacagctgaagaagatgctgcggcctgggctgcagacaacttcagcaagcctattgtcggtttcgttgcaggagcaacagcacctcccggtaagagaatggggcacgccggggcgattatctccggtggaaagggcacggcggaggagaagttctccgcattcgagaaggcagggattcacattgccagagatccatccaagattggggaagtgctagtctcggttttgattgaagccggactacgagagccttagg

SEQ ID NO: 308278 - DNA, 874 bp, Unknown
  Bacterial polypeptide expressing nucleotide sequence isolated from the Sargasso Sea
atgagtattttaattgataaaaataccaaagtaatatgtcagggctttacaggaggccaagcaacgcaacattgtattcaatgcttggattacggtactcaattagtaggaggagttacccctggaaaaggtggtcagacccatttagatcttccagtttttaattctgttaaagaagctgttgataccactggagcgacagctagcctaatattcgtgccagctaagttttgtaaagcttcaattattgaagcagctgaatcaggtatttctttgattgtctgtataactgagggtattcccacgatagatatgttggaagtaaaagccagatgcgatgaacttggagtcagattaattggacctaattgtccaggtattattacaccaggtgaatcaaagatgggaattatgcctggagatattcacctgcctggaaaagtaggcatcatatccagatctggaactctaacttatgaagcggtgaaacaaacttctgaccttggctttgggcaaactagctgcataggtatcgggggagacccaataccaggaacaagctttatagatgtattagatttatttgaaaaagatgactctactgaggcaatcgttatggttggcgaaataggaggaacagcagaagaggcagcagccgaatttatacaatcaaatgtcagtaagcctgttgtatcttatatagcaggagtcactgcccctcctggcaaaagaatgggtcatgctggtgcaattatcgctggaggaaaaggaacagcagatgataaatttagagcattagaagccgcaggagttcatactgtaaaaagccctgctgatattggtaaaggcatagcagagattacaggatggtaga

SEQ ID NO: 308279 - DNA, 871 bp, Unknown
  Bacterial polypeptide expressing nucleotide sequence isolated from the Sargasso Sea
atggcaattttaattgatgaaaatacaagagttgttgtccagggattaacaggtcgagaaggccagttccatgcattaagaaatagagattatggtacaaacattgttgcaggcacaaggccaggtaagggtggtgaaaatatagaatccataccaatatttaatactgttcaagaagctgtcaaagaggaaggagctaatgtagctatgacttttgttccacctgcttttgctaaggaggctgtattagaggcagcatttgctgggtgtgaattaattgtatgtattacagaaggtattccagcaaaagatgaagctgaaatgtatgacataatcaaaaaagaaacaaattcaaaattgctaggtccaaattgtccaggtttgatttctccaggtaaatcaaatgttggtattatgcctcatgaaattactaagcaaggaaacgttggtgttgtatcaagatcaggtacattgacttatcaagctgttcacgaattaacacaattagagattggccaatcaacatgtataggaattggaggagacccagtccctgggatgtcttttattgatgtccttgaagagtatgaaaaagatgatgaaacttcctcgattgtaatgattggtgaaattggaggaagtgccgaagaagaagcagcagattttattaaaaacaacatttctaaaccagtagtatcatatatagctggagtaacagctcctcctggcaaaaaaatgggccatgctggagcaatagtttcaggaaacaaaggaactgctcaagcaaaaatggatgcattaaaagatgcaggagtaaatgtagtttcaaatcctacaaaaataggtaatgctataaagaaagtcatttaat

SEQ ID NO: 308280 - DNA, 874 bp, Unknown
  Bacterial polypeptide expressing nucleotide sequence isolated from the Sargasso Sea
aatgagtattttggttagcaaagagtctagaatcctttgtcagggaatcacaggctcccaaggctcattccatgccgaacagtgtattcagtatggttcaaatattgtagcaggagtgactccaggaaaaggcgggtcaactcatcttgatgttccagtttttaactcagttgatgaagctaaagcagatctagaaattgatgtcagcatgatatttgttccggcaaaatttgcagcagatgcaatgaaatcagcaattgaatctgaaatagggcttattgtttgtattaccgagggagtccctgttcaagatatgattgaagttaaagccatgctgaatggctctgactccatactattaggcccaaattgtcctggcatcataacgcctgatgaaaccaagattggaatcatgcctggcttcattcatcaaaaaggttctgtaggcatcatttcaagatcgggcacactgacttacgaagctgttcatcaaacttcaatgtgtggccttggacaaagcacctgcattggcataggcggtgatccaatcaagggtctaaactttattgaatgtttgtcgctctttgagaaagatccagaaacagagggaattgtgatggttggcgaaattggcggttcggacgaagagaaggccgcagagttcatcaaagaaaatattagcaagcctgttgtcgcttatatagctggggtttcagcgcctcctggtaaaagaatgggccatgcaggagcaatcgttactggcaaagagggaactgctttaagcaaatacgaggccttgaatgacgctggagttgcaactacagattcgcctgcattgattggcaaaatcatgaaagatttactcaatcgataa

SEQ ID NO: 308281 - DNA, 889 bp, Unknown
  Bacterial polypeptide expressing nucleotide sequence isolated from the Sargasso Sea
aatggctgtaatcatagataaaaataccaaaattattgtacaaggctttacaggaaaaatgggaagttttcatgctgaagaaatgatcaaatatggttctaatattgttggaggagtgactccaggaaaaggtggatcaaaacatcttaatcttccagtttttaatacagttaaagaagcagtaaaaaatactggagcaacagcttctatattatttgtaccaccagctttcgccgcagactcagctatggaagctgctgatgctggtattaaaagttgcgttgcaattgtcgatggcatcccatcgcatgatatgattaggattaaacgatatatgagaagatatactaaatctgaaaaaatgagtttagttggtccaaattgtgctggtataattagtccaggtaaatcaatgttaggtataatgccaggtcatatatataaagagggaagagttggtataataagtagatcaggaactttaggttatgaagctgcacaacaattaaaaaatttaaatattggcgtttcaacaagcgttggtattggtggagaccctattaacggaagttcttttaaagatattataggaaagtttgaagaagatgatgaaacagacgcaatattaatgattggagaaataggtgggccacaggaagttgcagctggaaaatttgcaaaggaaaatatgaaaaaaccagttattgcctatattgccggcttaacagcaccaaaaggcagagttatgggacatgctggagcaatagtttctgcttatggagaaagtgcggtagaaaaagttgaaattttaaaggaatatgggattacgatttcaaaaaatccatcagttatgggtgatacagtaaaaagtgttattagtaaatcttaa

SEQ ID NO: 308282 - DNA, 883 bp, Unknown
  Bacterial polypeptide expressing nucleotide sequence isolated from the Sargasso Sea
aatgtctgttatcgtcaacaaagatacaagagttatttgccaggggtttactggagcacaaggaacatttcattctgagcaggctatcaaatatgggacaaacatggttggaggtgtcacgcctaaaaagggtgggtcaatgcatcttgaacttccagttttcgatacagtaaaagaagcgaaagaaaaaactaatgctaatgctacagttatttatgttccaccgccctatgcggcaaacgcgatcattgaagcgattgatagtgagattgaattaattgtttgcatcacagaaggtattcccgtgatggatatgatgaaagttaaagataaattaagctcttcatcttcaaggttaattggccctaactgtccaggaataattacgcccgacgagtgcaaaataggcatcatgccagctcacattcataaaaaaggtaatgtaggtattgtctcacgatcaggaactcttacttatgaggcagtatatcaaacaacagtagcaggcttgggtcaatctacatgtattggcataggaggagatccaataaatggaactaattttattgattgtttagatttgttcctttctgatccagaaactgagtcaataattatgattggagaaattggaggatcagcagaagaggaagctgctgaatttttaaagaaacaaactacaaaaaaacctacagtgggctttattgctgggacttcagctccaccaggcagaagaatggggcatgctggcgcaattgtttctggtggtaaaggcggtgcagacgacaaaattgaagcaatgaaagaggccggcattcaaatttcgaattcccctgctgcattagggtcgactttacttgaggtattgaagaatcaaatctaa

SEQ ID NO: 308283 - DNA, 871 bp, Unknown
  Bacterial polypeptide expressing nucleotide sequence isolated from the Sargasso Sea
atgagtattttagttaataaagacaccagagtaattgttcaaggctttactggctctcaaggaacattacattctgagcagtccatagagtatggtacaaatatagttggaggtgttactcctggcaaaggaggaatagagcatctaggtaagccagtttttaattctgttgaagatgctaagagttctctagatccaaatgcttctattatttttgtgccagcaagattctgtaaagactcaattttggaatcagctgaagcaggcatcaaattgattatttgtataaccgaaggaattccaacattagatatgcttgaagttaaaaaacgagttgatgagcttggagtaagattgattggacctaattgtcctggaatcataacaccgggtgaagctaagctaggaataatgcctggagatattcatatgccaggctcaattggcataatttcaagatctggcactctaacttatgaagcagttaaacagactaccgatttaggctttggacaaagtagctgtgttgggattggaggagatccaataccaggatcttcatttattgatatgcttaaattatttcaagatgataaacaaacggaagcaattgttatggtaggagagattggcggcacagcagaggaagcagctgcagagtatataaaaaataatattacaaaacctgtaatctcatatattgctggtaaaacagcgcctgctggtaagagaatgggtcatgcaggtgcaattattgctggcggaaaaggcacagctgataacaaaattgagaaactgcaagaatgtggagtatatgtagcagataatttagtatctattggttctaaagttgctgaggtgcttggctaaa

SEQ ID NO: 308284 - DNA, 874 bp, Unknown
  Bacterial polypeptide expressing nucleotide sequence isolated from the Sargasso Sea
atgagtatactagtcaataagaattcaaaaataatagttcaaggttttacaggttccgaaggaacatttcattctcaacaaatgattgagtatggaacaaacattgttggtggtgtaacacctggaaaaggaggtttaattcatttggataaacctgtttttaacacagtagaagatgctgtaaatgcaacagacgcaaacacatcaatcatatttgttcctgctggttttgcagctgatgcaatttttgaatctgttgatgctggaataaaagttatcgtttgtataactgagggtattcctgttttagatatgaccaaagtttataactatataaagcaaaaagattgtactttgataggtccaaattgtccgggaatcataacgcctgatgaagctaaagttggaataatgcctggatttgtttttaaaaagggtagagtaggtttagtttctaaatcaggtacattgacatatgaagctgcagatcagatagttaaagaaggttttgggatttcaacagcgattggtataggtggtgatccaataattggcaccacagttgaagatgctgtgaagttcttttttgaagacgatgagaccgattgtgttgtaatgattggtgaaattggcggccaattagagaataatgctgctcaatggataaaaaaatcaaaaatcaaaaaacctgtaataggattcatagctggtgaaactgcaccaaagggaagaaccatgggacatgcaggtgctatagtagggggcaaagatgatactgctgccgcaaagaaaagtattttaaaagaatgtggagtacatgttgccgattctcctgctgatataggtaaatttgtcaaaaaatatattaattaaa

SEQ ID NO: 308285 - DNA, 883 bp, Unknown
  Bacterial polypeptide expressing nucleotide sequence isolated from the Sargasso Sea
catgtcgattctgatcaacaaggacacgaaggtcatcacgcagggcattaccggcaaaaccggtcagttccatacgcgcgcctgccgtgaatacgcaaacggccgcgaagcattcgtcgcgggcgtgaaccccaagaaggccggcgaagatttcgaaggcattccgatctacgcaagcgtcaaggaagcgaaggcggaaaccggcgcgaccgtgtcggtcatctacgttccgccggcaggcgcagcggctgcgatctgggaagcggtcgaagccgatctggatctcgcgatctgcatcacggaaggcattcccgtgcgcgacatgatcgaagtgaaggaccgcatgcgtcgcgaaggccgcaagacgctgctgctcgggccgaactgcccgggcacgatcacgccggacgaactgaagatcggcatcatgccgggccacatccaccgcaagggccgcatcggcgtcgtgtcgcgttcgggcacgctgacgtatgaagcggttgcccagctgacggcactcggcctcggccagtcgtcggcagtcggtatcggcggcgacccgatcaacggtctgaagcacatcgacgtgatgaagatgttcaacgacgatccggacacggacgcagtcgtgatgatcggcgaaatcggtggtccggacgaagccaatgcggcggagtggatcaaggacaacatgaagaagccggtggtcggcttcatcgctggcgtcacggcgcctccgggcaagcgcatgggccacgccggcgcgctgatctcgggcggtgcggatacggccgaagcgaagctggaaatcatggaagcgtgcggcatcaccgtcacgcgcaacccgtcggaaatgggccgtctgctgaagaaggcgctgtaa

SEQ ID NO: 308286 - DNA, 883 bp, Unknown
  Bacterial polypeptide expressing nucleotide sequence isolated from the Sargasso Sea
catgtcgattctgatcaacaaggacacgaaggtcatcacgcagggcattaccggcaaaaccggtcagttccatacgcgcgcctgccgtgaatacgcaaacggccgcgaagcattcgtcgcgggcgtgaaccccaagaaggccggcgaagatttcgaaggcattccgatctacgcaagcgtcaaggaagcgaaggcggaaaccggcgcgaccgtgtcggtcatctacgttccgccggcaggcgcagcggctgcgatctgggaagcggtcgaagccgacctggatctcgcgatctgcatcacggaaggcattcccgtgcgcgacatgatcgaagtgaaggaccgcatgcgtcgcgaaggccgcaagacgctgctgctcgggccgaactgcccgggcacgatcacgccggacgaactgaagatcggcatcatgccgggtcacatccaccgcaagggccgcatcggcgtcgtgtcgcgttcgggcacgctgacgtatgaagcggttgcccagctgacggcactcggcctcggccagtcgtcggcagtcggtatcggcggcgacccgatcaacggtctgaagcacatcgacgtgatgaagatgttcaacgacgatccggacacggacgcagtcgtgatgatcggcgaaatcggtggtccggacgaagccaatgcggcagagtggatcaaggacaacatgaagaagccggtggtcggcttcatcgctggcgtcacggcgcctccgggcaagcgcatgggccacgccggcgcgcttatctcgggcggtgcggatacggccgaagcgaagctggaaatcatggaagcgtgcggcatcaccgtcacgcgcaacccgtcggaaatgggccgtctgcttaaggcctctctgtga

SEQ ID NO: 308287 - DNA, 379 bp, Unknown
  Bacterial polypeptide expressing nucleotide sequence isolated from the Sargasso Sea
atggttaatggagcaggtttagcaatggctactatggatataattaaattatatggacaagagcctgcaaattttttagatgttggcggtggtgcctctaaagaaaaagtctctgcagcatttaaaattattttatcagataaaaatgttaagggaattttaataaatatttttggtggaatcatgcgatgtgatgttttagctcaaggagtagttgatgctgcaaaagagataaacataaacgttcctttagttgttagacttgcaggtactaactttgcagaaggaaagaaaatattagataattcaggtttaaaattaatttctgcagaaaatttagatgatgcagctaaaaaaatagttgaagctataaaataat

SEQ ID NO: 308288 - DNA, 877 bp, Unknown
  Bacterial polypeptide expressing nucleotide sequence isolated from the Sargasso Sea
atgtcagttttagttaataaaaatacaaaagttatttgtcaaggatttacaggctctcatggaactttccattctgaacaagcaataaaatatggaactaatttagttggaggtgttactccaaagaaaggtggacaaacccatctaaataaacctgtttttaatactgtaaaagaagctaaagataatttaggtgctaacgcgacaatgatttatgttccagctaaatttgcttcagcagctattattgaagccatagatgcttcgattgacctaattgtctgtattacagagggaataccaattttagatatgttaaaagtaaagcaaaaacttcaaaattcaaattcaagattaataggacctaattgtccaggaataataactccagatgaatgtaaaataggaattatgccaggatcaattcataaaaaaggatctgtaggtatagtctctagatctggaacattaacctatgaagctgttgcacaaacaacagaaaatggcctgggacaatcaacctgcataggaataggaggtgatccaattaatggaactaatttcatagactgtttagatttatttttgaaagatgatgaaacagaatcaattctaatgattggtgaaattggcgggacttctgaagaagaggctgcagagtttattaaaaatcaaaaaatcaaaaagcccatagtaggatttattgcaggtgtaacagcgcctccaggtagaagaatgggtcatgcaggagcaattatttcaggtggcaaaggtggagcaatggataagatcaaaaccatggaagattgtggtattataattgctaaatctccatctgaaattggaaaaactttactaaataaattgtccaattgaa

SEQ ID NO: 308289 - DNA, 559 bp, Unknown
  Bacterial polypeptide expressing nucleotide sequence isolated from the Sargasso Sea
atgtcagttttagttgataaagatactagattaatttgccaaggttttacaggttcacatgggacatttcattctgagcaggcaattaaatatggaaccaaattagtggggggtgttactccaagaaaaggtggacaaaaacatttgggattaccagtttttaacactgttaaagaagctaaagattcagagggtgctaatgcaacaatgatttatgtaccagcaaaatttgctgcagctgcaataattgaagcaattgatgcttctattgaactaattgtttgtataacagagggaattccaattctggatatgattagggttaaacaaaaattaataaaatcaaactccagattaataggtcctaactgtccaggaattataactcctaatgagtgtaaaattggaattatgcctggtaatattcataaaagaggatctgttggcatagtttctagatctggtactttaacttacgaagctgtggcccaaacaagtgaaaatggactaggacagtcaacttgtattggaataggtggtgatcctatcaatggtacaa

SEQ ID NO: 308290 - DNA, 832 bp, Unknown
  Bacterial polypeptide expressing nucleotide sequence isolated from the Sargasso Sea
attacgctggatagaaatactgagatggatgtcttcatggtctcaacagaaggcggtgtagagattgaaaaagtagcatctgaaacgccagataaaattaaaaaaatatggattgatcctcttgttggcattaaaacctttcaactaagaaaattagcatttggcctgaaactaaatggagttgcattcaaagaggcagttgatacttttagaaaaatgtataattgttataaaaacactgacgcctccctccttgaaataaatcccttggtgaaaacgaataatgagaatattgttgcactagattctaaatttaattttgataataatgcactttttagacaaaaaaagatattggaaatgagagacctctctgaagaagataaaatggaggttgaagcaagtaaatacaatttgaactacataaaattagatggaaatgttggctgtatggtcaatggtgcaggcttagctatggctactatggacatcataaaacttgctggtggagaacctgcaaatttcttggatgtaggaggcacagcaagctcagagacagtaaaaaatggatttagaattattttatctgacaaaaatgtaaaatcaattttaatcaatatttttggtggaattgtcagatgcgaccgtgtagctaaaggtgtagttgaggcagttaaagaattggggctaaatgttccgattgtagtccgcctgcaagggacaaatgctgaagaggctaaaataattttagaggaaagtagcgtttcagtcatcccagctgatggaatgaaggatgcagcagaaaaagctgttagcgaagcaaaaaaataaa

SEQ ID NO: 308291 - DNA, 814 bp, Unknown
  Bacterial polypeptide expressing nucleotide sequence isolated from the Sargasso Sea
catgtctataatcattcacaaaaatacaaagattttagtccaaggattcactggaaaaattggaagttttcatgctgaagaaatgattaagtatggttctaacgttgttggcggggtaacacctggtaagggtggtatgactcatttaaatcttcctgtttttaatactgttaaagaagctgtagatcaaactggagcatcaacatcaattttatttgtcccaccagcctttgcagcagactcagcaatggaagctgctgatgcaggtattaaaacgtgtgtggctattactgacggtattccttctcatgatatggttaaaataaaaagatacatgagaagatatccaaaagataaaaaaatgggattagtaggtccgaattgtgcaggaataattagccctggtaaatctatgttaggtattatgcctggtcacatttacaaagaaggtaaaataggaatagttagtagatctggcactttgggatatgaagctgcacaacaacttaaagatttggaaattggtgtttcaacaagtgtaggtataggaggcgatccaataaatggaagttcttttagagatataattgaaaagtttgaaaatgatgatgaaactattgcagttttaatgataggtgaaataggtggcccacaagaagttgaagctggacaatttgctaaagaaaatatgagtaaaccagtaattgcgtatatagcaggacttactgcacctaaaggtcgcgtgatggggcatgctggggcaattgtttctgcttatggtgaaagcgcaatagaaaaagtagaactttcttaa

SEQ ID NO: 308292 - DNA, 895 bp, Unknown
  Bacterial polypeptide expressing nucleotide sequence isolated from the Sargasso Sea
aatgtctattttattaaataaaaatacaaaagttttgattcaaggaatgacaggtagaataggatccttccacgcccaagaaatggttgattacggaacaaatttagtggctggcgttacacctggaaaaggtggaacaaaacatcttgatagaccaatctttaatactgtaaaagatgcagtaaatgaaactggagccgaggcatgtattatttttgtgcctgcggctgcagctgccgattcaattatggaagcagcagatgctggaataaaatactgcgtatctataactgatggtatcccggctcacgatatgatgaaagttaaaagatacatgttgagatacaaaaaagaagataaaatgattttaactggtcctaactgtgctggaacaattacacctggagaggcaatgctaggtattatgccaggtcatatttatatggcaggtgatgttggggtagttggaagatcaggaacccttggctatgaagcagcttctcaaatgaaatctgaaggtataggaatatctacgagtgtaggaattggcggtgacccaattaatgggagttctcataaagatattcttgaattgtttgctgaagacgatagtactaaagcagttatgatgataggcgagattggtggcccacaagaagcagaagcagctgattttgttaaagaaaatatgaaacataagcctgtagtagcatatattgcgggtttaactgctccaaagggaagaagaatgggtcatgctggagcaataatttctggcaagggagaaagtgctgccgaaaaagtagagttattacaagaagcgggagttcatattgtgccaaatccatctgagcttggcacaaccatgaaagctgtactcgaaaagaatagttaa

SEQ ID NO: 308293 - DNA, 889 bp, Unknown
  Bacterial polypeptide expressing nucleotide sequence isolated from the Sargasso Sea
atgactgtactcgtagacaaaaatagtaagataattattcaaggctttacaggtaaaatgggctcttttcatgctgatgagatgataaaatatggctcaaacgtagtgggaggcgtaacaccaggaaaaggaggctcaaaacacttaaatttaccggtatttaacacagttaaagatgctgtgaatgaaacaggagctgatgcatctattttatttgtacccccagcttttgcagctgactcagcaatggaagcagcagatgctggaataaaaatatgtgtagctatagttgatggaataccttctcacgacatgatcagaataaaaaggtacatgaggagatacactaaaagttctaaaatgacattagttggaccaaactgtgctggaatcattagtcctggaaaatcaatgctaggaataatgccaggtcatatttataaagaaggtagaattggaattattagtagatcaggtacattaggttacgaagccgctcaacaacttaaaaatttaaatataggtgtttcaacaagtgtaggaattggaggagatccaataaatggaagttcttttagagatatcatagaaaagtttgaaactgatgatgaaaccgatgcaatattaatgattggcgaaattggtggcccacaagaagtagctgcaggagagtttgcaaaagaaaatatgaagaagccggtgattgcctatatagctggattaactgcaccaaaaggaagagtgatgggtcatgcaggagcaatagtttcagcttatggtgaaagtgcaattgaaaaagttgaaattttaaaagagtgtggaattacaatttctaaaaatccatctgttatgggtgatacagtaaaattagttctagaaaaaatgtaat

SEQ ID NO: 308294 - DNA, 889 bp, Unknown
  Bacterial polypeptide expressing nucleotide sequence isolated from the Sargasso Sea
catgacagtattaatagacaaaaagagtaagataattattcaaggttttacagggaaaatgggctcttttcatgctgacgagatgatcaaatatggttcaaatgtagttggaggagttactcccggaaagggtggatctaagcacctaaatttgccagtgtttaatactgttaaagacgcagtcagtgaaacaggagcagatgcatcaattttatttgtaccaccagcttttgcagcagattcagcgatggaagcagctgatgctggaattaagacatgtgtagcaattgtagatggtataccttcacacgacatgatcagaataaaaagatacatgagaagatacaccaaaagttctaaaatgactttggtaggacctaattgtgcaggaattattagtccaggtaagtcaatgttgggtataatgccaggacatatttacaaagaaggaagaattggaatcataagtagatcaggaactttaggatatgaagcagctcaacaacttaaaaatttaaatattggagtttcaacaagtgttggcataggaggagatccaatcaatggaagctcatttagagatataattgaaaagtttgagactgacgatgaaacagatgcaatattaatgataggtgaaataggtggtcctcaagaagtagcagcaggagagtttgcgaaagaaaatatgaaaaaaccagttattgcatacattgctggattaactgcaccaaaaggtagagtaatgggtcatgcgggagcaatagtttcagcttatggagaaagtgcaattgaaaaagttgagattttgaaagattgtggaattacaatttctaaaaacccatcagttatgggagatacagttaaagcagtactagaaaaaatataa

SEQ ID NO: 308295 - DNA, 606 bp, Unknown
  Bacterial polypeptide expressing nucleotide sequence isolated from the Sargasso Sea
gttgtgatttaatagtttgtattacggaaggcattcctgctaaagatgaagcaagaatgtatgatctgcttaaaagaaatactacttcacaattattggggcctaattgtcccggactaatctccccaggaaaatcaaatgtaggtatcatgccacacgaaataactaaagaaggaaacgtaggagttgtttcaaggtctggaactttaacttatcaagcagttcatgagttaactagattggacatcggacagtctacgtgtattggtataggcggtgaccctgtaccaggaatgtccttcatcgatgttttagaggcatttgaaaaagatgaacagacagaagcaatcgtaatgattggtgagataggtgggagtgctgaagaagaagcagccgaatacataagcaagctagttagtaaaccagtagtttcttacattgctggtgtaaccgcgccaccaggaaaaaaaatgggacatgctggggcaattgtttctggaaatatgggtacagcctctgctaaaattgaagcacttaccaacgctggtgttaatgttgttaacaaccctaccaagattggacaagcaataaaggaattgatttgaa

SEQ ID NO: 308296 - DNA, 730 bp, Unknown
  Bacterial polypeptide expressing nucleotide sequence isolated from the Sargasso Sea
agaagacctgtatttaatactgttgaagaggcaaaaaataaaactggtgcttttgctacaatgatttatgtacctgcaaaatttgcagccgcggctataaatgaagcaatcgatgcttctatagaattaattgtttgtataacagaaggaataccaattttagatatgttaaaagtcaaacagaaattatctaaatcaaactcacgattaataggaccaaattgtccaggaattattactccagatgaatgtaaaataggaataatgcctggcaatatacataaaaagggttcagtaggtattgtatcaagatcaggaactttgacctatgaagcagtggctcaaactacttcaaatggcttaggccaatccacctgcataggtattggtggtgacccaataaacggaacaagctttattgattgtttagatttatttttaaatgatccagaaacagaatctatattaatgattggagaaattggtggaatagcagaggaagaagcttctgaatttattaaaaatcataaaataaaaaaacccatggttggtttcattgctggaataacagcacccccaggaagaagaatgggtcatgcaggtgctataatttctggaggcaaaggtggtgccatagaaaaaattaaaactatggaagatgcgggaattacaattgcaaaatcaccagcagatattggaaaaacactgctactcaaattgtctaattgaa

SEQ ID NO: 308297 - DNA, 877 bp, Unknown
  Bacterial polypeptide expressing nucleotide sequence isolated from the Sargasso Sea
atgtctattattgtaaataaagattcaaagataatcgtacaaggaataactggatctgagggaagctttcactcatcacagatgctagattatggaacaaatattgttggtggtgttacacctggaaagggcggaacaaaagtaattgatgatagagtaatggtatataattctgttgaagaagcaaaagcaaatactggtgcgaatgtatctataatttttgtaccccctccttttgctgcagaagcaatcattgaagcatctgaggctggtataagtgtaattgtatgtatttctgaaggaatcccagttagagatatggttttagttaaaagagttattgagcagaataatacaatgttaattggtcccaattgtccaggagtaatttcagttgatgaatgcaagcttggcataatgcctggatttatatgtaaaaaaggcaatattggcgtagtctcaaaatccggtacattaacatacgaagccatagggcagcttgttgatgctggattagggcaaactacagctataggaattggtggtgatcctataattggaacctcaatgattgatgttttaaatctgtttgaaaaagatgatgaaactaagggtgtggtgttgattggtgaaattggaggtcaaatggaaaatgatgctgctaagtgggctaaagataatatgtctaaacctattgttggattcattgcgggacaaactgctccaaaaggcagaagaatgggtcatgctggagccattgtttctggtggagatgataccgcagaagctaagatgaaaatcatgaaagattgtggaattcttgtttgtgaatcagtcgcagaaattggtagaaaaatgaaaaaagcattacaataat

SEQ ID NO: 308298 - DNA, 655 bp, Unknown
  Bacterial polypeptide expressing nucleotide sequence isolated from the Sargasso Sea
gtacctccctcctttgctgctgaagctatcattgaagccagctatgctggtattaacttgattgtttgtataacagaaggtttacccgtgcatgatatgctacaggctaaaagaattattagtcaaaatggcactcgtttgattgggccaaattgcccagggattataaccgttgatgaatgcaaattgggtatcatgcctgggtttatatgtaaaaaaggtaatattggggtcatttctaaatctggtacattgacatacgaggcaattgaccaactagtaagtgttggtttaggccagacaactgctattggaattggtggtgatccgattattggtacaacaatgagagattgtttagagttatttgagtctgaccccgaaactgaaggagttataatcattggtgaaattggtggtcagatggaaattgaagcagctagatgggcgaaaaacaatatgtctaaacctatcgttggttttattgctggacagactgcccccccaggtaggagaatgggacacgctggcgctatagtttctggtggtgatgatacggctgaagcaaaaatgcggatacttaatgagtgtggtatagaagtagcggattcagttgctgatattggacaactaatgaaaaatttaatgaaataaa

SEQ ID NO: 308299 - DNA, 772 bp, Unknown
  Bacterial polypeptide expressing nucleotide sequence isolated from the Sargasso Sea
atgagtgtacttatagacaaatctactaaagcaatttttcagggatttacaggctcacaagcaactatgcatgccgagcaatgcatagagtacggtacaaatgttgttggtggagttactccaaacaaagggggacaagagcatcttggtaagccagtattcaattctgtagaagaagcaattaaagaaacagctgctgatacttcagtaatctttgtaccagcaaaatttgccaaatcagcaattatagaagctactgaagctggcattaatttaattatttgtattacagaaggtgttccagttcttgatatggtggatgttgttaatgttcttaaatctcatcctgaagtgagattaataggacctaattgtccaggggtaatttctcctggaaaggcaaaacttggaataatgccagcttcaattcatttagaaggaactgtaggtatagtttctagatcagggactctgacatatgaggctgtgaaacaaactacagatgcaggcttaggtcaaagtacatgtattggtataggtggagaccctgttaatggaacttcatttatagatgcattggaaatgtttgaaaacgattctcaaactgaatcaatagttatggttggtgaaataggcggaagcgcagaagaagaagcggctgaatatattagagataatattaaaaaaccagttgtttcatacatagctggtgtcaccgctccaaaaggaaagagaatggggcatgcaggcgcaataatttctggaggcaaag

SEQ ID NO: 308300 - DNA, 488 bp, Unknown
  Bacterial polypeptide expressing nucleotide sequence isolated from the Sargasso Sea
aatgtccattttagttaataaaaatactaaacttctttgccaaggttttactggttcacatggaactttccactcagaacaagcaataaaatatggaacaaatttagtaggaggtgtaacacctagaaaaggtggtcaaattcatttgggtaaacctgtttttaacactgtgaaggaggctgttgaagcaacaggtgccaatgcaacgatgatatatgtaccagcaaaatttgcatctgaggcaattatcgaagctatcgaagcatctattgatctagttgtatgtataacagaaggtattccagttttagatatgcttaaagtaaaaaaatatctatcaaactcaaatacgaaactaattggtccaaactgtcctggtataataactcctgacgagtgtaaaataggaataatgccgggaagtatacataggaaaggttcagttggaatagtttcacgttcaggcacattgacttatgaggctgtag

SEQ ID NO: 308301 - DNA, 355 bp, Unknown
  Bacterial polypeptide expressing nucleotide sequence isolated from the Sargasso Sea
aatggcaacaatggatataattaaattgtttggagaaactccagcaaattttttggacgtaggtggtggagcctcaaaagaaaaagtctcctcagcgttgaaaattattttatctgataaaaatgtaaaaggaatattaataaatatatttggtggaataatgagatgcgatgtgctcgctgcgggggttgtcgatgctgccaaagaaatgaaaattcatgttcctttggttgttagacttgctgggaccaatgtagaggaaggtaataaaattttaaaagaatctaaacttaaaataatcccagcttctgatttgtcagatgctgctgaaaaaattgtgaaagaaataaattaa

SEQ ID NO: 308302 - DNA, 751 bp, Unknown
  Bacterial polypeptide expressing nucleotide sequence isolated from the Sargasso Sea
ggtaagggcggtcaaatacatctcgatcttcctgtctttaatacagtaaaagaagctgttgacgctaccggcgcatcagcaagtataatttttgtccctgcaaaattctgtaaatcctcaattcttgaggccgctgaatctggtatttctttaatagtttgcataactgaaggtattccaacaatagatatgcttgaagtaaaggtaagatgcgatgaactaggtgttcgcctaataggaccaaattgtcctggtataatcacaccaggtgaagcaaagatgggtattatgcctggagatatacatttacctggaaaggtcggaattatctccagatcagggactttaacttatgaagctgtaaaacagacaacagatttagggtttggacaaacaagttgtgtcggaataggaggggatcctatacctggaaccagtttcatagatgttctggatttattcgaaaaagataattctactgaggctattgttatggtgggcgagattggtggcacagctgaagaagcagcagcagaatttattcaatcgaatgtgactaagcctgttgtatcttatatagcaggtgtaacagctcctcccggtaaaagaatggggcatgcaggggccataatcgctggaggcaaaggaacagcagaagataaatttaaggctctagagtcagcaggtgtttatactgtgaagagtcctgcagaaataggtaaaggaattgcagaggtctcaggatggtaga

SEQ ID NO: 308303 - DNA, 877 bp, Unknown
  Bacterial polypeptide expressing nucleotide sequence isolated from the Sargasso Sea
atgaatattcttaatcaagattcaaataaagttttaattcaagggttaggtagagatggtagttttcaagcagagagatgcatcgaatttggtacaaatattgtctctggagtccaccctactaaatctggcgaaacgtttaatagaaatattcctatatttggaagtgtctttgaggctgtaaaaaaaacctctcctgaaataggattaatttttgttcctgccccctttgctgctgatgcaataatagaacagattgatgcaagtatacctataattgtatgtgttacagagggaatacctgtttcagatatggtgaaagttaacgaatatcttaaaggcaagaaaactaaactaattggtccaaattgcccaggatatttaattcctgataaaaaattaaaggttggcataataccgggcagtatagttaaatccgggaatgtaggtgttgtttcaagaagcggaacacttacatatgaagcaatagttcaattgacaaagctaggaatagggcagagcgcttgtgttggaattggaggagacccaattaatggaacttcatttgtagatgtccttgatatgtttgaagaagacaaaaaaactgaagctattgtgatgatcggtgaaataggaggcacaaaagagcaagaggctgcagagagaattaaaagctctatatctaagccggtagtagcaagtattgttggtcaaactgcaccagaaggtagaagaatgggtcatgcgggagctgtaataactggtaaatctgcactcgcatctgaaaagattaattccttaagagatgctggagtattaatagcagattctccaacagaaattggactaaaggttcaagaactactcaaaaattaaa

SEQ ID NO: 308304 - DNA, 889 bp, Unknown
  Bacterial polypeptide expressing nucleotide sequence isolated from the Sargasso Sea
atggcaattttaattacaaaagaatcaaaaataataattcaaggttttactggaaaaattggaacatttcatgctgaagagatgatggagtatggaacgaacgtggttggtggtgtaactccagggaagggtggacaaaaacatttagaccgcccagtttttaatacagttaaagatgcagtagaggaaactggagctgatgctagtatattatttgtacctcctgcatttgctgcagattcagctatggaagctgctgatgctggtatcaaaactcttgttgcgataactgacggcatacctgcgcatgatatgattaaagttaagcgctatatgagaagatataaagctgaagatagaatgactatggtagggccgaattgtgcaggtgtaattagccctggtaaatgtatgcttggaattatgcctggacatatttataaagagggcaacgttggagtcataggtagatcaggaactcttggctatgaggctgctcaacaaatgaaagatttgggtattggtatatcaaccagtgttggaattggaggtgatccgataaacggaagcgcctttaaagatcaccttgctaaatttgaaaaagacgatgaaacaaaagcaattgtaatgattggagaaataggcggtcctcaagaagctgaagcagcagaatatgcaaaaaacaatatttcaaaaccaattattgcttatatagcaggattaacagcacctaaaggcaaaagaatgggacacgctggagcgatcgtaagttcacatggagaatctgctgctgaaaaagttgaaatccttaaaaaagcaggaatcacaattgctaagaatccttcggtaataggtgaaacggtagagacagtcctaaaagctctttaat

SEQ ID NO: 308305 - DNA, 799 bp, Unknown
  Bacterial polypeptide expressing nucleotide sequence isolated from the Sargasso Sea
catgtcaatattagtaaataaggattctagaatagttgtacagggtattactggatcagaaggtacctttcattctaatcaaatgattgattatggaacaaatatagttgctggtgttactccaggaaaaggtggacaaactgctttggagtcaaaagtgccagtttttgattgtgttgaagatgcaatgaaaacaactgatgctaatgtatcaattatatttgtacctcctccctttgctgcagatgccgtaatagaggcctctgaatcaggaatagatctaattgtttgcattactgaaggagtcccgattcatgatatggtaaaagccaaaaatattattgatagaaatagcacaagactagttggaccaaattgcccaggtattataactgtggatgaatgcaaagttggtatcatgccaggttttatatgtaaaagaggaaatattggagtcctctcaaaatcagggactctaacttatgaagcgataggacaattagtaaatgtagggcttggtcaaactacagcaataggtataggtggagaccctatcattggtacaacaatgattgatgcacttagattgtttgaagaagatccagaaactgaaggagtagtattaattggtgaaattggaggacaaatggagaatgacgcagcaagttggataaaagaaaacatgtccaaacctgttacagggttcattgcagggcagacagctcctcctggccgaagaatgggccatgctggtgcaattgtttctggaggtgatgatacagcagaagcaaaaatgaaa

SEQ ID NO: 308306 - DNA, 877 bp, Unknown
  Bacterial polypeptide expressing nucleotide sequence isolated from the Sargasso Sea
aatgtcagttttagttaataaaaacacaaagttaatttgccaaggttttacgggtagtcatggaacctttcattcggagcaagcaattaaatatggaacaaatttagtcggaggggttacaccaaaaaaaggtggtcaaactcatctagacagaccagtatttaatacagtaaaggaagcagtcgataaaactggtgccaacgcaactatgatttatgttcctgcgaaatttgcatctgctgcaatcatagaagccattgaagctaatttagaattaattgtttgtattaccgagggaataccagttcttgatatgattaaggtcaaaaaaaagttacttaattcaaaatcaagattaatcggtcccaattgcccagggataattactcctgatgaatgcaagatcgggataatgccaggaaatatccataaaaagggttctgttggtattgtatcaagatctggaactttgacctatgaggctgtcgcacaaactacagagaatgatttgggccaatcaacatgcataggtataggtggtgatccaatcaatggcacaaattttattgattgtttagatttatttttaaaagatgaggaaactaaatcaattttaatgattggtgaaataggaggatcagctgaagaagaagcagctgaatttgtaaaaaatcatgacataaaaaaacccatggttggttttattgcaggagttacagcaccaccgggtagaagaatgggacatgcaggggccataatatcaggtggtaaaggtggggctaaagataagatcaaaaaaatggaagattgtggcatagaggtagccacatccccttcagaaattggaaaaacattgttaaataaattgtccaattga

SEQ ID NO: 308307 - DNA, 877 bp, Unknown
  Bacterial polypeptide expressing nucleotide sequence isolated from the Sargasso Sea
gatgtctgttttggtaaataaaaatacaaaagtaatttgtcagggttttacaggagcacatggtacttttcattcagaacaagcaattcagtatggaacaaatttagttggtggagttacgccaaaaaaagggggtcaaaaacatttagacagaccagtctttaacagtgttcttgaggccaaaaaagaggttggtgctgatgcaacaatgatctatgttcctgctaaatttgcagctgctgcaattatagaagctattgatgcatcagttgaactcatagtttgtattactgagggtattccaatccaagatatgcttaaagttagacaaaagttaaatggttcaaaaagtagattaataggacctaattgcccaggaattataacacctgatgaatgtaaaattggaataatgccaggcaatattcataagcgtggatcagttggaattgtatctcggtctggaacattgacatatgaagcagttgcgcaaacaacagaaaatggcttggggcagtcgacttgtattggtataggtggagatcctattaatggcacaaattttattgattgtttagacttatttttaaatgacgatgaaacaaaatcaattttaatgattggtgaaataggtggtaatgctgaggaagaagctgcagaatttattaaaaatcacaaaattaaaaaacctatagttggatttattgctggaataacagctcctccaggtcgaagaatgggacatgctggtgctataatttcgggaggaaaaggcggtgctggggataagataaaaaagatggaagagtgcggaataactattgcaaactcaccatcaaaaattggaaaaacactattcaataaattgtctaattga

SEQ ID NO: 308308 - DNA, 496 bp, Unknown
  Bacterial polypeptide expressing nucleotide sequence isolated from the Sargasso Sea
aatgtcagtattagtaaacaaaaatacaaaagttatttgtcagggcttcacaggatctcatggcacattccactctgaacaagcaataaagtatgggacaaatcttgttggtggagtaacccctaaaaaaggaggccaaaaacatttagaaagaccagtttttaatacagtattagaggcaaaaaatgaggtaggtgcagacgctactatgatctatgttccagcaaaatttgcagctgctgcaataattgaagcaattgatgcatcaatagatcttatagtttgcataacagaaggcatcccagttcaggatatgcttaaagtaagacaaagtttggctagctcaaatagtcgtcttatcgggccaaactgcccaggaataattacacctgatgaatgtaaaattggaataatgcctggaaatattcataagagaggatcggttggtatcgtttctagatcaggaacattaacttacgaggcagtagcacaaact

SEQ ID NO: 308309 - DNA, 871 bp, Unknown
  Bacterial polypeptide expressing nucleotide sequence isolated from the Sargasso Sea
atgtccatcttagtaaataataatacaaaagttatttgccagggatttactggtaagcacggaacattccactcacaacaagcaattgaatatggaacgcagttagttggtggggtaactccaggtaaaggtggtgctgagcatttaaatcttccgattttcgataatgtcgctgatgccgttacgagtacaggtgcgaatgcgtctgtaatttatgttccaccacaatttgctgccgcggcaataattgaagcaataggtgctgagatagaaattattgtctgtatcacagaaggcatacctgttctcgatatgctggaggtgagagcacttctcaataagtcaaattctattctggtgggccctaattgtcctggaattataacacccggagagtgtaagattgggatcatgccggggcatatacaccgtgctggttcaattggtattgtctctcgctctggaacacttacttatgaggctgttgcacaaactacagctgtgggttatggacagtcgacttgtgttggtataggaggtgacccaataaaaggtatagactttatcgaagttattgataggttctattctgacccgaagacagaggcaataataatgattggagaaattggtggatcagcggaagaggaagcagccgaatttataagaaaaaacaaaaaaggtaaacccattattggatttattgcaggtcttacagcccctcctggaaggcgtatgggccatgctggcgccattgtggatggtaattcaggctccgcagaaacgaaaatagatgcaatgaaaagtgcaggaattattatgtcaagttcacccgcaatgctcggatcgaccctcaaaaatatcaaataat

SEQ ID NO: 308310 - DNA, 583 bp, Unknown
  Bacterial polypeptide expressing nucleotide sequence isolated from the Sargasso Sea
aatgtcagtattagtgaacaaaaatacaaaagtaatttgtcagggttttacaggctcacatggtacttttcattcagaacaagcaattaaatatggtacttacttagttggcggcgtaacacctaaaaaaggtggtcaaagacatttagatagaccagtttttaatagtgtgatagacgctaaaaatgaggttggtgctgatgcatctatgatttatgtaccagcaaaatttgcagcagcagcaatcatagaggcaatagatgcttcaatagaattaattgtatgtatcactgaaggtataccggttcaggatatgcttaaagttaaacaaaaattaaagggctcaaagagcagattaatagggcctaattgtccaggaataattactcctgaggaatgtaaaattggaatcatgcctggaaatattcataaaagaggatcagttggaattgtatctagatctggaactttaacctatgaagctgttgcacaaacaactgaaaacggattaggtcaatcaacttgtataggtattggaggtgatccaataaatggaacaaactttattgactgtttagactta

SEQ ID NO: 308311 - DNA, 575 bp, Unknown
  Bacterial polypeptide expressing nucleotide sequence isolated from the Sargasso Sea
tatggtagaaataaaaaaaagaatcatagcccaacaaacttattttattggacctaactgcccaggaatagttactcccgaggaatgtaaaattggtattatgcctggctttattcataaaaaaggaaaaattggaattgttagtcgctcaggaacattaacttatgaagcagtttggcaaacctctaaaattggattaggtcaaacaacatgtgtaggtataggtggtgaccctgttcatggtatgagttttattgattgcttaaaacttttcttaaatgatgaagatacagaaggaattttaatgattggagaaattggaggcacagcagaagaagatgctgcagaatttataaggaattataaaactaaaaagccaatttctgcttttattgcaggcctttctgcaccaaagggaaaacgtatgggacatgccggagcaatcattcaaggaaataagggaaccgctgagtcaaaaataaaagctttagagtcagcaggaatagctgttgcatcttccccagctaaacttggagaaactatgctaaatcaaatacaaaaaagtaattactaaa

SEQ ID NO: 308312 - DNA, 877 bp, Unknown
  Bacterial polypeptide expressing nucleotide sequence isolated from the Sargasso Sea
aatgtcagttttagttaataaaaacacaaagttaatttgccaaggttttacgggtagtcacggaacttttcattcagagcaagcaattaaatatggaacaaatttagtcggaggagttacaccaaaaaaaggtggtcaaactcatctagatagaccagtatttaatacagtaaaggaagcagtcgatgaaactggtgccaacgcaactatgatttatgttcctgcgaaatttgcatccgcagcaatcatagaggccattgaagctaacttagaattaatcgtttgtatcactgagggtataccagttcttgatatgattaaggtcaaaaaaaagttacttaattcaaaatcaagattaatcggtcccaattgtccagggataattacgcctgatgaatgcaagatcggaataatgccaggaaatatacataaaaagggttctgttggtattgtatcaagatctggaactttgacctatgaggctgtcgcacaaactacagagaatgatttgggacaatcaacatgtataggtataggtggtgatccaataaatggtacgaacttcattgattgtttagatttatttttaaaggatgaggaaactaaatcaattttaatgattggtgaaataggaggatcagctgaagaagaagcagctgaatttgtaaaaaatcatgaaataaaaaaacccatggttggttttattgcaggtgttacagcaccaccgggtagaagaatgggacatgcaggcgccataatatcaggtggcaaaggtggggccaaagataagatcaaaaaaatggaagattgtggtatagaagttgccacatccccttcagaaattggaaaaacattgttaaataaattgtccaattga

SEQ ID NO: 308313 - DNA, 877 bp, Unknown
  Bacterial polypeptide expressing nucleotide sequence isolated from the Sargasso Sea
aatgtctattctaatagataaaaacacaaaagttatttgccaaggttttacaggaaagcatggaacatttcattcagaacaagcaataaaatatggaacacaattagttggtggtgtcactccaaaaaaaggagggcagaaacatttaaatcttccagtatttgatacagtaaaagatgcaataaataaaactggagcaacagcaacaatgatatatgtacctgcaaaattcgctgcatctgcaattattgaagcaatagatgcagaaatagacctcatagtttgtatcactgaaggggttccagttctggacatggtgaaagtaaaaaatcttcttaaaaaaagtagaagtagattgattggacctaattgtccgggaataatcactcctggtgaatgtaaaattgggattatgcctggagacatacataaaaaggggaaagttggtattgtttcgagatcaggaaccttaacctacgaggctgttgcgcaaacaactgaaaatggcatgggacagtcgacatgtatcggtattggtggcgacccaattaatggaacaaactttattgattgtcttgaattatttttaaaagaccctgagacagagtcaataattatgattggtgaaataggaggttcagcagaggaagaggcctcagattttattaaaagatctaagattaataaacctatcgtgggttttattgctgggcttactgcacctccaggaagacgaatgggccatgcaggagcgataatttctggaggacaaggtggagcagaaaataaaattgaactaatgaagtcagctggtattactatttcagagtcacccgcagatataggaaaaacattatttaacaaactaaatagttaa

SEQ ID NO: 308314 - DNA, 877 bp, Unknown
  Bacterial polypeptide expressing nucleotide sequence isolated from the Sargasso Sea
aatgtctattttggttagtaaaagcacgaaagtaatttgtcagggatttacaggtaaacatggaacatttcattctgaacaagcaataaaatatggaacacaattagtcggtggtgtaactccgaaaaaaggaggtcagaagcatttgagtttgccagtttttgatactgtaaaagatgccaaaaaaacaactggggcaacagccacaatgatatatgttccagctaaatttacagcagctgcaattatcgaagcgatagatgcagaaatggaactaatagtttgtattactgaaggtgtaccagttctagatatgataaatgttaaaaatcatcttaaaaaaagtaaaagtagattagttggtcctaactgtccaggaataataactcctgaagaatgtaagattggaattatgcctggcgaaattcataaaaaggggaacgttggaattgtatcaaggtcaggaactttaacatatgaggctgttgctcaaactactgaaaatggtttgggacagtctacttgtattggaattgggggtgaccctattaacggaacaaactttatagattgtcttgatttattttttaaggatccagaaacagagtcaattattatgattggtgaaattggtggatcagctgaggaggaagcatcagaatttattaaaaaatcgaaaaataaaaagccaatcgtgggttttattgcaggacttacggcaccaccaggtagacgcatgggccatgctggtgcaataatttctggaggacaaggtggggcagaaaataaaattgaattaatgaaatctgcagggataactatttcagaatcaccagcagatataggaaaaacattatataaaaaactaaatagttaa

SEQ ID NO: 308315 - DNA, 622 bp, Unknown
  Bacterial polypeptide expressing nucleotide sequence isolated from the Sargasso Sea
aattaaatcaatatacaaaatgtttattgatatagatgctaatcttgttgaaataaatcctttgattttaactaaagaaaataaaattatttgtctggatgcaaaaatgagctttgatgacaatgcattatttagaaatccagaaattttaaatttaagagatttaaatgaggaagaagaaatcgagatagaagcaaataaacatggtttgtcttatataaaattagaaggtagcataggatgtatggttaatggcgcaggtttagcgatggcaacaatggatataataaaattatatggagaagagcctgcaaattttttagatgttggtggaggagcatcaaaagaaaaagtttcaaaagcatttaaaataattttgtcagataaaaatgtaaaaggaattttgataaatatatttggtggtattatgagatgtgatgttcttgcacaaggagttgtagatgctgccaaagaagttaaaatagaagttcctttgattgtaagattagctggaacaaaatttgaagaaggaaagaaaatattagataattcaggcttaaaaattatatcagcttcagatttatctgatgcagcaaaaaaagtagtagaatcaataaaataa

SEQ ID NO: 308316 - DNA, 871 bp, Unknown
  Bacterial polypeptide expressing nucleotide sequence isolated from the Sargasso Sea
gatgaaaaatattttaaataaagattcaaacaaagttttagttcaaggcttaggaagggatggaagttttcaaactgaaaagtgtattgaattcgggactgaggttgttgcaggtgttcacccaactaaggctggtgaaaattttaaaggaataccaatttttggaagcgttgatgaagctgtaagtcaaacttcgcctgacattgggcttatatttgtacctgcaccatttgcttctgatgcaataattgaacaggttgatgctggaattgaaactgtcgtatgcattacagagggaattcctgtgaatgatatgttaaaagtgaacaattatattaaaggtaaaaaagttaggcttattggtcctaactgtccaggatttttaatacccagaaaaaaattaaaagtcggaataattcccggaagcattgttactgatggaaaagtcggagttgtttcaagaagtggaactctaacgtacgaggcaattgttcaattgactatgctaggtattggccaaagcgcatgtgttggaataggaggtgatccactacatggaacatcatttgttgatgtgttagaaatgtttgaagaagatcaaaacactgaagccatagttatgataggtgaaattggaggcaccagagaacaggcagcagcacaaatgattaaaaactcaatttcaaagccggtcgttgcgagtattgttggccaaaccgcgcccgaaggtagaaggatgggtcatgccggagcagtgattactggaaagtcagctttagcttcagagaaaattaaatctttaaaatctgcaggtgtatatatagctgattcaccaacagaaataggtttaagattgaaagaattaatctaa

SEQ ID NO: 308317 - DNA, 414 bp, Unknown
  Bacterial polypeptide expressing nucleotide sequence isolated from the Sargasso Sea
ttgcatatatcaagctagatggaagtatcggttgtatggtaaatggagcaggattggcgatggcaaccatggatataattaaattgtatggtaaagagcctgcaaattttttagatgtaggtggtggtgcatctagagaaaaagtatccgctgcattaaagataattctttcagataaaaatgttaaaggtattttaattaatatttttggaggaattatgagatgtgatgtccttgctcaaggagtagttgatgcagctaaagaaattaatattagtgtacctttagttgtaagattagcaggtacaaattttcaagagggaaaagaaattcttgataattctggattagaactaatttcagcagaaaatttagatgatgctgctaagaaaattgttgaggcgataaaataat

SEQ ID NO: 308318 - DNA, 892 bp, Unknown
  Bacterial polypeptide expressing nucleotide sequence isolated from the Sargasso Sea
atgtctgtattaatagataaaaaaacaaaaataatagtacaaggtttcactggaaaaatgggaagtttccatgcagaagaaatgattaagtatggcactaatgtagctggaggagttaccccaggaaaaggtggaatgaaacatcttaatcttcctgtatttaatacagttaaagaagcggtcaaaaatacaggtgcatcagcatcaatattatttgttccaccagcttttgcagcagattcagcgatggaagcagctgacgctggaattaaaacatgtgttgcaatagtagacggaataccttctcacgatatgatcaaaatcaaacgttatatgagaagatattcgagaactgaaaaaatgactttagtgggacctaattgtgctggagtgattagtcctggaaaagcaatgttaggtattatgccaggacacatttataaagaaggaaaaatcggaataattggaaggtctggtacattaggatatgaggcagcacaacaattaaaaaatttaaacattggtgtttcaacaagcgttggtattggaggcgatccaattaacggaagttcatttaaagatattttagaaaaatttgaacaagacgatgaaacagaagcagttttaatgattggcgaaataggaggaccacaagaggtagctgctggaaaatttgcaaaagaaaatatgaagaagccagttatagcttacatagcaggattgacggcgccaaaaggaagagtaatgggacacgcaggtgcaattgtatctgcttacggtgaaagtgctgttgaaaaggttgaacttttaaaagaatgtggagttattatttctaaaaatccttcagttatgggagaaacagttaaatcagctttgaatagtaaaaattaaa

SEQ ID NO: 308319 - DNA, 760 bp, Unknown
  Bacterial polypeptide expressing nucleotide sequence isolated from the Sargasso Sea
aatgagtgtacttatagacaaatctactaaagcaatttttcagggatttacaggctcacaagcaactatgcatgctgagcaatgcatagagtacggcacaaatgttgttggtggagttacgccaaataaaggaggacaagaacatcttggcaaaccagtatttaattctgtagaagatgcaattaaagaaacagctgctgatacttcagtaatatttgtgccagcaaagtttactaaatcagcaattatagaagctgctgaagcaggtattaatttaattatttgcattacagaaggcgttccagttcttgatatggtggatgttattaatgctcttaaatctcatcctgaagtgagattaataggacctaattgtccaggggtaatttctcctggaaaggcaaaacttgggattatgccagcttcaattcatttagaaggaactgtgggtatagtttctagatcaggaactctgacatatgaagctgtgaaacaaactacagatgcgggtttaggtcaaagtacatgtattggtataggtggagatcctgttaacgggacttcattcatagatgcattggaaatgtttgaaaacgattctcaaactgaatcaatagtcatggttggtgaaataggtggaagcgcagaagaagaagcagctgaatatattagagataatattaaaaagccagttgtttcatacatagctggtgtaactgctccaaaaggaaagagaatggggcatgcaggtgcaataatt

SEQ ID NO: 308320 - DNA, 416 bp, Unknown
  Bacterial polypeptide expressing nucleotide sequence isolated from the Sargasso Sea
acttgcatatatcaagctagatggaagtataggctgtatggtaaatggagcgggattagcgatggcaacaatggatataattaaattgtatggaaaagagccagcaaattttttagatgtaggcggtggcgcatctaaagaaaaagtatctgctgcattaaagataatcctttcagataaaaatgttaaaggtattttaataaatatttttggaggaattatgcgatgtgatgttcttgctcaaggagtagttgatgcagctaaagaaattaatattagtgtacccttagttgtaagattagcaggtacaaatttcaaggaaggaaaagaaattcttgataattctggattaaaattaatttccgcagaaaatttagatgatgctgctaagaaaattgttgaggccataaaataaa

SEQ ID NO: 308321 - DNA, 379 bp, Unknown
  Bacterial polypeptide expressing nucleotide sequence isolated from the Sargasso Sea
catggttaatggagcaggcttagcaatggccaccatggatataataaaattgtatggaaaagaaccagcaaattttttagatgtaggaggaggagcgtcaaaagaaaaagtttctgcagctttaaaaattattctttcagataagaatgtaaaaggaattttgattaatatttttgggggaataatgagatgtgatgtgcttgcacaaggagtggtagatgcagctaaggagataaacattggcgttcccttagtggttagacttgcaggtacaaactttaaacaaggtaaagaaatacttgataattctggtttaaagttaatatcagcagaaaatttagatgatgcagctaaaaaaattgttgaggctataaaataa

SEQ ID NO: 308322 - DNA, 622 bp, Unknown
  Bacterial polypeptide expressing nucleotide sequence isolated from the Sargasso Sea
atgagtatcttagtaaacaaagataccaaacttattgttcaaggatttacaggttctcaaggtactcttcattcagagcaatccattgagtatggaacaaatattgtaggcggtgtcactcctgggaaaggaggtattaaacatcttggaaaacctgtctttaattcagttcatgatgcagtaaaagagttaaatccaaatgcctctataatttttgtgccagcaaaattctgtaaagactcaataatggaagcagcagatgcaggcattaagttaattatttgtatcacagaaggtattccgactattgatatgcttgatgtaaagaggcatatagatgatcttggaattagattaattggacctaattgtccaggcattattactcctggagaggctaagcttggaataatgcctggagatattcatatacctggctctattggaattatttctagatcaggaacacttacatatgaggcagtaaaacaaaccacagacctgggtttcggtcaaagcagttgtgttggaattggtggcgatcctattccaggctcatcatttatagatatgctgaaattattcgaggatgatgataagactgaagcaatcgtgatggttg

SEQ ID NO: 308323 - DNA, 733 bp, Unknown
  Bacterial polypeptide expressing nucleotide sequence isolated from the Sargasso Sea
aatgtcaatactattaaataaaaaaacttctattctagttcagggaattactggatctgaaggactatttcatgcacagcaaatgttagactatggttctaacgttgtttgtggagtaactcctggaaaaggtggtcaaactgttacagaaaaaaacttaccagtttttaatagcatcgaagaagcaaaaaaagagttttcaattgatgccacggtaatttttgtcccacctagatttgctgcaaatgcaattcttgaagcaattaatcaaaatattggtttaattgtttgtatatctgaaggaattcctgttcgagatatgaaaaaagttaaaagtgcacttgataattcctcttcaactcttattggtcctaactgtcctggcttaataacagctgaagaatcaaaaattggaattacccccggttttatttgcaaaaaaggttctattggtattctttctcgttcagggaccttgacttatgaggcaattgaccaaattgttaatgttgggttaggaatgactaccgctgttggaattggaggagatccaattatcggttcaagtatgatagatatattgaaacattttgctaatgatgatgaaactagaggtgttgtaatgattggagaaattggtggtagtatggaaaatgaagccgctgaatggatcaaagacaattttaataaacctgttgtatcatttattgcaggtcaaactgcgcctaaagga

SEQ ID NO: 308324 - DNA, 516 bp, Unknown
  Bacterial polypeptide expressing nucleotide sequence isolated from the Sargasso Sea
ttgatattgattcaaatgcactatttagacaagaaaaaattgcaaaatttcatgatacttcggaggaagaccctttagagctaaaagcttcagaatatggattaaattatattaagcttgatggaaatgttggctgtatggttaatggagctggcctagctatggcaacaatggacatagtaaaacatcatggcggcgaaccagctaattttttagatgttggaggtgcggctaatgttgatacaattaagaatggttttaaaattattctctctgaccctaacgtaaaatcagttttgatcaatatttttggtggtatcgttagatgcgacagagtagctaatggagtcattcaagctgttaaagaattaaacttaaatgttggtgttgtcgttagacttcaagggactaatgcaaaactggcaaaacaaattttagatgaatcagatatagagcttataagcgccgaaacaatagatgaagctgctcaaaaagcagttgggttggtatcataat

SEQ ID NO: 308325 - DNA, 892 bp, Unknown
  Bacterial polypeptide expressing nucleotide sequence isolated from the Sargasso Sea
atggctattttaattacaaaagaatctaaaataattattcaaggtttcactggaaagattggaacattccatgctgaagagatgatggagtatggaacgaatgtggttggcggtgtaactccagggaagggtggacaaaaacatttaaaccgaccagtttttaatacagttaaagatgcagtcgaggaaactggagccgatgctagtatattatttgtacctcccgcatttgctgcagattcagcgatggaagctgctgatgctggcatcaaaactcttgttgcgataactgacggcatacctgcacatgatatgattaaagttaagcgctatatgagaagatacaaagctgaagacagaatgactatggttggaccaaattgtgctggtgtaattagtcctggtaaatgtatgcttggaattatgcctggacatatttataaagagggcaacgttggagttataggtagatcaggaactcttggatatgaggctgctcaacaaatgaaagatttgggtattggtatatcaaccagtgttggaattgggggtgatccgataaacggaagtgcctttaaagatcaccttgctaaatttgaaaaagacgatgaaacaaaagcaattgtaatgattggagaaataggcggtcctcaagaagctgaggcagcagaatatgcaaaaaacaacatttcaaaaccagttattgcttatatagcaggactaacagcaccaaaaggcaaaagaatggggcacgcaggagcaatcgtaagttcacatggagaatctgctgctgaaaaagttgaaatccttaaaaaagcaggaatcacaattgctaagaatccttcggtaataggtgaaacggtagagacagtcctaaaagctcttcaatgaa

SEQ ID NO: 308326 - DNA, 811 bp, Unknown
  Bacterial polypeptide expressing nucleotide sequence isolated from the Sargasso Sea
tttcattcagagcaagcaataaaatatggaacaaatttagtaggaggtgttactcctaaaaagggaggtcaaatgcatttagatagacctgtatttaattctgtagttgaagccaaagatgccgttggggcagacgctactatgatttatgtgcctgcaaaatttgccgctgcagcaattatagaagctatcgatgcatctgttgaattaattgtttgtattactgaaggaattccaattcaagacatgcttaaggttagaaaaaaattagatggatctaatagccgacttataggtccaaattgtccaggaattataactccagatgaatgtaaaattggaattatgcctggcagtattcacaaaagaggttcagttggtattgtatcaagatctggaactttaacgtatgaagcagtagctcaaacaactgaaaatggattagggcagtcaacttgcattgggattggaggtgatccaatcaatggtacaaattttatagattgtttagatctgtttttaaatgatgaagagacacaatcaattttaatgattggagaaataggaggctctgcagaggaagaagcagcagaatttttgaaaaaccataagattaaaaaaccaacagtaggatttatagcaggaattactgcaccacctggaagaagaatggggcatgcaggtgcaattatttctggaggcaaaggtggtgctgaggataaaataaaaaaaatggaagaatgtggaattatagtcgcaaaatcaccatcaataatcggtaaaacattatttgataaactgtctaattgaa

SEQ ID NO: 308327 - DNA, 955 bp, Unknown
  Bacterial polypeptide expressing nucleotide sequence isolated from the Sargasso Sea
aatgcgacctgaatatcatccctgcatcaaatttagaggaggcagcaagtttagctgtaagagcatcaaagggagatatagggtgagtattcttatcaatgaaagtactaaggttatttgtcaaggatttactggaggacaggccacacaacactgtattcaatgtattgactacggcacgcagcttgtaggaggggtgacacctggaaaaggcggtcaaattcatctcgatcttcctgtctttaattcggtaaaagaagccgtagacgctaccggtgcatcagcaagtataatttttgtccctgcaaaattctgtaaggcctcaattcttgaggctgctgaatctggtatttctttaatagtttgcattactgaaggcattcctactatagatatgttagaggtaaaggtacgatgtgatgaacttggtgcccgcttaataggaccaaattgccctggcataatcacacctggtgaagctaagatgggcattatgcctggagatatacatttacctggtaaggttggaattatatctagatcagggactttaacttatgaagcggtaaagcagacaacagatcttggctttggacaaacaagttgtgtcggaataggaggtgatcctatacctggaaccagttttatagatgttctggatttattcgaaaaagataagtcaactgaggctattgtaatggtgggcgagatcggaggaacagctgaagaagcagcagcagagtttatacaatctaatgtgactaagcctgtcgtatcttatatagcaggtgtaacagctcctcccggtaaaagaatggggcatgcaggggctataatcgctggtggaaaaggaacagcagaggaaaaatttaaagcgttagaattggcaggtgtttatactgtaaagagtcctgcagaaataggaaaaggagtagctgaggttacaggatggtag

SEQ ID NO: 308328 - DNA, 544 bp, Unknown
  Bacterial polypeptide expressing nucleotide sequence isolated from the Sargasso Sea
aatgtcagttttggttaataaaaatactaaagtaatttgtcaaggattcactggaatgcatggtacttttcattcagaacaagccataaaatataaaacgaagcttgttgggggagtcacgccaaaaaaaggaggacaaaaacatttaaatcttccagttttcaattctgttcaagaagctaaagatgaaacatcagcagatgcaacaatgatttatgttcctccaaaatttgctagcgatgcaattattgagtcaatagaagcaaaaatggaactgattgtctgtatcacagaaggtattccagttttagatatgataaaagttaaaaaagtattaaaaaatagcagatcaagattaattggacctaactgtccaggaataataacacctgaggagtgcaagattggaataatgccaggcaatattcataaaaaaggatcagttggcattgtttctagatctggaactttaacttacgaagcggttgctcaaactactgccaatggaatggggcaatcgacatgtataggtattggtggagat

SEQ ID NO: 308329 - DNA, 634 bp, Unknown
  Bacterial polypeptide expressing nucleotide sequence isolated from the Sargasso Sea
atgtcagttttagtaaataaaaatactagagtaatttgtcagggatttacaggatctcacggaacatttcattctgagcaggcaattaaatatggaacgaatctagttggaggagtaactccaaaaaaaggaggacaagttcacttggaaagaccagtgtttaattctgttagagaagcaaaagaaacaacagatgcgaatgccacaatgatttatgttcctgcaaaattcgcagcttccgcaattaatgaggctatcgattcttctattgatttaattgtttgtattacagagggaattccaattttagatatgttaaaagttaaaaaaaaattaactaattctaactcaagattaattggccctaactgtcctggaattattactcctgatgaatgtaaaattgggataatgcctgggaatattcacaaaaaaggatctgttggtatagtttcaagatcaggaactttaacatatgaagctgtagctcaaacaactgaaattggattaggacaatcaacttgtatcggaataggaggcgacccaattaatggaaccaattttattgattgtttagatctatttttaaatgacgaagaaaccaaatcaatattaatgataggtgaaataggtg

SEQ ID NO: 308330 - DNA, 877 bp, Unknown
  Bacterial polypeptide expressing nucleotide sequence isolated from the Sargasso Sea
aatgtcaattttagttaataaaaatactagattaatatgtcagggcttcactggaaatcatggtacatttcactctgaacaggcaattaaatatgggactaatttagttggaggagtaactccaaaaaaaggtggtcaaacacatctatcaaaaccagtttttaattctgtaaaagaagcaaaagaaaaaacagatgcaaatgcttctatgatttatgttcctgctaaatttgccgcttccgctatcatagaagctatagaagcttcaattgaattaattgtatgtattactgaaggaataccaattttagatatgttaaaagtaaagaaaaaattatcaaattctaattcaagattaatcggcccaaattgtccaggtattattaccccagaggaatgtaaaattggaataatgcctggaaatattcataaaaaaggttctgttggaatagtatctagatctggaactttaacttatgaagctgtggcgcaaacaactaataatggattaggtcaatcaacttgtattggtataggtggagatccaatcaatggaacaaattttatagattgtttagatttatttttaaatgatgaagaaacgaaatctatactaatgataggtgaaattggaggaatagccgaagaagaagctgcagaattttttaaaaatcataaaataaaaaaaccaatggttggttttatagctggaattacagctccaccaggaaggagaatgggccatgcaggagcaataatttcaggagggaaaggtggcgctgaagataaaataaaaaaaatgcaagattgcggtataacgattgcaaaatcacctgcagaaattggaaaaactctattaaacaaattgtctaattga

SEQ ID NO: 308331 - DNA, 421 bp, Unknown
  Bacterial polypeptide expressing nucleotide sequence isolated from the Sargasso Sea
acacgatttatcatatataaaattagatggtagtattggatgtatggttaatggtgctggtttagcaatggcaacaatggatataataaaattgcaaggagaagaaccagcaaattttttagatgtcggcggaggagcatctaaagaaaaagtttcagcagcatttaaaataattttatcagatacaaatgtaaaaggaattttgataaatatttttggaggtataatgagatgtgatattttagcacaaggagttgtagacgcagctaatgaaattaaaattgaagttcctttggttgttagattagcaggaactaaatttgaagaaggaaaaaaaatcctagataattcaggtttaaaaattatatctgctacagatttatctgatgctgcaaaaaaaatagttcaggcaataaaataa

SEQ ID NO: 308332 - DNA, 886 bp, Unknown
  Bacterial polypeptide expressing nucleotide sequence isolated from the Sargasso Sea
gatgtcaattattatagataaaaacaccaaagtaatttgccagggttttactggatcacaaggcacttaccattctcaacaggcaattgattatggtactaagatggttggaggtgtgacgccaggaaaaggtggaacgactcatttagacttaccagtatttaattctgttaaggaggcaaaagatcatacacaagcagacgcaaccgtcatttatgttccagctaagtttgcaactaaagccatacatgaagcacttgatgcagacataaaaattatcacctgcattactgaaggtattcctgttcttgatatggtggaaattaaaaaaagaattattgaacaaaaaacttacttcataggccctaattgtccaggtttagtaacaccaggcgaatgtaagattggcattatgccaggctttattcatcaacctggcaaaattggaatagttagtaggtctggaactttaacgtatgaagcggtttggcaaacttctcaagtaggtttaggtcaaacaacatgtgtaggtattggaggcgatcccgttcatggtatgaactttattgattgccttgatttgtttttaaaagatgaggcaacaaaaggaatactaatgattggtgaaataggagggactgcagaagaggatgcagctgaattcatatcaaaatcaagcatcaaaaaaccaatgtcatcttttattgctggagtatcagcacctaaaggaaagagaatgggtcatgctggtgccataatttctggcaataaaggtacagcacaatcaaaaattgatgctttggagtcagcaaatattgcggtagctccatcacctgccaaaatgggtgaaacaatgctagctgaaatgcaaaaagggtataattaa

SEQ ID NO: 308333 - DNA, 358 bp, Unknown
  Bacterial polypeptide expressing nucleotide sequence isolated from the Sargasso Sea
tatggcgacaatggatattattaaacaatttggcgaagaacctgcaaattttttagacttaggaggcacagctaataaagatagagttattatgggttttaaaataattcaatcagatccaaatgttaaatcaattttgattaatatctttggaggaattattcattgtgatatgattgctaacggtattgttgaagcggttaaagaattagattttaaacttcctttagtggttcgttttcaaggaacaaatgcaaggcaaggtagagatgtaattaataactcatcacttggtctaatttctattgatgattttacagaagcagcaaaaaaagtagtggagctttctaaaaaataa

SEQ ID NO: 308334 - DNA, 508 bp, Unknown
  Bacterial polypeptide expressing nucleotide sequence isolated from the Sargasso Sea
aatgtcagtgctagtaaataaaaatacaaaagtaatttgtcagggttttacaggatctcatggtacttttcactctgagcaagcaatacagtatggaacaaatcttgtaggtggggtaactcctaaaaaaggaggccaaaaacatttagaaaggccagttttcaacacagtattggaagcaaaaaaagaagtaggtgctgatgctactatgatctatgttcctgcaaagtttgcagcagccgcaatcattgaagccattgatgcatcaatagatctaatagtttgtattacagaaggtattccagttcaggacatgcttaaagtaagacaaagtctagcagactcaaaaagtcgtcttataggaccgaattgccctggaataattacacctgatgaatgtaaaattggaataatgccaggaaatattcataaaagaggttcagttggaattgtttctagatcaggaacactaacttacgaggcggttgctcaaactacagaaaaatgg

SEQ ID NO: 308335 - DNA, 892 bp, Unknown
  Bacterial polypeptide expressing nucleotide sequence isolated from the Sargasso Sea
atgtctgtattaatagataaaaaaacaaaaataatagtacaaggttttactggaaaaatgggaagtttccacgcagaggaaatgattaagtatggctctaatgtagttggaggagtaacacctggaaaaggtggaataaaacatcttaatcttcctgtatttaatacggttaaagaagcagttaaaaacactggtgcatcagcatcaatattgtttgtgccgccagcttttgcagcagactcagcaatggaagcggctgatgcaggaattaaaacatgtgttgcaatagtagatggaataccttctcatgatatgatcaaaattaaacgttatatgagaagatattcaagaactgaaaagatgactttggtaggacctaattgtgcaggagtaattagtccgggaaaagcaatgttaggtattatgccgggtcatatatacaaagaaggaaaaattggaatcattggtaggtcaggtacattaggatatgaagctgcacaacaattgaaaaatttaaatattggtgtttcaacaagtgttggtattggaggtgatccaattaatggaagttcatttaaagatattttagaaaagtttgagcaagacaacgaaacagaagcagttttaatgataggtgaaattgggggacctcaagaagtggctgctggcaaattcgcaaaagaaaacatgaagaaaccagttatagcttacatagcaggattaacagcacccaaaggaagagtaatggggcatgcaggtgcaattgtttccgcttatggagaaagtgcagttgagaaagttgaactcttaaaagaatgtggagttattatttctaaaaacccatcagttatgggcgaaactgtaaagtcagctttaaatagtaaaacttaaa

SEQ ID NO: 308336 - DNA, 877 bp, Unknown
  Bacterial polypeptide expressing nucleotide sequence isolated from the Sargasso Sea
aatggcagtattaattaacaaaaatacaaaagttatctgtcagggattcacaggttcccatggcacatttcactctgaacaatcaattaagtatggaacaaatttagtaggaggagtgacaccaaaaaaaggtggccaaactcatcttgatagacctgtatttaatactgttgccgaagcaaaaaaatctaccgatgcaaatgctacaatgatctatgttcctgctagatttgcagcagatgcaataattgaagccatagatgccagcatagatcttattgtttgtataactgaaggaattccagttctagatatgttaaaagttaaaaagcatttactaaaatctaaatcgagattaataggtccaaactgtccaggtataattactccaggtgaatgtaaaattggaattatgccaggcaacattcataaaaaaggaacagtaggcatagtttctagatctggaactttaacctatgaggctgttgcacaaacaacagaaaatggactgggacaatccacatgtataggtattggtggcgatcccattaatggaactaattttatagattgtcttgatttatttttaaatgatcctgaaacagagtccatattaatgattggagagataggtggttccgctgaagaagaagcatctgaatttgttaaaaatcataaaataaaaaaacccattgttggatttattgcgggcataacagctccaccaggaagaagaatgggtcacgctggagccataatatccagggggaaaggtagtgcagaggaaaaaattaaaattatggaaaatgctggaattactatagctaaatcaccagcagatattggaataactctttataaaaaattgtcactttaa

SEQ ID NO: 308337 - DNA, 871 bp, Unknown
  Bacterial polypeptide expressing nucleotide sequence isolated from the Sargasso Sea
tatggcaattttaattgatgaaaatacaagagttgttgtccagggattaacaggtcgagaaggccagttccatgcattaagaaatagagattatggtacaaacattgttgcaggcacaaggccaggtaagggtggtgaaaatatagaatccataccaatatttaatactgttgaagaagctgtcaaagaggaaggagctaatgtagctatgacttttgttccacctgcttttgctaaggaggctgtactagaggcagcatttgctgggtgtgaattaattgtatgtattacagaaggtattccagcaaaagatgaagctgaaatgtatgacataatcaaaaaagaaacaaattcaaaattgctaggtccaaattgtccaggtttgatttctccaggtaaatcaaatgttggtattatgcctcatgaaattactaagcaaggaaacgttggtgttgtatcaagatcaggtacattgacttatcaagctgttcacgaattaacacaattagagatagggcagtcaacatgtataggaattggaggagacccagtacctgggatgtcttttattgatgttcttcaagagtatgaaaaagatgatgagacttcctcgattgttatgattggtgaaattggaggaagcgccgaagaagaagcagcagattttattaaaaacaacatttctaaaccagtagtatcatatatagctggagtaacagctcctcctggtaaaaaaatgggccatgctggagcaatagtttcaggaaataaagggactgccgttgcaaaaatggatgcattaaaagatgcaggagtaaatgtggtttcaaaccctacaaaaataggtaatgctataaagaaagtcatttaa

SEQ ID NO: 308338 - DNA, 871 bp, Unknown
  Bacterial polypeptide expressing nucleotide sequence isolated from the Sargasso Sea
atgagtgtacttatagacaaatctactaaagcaatttttcagggatttacaggctcacaagcaactatgcatgctgagcaatgcatagagtacggcacaaatgttgttggtggagttacgccaaataaaggaggacaagaacatcttggcaaaccagtatttaattctgtagaagatgcaattaaagaaacagctgctgatacttcagtaatatttgtgccagcaaagtttactaaatcagcaattatagaagctgctgaagcaggtattaatttaattatttgcattacagaaggcgttccagttcttgatatggtggatgttattaatgctcttaaatctcatcctgaagtgagattaataggacctaattgtccaggggtaatttctcctggaaaggcaaaacttgggattatgccagcttcaattcatttagaaggaactgtgggtatagtttctagatcaggaactctgacatatgaagctgtgaaacaaactacagatgcgggtttaggtcaaagtacatgtattggtataggtggagatcctgttaacgggacttcattcatagatgcattggaaatgtttgaaaacgattctcaaactgaatcaatagtcatggttggtgaaataggtggaagcgcagaagaagaagcagctgaatatattagagataatattaaaaagccagttgtttcatacatagctggtgtaactgctccaaaaggaaagagaatggggcatgcaggtgcaataatttctggaggcaaaggaacagctcaagataaatttaaagctttagaatctgctggagtaggtgttgttactgatttaaatttgattggttccagacttaaagaatctctttaaa

SEQ ID NO: 308339 - DNA, 895 bp, Unknown
  Bacterial polypeptide expressing nucleotide sequence isolated from the Sargasso Sea
atgactgttttgattgataaaaaaactaaaatattaattcaaggttttacaggtaaaatgggctccttccatgcagaagaaatgataaagtatggctcaaatgttgttggaggtgttacaccaggaaaaggtggaattaatcatttaaatttaccagtttttaatacagttaaagaggcagttgaaaaaactggagcaagtgcatctatactttttgttccaccagctttcgcagcggactcagctatggaagcagctgatgcaggaattaaaacttgcgttgcaattgtagatgggattccatctcacgatatgataaaaataaaaagatacatgagacgttattcaagaaccgataaaatgacattaataggtcctaattgtgcaggagtaataagccctggcaaagcaatgcttggtataatgcctgggcatatatataaagagggaagagttggaataataggaagatcaggtacacttggttatgaagcggcgcaacaattaaaaaatttaaatataggagtttctaccagtgttggtattggaggtgatccaattaatggaagttcttttaaagatattcttgaaaaatttgaacaagacaaagaaactgatgcggttttaatgataggagaaattggtggacctcaagaagtggccgcaggacagttcgcaaaagaaaatatgaaaaaaccagttatagcctacatagcaggattgaccgctcctaaaggaagagtgatgggtcatgctggcgcaattgtttccgcctacggtgaaagtgcagttgaaaaagttgagttattaaaagagtgcggagttactatttctaaaaatccatcagtaatgggtgaaacagtaaaatcagctttaaatggcaaagcaacataaa

SEQ ID NO: 308340 - DNA, 667 bp, Unknown
  Bacterial polypeptide expressing nucleotide sequence isolated from the Sargasso Sea
aatgtcagtattagttaataaaaaaacaaaagtaatctgtcagggttttacgggtgcgcatggaactttccattcagagcaagcaataaaatatggaacaaatttagtaggaggtgttactcctaaaaagggaggtcaaaagcatttagatagacctgtatttaattctgtatctgaagctaaagatgccgttggggcagacgccactatgatttatgtgcctgcaaaatttgccgccgcagcaattatagaagctatcgatgcatctgttgaattaattgtttgtattactgaaggaattccaattcaagacatgcttaaggttagaaaaaaattagatggatctaatagccgacttataggtccaaattgtccaggaattataactccagatgaatgtaaaattggaattatgcccggtaatattcacaaaagaggttcagttggtattgtatcaagatctggaactttaacgtatgaagcagttgctcaaacaactgaaaatggattagggcagtcaacttgcattggaattggaggtgatccaatcaatggtacaaattttattgattgcttagatctttttttaaatgatgaagaaacacaatcaattttaatgattggagaaataggaggctctgcagaggaagaagcggcagaattttga

SEQ ID NO: 308341 - DNA, 889 bp, Unknown
  Bacterial polypeptide expressing nucleotide sequence isolated from the Sargasso Sea
catgacagtattaatagacaaaaatagtaagataattattcaaggttttacagggaaaatgggctcttttcatgcagatgagatgataaaatatggctcaaatgtagttggcggagttactcctggaaagggtggatctaagcacctaaacttgccagtgtttaatactgttaaagatgtagtcagtgaaacaggagcagatgcatcaattttatttgtacctccagcctttgcagcggattctgcaatggaagcagccgatgctggaattaaaacatgtgtggcaattgtagatggaataccttctcacgacatgatcagaataaaaagatatatgagaagatataccaaaagttctaaaatgactttagttggacctaactgcgcaggaattattagtccaggaaaatcaatgttaggaataatgcccggacatatttacaaagaaggaagaattgggattataagtagatcaggaacattaggatatgaagcggctcaacaacttaaaaatttgaatattggagtttcaactagtgtaggtattggaggggatccaataaatggtagttcatttagagatataatagaaaagtttgaaacagatgatgaaactgatgcaatattaatgattggtgaaatcggtggtccccaagaagttgcagctggagaatttgcaaaagaaaatatgaagaaaccagttatagcctacattgcaggtttgaccgctccaaaaggtagagtgatgggtcatgcgggggcaatagtttcagcttatggagaaagtgcaattgaaaaagttgaaattttgaaagaatgcggaattacaatttctaaaaatccatctgttatgggagatacagtaaaagcagtcttagaaaaaatgtaa

SEQ ID NO: 308342 - DNA, 874 bp, Unknown
  Bacterial polypeptide expressing nucleotide sequence isolated from the Sargasso Sea
ttgagtattttaattgataaagatacgaaggtaatttgtcagggctttactggaggacaagccacgcaacattgtgttcaatgcatagattacggcactcaattagtcggaggcgttacgcctggcaaaggaggtcaaactcacttagatttacctgtttttgattctgtaaaggaagcagttgatcaaactggtgcaaccgctagcattatttttgttcctgcacgtttttgcaaagcctcaatactcgaagccgctgaatcaggaatatctttaataatatgcattactgaaggtatacctaccattgatatgcttgaagttaaggttagatgtgacgatcttggagttagattaattggaccgaattgtcctggaatcattactcctggtgaatgcaagatgggcattatgccaggtgatattcatcttcctggtaaggtcggggttatttctagatcgggtacccttacttatgaagctgtaaaacaaacaacagacctaggttttgggcaaacaagttgtgtaggaataggaggggaccctatacccggatcaagctttatcgatatattggatttattcgaaaatgattctgtaactgaagcgatagtgatggttggtgaaattggaggcacagccgaagaagctgcggcagaatttatacagtcaaatgtgaccaagccagtagtttcttacatagccggagttacagctcctgccggtaaaagaatgggacatgctggggcaattattgcaggaggcaagggaacggctgaagacaaatttaaagcgttagaggcagcaggagtttatacagttaaaagtcctgcggatattggaaaggggattgcagaagtaacgggatggtaaa

SEQ ID NO: 308343 - DNA, 735 bp, Unknown
  Bacterial polypeptide expressing nucleotide sequence isolated from the Sargasso Sea
aatgtctatcttggtaaacaaaaacacaaaggtaatctgtcaaggatttacaggtaaacacggaacatttcattcagagcaagcaataaaatatggaacacaattagtcggcggtgtaactccaaaaaaaggaggtcagaagcatttgaatttaccagtttttaacactgttaaagatgcaaaaaaaacaactggtgcaacagccacaatgatatatgtacctgccaaatttacagcgtctgcaattatcgaggcaatagatgcagaaatagaattaatagtttgtataacagaaggtgttcctgttttagatatgataaaagttaaaaatcatctcaaaaaaagtagaagtaggttaattggccctaactgtcctgggattataactcctggagaatgtaaaattggaattatgcctggagaaatccataaaaaaggtaaggttggaattgtatcaagatcaggtacgttaacatatgaggctgttgctcaaactactgaaaatggaatgggacagtctacttgtataggaattggtggcgaccctattaatggcacaaattttatagattgtcttgatttattttttaaggatccagatactgagtcaataataatgattggtgaaattggaggttctgatgaagaggaagcatcagaatttattaaaaaatcaaacaataaaaagccaattgtgggttttatcgcgggacttaccgcaccaccaggtagaag

SEQ ID NO: 308344 - DNA, 871 bp, Unknown
  Bacterial polypeptide expressing nucleotide sequence isolated from the Sargasso Sea
atgagtattttagttaacaaagacaccagagtaattgttcaaggctttactggctctcaaggaacattacattctgagcagtccatagagtatggtacaaatatagttggaggtgttactcctggcaaaggaggaatagagcatctagggaagccagtttttaattctgttgaggatgctaagagttctctagatccaaatgcttccattatttttgtgccagcaaggttctgtaaagactcaattttggaatcagctgaagcaggcatcaaattgattatttgtataaccgaaggaattccaacattagatatgcttgaagttaaaaaacgagttgacgagcttggagtaagattaattggacctaattgtcctggaatcataacaccaggtgaagcaaagctaggaataatgcctggagatattcatatgcctggctcaattggcataatttcaagatctggtactctaacttatgaagcagtaaaacagactactgatttaggctttggacaaagtagctgtgttgggattggaggagatccaataccaggatcttcatttattgatatgcttaaattatttgaagatgataaacaaactgaagcaattgttatggtaggagagattggtggcacagcagaggaagcagctgcagagtatataaaaaataatattactaaaccagtaatctcatatattgctggtaaaacagcgcctgttggcaagagaatgggtcatgcaggtgcaattattgctggcggaaaaggcacagctgataataaaattgagaaactgcaagaatgtggagtatatgtagcagataatttagtatctattggttctaaagttgctgaggtgcttggctaaa

SEQ ID NO: 308345 - DNA, 877 bp, Unknown
  Bacterial polypeptide expressing nucleotide sequence isolated from the Sargasso Sea
atgtcaatattgattaataaaaataccaaagtcatttgccaaggatttacaggtaaacatggctcttttcactcagaacaatcgataaaatatgggacaaaattagttgggggggtaaccccaaataagggcgggcaaaaacatttaggtttaccagttttcaacaccgttcatgaagcaaaaagtaaaacagacgctaatgcttcaatgatttatgtgccaccaaagtttgcagcccaagctatccttgaagcaatagatgcaaatttagaactaatagtatgtattactgaaggcataccaattatagatatgattaaagttaaaaaggttttaaaaaaaagcaaaagtagattaattggtcctaattgccctggaattatcacaccagatgaatgtaagattggaataatgcctggaaacattcatagaaaaggaaatgtaggaatagtatcaagatcaggtacacttacctatgaggctgtagctcaaactacggaaaacggaatgggccaaacaacatgcataggaataggtggagacccagtgaatggaactaattttatagattgtttagaactttttttaaaagatgaggaaacaaaatcaattattattattggagaaatcggtggtaatgctgaggaagaggcctctgattttttgagaaaatcaaaaattaaaaagcctatggtaggttttgttgctggtctcactgcgccccccgggagaagaatgggccatgccggggccataatatctggtggaaaaggtggagctgaagataaaatagagaagatgaaatcagcagacataacaatagcaaattcaccagcagatataggaaaaactctattagaaaaacttaatggttgat

SEQ ID NO: 308346 - DNA, 877 bp, Unknown
  Bacterial polypeptide expressing nucleotide sequence isolated from the Sargasso Sea
atgtcaatattagttaataaaaatactaaagtaatttgccaaggttttactggaactcatggaacatttcactcagagcaagctaaaaattatggaacaaaattagttggtggtgttactccaaaaaaagggggtcaaaaacatttaggtctacctgtatttaatacagttcaagaagctaaagaccaaacatctgcaaatgctactatgatttatgtgccacctaaatttgcagggtccgcaataatagaggctatagaggcaaaaatagaattgatagtttgtattaccgaaggaatcccagtaatcgatatgttaaaagtaaaaaaaattttatccaaaagtacgtcaagattaattggaccaaattgtccaggcattattacaccaaatgaatgtaaaattggaattatgccaggaaatattcataaaaaaggctctgttggaattgtttcaagatctggaactttaacctatgaagcagtcgctcaaacttcgtataacggaatgggtcagtctacttgtataggaattggaggagatcctatcaacggaacaaattttattgattgccttaaactatttttaaaagatgaggagacaaaatccatagttatgattggagaaattggtggatcagcagaggaagaagctgcacagtttcttaaaagagaaaaaaataagaaaccaatggtcggttttattgcaggtttgaccgctcctcccggtagaagaatgggtcacgctggagcaattattgatggggggaaaggtggagctgaggataaaatagaaataatgaaatctgctggaattacgatatcaaaatctccagcagatattggcaaaactctttttgaaaaacttaacggttgat

SEQ ID NO: 308347 - DNA, 662 bp, Unknown
  Bacterial polypeptide expressing nucleotide sequence isolated from the Sargasso Sea
ttttggttccccagcatttactgcagatgcaataatggaggctttagcagcagaaatacctctgattgtgtcaattactgagggagttccagttgttgatatgattcaggttgttgattttgtaagcaaaaaaggatgtaggcttattggcccaaattgtcctggaataataactccaggccaatgcaaaataggtatcatgcctggtgcaatacataaaacaggcagaataggaattgtctcaagatctggaactttgacttatgaggctgtaagtcagattactcgtgttaacctaggtcaatcaacctgcattgggataggcggtgacccagttaatggaactaattttattgactgtctgagtttgtttgaaaaggatgaacagacagaagcaatagtaatgataggagaaattggcggagatgccgaagaacaggcagctgattatgtgaaaaataatgttactaagccaattgtaagtttcattgcaggacaaactgcccctcccggacgtaggatgggacacgctggtgcaatcatttctggaggacatgggacggcagaagaaaaaatgagtgcattaaaagaagcaggagtacatgttattaactcattagatgaaatagggaataagatgctggaagctttagggaattaat

SEQ ID NO: 308348 - DNA, 592 bp, Unknown
  Bacterial polypeptide expressing nucleotide sequence isolated from the Sargasso Sea
tatgtcgatcattattaataaaaatacaaaagttatatgccaaggctttaccggttcacaaggtacatatcattctcaacaggcaatagattatggaaccaagatggttggaggtgtaactcctggtaaaggtggatccacgcatttaggtttgcccgtgtttaatacagtgaaagaggctaaggatcatactctagcagacgcaactgttatttatgttcctgcaaaatttgcaacaaaagctattcatgaagcattggatgcaaacataaaaattattacttgtataactgaaggaatacccgtccttgatatggtggagataaaaaaaagaattatcgaacaaaaaacatatttcattggccctaattgtcctggcttagttacccctggtgaatgtaagattggaatcatgccaggctttatccatcaaccaggaaaaattggcattgtaagtaggtctggaaccctaacatatgaggcagtatggcaaacttcacaggctggacttggtcaaacaacatgtgtgggtataggtggtgatccggtacacggaatgaattttatagattgtcttgatctttttttacaa

SEQ ID NO: 308349 - DNA, 676 bp, Unknown
  Bacterial polypeptide expressing nucleotide sequence isolated from the Sargasso Sea
agatgtcagcatgatatttgtgcctgcaaatttgcagctgatgccatgaaatcagcaattgaatcagaaattggactgattgtttgtattacagaaggggtcccagtccaagatatgatcgaagtcaaagccatgttgaagggctcagattcaatactattgggcccaaattgtcctggcatcataacccctgaagaaacaaagattggaattatgcctggtttcatacatcaaaaaggttctataggaattatttccagatctggcaccctgacttatgaggctgttcatcagacttctatgtgtggtcttggtcaaagtacttgtattggcatagggggcgatcccattaagggtctcaatttcattgaatgtctgtcactttttgaggaagatccagcaacagaaggaattgttatggtcggtgaaattggaggttcagacgaagaaaaggcagcagagttcatcaaagacaacatcactaaacctgttgttgcctatgttgctggtgtttcagcaccaccggggaaaagaatgggccatgccggagcaatcgttactggcaatgaaggcaccgcttcaagcaaatacaaagcactgaatgacgcgggagttaaaacaactgattccccagctttgattggtgaaatcatgaaagaattactcaatcaataat

SEQ ID NO: 308350 - DNA, 886 bp, Unknown
  Bacterial polypeptide expressing nucleotide sequence isolated from the Sargasso Sea
aatgtcaattataattaataaagacaccaaagttatttgtcagggttttacaggatctcaaggaacttttcattctaagcaagctattgattatgggactcaaatggttggaggggtaacacctggaaaaggaggaagtattcatttaaatcttccagtctttgattctgttcaagaggctgttgatagaactaaacctgatgctacagtaatttatgttccagcaaaatttgcaactaaggctattcatgaagctatagatgccaatattaaaattattacatgcatcactgaaggtattccagttttagatatggtcgaaataaaaaaaagaattattgaacaaaatatatattttattggtcctaactgtcccggtcttgttactccagaagagtgtaagattggtattatgcctggatttattcataaaaaaggtaaaattggaatagtcagccgttcaggaactcttacatatgaagctgtttggcaaacatcagaaatagggcttggtcaaacaacctgtgtgggtattggaggcgatcccattcatgggatgaactttattgattgtatagatctttttttacatgatgaagaaacaaaaggaatattgatgataggagaaataggaggatcagcagaagaagatgccgcagaatttattaaaaaatcttctattaagaagcctactgcagcttttattgcaggtattactgctccaaaaggaaaacgtatgggacacgctggagctataatatcaggaaacaaaggaactgctgagtctaaaatcaaagcactagaacaatcaaatgttttaatagccccttcacctgcaaaacttggtgaaaccatgttaaaagcgatgcaaaaaagctatacttag

SEQ ID NO: 308351 - DNA, 583 bp, Unknown
  Bacterial polypeptide expressing nucleotide sequence isolated from the Sargasso Sea
atgtcgattctgattaacaaagacaccaaggtcatcacgcagggcattaccggcaagaccggtcagttccacacgcgtgcttgccgtgaatatgcaaacggccgcgaagcgtacgttgcaggcgtgaacccgaagaaggccggcgaagatttcgaaggcattcctatctacgctagcgtcgctgaagccaaggctgaaacgggcgcgaccgtgtcggtgatttacgttccgccggcaggcgctgctgctgccatctgggaagcagtcgaagccgacctggatctcgcaatctgcatcacggaaggcattcctgtccgtgacatgatcgagctcaaggcacgcatgcgcgcgaagaacagcaagacgctgctgctcggaccgaactgcccgggcacgatcacgccggacgaactgaagatcggcatcatgccgggtcacatccaccgcaagggccgcatcggcgtagtgtcgcgttcgggcacgctgacgtatgaagcagtcggccagttgacggcgatcggcctcggccagtcgtcggcagtcggtatcggcggcgacccgatcaacggtctgaagcacatcg

SEQ ID NO: 308352 - DNA, 877 bp, Unknown
  Bacterial polypeptide expressing nucleotide sequence isolated from the Sargasso Sea
aatgtctatacttgtaaataaaaattcaagagttgtagttcaaggaataactggttcagagggtgagtttcataccaaacaaatgcttgattatggcacgaatattgtagccggtgttacccccggtaaaggaggacaatccgttttagatggcagcatcaatgtttatgactctgttgagcaatctgtagaaaaaaccagtgctaataccgcgataatttttgtacctcccccctttgcagctgaagcaataattgaatcaagttatgcaggtatagaaaccattgtgtgtatcactgaaggcgtaccagtgcatgacatgattaaggtcaaacagataataaagagaaataaaactagattaattgggccgaattgcccaggtattatcacagtagatgaatgtaaacttggaattatgccaggatttatatgcaaaaaaggaaatattggagttgtttctaaatctggaaccctcacatatgaagcaatagatcaacttgtaaatgcaggacttggccaaactactgctattggtattggtggagacccaatcattggcactacaatgcaagactgtttaaagctttttgaaaatgattcagaaacagagggcattgttataattggagagattggtggacaaatggaaatagaagcagcttattgggcaaagaaaaacatgactaaaccaatagctggtttcatcgccggtcaaaccgcacctccaggaaaaagaatgggacatgctggtgcgattgtttctggcgggaatgatacggcagaggcgaaaatcaaggtattgaaagaatgcgggatatctgtgtcagaatcagttgccaatattgggtcggtaatgaaatctataatgaactaa

SEQ ID NO: 308353 - DNA, 883 bp, Unknown
  Bacterial polypeptide expressing nucleotide sequence isolated from the Sargasso Sea
atgtcgattctgattaacaaagacaccaaggtcatcacccagggaatcaccggcaagaccggccagttccacacccgtggctgccgcgactacgccaacggcacgaactgcttcgtcgccggcgtgaacccgaagaaggctggcgaagacttcgagggcattcccatctacgcaaccgtcaaggacgccaaggcacgaaccggcgcgaccgtttcggtgatctacgtgcctcccgcaggcgctgccgacgcgatctgggaagctgtggaagccgaactggatctggtggtttgcattaccgagggcatccccgttcgcgacatgatgatggtcaaggacaagatgcgtaagggtggcagcaagacgctgctgctgggaccgaattgcccgggcctgatcacgccggacgaaatcaagatcggcatcatgccgggccacatccaccgcaagggccgcatcggcgtggtgtcgcgctcgggcacgctgacgtacgaagccgtgggccagttgaccgcgctgggcttgggccaatcgtcggcagttggtatcggcggcgacccgatcaacggcctgaagcacatcgacgtcatgaagatgttcaacgacgatccggaaacggacgccgtggtcatgatcggtgaaatcggcggtccggacgaagctaacgcggcttactggatcagggacaacatgaagaagccggtggtgggcttcatcgctggcgtgaccgcgcctccgggcaagcgcatggggcacgccggcgcgctgatctcgggcggagccgacacggcacaggccaagctcgacatcatggaagagtgcggcatcaagaccaccaagaacccgtcggaaatggcgcgtctgctcaaggcgatgctttgag

SEQ ID NO: 308354 - DNA, 877 bp, Unknown
  Bacterial polypeptide expressing nucleotide sequence isolated from the Sargasso Sea
atgtctattctagtaaataaagattccaaagtaattgtccaaggagtcactggatctgaaggccaatttcattcagttcagatgcttgaatatggtaccaatatagtggctggagtaacaccaggaaaaggtggtcaaagcacactagatggcaaagttccagtttttaactcagttgaggatgcagtaaaagatacttatgcagatacatctattatttttgtacctcccccctttgcagctgaagctataattgaagctagttatgcgggtatttcacttgttgtatgtatcacagaaggtgtaccagtgcacgatatgttaaaagcaaaaaaaattatttctcaaaatggaacccgattaattggaccaaattgtccaggaattatcactgtagatgaatgtaaattgggtataatgcctggctttatatgtaaaaaaggtaatataggagtaatctctaagtctgggacattgacctatgaggccatagatcaattagttaatgttggtttgggacagactacagctattggtataggaggtgatcctatcattggaacaaccatgagagattgcctagaattatttgaatctgattccgaaactgatggagttgttatcatcggtgaaattggtggtcaaatggagattgaagctgcaagatgggcaaaagcaaatatgtctaaacctatcgtcggttttattgctggacaaactgcaccaccaggcagaagaatggggcatgcgggcgctatagtttcaggaggtgatgacactgctgatgcaaagatgagaatacttaaggaatgtggtatagcagttgccgagtctgtcgctgatattggacagaaaatgaaaaatgaaatgaattaaa

SEQ ID NO: 308355 - DNA, 877 bp, Unknown
  Bacterial polypeptide expressing nucleotide sequence isolated from the Sargasso Sea
aatgtctattttagtaaataaagaaactaaagtaatttgccaaggatttacaggatcccatggcacatttcactctgaacaagctattaagtatggaactaatcttgtaggtggtgtaactcccaaaaaaggaggccaagaacatttgggtagaccagtctttaatactgttaaagaagctaaagataaaactggcgcgaatgcttcaatgatttatgtcccagcaaagtttgctgctgctgcaataattgaagcattagatgcatctatagaattgattgtttgtatcactgaggggataccaatattagacatgttaaaagttaaacaaaaattatcaaaatctaaatcaagattaattggtcctaactgcccaggtattattacacctgatgaatgtaaaattggaataatgccaggaaatattcataaaaaaggaacagttggaatagtctcaagatcaggtacattaacttacgaagcagttgctcaaactactgaaaatggactaggtcaatcgacttgtataggtattggaggcgatccaattaatggaacaaattttattgattgtcttgatctttttttaaaagacgatgatacaaaatctatactaatgattggggaaatcggtggttctgcagaggaagaagctgcagaatttataaaaagtcattctatcaaaaagcctatggttggatttattgcaggagttacagcaccacccggtagaagaatggggcatgctggagcaataatttctggaggcaaaggtagcgcaaaagacaaaatagaaactatggaaaaagcaggcattactatagctaattctcctgccgagttgggcaaaacacttgtagataaattgtctctttaa

SEQ ID NO: 308356 - DNA, 874 bp, Unknown
  Bacterial polypeptide expressing nucleotide sequence isolated from the Sargasso Sea
atgagtgttttggttagcaaagagtctagaatcctttgtcagggaatcacaggctcccaaggctcattccatgccgaacagtgcattgagtatggttcaaatattgtagcaggagtgactccaggaaaaggcgggtcaactcatcttcatgttccagtttttaactcagttgctgaagccaaagcagatctagaaatagatgtcagcatgatatttgttccggcaaaatttgcagcagatgcaatgaaatcagcaattgaatctgaaatagggcttattgtttgtattaccgagggagtccctgttcaagatatgattgaagttaaagccatgctgaatggctctgactccatactattaggcccaaattgtcctggcatcataacgcctgatgaaaccaagattggaatcatgcctggcttcattcatcaaaaaggttctgtaggtattatttcaagatcgggcacactgacttacgaagctgttcatcaaacttcaatatgtggccttgggcaaagcacctgcattggcataggcggtgatccaatcaagggtctaaactttattgaatgtttgtcgctctttgagaaagatccagaaacagagggaattgtaatggttggcgaaattggcggttcggacgaagagaaggccgcagagttcatcaaagaaaatattagcaagcctgttgtcgcttatgtagctggagtatcagcgcctcctggtaaaagaatgggccatgcaggagcaatcgttactggcaaagagggaactgctttaagcaaatacgaggccttgaatgacgctggagttgcaactacagattcgcctgcattgattggcaaaatcatgaaagatttactcaatcaataag

SEQ ID NO: 308357 - DNA, 274 bp, Unknown
  Bacterial polypeptide expressing nucleotide sequence isolated from the Sargasso Sea
aaaaggtgaagttatagtagcttttgtatctctagagaaggacgtgaacggttctttagaattagtagaggatctaaagaaacatgttgttaatgaaattggaattatcgcaaagcctgaaaagattataatttctgactctcttccgaaaacacgtagtggaaaaattatgaggcgaattttaagatctttagctgctggagaagaaattagcggtgatataagcactcttgaagatagttccgttttggaaaagctgaaagaattatcctaa

SEQ ID NO: 308358 - DNA, 253 bp, Unknown
  Bacterial polypeptide expressing nucleotide sequence isolated from the Sargasso Sea
ttttgtctctcttgagaaagatgtaaaaagttcctcagaattagtagagaatttaaagaaacatgttgttaatgaaattggaattatcgcaaagcctgaaaaaattataatttctgactctcttccgaaaacacgtagtggaaaaattatgaggcgaatcttaagatctttggctgctggagaaaaaattagtggtgatataagcactcttgaagatagttccgttttggaaaagctgaaagaattatcctaa

SEQ ID NO: 308359 - DNA, 209 bp, Unknown
  Bacterial polypeptide expressing nucleotide sequence isolated from the Sargasso Sea
tctgatcaagcagctcagggcccatgtgggcacggagatcggaccgatcgcccggccggatgagattcgttgcagtgatgcactgcccaagacccgcagcggcaagatcatgcgccggatcctgagggccctggccgctggtcaggaggtcagcggcgacaccagcaccctggaggatcgttcggtcctcgatcggctgcgggcttgag

SEQ ID NO: 308360 - DNA, 157 bp, Unknown
  Bacterial polypeptide expressing nucleotide sequence isolated from the Sargasso Sea
tcgccgcaccggcggcaagatcgactggcacgccgggcgcgacctgtggatgcacgaactgacggccggcgaatcccgacccagtgcgagccggaatgggtcggcgccgagcatccgctgttcattcctgtatacgtcgggctcgaccggcaagccg

SEQ ID NO: 308361 - DNA, 531 bp, Unknown
  Bacterial polypeptide expressing nucleotide sequence isolated from the Sargasso Sea
tatggcaaaaagaagtaaaaagaaaaaaagaaaatccaaatctaagaagaagaaaaattttaaaagaaaaaagaaaaagactcttagaaggagaaagaaaaagactcttagaagaaaaaagaaaaaaattttatctaaaaagaaaggctctaaacaaacagaagatgctgatggaaatatagtttttaaagtacctccaagctgggagaaacaggcctacgttaatcaatcacaatatacaaaaaaatataagctatcgataaaagacaatgaagggttttggaaaaaagagggtaaaagaattacctggattaaaccttatacaaaaataaaagacgtaaaatatagtaaggaggatgttagtataaaatggtattacgatggcacactaaacgcatcagctaattgtattgatagacatttagataaaaaaggaaataagactgcaattatttgggttggagatgattcaagcgactccaaaaaaataacttataaagaacttcacaaaaaatgttgtaaagcagcaaa

SEQ ID NO: 308362 - DNA, 831 bp, Unknown
  Bacterial polypeptide expressing nucleotide sequence isolated from the Sargasso Sea
tttgaagaggcgactaaaaaggttttagagactgatgatttatatcagttttcggaatacatatataatggtcaaatttacaagacctttgtaaatactccacagacattgcatgagttgcttgagtatggaaaaaaaactcgtcagtgggacgaatttatcgtttatgagaatgaacgaataacatattttgagtttatagataaagtgaatagcgtggcggctttcctccaaaaagagttgggcgtaaaaaagggtgataaagttgcgatagcaatgcgaaactttcctgaatatccaattcttttgatgggcattgtatcgataggagcgatagttgtttttgtaaatgcttggtggacaacaagcgaaatggaatatggctttaatgatagcgcagcaaagatatgctttgcggataaggaaaggttaaatgttattcttcccttttcaaatgaccgtggaatcaaattaattggaattagatcagagcatggtaaaaacgttttagactatgaaaaagacgtagcctcctacccatcaaaaaatttgagggtacctaatattgatccaaaagacgactttggaattatgtatacctctggatcaactggaaatcctaaaggcgttgttcttacgcacaggggagcaatttcagctgtattttcttggttaatgatggaaaagataggctcatatgtgtatcctgaaaaagtggctgctaagaagccatcaagcattcttctcctatctcctctttttcatgtaaatgggtctcatccaaacttcttatatgggattgcgaaagggtcaaaaattaccttgatgtac

SEQ ID NO: 308363 - DNA, 640 bp, Unknown
  Bacterial polypeptide expressing nucleotide sequence isolated from the Sargasso Sea
tttggatattcaagttgttgatgaatctggaaatgaagtagaacctgagacaaaaggctctttggtaattaaaacaccttggcccggaatgcttttgggattatggaaagatgaacaaaaatacaaagatgtgtattggtcaaagtttgaatcggtttattatcctggtgactatgcaatcaaagattctgatggttatctgtggcttcttggacgttctgatgatgtactaaaagttgcaggtcatagaataggaactgcagaactagaaagtagtattgtatcacataatgatgttgcagaatctgcagtatgtggaattccagacgatgtgaaaggtgaatcaataattgcatttgttgtattaaaggaaagtgcaaaagattctgatgaaaaacttcgtactgatctacgtgagacaattcgaacacaaattggacctatagctaccccaagtcaattctatattgtaaaccggttgccaaagactagaagtggaaaaattatgagacggttattgaaggcaattgcaaataatgagaaaattggtgatgtaagcactcttgaagatggatctgcagtaagtgaaattcaatctgcatttgatgaattacagaaaaatgtacaaaaccaacaataa

SEQ ID NO: 308364 - DNA, 634 bp, Unknown
  Bacterial polypeptide expressing nucleotide sequence isolated from the Sargasso Sea
tatgatatttaaaaacaatctcttacccaaaaatttaaaggaatacaacatgctttacaagcaaagcgttgataattcagaagtgttttggaatgatgttgctgaatcatttatttggaaaaataagtggtcaaaagtagttgattttgatttttcaaaaccaagttttaaatggtttaaagatgcaaaattgaatattactgaaaactgtttagacagacatgttgaggatcatccagataaaacagccattatttttgagccaaatgatccaaatcaaccagcagagcatatttcatacagagaattacatattagggtgtgtaagttttctaatgttttaaaaaataacaatattcagaagggggatagagtttgtatttatttaccaatggttcctgaacttgctattgctgtcttagcctgtgctagagtaggagctatacattctgttgtgtttgcaggtttttcttcatctgcactatcagctagaattaatgatgcatcatgtaagatggtcctaacctctgatggaagctttagaggaaataaaacaattgacttaaaatctatagttgacgaggctttaaaagattgtgattgtgttgattcggtaatagtattaagtcgaata

SEQ ID NO: 308365 - DNA, 773 bp, Unknown
  Bacterial polypeptide expressing nucleotide sequence isolated from the Sargasso Sea
agaattgtcgaatataagccacttcttgatgaggccatcaccgtcgcgcggtcacaagcccggcacctgcgtcatccatcagcgcgaggccgtcaccgccaccctaattgacgggcgtgatgtcgaatggcaagcagcgcatgacggcgcggaagagcttgccccagtcacggtcaaggcgaccgatccactttatattctctacacttcgggaaccaccggccagcctaagggcgtcgtccgtgacaatggtggacatgcggtggcattgaactggagcatgccgaacatctatgacacgcagcctggcgaggtctattgggccgcatccgacatcggctgggtcgtcggccattcctatatcacctatgcgccactgattgccggctgttcgtccgtgctgtttgagggaaagcccatcggcacgcccgatgccggggtgttctggcgggtcattcaagatcacagggtcaaggtcctgttcactgccccaacagcgtttcgcgcgatcaaacgtgctgatcccggcggtgagtatctccagcattatgatacctcctcacttgaatacctgtttctggctggagaacgggccgatccagacaccattatctgggcgcaggaaaagcttggcattccggtgattgaccattggtggcagaccgaaactggctggtcgatctgcgccaatccgatgggagtcgaggcattgccggtaaagccgggttcgccctctgtggcgatgcccggtttcgagatcgacatcctcgatg

SEQ ID NO: 308366 - DNA, 265 bp, Unknown
  Bacterial polypeptide expressing nucleotide sequence isolated from the Sargasso Sea
tatggataaaatatcaataaaaccagactggaaaaaagatgctttaatcgatgaaagcaaatataaatctatgtatgatgattctataaatgaaaatgatctattttggtcagaacaaggaaaaagaatttcatggataaaaccttatactaagattaaagatgtaaaatatagttcaagtgatgtttctataaaatggtattatgatggaaaactaaatgctagctataattgtatagatagacatgttaaaaatgatcctaat

SEQ ID NO: 308367 - DNA, 388 bp, Unknown
  Bacterial polypeptide expressing nucleotide sequence isolated from the Sargasso Sea
ggtcatagaattgcgagttcagaggtggaaagcatttgtttgtcacttgaggaggtaaaagaggcttgtgctgtttctagaaataatgaaataagcggttataaagtaatactttttatttctgcaaatttatctgatgagattgataaatcattattaaaagaatctattaaaaaaagaataattttaaaacttagtagttatcacttgcccgaagaaatatatttttttgatagtttacctaaaactagaagtgggaaaataatgaggagaattatgcgtacattagctaatggaaatgttttagatacctctcaagacttttcaactcttctaaataaaaaagaatttcttgatagcgttaataaattcaatattgaggcttaga

SEQ ID NO: 308368 - DNA, 577 bp, Unknown
  Bacterial polypeptide expressing nucleotide sequence isolated from the Sargasso Sea
catgccaaaaaaaaagaaaaaatctaagtcactaaaaaagagaaaaaagaactcgaagccaaagaggagaaaaaaatttactaaatcaaaaaaggctaaaaaattagaaggtcctaaagagattgtatacaaagtaaaaaatgactggattaaaaaaagtacaataaataaatctcaatacgaaaaaaaatataaacaatctttaaaagataacgaaggattttggaaaaaagaaggtaaacgtataacttggatcaagccatattcaaaaattaaagatgtaaaatatagcaagtcagatgttcatattagatggtattatgatggcacattaaatgcttcggcaaactgtatagataggcatcttaaaagaaacagagataaaacagcaataatttgggttggtgatgatccaaaagtacaaaagaaaataacctataaacaattgcatcaagaagtatctagggctgctaatggacttaaagaattaggtgttaaaaaaggtgatagagtaacaatttatttgactatgatccctgagctagcatacacaatgttagcatgtgcaagaataggt

SEQ ID NO: 308369 - DNA, 145 bp, Unknown
  Bacterial polypeptide expressing nucleotide sequence isolated from the Sargasso Sea
ggaaattattgataagtattcagttaatattttctatacggccccaaccgctattagagctctcaggggggcgggtgatgagtatgttaaaggcacagaccgatccagttggcggcttttaggaacggtcggtgaaccaattaat

SEQ ID NO: 308370 - DNA, 406 bp, Unknown
  Bacterial polypeptide expressing nucleotide sequence isolated from the Sargasso Sea
atggactatcattcaatttataaaagctggcaagcagatccagagagtttttggatggaagccgcaggaggtatagattgggacaaaaaaccaacgtttgctctaaatgagagtaatgaacccttatttgaatggtacacagatagttatgtaaatacgtgcttcaacgctgtagatagacatgtcgaaaagggccagggagatcaaaccgctatcatatacgatagccctatcacggggaaaaagcagcacatcagttatgcgcaactgcttgaaaaaacgagccttttagcaggttcgctcttaaagaagggaattacgaagggtgatagagtaataatctatatgccaatggttccagaggccattgtcgctatgttagcatgcgcgcggatggagcaatcca

SEQ ID NO: 308371 - DNA, 76 bp, Unknown
  Bacterial polypeptide expressing nucleotide sequence isolated from the Sargasso Sea
gcagaaatcgaaagtgcgtttgtcgctcatccaaaagttgctgaggcagctgttgttgttacccacacgacataaa

SEQ ID NO: 308372 - DNA, 877 bp, Unknown
  Bacterial polypeptide expressing nucleotide sequence isolated from the Sargasso Sea
agaaggctgtgtaagctatgaagaaatatcaaatacaaaagacttagattggccagaagataatgcaacagatgaggatcttactgtgctgctctatacatcgggttcaacaggattaccaaaaggagtgatgttaactcaccttgcaattattaatgctctgttcagtttctatacacttggtgaattaagaaaaatagtacatgaagagcagctattaatcgttgaaaatgcatcggttcttataaacgtgcctttatttcatgtaacaggtttaattacacaattcttgctttcaatgttagcaaagagaaaaattattattatgaaaaagtgggacgctagctatgcattagatttaatacaacaacacaaggtaacaaatttaagtggtgttccaactcaaagttgggatttaatgaaccattctaatgtagatgactatgatttatcatctctgattgatattggagctggcggagctgctcgaccagaagatcaagtcttcaatttacatgaaaagtttaatattccgatgacatttgcttggggtatgacagaaacttctgcacttgggacaattctaagaggtgatgattacttgaaaagaccaaatagtgcaggattaatagttccagatatcactgaaattggcataatggatgatgataataatttcttacaaaccaatgctgttggagagattgttttcaaatcaccttcaaatactattggatatctaaaaaatgaagaagaaacaaggaaaactattgtaaatggctggttaaaaacaggcgatctagggtatctagacgaggatggatatttatttattctagatagaaaaaaagcattaattattagaggaggagaaaat

SEQ ID NO: 308373 - DNA, 553 bp, Unknown
  Bacterial polypeptide expressing nucleotide sequence isolated from the Sargasso Sea
atgccaaaaaagaaaaaaagaaaaaaaattaaaaagaaaaaatctaaaaaaagaaaagtaaaaataataaaaaaaagattaaaaaaggttaattctaaaaaaattcataatacagaattaatttataaaccaaaaagtgattggataaaaaaagctatagtaaataaatctgcatatgaaaaaaaatattcagagtctttaaaaaacaacgataacttttggaaaaaagaaggcaaaagaattacctggataaagccatatacaaaaattaaagattataaatacagcaaaaccgatgtcaatattaaatggttttatgatggaactttaaatgcttcagctaactgtattgatcgtcacctaaagaaaaataaagataaaactgcaataatttgggttggtgatgatccaaaagttcagaaaaaaattagctacaaacaattacaccaagaggtttcgaaggcggcaaatggattaaaagaaataggtgtaaaaaaaggggatagagttacaatttatttaactatgatacctgagttggcatatacaatgc

SEQ ID NO: 308374 - DNA, 371 bp, Unknown
  Bacterial polypeptide expressing nucleotide sequence isolated from the Sargasso Sea
aaatataaattatcgataaaacataacgaggggttttgggcaaaagaggggaaaagaattacctggattaaaccttataccaaaattaaagatgtaaaatacagtaaagaggaagttagtattaagtggtactacgatggcacacttaacgcatcagcaaattgtattgacaggcatttagataagaaaggaaataagactgcaattatttgggtaggggatgatccaagtgactccaaaaaaatatcttataaagaactacacaaaaatgtttgcaaagctgcaaatggtttgaagagtataggaattcaaaagggagacagggtaacaatttatttaactatgatacctgagcttgcatatacaatgtt

SEQ ID NO: 308375 - DNA, 913 bp, Unknown
  Bacterial polypeptide expressing nucleotide sequence isolated from the Sargasso Sea
gactgtcagcgaaaacgattgggcttacatactttacacttcagggtctacagggaaaccaaagggcgtgttggctccacatcgttgttatcacggccgtttgatgtggatgtggcaaacattcccacttgaagttggtgaggtgggtatccacaaaacggctgcaacatgggtggatcacattcaagagatctttggttatctcggtggtggtgcaactgtcgtgaccgctaatgaatctgctagaaaagacgtacgcattcttacttcactttgtcaccaatatgaagtctcgaggatcgtcttgatgccgtctctccttcgcctcattgttgacatgtatggcaaacaacttgctgaagaccttccaaagctgcgctgcgtgatttctagtggcgagccgttgcccgttgagcttgtcaaggatttcatttcaaatgcttcaagccgaacaactctagttaacgcctatggatcaaccgagattgcaggagatgtgacatgggcagcattcacagcaagtcacatgcccgagccaggcagcagtggttttgccacagtcgggacacctatgcgtggcgtgcaactccatgtactggatccggataagctcgtgccagtgggcgccggcgaagttggagaaatatttgtcgcaggtgattttgtggccgaaggctacctcaaccgtgaaagtgagcaggacttgtgtttcttgaaaattccaagcctgaatccggattgcatgggtggaatgcgcggttggaatccggagagagtattccgcaccggtgattttggccgctttgatggtgaattcctctacctccaagggcgaaaggatcagcaagtgaaagttcacgggcagcgaattgaagttctccaatgtagagcacgtcctccaagagagtcactg

SEQ ID NO: 308376 - DNA, 142 bp, Unknown
  Bacterial polypeptide expressing nucleotide sequence isolated from the Sargasso Sea
tcagattctcttccaaaaacgcgtagtggaaaaataatgagaagaattttgagatctttggcagaaggcgaaaaaataagtggagatattagtacccttgaagatagttctgttttagaaaaattaaaggaaatatcttaaa

SEQ ID NO: 308377 - DNA, 463 bp, Unknown
  Bacterial polypeptide expressing nucleotide sequence isolated from the Sargasso Sea
ttgatttacaagacaaaaaaagaatggactcgtcaatcactagtaaacaaaaaagaatatgaaaaaaaatataatcagtcgataaaagacaatgatggattttggagaaaagaaggaaaaagaataaattggataaaaccttacacaaaaataaaagatgttaaatatagtaaaactgatgttcatattaaatggtattatgatggaacactaaatgcttcagcgaactgcattgatagacatttaaagaaaaataaaaacaaaactgcaattatatgggtaggagatgatccaaaggtacaaaaaaaaatatcatataaacaattacatcaagaagtttcaaaagcagccaatggccttaaatcattaggaattaaaaaaggggaccgggtaacaatttatttaacaatgatacctgaacttgcatatacaatgctcgcttgtgcaagaattggcgctattc

SEQ ID NO: 308378 - DNA, 613 bp, Unknown
  Bacterial polypeptide expressing nucleotide sequence isolated from the Sargasso Sea
catggctaaacgaagaagaaaaaagaaaagaagaaataaaacaaaaaagagaagtaaaaaaagaagaagaaaatcacaaaaaaaaattaaaggatcaaagaaaaagtcttctaaagaaactttagattctgacggcaactttgtcttcaaagtttcagaaaattgggcaaaacaagcatatgtgaacaaatctcaatatgaaaagaaatataaactatctctgaaagacaatgagggtttctggaataaagaaggaaaaagaataacatggataaaatcttacacaaaagtaaaagatgttaagtacagtaagcaggaagtaaatataaaatggtattatgatggaactttaaacgcttctgcaaactgcattgatagacatctagaaaaaaagggtaacaaaactgcaattatttggataggagatgacccaagtgactccaaaaaaataacatataaagaactttataaaaatgtttccaaagcagccaatggtctaagaagtataggtgttcaaaagggtgacagggtaactatttatttaacaatgattccagagttagcctacataatgttagcttgtgctagaattggagcagtacattcaatcata

SEQ ID NO: 308379 - DNA, 223 bp, Unknown
  Bacterial polypeptide expressing nucleotide sequence isolated from the Sargasso Sea
tatttatcttggtatgaccccggagatagtagtttcgatgcttgcctgtgcaagatttggagcagtgcactctgtagtatttggtggattttcagctgaggcactagctgatcgtataaatgatgctgaagcaaaggtagttataacagctgataggcgcatggagaagaggagaaattgttcctctaaaggagaacgtcgacaactcattagaactaactga

SEQ ID NO: 308380 - DNA, 271 bp, Unknown
  Bacterial polypeptide expressing nucleotide sequence isolated from the Sargasso Sea
tatgcttttgttactttaatggtaggtgaagaattttcagatgaattatcagcggaattaagaaactttgttggcaaagaaattggtcctattgcaaaacctgacttaattcaaaatgctcccggtcttccaaaaactagatcaggcaagattatgagaagaatattacgtaaagttgctgaaggtgatttcgaaaacttaggtgatacgacaactcttgctgagcctgctgtggtttctgatcttattaataataaaaaaagtttatgaa

SEQ ID NO: 308381 - DNA, 577 bp, Unknown
  Bacterial polypeptide expressing nucleotide sequence isolated from the Sargasso Sea
atggctaaaagaaccaaaaagaaaaaaagaaaatcaaaattaaataaaaagaaaaaaaatagaagaaaaaagaagaggactcttaaaagcaaaaagaaaagaggttcttctagaaaaaataattctaaacaaatcaaagatgctgatggaaacttggtttttaaagtaccgcagaaatgggaaaaacaagcttacgtagaccaaaagcagtatacgaataaatataaactatctattaaagataatgagaatttttgggccaaggaagggaagagaatatcctggattaagccatattctaaaataaaagatgtaaaatatagtaaagaggaagtaagtataaagtggtattatgatggaacattaaacgcttcttcaaattgtatagatagacacctacaaaaaagaggaaacaaaactgcaattatttgggtcggggatgatccaagcgactctaagaaaatcacttataaagaattacataaaaatgtttgtaaagcagcaaatggtttaaaaagtatcggtattcaaaaaggggacagagtaactatttatctaacgatgatttcccgagctt

SEQ ID NO: 308382 - DNA, 832 bp, Unknown
  Bacterial polypeptide expressing nucleotide sequence isolated from the Sargasso Sea
gctattcttgcggcgaatagccttgaattcctgattacttatttaggcataatgagagctgggatggttgcagttcccataaatcataaatttccaatggaaactattgagttcattttatctgacgcagattgcaagcttatttttgccgatgatgcccgtcggcaccaaatacctgttgggtataagttcattgtctttgatacaaatggcagtaatgaattttgcgactttctagattatggtcattatgaaactattagacctgctgatgacgaggttgcgatgttcttgtacacctctggatccactggtcgtccaaaaggtgttccgttaactcataaaggacatctctgggtcattgaaatgcgccttaaacaaagaccagaatcagaccatagaatgttagttgcggcccctttatatcatatgaatggcctcgcgatttgcaaagttgcttttgcaggtcatctaggaatagttttgttaccccaatttgatgcaaaagagtatatttctgcgattgagaaatataaagtcacctggttaacatccgttgcagccatgatggcgatggttgttagagagggtgatcttctgagcacgaccaatctctcttccgttcgcattgtgagaatgggatctgccccggtaagtgagcagcttgtacgagacataaaaagaactttaccgaatgcaaaaatcacgaatggctacggaacaactgaggcaggcccggtcgtttatggtcagcatccagaaggtcttgctcaacccgatatttctgtagggtaccctatagctaacatagcccggcttgtagatggcaata

SEQ ID NO: 308383 - DNA, 796 bp, Unknown
  Bacterial polypeptide expressing nucleotide sequence isolated from the Sargasso Sea
gaatttaatttaacatataaaaaaacattagactttatttataaattaaatgattatttttttaataataaaataaaaaaaaaagagaaaataattgttatatttgacaattctatacttttaagtttattatttttagggataacttctaccaacagggtatttgttcctgtaaatccagaaataggaaaatatgaatttttaaatattttaaaaacatctggagcaaaaatcttaattattgatgaaatttataaaaaaaagttttctaaacttttcaagaaaaaaagtatttatataaaaaaccatttagaatttgttgatgatatattaaccagaaaaaataaaaaatttgataaaagtttctctggcttatgtgaaattctttacacctctggatcaactggtaatcctaaaggggttatgcttacgcatcaatctattttagcgaatataaacggtttagaaaaaattttaaatttaaagaaatttaaaaattttttagcaatcaccccattatttcataataatggacaatttataccaactttgctttcaataaaaacattcggcacaagtcttccagtaaattcaaagacaagtgtaataattttttgggatttagtaaaagaatttaagataaattattcttcggtcatggctactcatattagttatctattgaaaacatcaaaaaaagttagagaccataatctagatggtcttttttgtggaggtgctaaacttgataaaaatattcaaaaaaaatttgaaaaaaaatttgctgttaaaattg

SEQ ID NO: 308384 - DNA, 139 bp, Unknown
  Bacterial polypeptide expressing nucleotide sequence isolated from the Sargasso Sea
ggcccgctcgcatgcggcggcacgcaggtcgtgttcgaaggcgtgccgacctatccggacgccggccgcttctggaagatgatcggcgaccacaaggtcaccgtgttctacaccgcgccgaccgcgatccgctcgctga

SEQ ID NO: 308385 - DNA, 494 bp, Unknown
  Bacterial polypeptide expressing nucleotide sequence isolated from the Sargasso Sea
aaataagtattatccaggtgattatgccatatgtgactctgacggttatttttggctattaggaagatctgatgatgtattaaaagtagcaggacatagaattggaacagctgagcttgagagcagtttagtttctcatgattacgtagcagaatctgcagtatgtagtattcctgatgaaattaagggtgagtcaattattgcatttgttgttttaaatgacggcatagaaattacacaagaaaaaatagtcaatgaattaagaaatactgtaagaaatagtgttggtgcaattgccatcccccaggaattctatattgtctctaaacttccaaaaacacgtagtggaaaaatcatgcgtagattactcaaggcaattgcaaacaaggaaaaagttggtgatgttagtacattggaagatggtgctgcagttactgaagttcaatctgcttttgatgagatacaaaaatcagttaacatatcagatcgctgaa

SEQ ID NO: 308386 - DNA, 194 bp, Unknown
  Bacterial polypeptide expressing nucleotide sequence isolated from the Sargasso Sea
ttcaaaaactattggtccaattgcaaaaccagaaaaaattcaaattgttcctggtctacctaaaactagaagcggtaaaattatgagaagaatattgagaaaaatagcttctggagaaaagaaaaattttggagatatatctactcttttaaacccagaagttgttgagcaaatattaaaaaatagtatttaat

SEQ ID NO: 308387 - DNA, 367 bp, Unknown
  Bacterial polypeptide expressing nucleotide sequence isolated from the Sargasso Sea
catgtcaaaaagaaaaaagaaaaaaagaaaaaaaaatattaaaaaaagaaagaagaagattaaaaaaaaaataacttctagaaaaaaagatactcagcaaactacagattctgacggcaatattgtttacaaagtatctgaaaaatggtcaaaacaagcgtatgctaataaaagccagtacgagaaaaaatataaattatcaataagagaaaatgaaaatttttggaaaaaagagggcaaaagaataacttggattaaaccttatacaaaaattaaagatgtaaaatacagtaaagaaaaagttagtattaaatggtattatgacggaacattgaatgcttctgcaaattgtatcgatagacattta

SEQ ID NO: 308388 - DNA, 120 bp, Unknown
  Bacterial polypeptide expressing nucleotide sequence isolated from the Sargasso Sea
taatgcgccgaatattgcgtaaaattgctgaaagtgatgtggaaagcatcggggatacttcaacacttgctgatccatctgtagtagatgatttaatttccaatcgtcctgcaaattgag

SEQ ID NO: 308389 - DNA, 145 bp, Unknown
  Bacterial polypeptide expressing nucleotide sequence isolated from the Sargasso Sea
tcttccaaaacacgatcaggaaaaataatgcgaagaattttaagaaagattgctgctaatgaacaagatcaacttggtgacactactacgcttgctgatccatctgttgtagatagcttagttgaaaatagaaaaaatatttaaa

SEQ ID NO: 308390 - DNA, 693 bp, Unknown
  Bacterial polypeptide expressing nucleotide sequence isolated from the Sargasso Sea
tatggcaaaaagacccaaaaagaaaaaaaagcctataaagaaaaaaagagtaaagaggcttaaaaaaaaaagaagaaaaactttaaaatctcgttcaagtaaaaaacataataaaattaagaaaactaattctgaatcagatgaaaaaatttataaaactaaatctgagtggatcaaaaaagcacttgtaacaaaaaatttatatcaaaaaaaatataatcaatctattaaggacaatgaggggttttggagaaaagaaggaaaaagaattaattggataaaaccctacacaaaaatcaaagatgtaaaatacagtaaatcagatgttcatattaaatggttttatgacggcaccctcaacgcctcagcgaattgtatagacagacacttaaaaaataataaagataaaacggcaataatctgggtgggcgatgatcctaaagttcaaaaaaagattagttataaacagttgcataccgaagtatgtaaaattgcaaatggattgaaaagtattggtgtaaaaagaggtgacagagttacaatttacttaacaatgatacctgaattagcttacacaatgttagcttgtgcaagaattggtgcaatacattctataatttttggaggattttcaccagatagtatagctggcagatttaatgactgtaactcagattatatagttacagcaga

SEQ ID NO: 308391 - DNA, 229 bp, Unknown
  Bacterial polypeptide expressing nucleotide sequence isolated from the Sargasso Sea
gctcttgaacaggaactaacaaaatttgtttcaaaagagataggtcctattgcaaaacctgaccttattcaaaatgctcctggtcttcctaaaacaagatctggaaaaattatgagaagaatattaagaaaaattgctgaaggtgatttcgataatcttggagacacaaccactcttgcagagcctgcagttgttgcatctttgcttgaaaatagcaaaaaactatgaa

SEQ ID NO: 308392 - DNA, 541 bp, Unknown
  Bacterial polypeptide expressing nucleotide sequence isolated from the Sargasso Sea
ttgccttctcacgccttctcaagccttctcacgccctctctagccctctcaagccctcccacgccctcccacgccttcccacgccctcgcgcacagtcggagccggtgatgcccgtcaaggacccgacctccgacatggccgtcttctccaagaagggctcgcagctcatgcgcgatgtgagggagcggcgcgagcgcgagcgcgcgaccaaggagaagttcaacatggcggggacggtcatcggcaacatcctcggcgtgaaggaggagaaggtcgaggaggggaccggccagcgcaccgacgtgcaggacgacgcctattcgagcgcgctcaaggcggacgcggcgggcgcgggcgacgacgacgatgagggcggggagggcggcgattacaaaaaggattccatgtacgcacacggcgaagcccaaacggccttccatggccttccatggccttccatggccttccatgggcttacgtgcccttccatgggcttccatgggcttccatggccttccatgcccttcgatggccttctat

SEQ ID NO: 308393 - DNA, 550 bp, Unknown
  Bacterial polypeptide expressing nucleotide sequence isolated from the Sargasso Sea
atgccaaaaaaaaaagcaaaagttaaaaagaaaaagtctattaagagaaaaaaaaattttaaaaaaaaatctgatcagaacatagaaaaagaattaatttataaaactaagaaagattggatcagtaaagctacagtaaataaatctcaatacgaaaaaaaatataaatcttcactttcagataatgatgctttttggaaaaaagaaggaaagagaattagttggattaaaccttatacaaaaattaaagatgtaaaatatagtaattcagatgttagaataaaatggttttatgatggaactttaaacgcttctacaaattgtattgatagacatttaaaaaaaaataaagataaaactgcgataatatgggttggtgacgatccaaaaattcaaaaaaaaattacttataaagaattacacaaagaagtatcaaaagcagcaaacggattaaaagaaataggtgttaaaaaaggtgatagagttacaatttatttaactatgatacctgagttagcatacacaatgcttgcttgtgcaagaattggtg

SEQ ID NO: 308394 - DNA, 79 bp, Unknown
  Bacterial polypeptide expressing nucleotide sequence isolated from the Sargasso Sea
aatgagaactgtctatggtgatcatcaaagatttattgatacatatttttcccatttgatgaaaatattttacaggtga

SEQ ID NO: 308395 - DNA, 481 bp, Unknown
  Bacterial polypeptide expressing nucleotide sequence isolated from the Sargasso Sea
cctgaatgaaattgacccatccattctaacacggcgctcgctgcgctcgctcaacagcggcctgcgcgggaacaaagtggtccccctcaagtccatcgtggacgaggcgctgtcactggtggcccccgaggagcgatccgtggaggcggtgctggtggtggaccgcctcaaggcgtggacggctccctccagccccctccgagccgtcgccggcgccgcagccaaggcctcgggcagcctcaagtccgactcctgcttcagcggggaagatggcgactcctccctcctcaatgggcggcctcagaagcaccgcgacgtgccctactctgaggcggtggcgaaggcgtcgccggtctgcgagccgacgtccgtggactcggaggaccccttgttcatcctctacacgagcgggtccacgggcaagcccaagggcgtgctgcacacgtcggcgggctacctgttgggggcctccatgacccac

SEQ ID NO: 308396 - DNA, 730 bp, Unknown
  Bacterial polypeptide expressing nucleotide sequence isolated from the Sargasso Sea
tatggctaaaaagaaaaaaaggaaaaaattaaggaaaaaaagagttaaaaaatttaaaaagagaaaaactaaaaaaaccaaaaaaaaaattaaaaaaacaaagagaataagaaaaaataaaaaaataaaaaactcaaaatcaagcgaacttgtttttaaagtaccaaaaaaatgggctaacaaagcttacgttgataagaaagaatatgaaagaaagtataaattatcaataaaagataatgaaggattttggaaaaaagaaggtaaaagaatagattggataaaaccttataagaaaataaaagatgttaaatatagtaaaaccgatgttaaaattaaatggttttatgatggaactttaaatgcttcggcaaattgcatagatagacatttaaaagataaaaaaaataagactgcaataatttgggtgggagatgatccaaaagattcaaaacatataagcttcaaagaacttcataaaaatgtatgtaaagcagcaaatggcttaaaaaatattggcataaaaaaaggggatagagtaactatttatttaactatgatacctgagctagcttatgtaatgctagcttgtgcacgaattggagctatacattctataatattcggcggcttttccccagattcaatagctggaagaattaatgattgtccatctgattacattattactgctgatgaaagcattagaggaggaaaaactatacctctt

SEQ ID NO: 308397 - DNA, 218 bp, Unknown
  Bacterial polypeptide expressing nucleotide sequence isolated from the Sargasso Sea
cgaacaccaaattggccctatagctaccccacgtcaattctatattgtaaatagattaccaaagactagaagtggaaaaattatgagacgattgttaaaggcaattgcaaataatgagaaaattggtgatgtaagcactcttgaagatggagctgcagtaagtgaaattcaatctgcatttgatgaattacagaaaaatgttagaaaccaacaataac

SEQ ID NO: 308398 - DNA, 806 bp, Unknown
  Bacterial polypeptide expressing nucleotide sequence isolated from the Sargasso Sea
tattgtcgaatgcgatcaggacgatattgcaatgtttctgtacacctctgggtccacgggacgaccaaaaggcgtgccgttgtcccattacgggcacttatgggtcatcgagatgcgctcaaagggtggtgatattgcgtcgcatcgcttactcgttgccgctcctctttatcatatgaatgcccttgcaattgccaaagctgctttactcgggcatgccacgatcatcctgctgccacaattcacaaccgatggttatgttaaggcaatcgagcactttcaatgtacctggctcacgtcagtcccaacgatgatggcccttgtcaccaaggacacagcgctcgtcgaggctactgatgtctcgtctgtaaaaatcgttcgtatgggttcagcaccagcaacgcaacgcctctttgatgatatacgcaaagcctttccaggtgcggcgatctcctatgggtatggcactacagaagcaggtcccgtctgcttcggaccgcaccctggaggcttaccaacccccgatctctctattggatatccggtcgcagaggtccggatgcgccttgtccaaggcgacaacctggatgcggacgaaggcgaactacaaatggactgccctgccaaaacgccgggttaccataagctgccggaaaaaaccgccgaggtcatgacagcagacggctattacaagacaggcgatatcattcgccgcgatgcaaacggcttccactattttgtcgatcgcgtcgacgatatgttcgtttgcaacggcgaaaacgtctttccggtagaagtagaaagac

SEQ ID NO: 308399 - DNA, 656 bp, Unknown
  Bacterial polypeptide expressing nucleotide sequence isolated from the Sargasso Sea
catgacaccaaggaatttgggaaacctaatcgatcgcaatacggatcccgaaagggttgtcgttattgatattaaagaccctgccaatccgttcattcttaaatgtggtacgcttgtggcgcggatagacgctgtcgcacgttctatcactgcccgtgggtttgaaaaaggggatgccgttgcaatcttgtcggccaacagcgcagattatttgtgtgcatatttcggtgttatgagggccggtttggtggcggttcctttgagctacaaatttccggtagaaactatacgatacatgttagcagattgcggggcgaagttagtcattgccgataaagatcgagcacaatattgtcccgaagaaataccgatcattcagtttgatgacgaagggtcaaacggcttcgaaacatttttaaatactggttcttttgattgcgttgaaactaacgggaacgatatagctatgatcctttatacgtcagggtcaactggtcgaccgaaaggggttccccttactcatgccggacaactttgggtcatcaacaatattataggtgatggaagttcatttaagcaccaccgtttccttgttgcggcaccactctttcatatgaacgggctttttatgtctaaggtcgtcgctgccagcccaa

SEQ ID NO: 308400 - DNA, 360 bp, Unknown
  Bacterial polypeptide expressing nucleotide sequence isolated from the Sargasso Sea
tatggaaattttaaaagattgggtaaataatgctaaagtcaattatgatgagtacacaaaactttataacgaatcaattgtaaataatgaaaatttttggagtaaagaaggtaaaagaattgattggatcaaagactatacaaaaattaaaaatattaaatattcaaaaaacgaagttaatataaaatggtttcatgatggtacattaaatgtttcttataattgtatcgacagacatgcaaaagaaacacctgaacgaatagctattatttgggaaggagacaatcctaatgatgtaaagaaaattacatataaagaattattaaagaatgtatcaaaagctgcaaacgtactaaaaaa

SEQ ID NO: 308401 - DNA, 265 bp, Unknown
  Bacterial polypeptide expressing nucleotide sequence isolated from the Sargasso Sea
gtgacactgatgtctggggaaaccccgactgaagaacttcgcttagaactaaggaattgggttcgcaccgaaatcggaccaatcgcctctccagatctcattcagtgggcacctggtttgccaaaaacacgttctggaaaaatcatgaggcggatattgagaaaaatagctgaaaacgactatggttccttaggtgatacatctacattggcagaacctgctgttgtggatgacctcattataaatagaatgaatgaaacttaac

SEQ ID NO: 308402 - DNA, 109 bp, Unknown
  Bacterial polypeptide expressing nucleotide sequence isolated from the Sargasso Sea
ttataaaaaaatcaaaaatgtaaaatacagcaagtctgaagttagcattaaatggtattatgatggtactcttaatgcatctgcaaactgtattgatagacatttaaaa

SEQ ID NO: 308403 - DNA, 114 bp, Unknown
  Bacterial polypeptide expressing nucleotide sequence isolated from the Sargasso Sea
aagatggtattttgaatgcctctgtaaactgtattgatcgccatttatcgaagaaagcaaatgaaacagcaataattgggagtctgatgatccaaatgttgataagaaaataac

SEQ ID NO: 308404 - DNA, 157 bp, Unknown
  Bacterial polypeptide expressing nucleotide sequence isolated from the Sargasso Sea
tcgcacctggtttgccaaaacaagatctggaaaaattatgaggagaattttgagaaaaattgctgctaatgaaccagataatttaggagatacaacaactttagcagatcctagtgttgtgacatcgcttgtcgaaaatagacaaaacaaaggttaa

SEQ ID NO: 308405 - DNA, 604 bp, Unknown
  Bacterial polypeptide expressing nucleotide sequence isolated from the Sargasso Sea
atgctacctgcaacaggcaatctgggtgatctcacaaacaggtcgttagaccaaaataaaaccgcactaatcgatgcatcagactttgaaaatccaatctctttgtcgcatggtgacctcgaccgacgcgccaatgcggttgcacgcgctttggttgctcgcggctacgcccgcggggaccggatcgcgatcctagcagctaacagcgccaacttcctcgcaacctatctcggtacgatgcgcgccggcatgatttccgtcccagtcaattggcggttcccctcagaaactatcgcctacatccttagcgactgtgacgcaaaatttatctttgtcgacgaaatacgtcgagacgctgtgccggacggtcttcccatggttcaattcggaaccgacttcgaaacttttctcgatccaggaccgttcgacattgtcaattgcgatcaagacgatattgcaatgttcctttacacctctgggtccacgggacgcccaaaaggagtacccttatctcattacggacacttatgggtcatcgcgatgcgctcaaagggcggcgatattgcatcacatcgcttgctcgttgccgcccccctttatcata

SEQ ID NO: 308406 - DNA, 216 bp, Unknown
  Bacterial polypeptide expressing nucleotide sequence isolated from the Sargasso Sea
aactagaggaggatttaaagaaacatgttgttaatgaaattggaattatcgctaagcccgaaaaaataataatttctgactctcttccgaaaacacgaagtggaaaaattatgaggcggattttgagatctttggccgctggagaaagaataagtggtgatataagtactcttgaagatagttctgttttggaaacgttgaaagaatcatcttaat

SEQ ID NO: 308407 - DNA, 262 bp, Unknown
  Bacterial polypeptide expressing nucleotide sequence isolated from the Sargasso Sea
tgttaccttaatgaaaggtgaagattttaatgatgctcttgagcaggaactaacaaaatttgtttcaaaagagataggtcctattgcaaaacctgaccttatacaaaatgctcctggtcttcctaaaacaagatctggaaaaattatgagaagaatattaagaaaaattgctgaaggtgatttcgataatcttggagacacaaccactcttgcagagcctgctgttgttgcatctttgcttgaaaatagcaaaaaactatga

SEQ ID NO: 308408 - DNA, 814 bp, Unknown
  Bacterial polypeptide expressing nucleotide sequence isolated from the Sargasso Sea
catgccaaaaaaaaagaaaaaaagaaaagttaaaaaaaagtctttaaaaaaaagaaaatttaagaaatcttctaagaaaaagagaaagagcagaaaaaaaagaattaaaaaaaataaatcaaaaattaaatctaaagagtcaggcgaaaaattttataagacaaaatcagaatggattaaaaatgcgtatgtcaataaatctgtttatgaaaaaaagtataaagagtctttaagaaataataacgaattttggtcgaaagaaggaaagagaattacttggataaaaccttatacaaaaataaaagatgtaacttacagcagtacagatgttaatattaaatggtattatgatggaactcttaatgcttctgcaaactgtatagacagacatttaaaaaaaaataaagataagactgcaattatttgggttggtgatgatccaaaagttcaaaaaaagataagctataagcaattacacgatgaagtttcaaaagcagcaaatggacttaaaaaactaggtgtacaaaaaggtgatagggttacaatttatttaacaatgattcctgaattagcatacacaatgctagcttgtgcaagaattggagctatacactcaataatttttggtggtttttctgcagactccattgctgatagagttaataattgtaggtcagattatattgttactgcagatgaggggataagaggtggtaaaactattcacttaaaatcaataactgatgaagcactaatacattgtccgaatgtgaaaaaatgtattgtagttaaaagaacgggcaacagaattaac

SEQ ID NO: 308409 - DNA, 316 bp, Unknown
  Bacterial polypeptide expressing nucleotide sequence isolated from the Sargasso Sea
cggtagttggcgcccagatgacaccaccggtcaagcgatagttggatattgcattttgagaggaggcaacgaaccaagtgacgagttgcgcgaagagataaggcaacacgttgctaccaaactaggtgccatcgccagacctaaagctgtggtgcttgttcctgatctacccaaaacccgatcaggaaaaatcatgagaaggctgcttcgtgatgtcgccgaaggaagaaagctcggcgacaccacaaccttggccgatgaaagcgttgttgatgagattcgtgatcgcgccgccgaggcacctcaggaggactga

SEQ ID NO: 308410 - DNA, 189 bp, Unknown
  Bacterial polypeptide expressing nucleotide sequence isolated from the Sargasso Sea
gatccatcaaaagtaaaaaaaattagttatcaagaattacaaactaaagtgtgtaaaatggctaatgttttaaaaaagataggtgtgaaaaaaggcgatagagtaacaatatatttaacaatgattcctgagcttgcttacgtaatgcttgcttgtgctagaataggtgcaatacactcaataattttt

SEQ ID NO: 308411 - DNA, 684 bp, Unknown
  Bacterial polypeptide expressing nucleotide sequence isolated from the Sargasso Sea
tttgagatctatcggtgttaaaaaaggtgatagagttgtaggcattgtaactaataatgcggaaacattgatttcatttcttgcagtaaattcaattggtgcggtatggtcttcttgttcaccagattttggtgaacaggctatattagataggtttagtcaaatagagcccaaaattttattttattccagcagctatatgtatggaggaaagaaatttaaaattttagaaaaaataaaaaatgttgagagtaagcttaatacattggaagtatccatatgcattgattattctcaaaaagacaaaagtttcatcgatgaaaaattaaatttttttgaagaaaacaatagagaattgagtgagctctcttttgaaagatgtcagtttaatgaccctatgtatatattgtattccagcggtacaactggaaaaccaaaatgtattgtacataataccggaggtccattaatccaacatttgaaagaacagcaacttcactgtgaaatttgtgaaaacgataagcttttctattttactacttgtggatggatgatgtggaattggcttatttctggtcttgcttctaaggcaacagttgttctttatgaggggtctcctttttttccacatcaggactcactttttaaagtggcggaagaagaggaaattacttgctttggcac

SEQ ID NO: 308412 - DNA, 918 bp, Unknown
  Bacterial polypeptide expressing nucleotide sequence isolated from the Sargasso Sea
aaggcttttcaaaagaaattatcaagtactaaagaatttagttatgatcttttgtataaatggtcgttagataatattgaagaattctggaatttagtttgggatgacgcaaatattattggcgccaaaggaaaaagtataattaatgactataatgatttaattaaaagtaaattctttccaaaaggtcacttaaatttcgcagaaaacttactagttggtgaagatcatagagaagccataattttttatggtgagggaaaagaaaaaaagtctctttctttaaaagaattaaaatcaaaagttgaagttctagcaaaatggttaattaaaaatggtgtaaagaaaggtgatagagttgctgttttagcaacaaattcgccagaaactattatttcaatgcttgcaacagctgcagtaggaggtattttcacatcatgctctccagattttggtgaggaaggaattattgaccgatttggccagtgtaatccgaaaatttttataactacagatggctacatttatggcggaaaaaaatatgatattagtgataaggctaataatatttctaataggatttcatccatcgaacaaacaatacatattagatatattgatgaaactggtttaaaatataataatgattggcatgaaatattgtcagaaaaaaataatgacaaatttgaatttgtaaaattttcttttaacgatcctctatacattctttactcaagtggcaccactggaaaaccaaaatgtatagttcattctgccggaggaacattaatacagcatatcaaagagcataaatatcattgcgatatgaaagaaaatgaccgcattatgtactttactacttgtggttggatgatgtggaattggatggttactgctttggcgtcaaaagtaacctta

SEQ ID NO: 308413 - DNA, 576 bp, Unknown
  Bacterial polypeptide expressing nucleotide sequence isolated from the Sargasso Sea
catgcctaagaaaaaaaaaattagaaaaaaagtaatctctaaaaaacccaaagagacagtttataaaacaaagaaagaatggataagtaaagctaccgttaataaatctcaatatataaagaaatataacgagtcgattaaagacaatgatggattttggaaaaaagaaggaaaaagaattaattggattaagccttataaaaaaattaaagacgttaaatatagtaaagatgatgttcatatcaaatggttctatgatggtactttaaatgcttcagcgaattgcattgataggcatcttaaaaaaaatgctaataagactgcaattatatgggtaggagacgatgctaaagttcaaaaaaaaattacatataaagaacttcataaagaagtttcaaaagcagcaaatggattaaaaaatcttggagttcaaaggggtgacagagtaacaatttatctaaccatgataccagaacttgcctacacaatgcttgcatgtgctagaataggtgcagttcactccataatatttggaggtttttcaccagatagtatttcaggcagaattaatgattg

SEQ ID NO: 308414 - DNA, 373 bp, Unknown
  Bacterial polypeptide expressing nucleotide sequence isolated from the Sargasso Sea
agaaagtagcattgtatctcataatgatgttgcagaatctgcggtgtgtggaattcctgatgaagttaaaggtgaatcaataattgcatttgttgtgttaaaggaaagtgcacactcttctgatgaaaaacttcgtaccgaattacgtgagataattcgaacccaaattggacctattgctactccaaatcaattctatattgtaaacaggttgccaaagactagaagtggaaaaatcatgagacgactactaaaggcaattgcaaataatgaaaaaattggtgatgtaagtactcttgaagatggtgctgcagtaagtgagattcaatctgcatttgatgaattacagaaaaatgtacaaaatcaacaataa

SEQ ID NO: 308415 - DNA, 208 bp, Unknown
  Bacterial polypeptide expressing nucleotide sequence isolated from the Sargasso Sea
aaaacacgtacgcggtgaaattggatccttcgcaagtcctgatattgttcagtgggcatcgggattgccaaaaactagatctggcaaaattatgcgacgaattttaagaaaaatagcaataaatgaaattgacaatttaggtgatacaagcacccttgccgaacctgaggtggtgaataatcttattgagaatagagagaataaataa

SEQ ID NO: 308416 - DNA, 216 bp, Unknown
  Bacterial polypeptide expressing nucleotide sequence isolated from the Sargasso Sea
gcgccgcccgcggcgctcgaacaggcggcgaccatttccggcatgccggcctatcgtgcgctcgccgccgaagccgaaaacgattacgaaggattctgggcgcggctcgcgcgcgagggtctggcgtggcacaagccgttcacgaaagtgctcgacgagtccaacgcgccgttctacaagtggttcgacgacggcgagctgaacgcgtcgtacaac

SEQ ID NO: 308417 - DNA, 686 bp, Unknown
  Bacterial polypeptide expressing nucleotide sequence isolated from the Sargasso Sea
tttgataatacaagagcttgatccagtttatataatttctgaaagagatttaagtgaaattacagaaggcaaaacgataaatttttctcatcataaggatttaaaaatagctgacgaagaaattaataaatatcagctagaagtaacttatcttaacccaactaatagagaagatttatctgttattctttatacctcaggctctacgggagttcccaaaggggtgatgctttcaaatcaaaatactctccttacaatcggtaatattatcgaattctgtaaatttcattccacttcctttgagctagttacattacccttaactcatagctttggattaggacaaatatattcaatgcttttttctggtggttccgcatttattgaaatgggcatgttgagaatgaaaagaatctttcaagcaatggacgaatacacaattacaggttttccaacaacaccaaagggcgtagatttaatactaagtaggtattcagaaatatttagatcaaaaggaagagaccttactggaatgataatcaattcggctccactctcaccacatcagacaaaagaattacagagtcttttacctcatataaatatatatgtttactatggtttaactgaaggttcacgttctacatttgtatgtttaagtaatttaaaggaagagctacatacaa

SEQ ID NO: 308418 - DNA, 669 bp, Unknown
  Bacterial polypeptide expressing nucleotide sequence isolated from the Sargasso Sea
aatgagtaaattgtttaatttaggcgatttgattgaccgatcagctgactcatccaaattagcgttaattgatctgagtagagttggtaagccaaaaaaatatactcataaagagattgaccagatggttatggcggtagctcgcggcctcagtaatctaaagcttgatagaggtgaccggatagcaatacttgcggcgaatagtctcgaatttataactacttatttagggattatgcgagctggcatggtagcagttcccattaaccataagttcccaatggacaccatcgagttcattttatcagacgcagactgcaaggttgtttttgctgatgaagcacgttgtttacaaattcctgaaggatacaaattttttatttttgattccgatgctggaagtaaattcggaaaatttctagattacggtgaatttgaaactgttatgccctcagaagacgaagttgcaatgttcttatacacttccgggtctacaggccgtccaaagggtgttcctttaacccataaagggcatctttgggttattgaaatgcgccttaaacagaaaccagaaccagaccatcggatgctggtggcagccccgttatatcatatgaatgggctcgcgatttgcaaagtagctctcgctggtcatcttagtatcgtttt

SEQ ID NO: 308419 - DNA, 799 bp, Unknown
  Bacterial polypeptide expressing nucleotide sequence isolated from the Sargasso Sea
ttgctgccgcggggtttcttgcaggtggtggcggtgctgggcgtgctgaaggcggggggcgcgtacgtgccgctggacgacacgtaccctcggttgcggatcgcatcgatcggggaggactgtgggatgaaggtgtgcgtgagcacgtgtgcgggcggcttgtggcagaaggcggcggactttggggcgttcgcggtggaggacgtgaacttggatgcgttgggcacatcgggcaactgcggtcgtctggagaatgtgggcgtggggacgaagaacctgtgctacgtgctgtacacctcgggcagcacgggtaagccgaagggcgtggaggtggcccaccgttcggtgtcaaactttgggcagctcattttgtttgatagcgtttttttcggaagttttcgtcggcactgtgttctttgcgtctctcggctctcctgggacatgtcggtgaggtcaatgattcaatcttggggtttgacgggtgtattgtgcttggtgcctgttgccctttcaacgcacatgtccatgaatttaaacatgctgatgcagaaaatggaaatcacctcattagactgccctcctggacttttgagtggtctggatgagatgtcatccttgcggattgtttgggctggaggggacattttgcctccaaagataatccagcggctcctcgaccatggggtgaaagtaagaaacagttatggtcccacagaagccactgtcgatgcaacacaccatgctgtaactggctcagacccgagtctaatcaatggaacgcctgtcagcattggggggc

SEQ ID NO: 308420 - DNA, 472 bp, Unknown
  Bacterial polypeptide expressing nucleotide sequence isolated from the Sargasso Sea
tgatgtatttttttggacaaatacaacaaattggactgcagggtatttatcgggtaatactagctctgatactagaccatttagaataagttcttatgcaattatagattctcttttgcatcagattgcattaaataatccaatgctagagcaaattgtatttgctggattttctgcaggtggacagtttgtaaacagatatattggtggcaataatattacagaatttctttttagtgaattttctgtaccaattcgatttattattggtagtccttcttcatatttatatatgaataatgaacgtagagttgctggttcaactgatcaatttaatattccaagtggatgcagtggatataatgaatataaatacggtttagatgacttaaatagttatatgtccttagcaggcgttgactccattcgatcccgatatgaacgtagaaatgttgtttacctagtcggttca

SEQ ID NO: 308421 - DNA, 322 bp, Unknown
  Bacterial polypeptide expressing nucleotide sequence isolated from the Sargasso Sea
atgctatatgaaaaactgatgagcgcatggaaagcatgtgatatttcttcctggagatcatgttatcacgaagattacacatttgttagtcatgcaaatggtactactatgtctgcagctgatatgtctgacgaaataatgcttggtatgatgcaaacaacaacattagaaaaacaacgctgcatatatgaggatgaaaatattcttgtcgaacatagctttgccacttttggatcaggcgcaagagaagcagttttggctgttcacactaaaaaagacggtcttatctggcaaactgaaactggtgctacaccaatttaat

SEQ ID NO: 308422 - DNA, 1441 bp, Unknown
  Bacterial polypeptide expressing nucleotide sequence isolated from the Sargasso Sea
attgggaagttatctccagaatgacctaggagtaaaaaagggggatagaatagcggttgctatgagaaattatcctgagtacaccgttctcttcatggcgatagtttcgataggagcggttatagtatttgtaaacgggtggtggactactgaggaaatggaatatggatttgatgatagcggggctcatatatgctttgccgacagagaacgcattgaagtaataaagccttttgcagacaagaaaaatgttaagctgatctctgtcagagcagaggaaatcaacaatattttgtcttatggaaaaattctgaaaaacgctaaaaacagagatataaaggtcaatatatataccgatgatgattgtgccgtaatgtatacttccggttctactggacaccctaagggtgtcgttttaacccataggggagccatatctgctactttctcttggctaatggcagaaagagttggaggacttttagctgatcaagaaaagttagagactagaaggccctctagtatcttaaatgcttcaccacttttccatgtaaatggaacacatccaaatttcttatattccatagcaagaggatcaaaaataattctcatgtataaatgggatccaaaagaggctgtagatattatcgaaagagagagtgtcacaaggattactgctgttcctacggtggttgcagacttagttgcagaagcttcaactcaaaataaaagtcttgaaacattagaatttttgggagcaggaggcgcaaaaaggccaccgcctcaagttggagttgaaaaaaaagctcttccatcaaccgatattgcctccggatatggaatgactgagacaaatgcccttggaataggtatagctggagatgaatatttagataatcctgagttggccggaaggctttatcctcccatacaagagataaaaattgttgatgaaaaaggtaaggaagtgaattatggagaattaggcgaaattgccttaaaaagtcctgcaaacatgcgttgttatctaaacaagcctgatgcgactagagatgttctccgagatggatggatgcacactggtgacctagcaactctaaactctagtggatttgtagttatcagagatcgaaaaaaaaatataataattcgtgggggtgagaatatatcgtgtttggaggttgagggcgctattcaaaagcatccagatatagttgaatcaattgttttcccagtaccaagtaatagatttggagaagaggttggtgtttgtattcatgcaaaagatgatcatagtctttcaaatgttagtataattgagtttttgaaagataaattagcaaagtttaagatcccagttcatttttggtggataaacaaaagcttgcctagaggagcaaccgataaattggatagaatattaacaaaaaattatgtttag

SEQ ID NO: 308423 - DNA, 633 bp, Unknown
  Bacterial polypeptide expressing nucleotide sequence isolated from the Sargasso Sea
aatgcccaagaaaaaaaaaaagaaaaaaaagtcagtaaaaaaaataaagaagaaaattgacaataatgaaataatttttaaaacaaagaaagattgggtttcaaaggcaactgttaataataaagaatatcaaaaaaaatataagcaatccataaaagataatgatggattttggaaaaaagaaggtaaaagaatagattggattaagccttacactaaaataaaagatgtaaaatatagtaaatcagatgttcacattaaatggttttatgatggtgtattaaatgcttcagcaaattgtatagatagacatttaaaaaaaaataagaacaaaaatgctatcatttgggttggggatgatccaaaaatacaaaaaaaaattacttataaacagttgcatcaagaagtttcaaaaactgctaatgccttgaaggatgtaggtgtccaaaaaggagacagagtaacaatttatatgacaatgattccagagttagcatacacaatgctagcttgtgcaagaattggagcgatacattcaattatttttgggggattttccccagatagtattgctggtagaattaatgattgtaaatctgattatgtagtaactgctgatgaaggtataagagg

SEQ ID NO: 308424 - DNA, 611 bp, Unknown
  Bacterial polypeptide expressing nucleotide sequence isolated from the Sargasso Sea
gatggcaaaaagaagcaaaaagaaaaagtcaaaaaaaagaggtaaaaaactttttaaaaaaagaaaacttaatagtaaaaagaaaaaatctttaaaaaaaagaaaaataataagaaaaaaagtttctaaagaaacaaaagatgttgatggtaatttagttttcaaagttccagaaaaatggtctaagcaagcttatgtaaataaatcacagtatgaaaaaaaatataaattttctataaaaaataatgaagatttctgggcaaaagaaggtaaaagaataaattggataaagccttatacaaaaataaaagatgtaaaatatagtaaagaagatgttcatatcaaatggtattatgatggaactttaaatgcctcagcaaattgcatagataggcatctggaaaaaaaaagtaacaagccagctataatttgggtgggtgacgatccaagtgactcaaaaaaaatatcgtacaaagagttacataaaaatgtttgcaaagttgcaaatggtttaagaagtttaggaatacaaaaaggtgatcgagtaacgatttatcttaccatgatacctgaactggcttatacgatgttagcttgtacaagaattggtg

SEQ ID NO: 308425 - DNA, 460 bp, Unknown
  Bacterial polypeptide expressing nucleotide sequence isolated from the Sargasso Sea
tatgactactaatgatggtggtatagatgcattattacaagaagataggacttttcctccttcaaaggattttgtatcgaatgcgaatatttcagatcctgatatttatgataaggctaaggcagatccagaaagtttttgggcaggattcgccaaagaattagattggtttcaaggatgggatcaggtcctagactggaaagctcctgatgcgaaatggtttataaacgggaagctcaatgcttcttacaattgtgtggacaggcatgctaaatcagaaaaaagaaacaaagctgcattgatatgggaaggtgagccaggagattggaaagtatacacatattgggatctgttacgtgaagtcagtaaatgtgctaatgctctaaagagtctgggagtacataaaggagatagagttaccatataccttccaatggtccctgaattggtgatttctatg

SEQ ID NO: 308426 - DNA, 970 bp, Unknown
  Bacterial polypeptide expressing nucleotide sequence isolated from the Sargasso Sea
atgaaaaatattgctgtagtttttggaggtttttcctccgagtatgaagtttctgttaaaagtggaaaattcatatatgagaatctaaaagataatcatagtcttaatgtatatcaaatatgtatttcaaaagagacaaattatgttatatatgataataacaagtatgatttagattacacgaatctatcatttaatattaatgggaaaaaaataaatctagatggaatttttaatattattcatggggagcctggggaaaatggagacttggctaacattttagaaaaaaataatataccacaaacaggttgcaatagttttgtttcagatttaacttttgataagaaaaaatatatagattttgtaaataaacttgatattccttcatctaaacacattttattaactagtgaaaatcaatatgatttaaaaaaaattatgagcgagatcaatatcccatgtattgttaaaccaaacaatggtggaagtagtattggagtctcaaaagtgaaccatattaatgatttagagaacaaaattaaaattgcatttaaagaatgtaatgaggtattaatagaagattttctttttggaaaagaagtttcagttggtgttattcaaaaaaaggataaaaggattattctccctgtgactgagataataagtgaaaatgaactttttgattatgaggcaaagtatctcggtcaatctacagagattacacctgcaaatatttctaatgaagaaaaaaatctaatacaaaagtatatcaatataatctatgataatattgaattcaacgggtttactagatcagaatttataattgttgatggaatacctcatattcttgaaacaaatacaattcctggatttacaaaacagagtattatacctcaacagattgaagctcttggattatctgtaaaggatgaaataaattatcaaatagaatcaattctttaaa

SEQ ID NO: 308427 - DNA, 1075 bp, Unknown
  Bacterial polypeptide expressing nucleotide sequence isolated from the Sargasso Sea
ctgtggcaagcctccgaaaaaagacgaaaacaatcgaacttagtcaaataccattcttatctcaaaaaaagttactcaataaattttgattatgaatatgactccttattcaactggagtatagcaaagcctaatttattctggacgagtcttttgagttatttagatataagctatagtggcaatgaaaaccctgctattagtgaaagtgaaaatatttatgacaagaaattttttccaaacttaaagcttagctatagtgaaaatatcattaataatttaaattctattcctatactctatgtaaatgaaattggatttaaaaaatattacagcaaagaagaagttattcataaagtaaatttagtcgcaaaatatttgagatctatcggtgttaaaaaaggtgatagagttgtaggcattgtaactaataatgcggaaacattgatttcatttcttgcagtaaattcaattggtgcggtatggtcttcttgttcaccagattttggtgaacaggctatattagataggtttagtcaaatagagcccaaaattttattttattccagcagctatatgtatggaggaaagaaatttgaaattttagaaaaaataaaaaatattgagagtaagcttaatacattggaagtgtccatatgcattgattattctcaaaaagacaaaagttttttcgatgaaaaattaaatttttttgaagaaaacaataaagaattgaatgagctctcttttgaaagatgtcagtttaatgacccaatgtatatattgtattccagcgggacaactggaaaaccaaaatgtattgtacataataccggaggtccattaatccaacatttgaaagaacagcaacttcactgtgaaatttctgaaaaagataagcttttctattttactacttgtggatggatgatgtggaattggcttatttctggtcttgcttctaaggcaacagttgttctttatgagggatctcctttttttccacatcaggactcactttttaaagtggcggaagaagaggaaattacttgttttggtacaagcgccaaagttt

SEQ ID NO: 308428 - DNA, 1675 bp, Unknown
  Bacterial polypeptide expressing nucleotide sequence isolated from the Sargasso Sea
atgccagaaacaaagataacaactaaaacaaatcttgaagctgcctttgctgaattaagagaagcaaatccactttttgatttagagaatcgtactttattaaatggtgttgaatataaagtttttaaaagtgctccaaagacaatgagggatcttcttgaagccatacctctactgcatggtgattttccagttcttcttgatcaaggacagcagctcacttatgcagagacaatagctaaagccaagaatcttgcaaattatttaactgaacaaggaataaggcctggagatagagtaggtatttgcatgcaaaattgttctgaatggattattgctcatttagcaatttcaggccatggtgctacatctgtgcctctaaattcatggtggcataaagaagaacttacatatggggttgagcatagtgagataaaaattatatttgtagatgaaaaaagatatgaatttataaaagatttgccagtagaaaaaattattaccggttcaaatcaaattgatggttgcgtaaatttctctactacaatcgaaggcaatattgatacatggccagaacaaaatgcaaatgatgaagatgttaatgtcatattgtatacctcaggcagtactggaatgccaaaaggggtcatgcttacacatttatcagttattaatgcactttttggtttttatacatttggtgagcttagaggaataattcatcaagaagaactgctagatatggaaaatgcttcgattcttctcaatgttcctttatttcatgtgacaggtttaataactcaatttctgctatctatgttggctaaaagaaatatcatactcatgcgtaaatgggatgccactgaagctttagaattaatagctcaacataaagtaactaatttaagtggagtgcccgcccaatcatgggatctattaaatcaccctgatgttgataattacgatttaagttctttgactgatatagcagctggaggagctgcaagaccagaagagcaagttataagtctaaataagaaatttaatattccacaaagctttgcttggggaatgactgaaacaactgccataggaacccttttaagaggaaatgattatttacatagacctaatagtgctggattatgtgtgcctgatttaactgatattcgtattgttgatgatgattggaactttttagatacaggtcaaattggagagatggtttttaaatctcccacaaatactattggttatttaaagaatccagaagaaacggaaaaaacttttaaagatggatggcttaaaactggcgatcttggatatttggatgaagatggttatatatttattgtcgatagaaagaaggcattaataattagaggcggagaaaacatttcctgtcttgaagttgaaaatgcactagataaatataaaggaattgttgaatcatgtgtttgcggaatatatgatgaaaaattcggagaagttgtgggcgcctatatttatactgaagatcaattagacatagaatcaataaaagaattcttatctacatatttggctaattataaagtcccagaaatatttaaatttacaaataagccgttacctagaatagcttcagaaaaactagatagagttgggattaaagaattactttctaatgattaat

SEQ ID NO: 308429 - DNA, 106 bp, Unknown
  Bacterial polypeptide expressing nucleotide sequence isolated from the Sargasso Sea
ttgggcgtaccagtgattgaccattggtggcaaaccgaaacaggctggacgattgttggtaatccaatgggtatagagcagctccccataaaggttgggagcccat

SEQ ID NO: 308430 - DNA, 241 bp, Unknown
  Bacterial polypeptide expressing nucleotide sequence isolated from the Sargasso Sea
cttaaaggagaatcaatcaaagcatatgtaacccttatgttaaacataacagaatcccctgaagtcgaatcagaacttaaaactcacgtaagaaacgtactaagccccatagcagttccatcagcaatagactttttgccagtattaccgaaaaccagatcgggaaaaatcatgagacgcctcctaaaagctcaggagctcggattagatccaggtgatattacaacactcgaagaataaa

SEQ ID NO: 308431 - DNA, 703 bp, Unknown
  Bacterial polypeptide expressing nucleotide sequence isolated from the Sargasso Sea
atgaatttaaaagagatttacgagaaatcaataaaaaaacccgacgaattttggagagaggtggctaatgatattttctggtttaagaagccaaccaaaattttgaacagcgataaccctcctttttataaatggtatgaggacggagttactaacacttgttataatgctctagacttgcacattcaaaatggtttaggagacaaaactgctttaatttatgacagtccaatcactggaaataagtcaaagttcacttttaaagaattaaaaaataaagtttctaagttcgcaggtgctcttaaaaatcaaggaattgctagaggggatcgggtagttatatatatgccaatggtgcctgaagcagtgatagcaatgttagcttgtggtagaattggagcagtacactcagtagtttttggaggatttgcctcaaatgaattagcaagtcgtattgatgatagtaaagcaaaaatattgattacggcttcatgtggttttgagcctggaagaactgttgaatataggccattagttgatggagcgctgaaattagctaaacataaattagataaggttattttttatcaaagaaaagatcacgagattaaattaaatgcacccttggaaattagttgggatgaaagtcttcagaatgcaaaagatacagactgtgtagagatgaagtcaaatgattatgctt

SEQ ID NO: 308432 - DNA, 1192 bp, Unknown
  Bacterial polypeptide expressing nucleotide sequence isolated from the Sargasso Sea
atgccaaggttgctttggagtccatctaacgaaagagtaaaaaaaacaaacctatataattattttatttttttagaagaaaaaaacaaaattcaattaagttttgattatagtaaaatctggtcttggagcattaatcatcctgttgaattttggttaagcttaatagattatttaggtataaagtacaaaggaagctctaacccagttattgaaaagaataagtttatatataatcaagaattttttaaaaatattaaagttaattatgcagaaaatattttatctaatcttaattcatgcccgattacttttatcaatgaacttggtttcaagaaaaattattataaggaagatttagtatcaaaaacgtcaacattagctaactattttagatcgattggggttaaaaaaggagaccggattgcggctgttgcggtaaacagtgctgagacactaattgcatttttagcagtgaactctatcggggcgatttggtcatcttgctctccagattttggcgagatagctattttagatcgttttaatcaaataaagccaaaagtattattatattctaaaatttatttatatggcggaaaaaaatttgatattgaaaagaaaataaaaaatgtaatcaataatatcaaaacacttgaacataccatttgtattaattatccagacaagaagctggataaaggaatagacgaagtaagtttgaattcaatttttcaaaaaaaaacttatcaaggaaaaattatttttgaagaaaactcatttaatgacccaatgtatattctttattctagtggaacaactggtaaacctaaatgtatagttcataatactggtggaccacttttacaacatgtaaaggagcaacagcttcactgtgatctcaaaataggtgataaattattttattatacaacctgtggatggatgatgtggaattggcttattacaggcttagcatcaggagtttcattagtactttatgatggatccccattttatccagagaaagaaaccctttttaaaattgctgaagaagaagaaataacatgctttggaacaagtgcaaaatttattgacgctttgagaaatgataaggtaaatattttagaaaaatataaattagataaacttcaatcaatattaagcactgggtcacccacttataagtgag

SEQ ID NO: 308433 - DNA, 369 bp, Unknown
  Bacterial polypeptide expressing nucleotide sequence isolated from the Sargasso Sea
tatgaatcaaaaattttctgaaatttactcaaattcaataaagaatcctgatgaattttggaaaaatgtatcagaagacatgttttggttcaaaaaaccaacaaaaattcttaatagatctaatcatcctttctacaaatggtatgaagatggcaccacaaatacttgctacaatgctttagacatccatgttgataatgatcgaggtgaacgagctgctttaatttatgatagcccaataacaggtaataaaaaaaagtttacttataaagagttaaaagaaaaagtttcaaaatttgcaggtgccttaaaaaatcaaggaataaaaaaaggcgatagagttataatttatatgccaatgatacccca

SEQ ID NO: 308434 - DNA, 1675 bp, Unknown
  Bacterial polypeptide expressing nucleotide sequence isolated from the Sargasso Sea
tatgcccgagacaaagataacaacagaaaccaatctaaaggctgcttttgctgaactaagaaaagcaaatccattattcgagctagagaatcgtaaattagttaatggcattgaatacaatgtttttaaaagtgctcccaaaacgcttagagatctatttgatgtaatacatcttttgcatggagattttccagtccttcttgatgaaggaatacaacttagttatctagagacaatggctaaagctaaaaatcttgctcattaccttacaggtcgaggcattaaacctggcgatagagttggtatatgcatgcaaaattgttctgaatggattattgctcatttagctatttctgctcatggagctacttctgttcccttgaattcatggtggcgcgaagaagagcttaagtatggagtggagcatagtgaggtaaaaattatcttccttgatacaaaaagatacgaatttatcaaagacttacctgttgaaaaagttattgttggcgatgaacaaatagatggatgcacgaatttctcatctacagttgaaggaagttatgattcatggccggaacttaatgctactgaagaagatgtaaatgtaatactttacacatctggaagtacaggtatgcctaaaggagtcatgctttctcatttatctgtgattaatgcactttttggattttatacctttggtgaactaagaggattaattcatcaggaagagcttttagacgttgaaaatgcatccattcttctaaatgtccctttgtttcatgtaactggtttaattactcagtttttattatcaatgttggcgaaaagaaatataatacttatgcgtaaatgggacgctactgaagctctcgagttaattacaaaacataaagtgactaatttaagtggtgtgccagcacaatcctgggacttactaaatcatccagaagttgataattatgatttaagttctttaactgatattgcagcaggaggtgctgcaagaccagaagaacaggtagtaaatcttgataagaaatttaacattcctcaaagctttgcatggggcatgactgaaacaacagcaataggaacgctattgagaggcaatgattatctagaacgaccaaacagtgctggtctatgtgtgcctgatttaacagagataaagataattgacgaaaagtggaactttttaaaagctggtcaaattggtgagatggtatttaaatccccaacaaataccattggatatttaaaaaatcctgaagaaacaaataatacaatcaaagatggctggcttaagaccggtgatctcggatacctcgatagtgaaggttatatctttatagtagatagaaaaaaagcattaattatcagaggtggagaaaatatttcatgccttgaagttgaaaatgcactagacaaatataatggaattattgaatcctgtgtgtgtgggatatatgatgaaaaattcggagaaatagtgggcgcttatatatatgttgaagaagaacttgatacagaatcaataaaagatttcctctctaaatatttagccaattacaaagtccctgagatatttatatttacagataaacctttaccaagaatcgcttcagaaaaacttgatagggttggaattaaggaattgctttctagaaaataa

SEQ ID NO: 308435 - DNA, 790 bp, Unknown
  Bacterial polypeptide expressing nucleotide sequence isolated from the Sargasso Sea
ttgttagcactaaatatatctgtgttatcaaatattatttttgcccaagtaaatatcggatcaaatcgattctttatctatgaagagaatgactctcttagtttaccttattacagtaattattctttaaatgaatataataatcatacaaagcttgctattatatatctccatggagcaagtagaaatgccgatgattattacaataatatatttgcaatcgtaaatgcaactggcaatatagactccaccataattattgcaccgcaatttttacgttcacaagatttaagtgatgataatttgacagatgatgtatttttttggacaaatacaacaaattggactgcagggtatttatcgggtaatactagctctgatactagaccatttagaataagttcttatgcaattatagattctcttttgcatcagcttgcattaaataatccaatgctagagcaaattgtatttgctggattttctgcaggtggacagtttgtaaacagatatattggtggcaataatattacagaatttctttttagtgaattttctgtaccaattcgatttattattggtagtccttcttcatatttatatatgaataatgaacgtagagttgctggctcaactgatcaatttgatattccaagtggatgcaatggatataatgaatataaatacggtttagatgacttaaatagttatatgtccttagcaggcgttgactctattcgatcccgatataaacgtagaaatgttgtgtacctagtcggttcatcagatg

SEQ ID NO: 308436 - DNA, 211 bp, Unknown
  Bacterial polypeptide expressing nucleotide sequence isolated from the Sargasso Sea
caacaagtcctgagagaatgggtcagcgaacaggtcggcgcaatagcaaagccagatgaaattcgtttttcagataatttgccaaaaacacgctcaggcaagattatgagaaggcttcttcgtgcaatcgctcgagaagaagcaatcactcaagacatatcgacgctagaggatgagtcaatcattaggcagcttcaaggcgaggaataat

SEQ ID NO: 308437 - DNA, 1375 bp, Unknown
  Bacterial polypeptide expressing nucleotide sequence isolated from the Sargasso Sea
atgtattctcaccttttttcggaaatccgggtaggatcccgcactcttaaaaatcgggttgctctgcctgcgaccctaaccaattacggtagaggaaaccaaattacagagcactggaagaatttccttatagagcgggctaagggaggggttggacttataatttcggagattatagctgtcgaccctgaggcacttgcgcagcaagcaatcgtcactggttttgatgacaccaacgaagttggtttcagagaaacctcagaagccgtccataaagagggcgcgttgttagttggtcagttatggcaccctggtcggcaacagttatggcatccaacaaaggcaccgatgggtgtctcggagcagccggatgctcttagctggactgttcctcatgttatgtctgtggacgctgttcaacggattattcaagcatacgtaaacaccgcaaaacgcctgcataaatgcggttttgcgggggtcgaattgcatggtgctcatgggtaccttattggccaatttctgtctccctggtcaaataaacgggatgatcgatatggtggcgaggttacgggccgggcccgtttcgtcactgaaatagcagctgggatacgtgctagttgtagccctgattttataattggcttaaagatgccgggtgatgaaggtgtaaggggtggtatcgatagcgaggaagcgctggccataacgagcaatctagtacgcaccaagaattttgactatttctcgtatggtcagggaaattttagtctgagccttgaaaaccatgttccagatattcatttcaagccaggccattttctaaatattcataaaaagatgcgggaagcagctagaggcgtgcctgttatggctttaggccgagtcgattcgccagagttggcagaacgagtaatcgctgagggttatggagacatagttggaacgtctaggactctaatagcagacccggcttggccgcagaaagcgttcaaaggtagatctaaattaatccggccatctgtgtttgataattggtgttggggcgaagttcatcagggaaaacctttacaggagcaccataacccttacctcggtgaagttggtgaggcctttgctgaggatcggcttccgcccgcccgtaacccgcgtggaattgtggtcattgggggcggtcctggagggttggaaacagcttgggttgccgctgccagaggccatcaagtatcgctctataatggatcatcagcattgggaggtaaattaagacgcgatgcggcactaccggggcgatgtgaaattttgaagataatcgaataccaaactcacatggaggatctttatggtgttgatgttaggctgggtaagttcgcag

SEQ ID NO: 308438 - DNA, 199 bp, Unknown
  Bacterial polypeptide expressing nucleotide sequence isolated from the Sargasso Sea
agggagtgggttggcgagcaagtaggcgcaattgcaaagccagacgaaattcgattttcagacaatttgccaaaaacacgttctggaaagattatgagaagattacttcgagtaattgcaaaaggcgaagccatcacacaagacatatcaacacttgaggatgagtcaatcatcaagcaactacaaggtgaagattagg

SEQ ID NO: 308439 - DNA, 195 bp, Unknown
  Bacterial polypeptide expressing nucleotide sequence isolated from the Sargasso Sea
aacaaataggacctatagcacttcctgacctaattcaattctcgcctggattaccaaaaactagatctggaaaaattatgagaagaattttgagaaaaattgcttcaaatgaacatgaacaattaggagataccactacgctagcagatccaggggttgtaaaaagtttagtagaaaatagaaaaaatatctaaa

SEQ ID NO: 308440 - DNA, 1744 bp, Unknown
  Bacterial polypeptide expressing nucleotide sequence isolated from the Sargasso Sea
ctggtagcccaatcaaaaaagaagaatcctgcccaagcttctaaatacgctaagcggggaaatgcgaaagcaaaaaagaaagattatagaggagctttatcagattataaaaaagcatatcaacttaatccgagttcaaactataaaaagaaagttcaacaattaacatctttggcaaaaaaacaagctggtagcaaaggttcaagcaagaaagtatcaaagaagcaggtggctcaggcttcgcagtatgcgaaaaggggaaatgcgaaggctaagaaaaaagattatgcaggagcattaaaagattaccaaagagcactgaggctgaatccttcatcatcaaaccaaaaacgagtgaaacaactaactagcttagtaaaaaaatcaggtaaatcaacagcatcgcgcaaaactaccaaagctagaatgccaaaagttgctgatattcctacaataagtccaattaaatacgccaatgatatttacaatatcgctgaagggtttgagatgagcacgcgcaacctcgcacgcgcaacaagtattttagaaaataggcaaaataaaaagatcgaaacaattaaattgcaaagaactccttcaactagcgagcttgaaagcgcagctagatctgaacccaatgattttagaaagcaagttgatcttgctcgtaattatgaagctgttggtcgctttgacgattcaaaagagatttatttaaaattagccgctcaaaatccattgaatgctgatgcacatttccatttgggtgcatactacgcaaggttcgatcaaatgacaaaagctcgccatgcgtttgatgaagcgcttgacattcagccaagtcatagagcgacgattgaagccatggctaccttttttggcaaaaaagaacaacgttctttttcagatggaatcttagcaaaatcagcagagaaagaccccgctggccctgcgcagcaaattaacaagattagaaaaaatctagatgaatttaattatgaatacgcagcaagattagctcaaagtggtcaggatatgtttcccaagcagggttcatttattttattaaaaggtaaagcatttgaaggtatgggtgatacgcaaaatgctaaatcaagctatcaagagtcaattaaaaatgaccctacccatcatgagtcctatgttgctcttggggatttatattctagccaaggaaagcatttatatgcagcgttaacctatagtgatgcaatacggctcgatccagcaaatgagaatgtccgttttaagcagggtcttgggtattttaaagcaagcgaatggggaagggctgcctctgcatgggaagatttgctttattatgatcccaaaaatcagaaagtaaatctattattaccacaagcatattatatcttagcagttgaatataataggtcaggtcagtcaagtttaggtcagagtgcatttcgaaaggcaataaatattaaccgaaattcagctgcatggctacctggatcaatgagaacattgggaggtttttatagagaaaagggtatgtataaagaatcattggctgcatatcaggaagctatagaattaaaaccatctgactcgcaaacatatcttggcttaggcataacttattggaaaatgaaagaggaagctcttgctaaagcagcttggtcaagatcaatggagcttgaccctactaataatgacgctagaggctggctattgctatctggtaaaatctctggctaac

SEQ ID NO: 308441 - DNA, 247 bp, Unknown
  Bacterial polypeptide expressing nucleotide sequence isolated from the Sargasso Sea
ggtgaagattttaatgatgctcttgagcaagaactaacaaaatttgtttcaaaagagataggtcctattgcaaaacctgaccttattcaaaacgctcctggtcttcctaaaacaagatctggaaaaattatgagaagaatattaagaaaaattgctgaaggtgatttcgataatcttggagacacaaccactcttgcagagcctgctgttgttgcatctttgcttgaaaatagcaaaaaactatgaa

SEQ ID NO: 308442 - DNA, 325 bp, Unknown
  Bacterial polypeptide expressing nucleotide sequence isolated from the Sargasso Sea
aaagttgcagaagctgcttgtataggtaaaagccatgaagttaagggacaggcaatagtcgccttcgtcacaattaaagatcaaataagcacttctgacgaccttgttacggagcttaaacaacacgtagcgacgaaaataggtccaatggcgaggccggatgatatatattttgctgcagaactacctaaaaccagaagcgggaagataatgagaagactgttgagagatgtggcggaaggtaggactttaggggatacgacaacgctggcagatccggcagtggtagaatctttgaaatcgcaatacgaggatgatgaataat

SEQ ID NO: 308443 - DNA, 154 bp, Unknown
  Bacterial polypeptide expressing nucleotide sequence isolated from the Sargasso Sea
acccggtcttcccaagacgcgatcagggaaaataatgcgccgcattttaagaaaaattgctgaggacgattttaatagtttgggagatacttctactttagccgaaccagctgttgttgaggacttaatcgaaaaccgaatgaatagaaagtaa

SEQ ID NO: 308444 - DNA, 352 bp, Unknown
  Bacterial polypeptide expressing nucleotide sequence isolated from the Sargasso Sea
atgtctgaaaaaattgaaaatttacttggagaagatagaacttttgaccctccatcgagcattacagagaatgcaaatgctacacaagaatggtttgatcttgccaatgaagatagacttgcttactggcaaaaacaagctttagagagaattacttggtataaagaacccaaagagattttggatgattcagatgcacctttctataaatggtttaaagatggagaactcaacctttcatacaattgtctcgaccgacatttagaaactgatagagacagaattgctttctactgggagggagaacctggagactctcaagaaatacatatcaagatctttatgagagggg

SEQ ID NO: 308445 - DNA, 769 bp, Unknown
  Bacterial polypeptide expressing nucleotide sequence isolated from the Sargasso Sea
aatgtttcagccaggttctgacatccagcggacaagcacgctgaccgcatttctgaggggctgcggcattgacagttacgaggaactcgtccgccgttcgaatgaagacccagactggttctggggccagatcattgaccatgccgggatacggttcgcgcggccctacagccggttgcgagatatctccgaagggcccgaatcgatccggtgggccgtcgggagtactttgaatctgacggaaacctgtcttgacgcccgaattgccgatggcttgggcgacaaggtcgcaatcgactgggtcggcgaagacggaagccgccgccgctggacctattccgaccttaccgccgaagcctcccgcgttgcctcggcccttgccacgcgcggtgtaaggcccggtcaggcggtgggcatctatatgccgatgatccccgaaatcgaggccgcgcttctggggattgcccggctgggcgcggttgcggtgccgctgttttccggttttgcgcctcatgccatcgtatcgcgccctgacgacgcggatgccgtggcggtgctgacagcggatgccacaccccgggcgaggcaagccggtctggatggaggcgagcctcgcccaggctttgaccgacgtgccatcggttcataccgtgatcagcctgcgacggttcggcggtgcggtagccgatcccgcccgcgatctggactggagcgaaaccgtgggccgcgccagtccggagtttgccgccgttcccgtcagtgccgatga

SEQ ID NO: 308446 - DNA, 850 bp, Unknown
  Bacterial polypeptide expressing nucleotide sequence isolated from the Sargasso Sea
atgaatagcagccaactatccccgctggaattgccgcgcagttacaacgcggcgacccattttattgatcgccatctcgatgagggtcgtgcttccaaaattgcggtgattgatgaacaaggcagttacacctacgctcagcttgccgagagggttaaccgcgctgcgggcgcccttctgcaactcggtttggagcccgaacagcgtgtgctcttatgcctgcttgataccatcgatttccccacagtattctggggagcgataaaggcgggattggttccggtgccggtcaacacactgctaaccctgcaggactacgcctatttgctggatgacagccgcgcccgtgcactggtggtgagttcggcactttacgatggattcgccaggcacctggatcagcacggattgcttgagcaggtaatcgtgtcgggcaacgagagccatgatcaccggagtctggatgacctgctggcgacaagttcacctatgactcagccggcttccacgacctgtgatgacacggcattctggctttacacctcgggctccaccggcacccctaagggggcggttcaccgtcattctgatttggtacaaacagcccacctgtatggccagggtgtgctgggcatccgtgaagaagacgtcgtattttcggcagccaaactgttctttgcctatggtctgggcaatgcgatgtctttcccgtttcacgttggcgcgacggcagtgctattggcgcagcggccaactcctcacgctgttctggatcggctcaagcagtgtgccgcgactattttctacggcgtgccgactctgtacggtgcgatgctttgcgacgccggca

SEQ ID NO: 308447 - DNA, 368 bp, Unknown
  Bacterial polypeptide expressing nucleotide sequence isolated from the Sargasso Sea
tatgagcgagcagaaaatattcgaaattcctgtatctgctaaagaaaaggcatggatcgataatgacacctatttaaaaatgtatcaggaatctgttgaagatcctgagggtttttggaataaacaggcagatcgactggaatggttcaaaaaatgggaccgaactcttgattgggattacaataaggcttatatacgttggtatgaaggaggaaaacttaatgtttcccataattgtctggacagacacttggaagcacgtggtgatcaaaaggcattgatttgggagtcagatgatccaaaagtcgatagaagctttacttataaacaacttcattccgaagtgagcaaatttgccaatgtaatga

SEQ ID NO: 308448 - DNA, 1321 bp, Unknown
  Bacterial polypeptide expressing nucleotide sequence isolated from the Sargasso Sea
ttgttagcactaaatatatttgtgttatcaaatattattcttgcccaagtaaatatcggatcaaatcgtttctttatctatgaagagaatgattctcttagtttaccttattatagtaattattctttaaatgaatataataatcatacaaagcttgctattatatatctccatggagcaaatagaaatgccgatgattattacaataatatatttgcaatcgtaaatgcaactggcaatatggactccaccataattattgcaccgcaatttttacgttcacaagatttgagtaatgataatttaacagatgatgtatttttttggacaaatacaacaaattggactgcagggtatttatcgggtaatactagctctgatactagaccatttagaataagttcttatgcaattatagattctcttttgcatcagattgcattaaataatccaatgctagagcaaattgtatttgctggattttctgcaggtggacagtttgtaaacagatatattggtggcaataatattacagaatttctttttagtgaattttctgtaccaattcgatttattattggtagtccttcttcatatttatatatgaataatgaacgtagagttgctggctcaactgatcaatttgatattccaagtggatgcagtggatataatgaatataaatacggtttagatgacttaaatagttatatgtccttagcaggcgttgactccattcgatcccgatatgaacgtagaaatgttgtttacctagtcggttcatcagatgatggtggaacaactgattgcgcatctgaaacacaaggaaataatcgatatgaaagatcaatcatttattataattatttacaatattattttgggaatcaaatagtaaataatcatcagcatgcggttataccaaatatggatcatgataattattatgtatttaattcatcttgtggtagaaaggcaatttttggtaatggtaactgtaatgaattagattttttaaataccaattatagtcaaattaccaatgaatttaccatcacgtataattttcctaatccatttaatgcaataactaaaatttattatgaaacacatacaacaaatgatatatatataaatatatataatatattaggtgatcatgtcaaagaatttaaaatccaaaatcaagcacctggtaatcattcagctatctgggatgggactaatcatttcaataaagatttgagctctggggtgtatgtataccaaattagaattgatgaaactatagcaaaaaataaaatgattatgttaaaataat

SEQ ID NO: 308449 - DNA, 304 bp, Unknown
  Bacterial polypeptide expressing nucleotide sequence isolated from the Sargasso Sea
aatgactgatacaaaagtcatttctcctgaaagaggtttttcaaacccgcatttaagttcactggatgaatataagagactgtatgaacagtccatcaatgatcctgttactttttttcaaaatgccgcgaaagaaaatttatcgtggagcaagccgtttacgactacttttaataaacaattcaaaaatgcgaaatggtttgaggatggtgagttaaacattgcttataactgcattgatagacatctagagcatcatcaagataaaactgcttttatttgggaaggcgatgatcctgctgaa

SEQ ID NO: 308450 - DNA, 253 bp, Unknown
  Bacterial polypeptide expressing nucleotide sequence isolated from the Sargasso Sea
aatgaaagaaaaagagtttgatgaatctctatcagaagagcttgttaaatttgtatctaaagaaattggtccaattgcaaaacctgatcttattcaaaacgctccaggccttcccaaaacaagatcaggaaaaattatgagaagaattttaagaaagattgctgagggtgactttgataatcttggagatacaaccactcttgctgaacccgctgtagttgagtctttacttgaaaatagtaaaaaattgtga

SEQ ID NO: 308451 - DNA, 316 bp, Unknown
  Bacterial polypeptide expressing nucleotide sequence isolated from the Sargasso Sea
catgactaaagaaaccatatacgaaccctcagaagaaattattaacgatgccgttatttctaataatgagttcgaagagctttacaaagaatcaatcaacaacccagatcaattttgggataaacaagcacgtaattacctttcatgggataaagaatgggatgtagtaaaagaaagtgatctaacgaaaggcaacataagctggtttaaaggggctaaattgaacgcttccgtaaattgcattgacaggcacctagagaataatggtgagaagacagcgattatctgggaaggagatgaccctcaagactcttaa

SEQ ID NO: 308452 - DNA, 420 bp, Unknown
  Bacterial polypeptide expressing nucleotide sequence isolated from the Sargasso Sea
tttgcagggcaaatataaggaaatatacgattcttcgataaaccaaaaagagaatttttggaaggaagttgctgaaagtatattttggtataaaaagccaacgaaaattttaaactcttctaaccctcctttttataagtggtatgaagatggtgtaactaacacctgctacaatgcaattgattttcatatagataaaggtagaggagaaaagttagctattatttacgatagtccaattactggctcaaaaaaaacttttacttacaatcagcttaaagaaaaagtttctttgtttgctggagcgcttaaaaatcaaggaataaacaaaggtgatcgtgtaataatttatatgcctatgataccagaggccgtaatagcaatgttggcatgtggaagaataggtgcagttcattcagt

SEQ ID NO: 308453 - DNA, 376 bp, Unknown
  Bacterial polypeptide expressing nucleotide sequence isolated from the Sargasso Sea
gtgtttcaggacatcgtgttaggaacaatggaaatagaatctgctttggtaagtcataaatcagttgcagagtctgcagtcgttggaaaaaaagatgatctaaaaggtgaagttatagttgctttcgtatctctagagaaagacgttaacagttctccagaattagtagagaatttaaagaaacatgtggttaatgaaattggaattatcgcaaagcctgaaaaaattataatttctgactctcttccgaaaacacgtagtggaaaaattatgaggcgaattttaagatctttggctgctggagaaaaaattagtggtgatataagtactcttgaagatagttctgttttggaaaagctgaaagaattatcctaaa

SEQ ID NO: 308454 - DNA, 280 bp, Unknown
  Bacterial polypeptide expressing nucleotide sequence isolated from the Sargasso Sea
aaatggtttgtattgttatgtcactttaaatgcaggagaaactgaaaatggagatcttgaaagagatttaaaactttgggtcagaaaacaaattgggcctctagcaactcctgacttaatacactttaccccgggtcttccaaaaactagatcaggtaaaataatgagaaggattttgagaaagattgctgcaaatgaacatggacaattaggtgacaccactactttagctgatccaagtgttgtcgatagcttggtcgataatagaaaaaatatttaa

SEQ ID NO: 308455 - DNA, 454 bp, Unknown
  Bacterial polypeptide expressing nucleotide sequence isolated from the Sargasso Sea
atgcctatgataccagaagcagttattgctatgttatcttgtgtaagaattggtgctattcattcagttgtctttggtgggtttgcatcaaacgaacttgcaagtagaatagatgacagtaaagccaaagttttaattactgcttcatgtggttttgaaccaggtagaaccgtagaatatagacctttagtagatgaagctttaaagttagcaaaacataatgttaaaaaagttattttatttcaaagaaaaggttatgaggtcaaactaaatgctcctttagagatcagttgggaagagtctttaagcaattcaaaagatgttgattgtgttgaaatgggttcaaatgaatacgcgtatatactttacacctctggtactacagggatccctaaaggcattgtaagagacactggtggccatattgtcgctcttaaatggacgatgaaaaata

SEQ ID NO: 308456 - DNA, 559 bp, Unknown
  Bacterial polypeptide expressing nucleotide sequence isolated from the Sargasso Sea
tatgcagagaattacgagtctttctggttattttaaaaaatatgaacagagtgtgaaagatcctgagaaattttgggcagaaatagctgatacttttgtttggaaaaaaaagtgggataaggtattggattgggattttgatagtgtagatattaagtggtttaaaaatgctaaacttaacataactgagaacatccttgaaaagaacttaatagatcgagctgataagacagctataatatgggagccaaatgatccaactgaaccctcaatccatataacatataaagagctttatgaagaaacttgtaagttttcaaacgctcttagagagaaggggattaaaaaaggtgatagagtaattatatatatgccaatggtgcctgaggcagcaattgcaatgttagcttgtgctagagttggtgctgttcactcagtagtttttgcaggtttttcatctacttcacttgctgatagaataaatgactgtcaagcaaaaatggttttaacttccgatggaaattttaggggaaataaaacaattcctgttaaacctgtt

SEQ ID NO: 308457 - DNA, 232 bp, Unknown
  Bacterial polypeptide expressing nucleotide sequence isolated from the Sargasso Sea
ttcttcagataaaattaagtctggaatcttggatatggttactaaggatataggaccgcatgcgaaaccagataaaatacaattcacaccagcattgcctaaaactaggtctgggaagataatgcgtagaattttaagaaaaatagcagaaggtgattataataatttgggtgatatatctacccttgcagatccaagtgtagtagaaaatcttatttcagagaatcagtaa

SEQ ID NO: 308458 - DNA, 1062 bp, Unknown
  Bacterial polypeptide expressing nucleotide sequence isolated from the Sargasso Sea
ctgcacttatttacgatagcccaattacaggaaacaaagcaaagtttacttataatgaattaaggtcaaaagtttcaaaatttgcaggagctttaaaaaatcaagggcttcgaaagggtgatagagctatcatttatatgccaatggtgccagaggctgtagttgctatgttagcatgtggaagaattggtgtcattcactcagttgtattcggaggatttgcttctaacgaacttgcaagtcgaatagacgatagtaaagctaaagtactaattacatcatcatgtggttttgaaccaggtagaactgtagaatatagaccgcttgtggacggtgctttaaagcttgcaaagcataaaatagataaaattattttctttcaaagagaaggtcatgaggtaaagctcaatttacctcatgaaataagttgggatgaagcactatcaaatgccaaggatactgattgtgttgaaatgaattcaaatgaatatgcatatattctctatacttcaggcactactggagtaccaaaagggattgtaagagatattggcggacatatagttgcactaaagtggacaatgaaaaatatttacaacattgatgagggggatgtttggtggtcagcgagtgatataggttggatagttgggcactcctacatagtttatgcaccattgtttaaaggatgtacaactgtgctatttgagggtaaacctgttggaacaccagatgctggggctttttggaaaataatttctgactacaatgtaaaatccctatttactgctcctacagcttttagagcaattaaaaaggaagaccccgaaggcaagtttttttctaaatataatctttctaaatttgagagtttgtttcttgcaggtgaaagagctgaccctgatacaattagatgggcagaaaatttattaaatgttccggtaatagatcattggtggcaaactgaaactagctgggcaataagttcaaattgtacaggtatagaaatgatgaaacaaaatatggttccgcatgtaaagctgttcctggatatgatgtaaa

SEQ ID NO: 308459 - DNA, 430 bp, Unknown
  Bacterial polypeptide expressing nucleotide sequence isolated from the Sargasso Sea
atgacacaagaaatttataatcctgatcccggattttcaaatccgcatataaaagatttcgatgaatatttaagtctatataaagagtcaattgagaatcctgagaaattctttggtgatctggcaaaagaaaatatttcatggattgaggattttaaagaggtacataactctgagttccaagaatctaaatggtttgttggaggaaaaacaaacataacgctaaactgtattgatagacaccttgaaaaaaatggcgataagattgccttaatttgggaaggtgatgagccaggaaactctaaagagataactttcaaagaattgcactctgaggtttgtaggtttgcaaatatccttaaaacgcttcaaattaaaaaaggctccagagtttgtatttatatgccgatgattccgaagctgcattgca

SEQ ID NO: 308460 - DNA, 100 bp, Unknown
  Bacterial polypeptide expressing nucleotide sequence isolated from the Sargasso Sea
gatggatatctactggtgtactgctgatataggttggattacaggtcattcatatatcgtatatggaccattatccaatgcagtaactcaagtttatctt

SEQ ID NO: 308461 - DNA, 658 bp, Unknown
  Bacterial polypeptide expressing nucleotide sequence isolated from the Sargasso Sea
gctggcacgccatccgggagctcggcaggttccagtcaaacgcgccgtggtttcaccctctgtccgacggattgatacgggtcgtggaacggtcgatcgactcctccttacccttgcaccaacagtctttggcccgtctgctgtgaccgagtccaatacgtcgatcgaaagtgtcctgcaggagcagcgggtgtttcagccgccggcggagatggcggctgcagcacgcatcggcagtctggagacttaccgcgccatggccgaggcggcgaccacggatcccgatgggttctggggggaggcggcccgtcgtgagctgcattggttcgagccgttccacacggttctcgattggtcggaacctcctttcgcccgctggtttgaagggggcaccaccaacctgtcgtacaactgcctcgaccgacatctcgagggggccaaggctgagaagaccgcgctgatctgggaaggggagcccggagacgtgcgccgtttcacctatcgcgagctccatgccgaggtgtgcaaagccgccaacgccttgaaggccatgggcatcggcaaaggcgatctggtcgccctctacatgtcgatgattccagaggccgccattgcgatgctcgcctgcgctcgcatcggtgccccccattccgttgtg

SEQ ID NO: 308462 - DNA, 463 bp, Unknown
  Bacterial polypeptide expressing nucleotide sequence isolated from the Sargasso Sea
cctgggataaccagtacaaagccagggtcagcatgtggaccataccctggggttgactctgtcattattgatgaaaaaggcaatgaagttggaaaaggtgaaggaggttatcttgcaattaaatctccttggccatccatgttaagaactgtatatggagacgataaaagatatattgatacatattggtctcaacacgaaggcctgtactttgctggtgatggcgctaaatatgacgatgatggttatgtttggcttcttggaagagtagatgatgtaatgaatatctctggtcatagaatctctaccgctgaagtagagagcgcactagtatctcatgaatctgttgctgaggctgccgtaattggcagatcagatgaaataagtggagaagcaattgctgcatttgtttcattgattggaacagatgcaggagatgaaaaattaatatcagaattaaggc

SEQ ID NO: 308463 - DNA, 772 bp, Unknown
  Bacterial polypeptide expressing nucleotide sequence isolated from the Sargasso Sea
aatgaaaaaatattctgttccaaaatatttccaatcgtctgttggacataatagtcttgataactatcaatctttaagagaaaatgcaaaccaagattcaaattcttattgggagtcagttgccaatcgcattgattggtttgataagtggaccacagttaataatacagattattctaaagcgcgtattgagtggttttcaaatggaaagttaaatgcatcttataattgcatagacagacatattgaaaatggcttaggagaaaaaatagctcttatttggcaatctaacgatcctactatttcaaaaaatgtcacgtataatgaattacttgaaaacgtttcattatttgctaatggattaaaacgagctggaattaaaaaaggtgatcgtgtatgcatttatatgcaaatgattcctgaagctattgtagcaatgcttgcttgtgcacgaattggagcagtgcattcagttgtatttggagcattttcaagcgacgctttaaaaaatagaattaatgattcagaatgtaagctgcttattactcaagataacggagtgcgaggatctaaatttgatattccaatgaaagaaaatgcggataaaattgcagatgaatgtccttctttatcaacagtagttatggttgaacgttctggaaatgatatgtttatgaaagaaggcagggatatgacttggaatcaatttattgatggttgctcaattgattgtcatgcagaggttatggatgcagaagacccattatttatt

SEQ ID NO: 308464 - DNA, 898 bp, Unknown
  Bacterial polypeptide expressing nucleotide sequence isolated from the Sargasso Sea
tctaatggagcatcacccgcagatccagttcctgttgatgcaacagatccattatacatcctttatacttcaggtactactggtctacctaaaggggtcgtaagggataatggtggtcatgcagttgcactcaaatacagtatgaaatcaatattcaattctgatcctggtgatgtatactgggcaggttctgatgttggatgggttgtgggacattcttacatcgtgtatgctcccctgattcatggttgcacaactattctctatgaaggtaaaccagtaagaactccagatgcaggctcattttggagggttatttcagaacatcaggttaacacattttttactgccccaacggcatttcgcgcagttaagaaggaagatcctactgcaaaattaaaagagaaatatgacatcagttgcttacgaactctgtttttagctggagaaagattggaccctccaacttacaaatggcttacaggaatccttaacatacctgtcattgatcactggtggcagaccgaatccggttggcccatgtgttcaaacatgatgggacttgaccctaatcctgtaaaaatgggttcacctacatttcctgtacctggatataatattaaggttttagatgatgaaggtaactcatgccagtcaggagagacaggaaacattgtcgtcaagctacctttaccaccaagctgccttacaacactttggaatgatgacaaacgctttagagattcatatctttcaaaatatccaggttactaccttacaggagatggtggaataattgatgaagatggatatgtgtttgtaatggggcgcgtggatgatgtaattaatgtcgctggacatcgtttatccactggacagatggaggaactaatgcatc

SEQ ID NO: 308465 - DNA, 514 bp, Unknown
  Bacterial polypeptide expressing nucleotide sequence isolated from the Sargasso Sea
atgaaatattcggaaatttataaagactggaaagataatccaatagaattttggaaaaaaaatgctgaaaacgtttcttggattaaatttcctgaaaaaattttaaaaaagaacagtaactatttttatgaatggttttcagacggtgttttgaacacttgttataatgctgtagataaaaatattttagaaggaagaggagatcaggttgctatttattatgatagtccaataactaattcaaaatcaaaactaacctataatgaattaaagtccaaagttgaaagatttgccggtgctttaaaaaaatataacatatctcaaggtgatagagttatagtttatatgcctatgatacctgaggctattatagctgttttagcaatagctagaataggagctgtgcattctgttgtttttggaggatttgcagctaaagagcttgcagtaagaattgatgactgttcacccaaaattattatttctgcttcaaccggtattgagcccaggtaga

SEQ ID NO: 308466 - DNA, 150 bp, Unknown
  Bacterial polypeptide expressing nucleotide sequence isolated from the Sargasso Sea
tttatcaaatatatataaagaattaggtgtgaaaaagggagatcgagttattctttatatgcctatgataccagaggcagcatatgctatgttagcttgtgctagaatatgtgctgtacattcaataatttttggaggtttttcaccata

SEQ ID NO: 308467 - DNA, 274 bp, Unknown
  Bacterial polypeptide expressing nucleotide sequence isolated from the Sargasso Sea
acaaggaatctacgcttttgtgactctcatgacaggatcaaaagaaaacgaaaatataattcaaaacattttaaatacagttaaaaaagaaatcggacctcacgcaaagccagacaaaattcagtttacaccatctttgccaaaaacaaggtcgggtaaaatcatgaggaggattttaagaaagattgctgaagatgacctcgaaaatcttggcgatatatcaacattagccgatccatcagtggttgaagaattgatcaagagcaaaatatag

SEQ ID NO: 308468 - DNA, 145 bp, Unknown
  Bacterial polypeptide expressing nucleotide sequence isolated from the Sargasso Sea
tttgcctaaaactagatcgggaaaaatcatgagaagaattttaagaaaaattgcagctaatgaacatgatcaactgggggatacttcaactcttgcagatccaagtgtagttgatgatttaatttcaaacagattaaataaataa

SEQ ID NO: 308469 - DNA, 415 bp, Unknown
  Bacterial polypeptide expressing nucleotide sequence isolated from the Sargasso Sea
atgtcagataaattcaacaaaatttacaatcattcaataaaaaatcctgaaaaattttggcaagaagcagctgaagacatcttttggtttaaaaaaccgacaaaaattttaaataaatctaatcctcccttctttaaatggttcgagaatggagtaaccaacacgtgttacaacgccttagacattcatatcgatcaaggtagaggaaaaaacactgcccttatatatgatagccccattacaagtaacaaaagtaaatttacctacgaggaacttagatctaaagttgcaaaatttgctggagcattaaaaaatcagggagtaaataaaggtgaccgagtaattatttacatgccaatgatcccagaggctgtgatcgcaatgcttgggtgtgcaagaattggtgcaatacact

SEQ ID NO: 308470 - DNA, 301 bp, Unknown
  Bacterial polypeptide expressing nucleotide sequence isolated from the Sargasso Sea
cccacacaatattaagggtcagggtatctatgctttcgttagtctgaaagctgatgttgactatgaagatgaggcaatttcaaaagagctcaatagcactgttagagatgtaattggaccgattgcttcaccggatcacatacaaataacaccatccttgccaaaaacgaggtcaggaaaaattatgcgtcgcatattacgcaaaattgctgaaaataattttggtgatttaggcgatacctcaacactcgccgatcctacagttgttgatgatctgattagcaatagaaagaataaataa

SEQ ID NO: 308471 - DNA, 772 bp, Unknown
  Bacterial polypeptide expressing nucleotide sequence isolated from the Sargasso Sea
tatggctaagagaaagaaaaaaaaagtaaagaaaaaaagaaaaaagaataaaaaaataagaaaaaaaattaaaagaaaaattaaaagatcaacaaagtcaaaaaagaataaaaaaattttatcaaacgaactaatctttaaggtgccaaaaaagtggtcaaataatgcatatgttgacaaaaatgcttatgaaaaaaaatataaactttcattaaaagataatgatggtttttggaataaagagggtaaaagaatagattggatcaaaccatataaaaaaataaaagatgttaagtatagtaaaactgatgttaaaattaaatggtactatgacggaacattaaatgcttctgcaaattgcatagacagacatcttaaaaataaaaaaaataaaacagcaattatttgggttggagataatcctaaagaatctaaacaaattagttacaaagagcttcataaaaatgtttgcaaaactgcaaatggtttaaaagaacttggtataaaaaaaggagatcgagttacaatttatttaactatgataccggaattagcgtatgtaatgttagcctgcgcacgaattggagcaattcactcaataatatttggtggtttttcacctgactcaatatctggaagaataaatgattgtcagtcagattatatgattactgcagatgaaggtataagaggaggaaaaattataccattaaaaaaaattgcagatgaagctttaaaaaatgtcaaatgtaaaaaaatgtgttgtgattaa

SEQ ID NO: 308472 - DNA, 226 bp, Unknown
  Bacterial polypeptide expressing nucleotide sequence isolated from the Sargasso Sea
cggaacgagttaattaaatgggtacgaaaagaaatagggccgatcgccagcccagatctaattcaatgggcgccgggtctgccaaaaacccgctcgggaaagataatgcgaagaatactgaggaaagttgccgaaaatgattttggatcattaggggatacgtcaaccttagcagagcccgctgtcgtacaagacttaatagataatagagaaaatagaggttaat

SEQ ID NO: 308473 - DNA, 841 bp, Unknown
  Bacterial polypeptide expressing nucleotide sequence isolated from the Sargasso Sea
atggctaaaagaaaaaaaagtaaaagaaaaatcaggtcaaaaaaaagaaggcctaagagaaaaaaagggcttagaaaaaaaagttataagaggtctgcccctaaaagttctgcaaaacaaattaaagatacagaaggtagcttagtttttaaagtgcctgagaattggtctaagcaagcgcttgtaaataaaaacaaatatgaaaaaaaatacaatctatcaataaaagataacgaaaaattttgggccaaagaaggtaaaagaataacttggatgaagccttattcaaaaattaaagatgtgaaatatagtaaagaagaagtaaatatcaaatggtactacgacggaactttaaatgcttctgctaactgtattgatcgacatttagaaaaaaaaggaaataaaacagcaataatttgggttggggatgatccatcagactcaaaaaagatttcctacaaagaattacataaaaatgtttctaaggctgcaaatggattaaaaagtttgggaatacaaaagggagacagagttacaatttaccttacaatgataccggaattagcctatgtaatgttggcttgtgcaagaatcggagctgttcactctataatatttggtggtttttctcctgactccattgcaacaagaattaatgattgcgaatccgattatgtaattactgctgacgaaggtgtacgaggaggcaaaattatacctttaaaaaaaattgcagatgaagcaatgatgcaatgcccgaatgttaaaaaatgtgttgtagttaagagaactgggaattcgataaattgggacgatgaaagagatgttgcctatgatgata

SEQ ID NO: 308474 - DNA, 385 bp, Unknown
  Bacterial polypeptide expressing nucleotide sequence isolated from the Sargasso Sea
gtaataagtggtttcagggacatcgggttaggaacaatggaaatagaatctgctttggtaagtcataaatcagttgcagagtctgcagtagttggcaaaaaagatgatttaaaaggtgaagttatagttgcttttgtatctctagagaaagacgttaacggttcttcagaattaatagaaaatctaaagaaacatgttgttaatgaaattggaattatcgcaaagcctgaaaaaattataatttctgactctcttcccaaaacacgtagtggaaaaattatgaggcgaattttaagatctttggctgctggagaaaaaattagcggtgatataagcactcttgaagatagttctgttttggaaaagctgaaagaattatcctaat

SEQ ID NO: 308475 - DNA, 151 bp, Unknown
  Bacterial polypeptide expressing nucleotide sequence isolated from the Sargasso Sea
tctgggtttaccaaaaactagatcaggaaaaattatgagaagaattctgagaaaaattgcttcaaatgattttgaaaacttaggagatacttctactttggctgatccttctgttgtagatgatttaattaaaaatagaaaaaataaataa

SEQ ID NO: 308476 - DNA, 670 bp, Unknown
  Bacterial polypeptide expressing nucleotide sequence isolated from the Sargasso Sea
tatggcaaaaagaagtaaaaagaaaaaaagaaaatcaaaatctaagaaaaagaaaagctttaaaagaaaaaagaaaaaaattcttagaaaaaagaacaagaaaatttcaacgaaaaagaagggctcaaaacaaagagaagattctgatgggaatattgtctttaaagtgcctcctagttgggaaaaacgagcttatgttaatcaatcccagtattcaaaaaaatataagttgtcgttaaaggataacgaaggtttctgggctaaagaaggaaaaagaattacctggatgaaaccatatactaaaatcaaggatgtgagatatagcaaagagaacgttagtattaagtggtattacgatggtacattaaacgcatcagcgaactgtattgatagacatttagataaaaaaggaaataaaactgcaattatatgggttggtgatgacccgagcgactccaaaaaaatatcttataaagaacttcataaaaatgtttgcaaagcagcaaatggattaaaaagcataggaattcaaaaaggagacagggtaactatctaccttactatgatacctgagctagcttatactatgttagcatgtgctagaatcggtgctgttcattcaataatatttggaggattttctccagactcgattgcaacaagaattaat

SEQ ID NO: 308477 - DNA, 322 bp, Unknown
  Bacterial polypeptide expressing nucleotide sequence isolated from the Sargasso Sea
gaggcagctgtggttggctttccacatagcattaaaggcaatggcttgtattgctatgttactttaaatgcaaatgaaaaagcaactggtgatttagaaagagatcttaaactttgggtaagaaaacaaataggaccgattgcaaccccagatgtagttcagttttctcctgggctacctaaaacacgatctggaaaaattatgagaagaattttaagaaaaattgctgcaaatgaacctgaaaacctaggtgatactactaccttagccgacccaagtgttgtagattctttaatagaaaatagacaaaataaaggttaat

SEQ ID NO: 308478 - DNA, 894 bp, Unknown
  Bacterial polypeptide expressing nucleotide sequence isolated from the Sargasso Sea
aacagaaaaaacacatttttatggtttcataaaggcaaattaaatacctgttataattgtttagatagacacgtagaaaacggtaaaaacgataaagtagctatcatatatgacagtccaattactaagacaaaaaagcaaattacttatggccaactccttaacaaagtttctgcattagctgcatcattaaaaaaaataggagttaaaaaaggtgatagggttgttttgtatatgcctatgatacccgaagttataatttccatgttagcctgtgctagattaggagcaattcattcagtagtgtttggaggttttgcagcaaaggaacttgctagcagaatttctgatgttacaccaaaagtaatcatttctgctagttgtgggattgaaccaaataaaataattaactataaggaaatattgaactctgcattgtctcagaccttacataaacctgtaaaacaaattatataccaaagagagcagtatcgttgtagattagacaaaacaaacgatatttcttgggatgaattcatagatttttcctctaaaactagctgcgtatctgttgacgcaaatgatcctctgtatattttgcatacttctggaactacaggaataccaaaaggaatagttagaacaaatggaggacatgcagttgcactcttaaatagtatgaaaatgacttatgatatttcagaaaatgacgtattttgggcagcttctgacgtaggttgggtagttgggcattcttatatagtttatgcacctcttttgttaggatgtagcaccgtattgtatgaaggtaaaccggtagggactcctgatgcaggacagttttggagagtaatctcagaatataatgttaaaactatgtttacagctcccaca

SEQ ID NO: 308479 - DNA, 148 bp, Unknown
  Bacterial polypeptide expressing nucleotide sequence isolated from the Sargasso Sea
cttgccaaaaacaagatcaggaaaaataatgagaagaattttaagaaagattgctgctaatgagcataaagaattaggtgatacgactacccttgcagacccgtccgttgtagagtctttagtagaaaacagacaaaacaaagattaa

SEQ ID NO: 308480 - DNA, 783 bp, Unknown
  Bacterial polypeptide expressing nucleotide sequence isolated from the Sargasso Sea
gttaatcgacaggagggatattgattggtgcgatgcgcattacaaagttacacctgttgattgtgttgaggtggaggctaccgatccagtgtacattctatacacatcgggtaccactggtattcctaagggggttgtgcgtccgactgcggggcatcttgtttctttgaaatggtctatgaaaagtatatacgatgttgatcctggagatgtttactgggcagcctctgatgtaggctgggtggttggacattcatacatcgtatacgccccactttttcatggctgtacaagtatcttgtatgaaggaaaaccagtaggtacaccggatgctggggcgttttggagagttatttccgaacatcaggtaaattgtatgtttacggcgccaacggcaattagagctattaagaaagaagatccatacggcaaattagtcgaaaaatacaatctaaattgccttcggtcgcaatttctagccggagaaaggtgtgacccggatacgctagaatggaccaagaacatgctaaatgttcctgtcatcgatcattggtggcaaacggaaacaggatggccgatagcttctaactgtcttgggatagaacaaatggatataaagccaggttcacctacttgtgctgtgcctggttggaaaatagatgtgctcgatgagttctcgagacctgttccaagaggagaaattggagcgatctcactaaaattacctttgccaccaggttccttgcccaccctttggcagaatgacgaacgttttgtagatag

SEQ ID NO: 308481 - DNA, 508 bp, Unknown
  Bacterial polypeptide expressing nucleotide sequence isolated from the Sargasso Sea
aaaagaaggaaaaagaataaattggattaaaccttataaaaaaattaaagatgtaaagtacagcaaagatgatgtttatattaaatggttttatgatggtacattaaacgcatcagcaaattgtatagatagacatttaaaaaagaatgctgataaaactgcaattatctgggttggagatgatccaaaagttcaaaaaaaaattagctacaaggaattacataaagaagtttccaaagcagcgaatggactaaaaaatttaggtgtacaaaaaggggatagggtaacaatttatcttaccatgataccagaacttgcttacacaatgctagcatgtgcaagaataggtgcagttcactcaataatatttggtggtttttctccagatagtatctctggtaggattaatgactgtgagtccgactatgttataactgcagatgaaggtgttagaggcggtaaaacaattccactaaaatcaattacagatgaagcattacaaagctgt

SEQ ID NO: 308482 - DNA, 445 bp, Unknown
  Bacterial polypeptide expressing nucleotide sequence isolated from the Sargasso Sea
ttaagagatgaggatggtcattacagaatcactggaagagtagatgatgttataattgtttctggacacaatcttggaaccgcacctattgaagaagctattaacgaacataatatcgttgctgaatctgctatagttggttatcctcatgatataaaaggaagtgcgctttatggatatgttataataaaagaaagtattcagaatgaagatgaattggcagctcttagaaaagaaattaattcattaatttctgcacaagttggcccaattgcaaaattagataaaatacaatttgtatctggtcttccaaaaacaagatcgggtaaaattatgagacgtattttaagaaaaattgctgagggagatgtctccaacttaggtgatatttcaacattattaaatccagatgttgttgcagaaattcaggaaggtaaaatttaaa

SEQ ID NO: 308483 - DNA, 919 bp, Unknown
  Bacterial polypeptide expressing nucleotide sequence isolated from the Sargasso Sea
attctacaaatggttcgaggacggaaccacaaacacttgctataatgctctagatttccacattgataatggtttaggggaaaaaactgcactaatttatgatagcccaattacaagtaacaaagcaaagtttacctataatgaattaaggtcaaaagtttcaaaatttgcaggagctttgaaaaatcaagggcttcaaaaaggcgacagagctatcatttatatgccaatggtgccagaagctgttgttgctatgttggcatgtggaaggattggagttgttcattcagttgtattcggaggttttgcctctaatgagcttgcaagtcgtatagatgatagtaaagccaaaattttaataactgcttcatgcggttttgagcctggaagaacagtagaatataggcctcttgtagacggagcattaaaacttgcaaaacacaaaattgaaaaagttatcttctttcaaagaaaaggccatgaattaaagttaaacgctccaaaagaaattagttgggacgatgctttatcaaatgcaaaagatacagattgtgtagagatgaattcaaatgaatatgcctatattctatatacatcaggtacaactggtgtaccaaaaggaattgtaagagatattggtggccacatagttgctcttaaatggactatgaagaatatttacaacatagatgaaggagatatttggtggtccgcaagtgacattggttggatcgtagggcactcctatattgtttatgctcctttatttaaaggttgcaccactgttttattcgagggtaaaccagttgggaccccagatgctggtgctttttggaaaatgatttcagactataaaattaaatctttatttacagcacctacagcatttagagctataaaaaaagaagatccagaagga

SEQ ID NO: 308484 - DNA, 283 bp, Unknown
  Bacterial polypeptide expressing nucleotide sequence isolated from the Sargasso Sea
aggggatggtctctactgttatgtaactctaaatgccggtgaaacagaaacaggagaacttgaaagagatttaaaactttgggtaagaaaacaaattggacctttagcaacaccagaccttattcattttactccaggtcttccaaaaacaagatctggtaaaataatgagaagaattttaagaaaaattgctgctaatgaacacgagcaattaggtgatactaccactttggcagatcctagtgttgtaaacagtttagttgagaatagaaaaaatatttaa

SEQ ID NO: 308485 - DNA, 229 bp, Unknown
  Bacterial polypeptide expressing nucleotide sequence isolated from the Sargasso Sea
aaaaaattaggaattaaaaaaggtgatagagttactatttacttaacgatgatacctgagcttgcaattttaatgctagcttgtgcaagaattggagcagtgcattcaataatttttggtggtttttctgcagagtgtatttctggaagagttaacgattgcgaatcagaatatattattactgcagatgaaggagtgagaggaggaaaaactattcctcttaaatata

SEQ ID NO: 308486 - DNA, 412 bp, Unknown
  Bacterial polypeptide expressing nucleotide sequence isolated from the Sargasso Sea
atgattaagaattatgttaatgttaccggaaaaattaataaaaaagaatatgaagaattatatattgaatctattaaaaataataaatctttttggaataaacatggaaagagaatagattggataaagccctatactaaaattagtgattttaactactcaaaagaaaaagttgaaattaagtggttttatgatggtactttaaatgtatcttacaattgtattgatagacatgcaaaaactaatccaaataaagtagcaattatttgggagggagacgacccaaccgaagtaaaaaaaataacgtataatgagttactaattaaagtaagtaaaactgctaatgctttaaagtccctaggtgtaaagaaaggtgattgtgtaacaatttatctaactatgttacctgagc

SEQ ID NO: 308487 - DNA, 730 bp, Unknown
  Bacterial polypeptide expressing nucleotide sequence isolated from the Sargasso Sea
atgaaatcagattttgaaaagatttataacgaatcaattaaaaatcccgaagaattttggaaaaaagttgctgatgatatgttttggtttaaaaaaccttcaaaaattttaaataaatctaaacctccattttacaaatggtatgaggatggagttacaaacacatgttataacgctttggatattcacattgataatggcaaaggtgatagaactgctttaatctatgacagtccaattacagataataaaaaaaaattcacctataaagaattaagagaaaaagtttcaaaatttgcaggtgcattacaaaatcaaggaataaaaaaaggagatagagttatcatttatatgccaatgatacctgaggctgtcattggtatgcttgcttgtgggagaattggagcggttcattcggtagtgtttggtggttttgcttcaaatgaattggctagcagaatagatgatagtaaagcaaaaattttacttacggcctcatgtggttttgaacctggtagaacagttcagtacaaacctcttgtagacgaagctttaaaacttgcgtctcataaaattgaaaaactaattttgttccaaagaccagacactgaagttaaattaaattctcctaatgaaattagttgggaagaagctttgtctaatgcaaaaaatgttgattgtgttgaaatgaacgcaaatgaattcgcttatattttgtatacctcaggaa

SEQ ID NO: 308488 - DNA, 226 bp, Unknown
  Bacterial polypeptide expressing nucleotide sequence isolated from the Sargasso Sea
tttggaaagggagttaaagttatgggttagaaaacaaattggcccaatagctacgccagatctaatacatttttctcctggattaccaaaaacaagatctggaaaaataatgagaagaattttaagaaagattgcagcaaatgaacatgatcagcttggtgatacaacaaccttggcagaccctagtgttgtacaaagtttagttgatgagagaaaaaatgtttaa

SEQ ID NO: 308489 - DNA, 582 bp, Unknown
  Bacterial polypeptide expressing nucleotide sequence isolated from the Sargasso Sea
ttgtcgtcaagctacctctacctccaagctgccttccaactctttggaatgatgacaaacgctttagagattcatatctttcaaaataccctggctactaccttacaggagatggaggactaatcgataaagatggatatgtatatgtaatggggcgagtggatgatgtaattaatgtagctggacaccgtttgtcaactggacaaatggaggaactaattgcagcacatcctgcagttgcagaatgtgctgtggtaggtattgacgatgagctcagagggcagattcctgttggttttgcagtacttaaagacggtataaatatcagtcaggatcaattggagcaagaaatggtaagcatcatccgcgaagaaataggagcagttgcctattttagacagtccgttatagttagtcggcttcccaaaacgcgatcaggtaaaattcttagaaaaaccatacgtcaattggctaaaggtgaagatgttcctgctccaccgactattgacgacccagcaatacttaaagaaatttgtcaagtaatggaatcctgtggtgtagggagttttgcatcaaaataat

SEQ ID NO: 308490 - DNA, 775 bp, Unknown
  Bacterial polypeptide expressing nucleotide sequence isolated from the Sargasso Sea
tatggctaaaagaaaaaaggggaaaagaaagaaaaaattaagaaaaagaaagaaaacattaagaacaagaaagaagataagaaaaagaaagaaaaaattaagaaaaagaaagaaaacattaagaacaagaaagaagataagaaaaagaaaaaagaaaacaaaatcgcgaaaaattaaaaaagcaaaaagcagtggatctgctgaacttgtttttaaaattccaaaaaaatggtcaaataatgcctatgctgataaaaatttttatgaaaaaaaatataaattatctataaaagataatgaaggtttctggagaaaagaaggaaagagaattgattggataaaaccttacacgaaaattaaagatgtaaagtatagtaaaagtgatgttaaaattaaatggtattatgatggaactcttaacgcgtcagcaaattgtatcgatagacatttagaagataaaaagaataaaactgctataatatgggttggagataatccaaaagagtctaaacaaattagttataaagaacttcacaaaaatgtttgcaaaactgcaaatggtttaaaagaaattggaataaaaaaaggagatcgagtaactatttatctaacaatgatacccgagctagcatacgttatgttggcttgtgcaagaattggtgcggtacattctataatatttggtggtttttcacctgactctatagctggaagaataaatgattgtcaatctgattacattataactgcagatgaaggtgttagggggggaaaa

SEQ ID NO: 308491 - DNA, 853 bp, Unknown
  Bacterial polypeptide expressing nucleotide sequence isolated from the Sargasso Sea
ccaaaaggggagtttattaaaaaatttgatttaacaagtttgcaatctttatttcttgctggagaaagagctgatcctgacacggtgttgtggttggaaagaaaattaaaagttcctataattgatcactggtggcaaactgaaactggatggccggtggcagcaaaccctttaggtatagaagcactcccaattaaaacaggatctccaacaatagctatgcctggatatgatgtaagggttttatcagaagagggtgaggaggttccaaaggatacattaggagcaatctcaataaaattacctttaccaccaggatctttgcctagtttgtggaatgcagatgataggtttatagaatcttatttatcaacttttgaaggtttctatgaaacgggagatgcaggttatcaagacgaagatggctatttatatattatgtcaagaactgacgatgtaataaatgttgcaggtcataggctttctacaggagctatggaagaaactttatctaatcatgtggatgtggctgaatgtgcagttattggtgtatcggatgatctaaaaggacaagtcccattaggacttatatgcttgaataaaggatgcaacaaaactcatgaagacgtttgtagagaggttgttgatttagttagaaacgaaataggacctgtcgctgcatttaaatctgtggctgttgtgtccgctcttccaaaaactagatcaggaaaaatcttgcgagcaactataagaaaaatagctgataaagttgaatgggaaatgcctgcaacagtagataatcctatagtttttaaagaaattgaagaggctttaaaaccattaggttattaat

SEQ ID NO: 308492 - DNA, 763 bp, Unknown
  Bacterial polypeptide expressing nucleotide sequence isolated from the Sargasso Sea
aatgccaaaaaaaagaaaaagtaaaactaggaaaaaatcatctaaaaaaagaaaacctattaaaaggaaatcaaaaataaaaaaaatacgtgttaaaaagaaaaatagaagcactggaaaaaaagaggataattcaacaactgagttaattattaaaactaaacctgaatggattaaaagtagtttagcaaataagtctcagtatcaaaaaaaatactcagaatctattaaaaataacaatgctttctggaaaaaagaaggaaaaagaatttcatggatcaaaccttataaaaaaattaaagaagttaaatatagtaaagatgaagtaaaaattaaatggtttgaagatggaacattaaatgcttcagcaaattgtattgatagacatttaaaagataaaaaagataaaactgcaataatttgggttggagatgatcctaaagactcacaaaaaatttcatataaacaattacaccaaaaagtttctaaagcagcaaatggtctaagaaaattaggtatacaaaaaggtgatagggtaacaatatatttaacaatgatacctgagctagcaattttgatgttagcttgtgctcgtataggagctgtacactcaattatttttggtggattttctgcagaatctatttcgggaagagtaaacgattgtgagtcagaatacataattacagccgatgaaggaataagaggtggtaaaacaattcctttgaaagcaactactgatgaagctttaacaaactgccca

SEQ ID NO: 308493 - DNA, 251 bp, Unknown
  Bacterial polypeptide expressing nucleotide sequence isolated from the Sargasso Sea
agctggagaaaaaagtactcttgatttagagagagatttaaaactttgggtaaggaaacaaattggtccaatagcaactccagacttaattcaatttgctccaggacttccaaaaacaagatcaggtaaaataatgagaagaattctaagaaagattgctgctaatgagcatggtcaattaggtgatacaaccactttagctgatccttcggttgttgaaagcttggtcgataatagaaaaaatatctaga

SEQ ID NO: 308494 - DNA, 844 bp, Unknown
  Bacterial polypeptide expressing nucleotide sequence isolated from the Sargasso Sea
atgccaaagaaaaaaaaagtaaaaaaaagatcaaagaaaaaaaaatctaaacgaaaatttaaaaagcataattcaaagaaaagaataaaaagaaaaatatctaaacccaaagccgaaaaagaactaatcattaaaactaaaaaagagtgggttagtaaagctattgtaaataaatctcagtacgaaaaaaagtataagtcatccataaaagataatgatggcttttggaaaaaagagggaaaaagaattacgtggattaaaccatattctaaaattaaggatgttaaatatagcagagatgatgtgagaataagatggttttatgatggtacattaaacgcttcaacaaattgtattgatagacatctcaaaaaaaataaagataagactgcaattatttgggttggcgatgatccaaaaattcaaaaaaaaatttcatataaagaattgcataaagaagtttctaaagctgctaatgcactaaaaaatttaggtgtacaaaaaggagatagggttacaatctatttaacaatgattccggagcttgcatatacgatgttagcatgtgcaagaattggtgctatacattctatcatttttgggggtttttcacctgatagtatttctggaagaattaatgactgtaagtcagattatgtgattactgctgatgaaggtttaagaggaggaaaaactattcctttaaaatcaattactgatgaggcactagtaaactgtccgaatgtaaaaaaatgtattgtagttaagagaacaggaaattttgttaatatggatccaaatagagatgtttggtatcacgaaattacaaaaaatgttcaaataa

SEQ ID NO: 308495 - DNA, 736 bp, Unknown
  Bacterial polypeptide expressing nucleotide sequence isolated from the Sargasso Sea
ccgaaaaaaaagaaaaaaagaaaaagtagaagaaagattaaaagaaaatcttcaaaaaaaagaaaatctagaaaaatttcaaaatcaaagaaaaaaagaaatagaaaaaaaaattctaaaactggatcgaaagattcatctgaaaaaatttatagaacgaaatcagactgggttaaaaatgcattgatcaataaatcaatgtatgaaaaaaaatataaagaatctgtaagaaataataatgacttctgggcaaaagagggaaaaagaattacatggataaaaccatatacaaaaattaaagatgttacttatagtaaaacggatgtaagtataaaatggttttatgacggcacattaaatgcttcggcgaactgtatagatagacatttaaaaaagaataaagataaaactgcaattatttgggttggagatgatccaaaagttcataaaaaaataagttataaacaattgcatgatgaagtatcaaaagcagcgaatggattaaaaaaacttggtgttcagaagggagatagggttacaatttatcttacaatgatacctgaattagcttacacaatgcttgcttgtgcaaggataggtgccattcattcaataatttttggaggattttctgcagactcaattgctgatagagtcaataattgcaagtcagattatatagttaccgcagatgagggtataagaggtggaaaaacaattcatttaaaatcgatca

SEQ ID NO: 308496 - DNA, 253 bp, Unknown
  Bacterial polypeptide expressing nucleotide sequence isolated from the Sargasso Sea
aatggtgggagaaaaatcaactttagatttagagagagatctaaagctatgggtaagaaaacaaattggtccgatagctacaccagatttaatacaattttcacctgggcttccaaagactagatcgggtaaaattatgagaagaattcttcgaaaaattgcagcaaatgaacatgatcaattaggtgacacgaccaccttggcagatccaagtgtagtaaaaagtttagttgaaaatagaaaaaatacttaa

SEQ ID NO: 308497 - DNA, 217 bp, Unknown
  Bacterial polypeptide expressing nucleotide sequence isolated from the Sargasso Sea
gcgtttgttgctcatccaaaagtagcagaagctgctgtagttggatatccacatgacattaagggtaatggtttgtattgttacgttactttaaatggtgggagaaaaatcaactttagatttagagagagatctaaagctatgggtaagaaaacaaattggtccgatagctacaccagatttaatacaattttcacctgggcttccaaagactaga

SEQ ID NO: 308498 - DNA, 714 bp, Unknown
  Bacterial polypeptide expressing nucleotide sequence isolated from the Sargasso Sea
aaaaatcaggagttaataataaaaactagatctgattgggctaagaaagcacttgttaataaaaatcaatatacaaaaaaatataatcagtcgttaaaaaaaaatgatgatttttggaaaaaagaaggaaaaagaattacttggataaaaccttacaaaaaaataaaaaatgttaaatacagcaaatcagatgtacatataaaatggtactatgatggaacattaaatgcatcggcaaactgtatagataggcatttaaaaaaaaataaagataaaacagcaataatttgggtaggtgatgacccaaaagttcaaaaaaaaatttcctacaaacagttacacattgaagtttccaaaacagcaaatgcattgaaagacttgggaattaaaaaaggtgatagagtaactatttatttaactatgataccagagttggcatatacgatgttagcatgtgcaagaattggagctatacattcaataatatttggaggtttttcacctgatagtattgcgggtagaataaatgattgtaaatctgattacgtaataactgctgatgaggggttgagaggaggaaaaataattcctttaaaatccataactgatgaagcgttaataaactgtccaaacgtaaaaaaatgcatagttgtaaaaagaactggtaatagaattaattgggatgagagtagagatgtttggtataatgatata

SEQ ID NO: 308499 - DNA, 778 bp, Unknown
  Bacterial polypeptide expressing nucleotide sequence isolated from the Sargasso Sea
atgcctaagaaaaaaaaaacaaaaaaaaaagtaatctcaaaaaaacctaaagagacaatttataaaaccaagaaagaatggataagtaaagctacagttaataaatctcaatatacaaagaaatataacgagtcgattaaagataacgatggattttggaaaaaagaaggaaaaagaattaattggattaaaccttataaaaaaattaaagacgttaaatatagtaaagatgatgttcatatcaaatggttctatgatggtactttaaatgcatcagcaaattgcattgataggcatcttaaagagaatgctaataagactgcaattatatgggtaggtgacgatcctaaagttcaaaaaaaaattacatataaagaacttcataaagaagtttcaaaagcagcaaatggattaaaaaatttgggagttcaaaagggtgatagagtaactatttatcttactatgataccagaacttgcctacacaatgcttgcgtgtgctaggataggtgcggttcactccataatatttggaggtttttcaccagatagtatttcgggtagaataaatgattgtgaatctgattacgtgataactgcagacgaaggggtaagaggtggaaaaacaataccattaaaatctataacagatgaagctttacagagctgtcccaatgtaaaaaaatgtatcgtagtaaagagaacaggtaccaaaaaaattgattggtttaatgatcgtgatgtttggtatcacaaaatgacaagtaaagtttcagcaa

SEQ ID NO: 308500 - DNA, 154 bp, Unknown
  Bacterial polypeptide expressing nucleotide sequence isolated from the Sargasso Sea
ctgaaggtattccaaattatccggattggtctaggtggtggcaagatagtagataaatataaagttaacattttttatacagcaccaactgcaataagagccatgatgagagaaggagatgggcctgtaaaaaaaacatcaagaaaaagtctaa

SEQ ID NO: 308501 - DNA, 250 bp, Unknown
  Bacterial polypeptide expressing nucleotide sequence isolated from the Sargasso Sea
gctggagaatcagagactggagatcttgaaagagaattaaaattatgggttagaaaacaaataggtcctttagcgactccagatctaatccattttacccctggtttgcctaaaacaagatcaggaaaaattatgagaagaatcctaagaaagattgctgctaatgaacatggtcaattaggtgataccacaactttagcagatccaagtgtagtcgatagtttagttgaaaatagaaaaaatacttaaa

SEQ ID NO: 308502 - DNA, 674 bp, Unknown
  Bacterial polypeptide expressing nucleotide sequence isolated from the Sargasso Sea
aataaattacaataccgaaaaaaaatatcaatcatctataaaagataatgaaggtttctggcgaaaagaaggaaaaagaattacgtggataaagccttataataaaattaaagatgtaaaatatagtaaaacagatgtacatataaaatggttttatgatggtactttgaatgcatcggcaaattgcattgatagacatttaaaaaaaaataaagataaaactgcaatattgtgggttggtgatgatccaaaagtccacaaaaaaatatcatacaaacaattacatcaagaagtttccaaaaccgcgaatggtttaaaagaattaggagtacaaaagggagacagagttacaatttatttaacaatgatacccgaattagcatatacaatgctcgcatgcgcaagaataggtgctattcattcaattatttttggaggattttctgcagaaagtatagccggaagaattaatgattgtaaatcagattatgttgttacagcagatgaaggcgtaagaggtggaaaaataattcctttaaaatcaactactgacgaggctttaattcattgtccaaatgtaaaaaaatgtattgttgtaaaaagaactggaaatagaattaattgggaagaaagtagagatgtttggtatcacgaaatgataaaaaaagtttctt

SEQ ID NO: 308503 - DNA, 559 bp, Unknown
  Bacterial polypeptide expressing nucleotide sequence isolated from the Sargasso Sea
acttcctcttccgccagttgttttccttcgctttggaacgacgatgagcgtttccgaaaatcctacctttcccagttccctggctattatcagacaggagacggggggatcattgacgaagacggttatgtttttgtgatgggccgtgtggatgatgtgatcaacgttgccggacaccgactatccacggggcagatggaagagttgatcggttcccaccccggagtggcggaatgtgcagtggtcgggatcgatgacgaattgcggggtcaggttccggtgggttttgccgttttgaaggatggtgtggaaatgaaccatcaggatctggaaaaggaactggtctccatcatccggaaggaaatcggggcagtcgcctgcttccgaaaatccgccctagtgaaaaggcttcccaaaacccgttccggcaagatcttacgcaaaaccatccgtcagttggcaacaaccccagaggttccaattccacccaccatcgacgatccagccattatcgatgaaatccgtgatgcgatgcagaccagtggaattgggaattaag

SEQ ID NO: 308504 - DNA, 171 bp, Unknown
  Bacterial polypeptide expressing nucleotide sequence isolated from the Sargasso Sea
ctgactatatacatattacagctggctacccaaagacaagatctggaaaaattatgagaagaatcttacgaaaaattgcttcaaatgaatttgaaaatttaggtgatacttctactttagcagatcctactgttgtagataatttaattgaaaatagaaaaaataaataaa

SEQ ID NO: 308505 - DNA, 745 bp, Unknown
  Bacterial polypeptide expressing nucleotide sequence isolated from the Sargasso Sea
atgaaaaaatattctgttccaaaaaattttcactcgtctgttggacatgatagtcttgatcgctatcaatctttaagagaaaatgcaaagcaagattcaaattcttattgggagtcagttgcaaatcgtgttgactggtttgataagtggactactgtcaataatacagattattctaaagcgcatattgagtggttttcaaatggaaagttaaatgcatcttataattgcatagatagacatattgaaaatggcttaggagaaaaaacagctcttatttggcaatcaaacgatcctactatttcaaaaaatgtcacgtacaatgaattattagaaaaagtttcgttatttgctaatggattaaaacgagctggaattcaaaaaggagatcgtgtatgcatttatatgcaaatgattcctgaagctattgtagcaatgcttgcttgtgctcgaattggagcagtgcattcagttgtatttggagcattttcaagcgacgctttaaaaaatagaattaatgattcagaatgtaagctacttattacgcaagataacggtgtccgtggatccaaatttgatattccaatgaaagaaaatgcagataaaattgcagatgaatgcccttccttaacaacagtagttatggttgaacgttcaggtaataatatgtttatgaaagaaggtagagatataacctggaatcaatttgtagatggctgttctagtgaatgtcccgctgaagtga

SEQ ID NO: 308506 - DNA, 205 bp, Unknown
  Bacterial polypeptide expressing nucleotide sequence isolated from the Sargasso Sea
agaggtcagcaaacatgatctaactagccttcgtgttcttggaactgtgggtgagccaattaatcctgaagcatggatgtggtcccacgaaaatattggaggatcccagaccccgatagttgatacttggtggcagacagagacagggggcaatatgattactcctcttccaggtgtcacaactacgaaaccaggatctgcttgt

SEQ ID NO: 308507 - DNA, 797 bp, Unknown
  Bacterial polypeptide expressing nucleotide sequence isolated from the Sargasso Sea
gaagaagaaagcaaggtaagaaaaaaaaagtctaaagttagaaaaaaaacctcaaaaaaggtgaaaagaagatctaaagttagaaaaaaatcttctaaaaaaccaaaaaaaagaattaaagcaaaaaaagaaaacggaaatacacctcctgaagttgttattaaaacaaaaccagaatgggttaaaagtggcttagcaaataaaagtaaataccaacaaaaatattctcaatctataaaaagcaatgacgaattttggaggaaagagggaaaaagaattacttggataaaaccatataaaaaaattaaagacgtaaaatacagtacaaaagaagtaaaaattaaatggtttgaagatggcactttaaatgcttctgcaaattgtattgatagacatttaaaggataaaaaagataaaactgctattatttgggttggagatgatccaaaagatagtcaaaaaatttcttataaacaacttcatcaaaaagtttctaaagcagcaaatggtttaaaaaaattaggaattaaaaaaggtgaccgtgtaacaatttatttaaccatgataccagagttagcaattttaatgctggcctgtgtgagaattggtgcagttcattcgattatttttggaggtttttcagcagattctatttcgggaagagtgaatgattgcgaatctgaatatatcattactgcagatgaaggagtgcgaggtggaaaaactattccactaaaatatacagtagatgaagctctaatgagttgtccaaatgttaagaaatgtattgttgttaa

SEQ ID NO: 308508 - DNA, 313 bp, Unknown
  Bacterial polypeptide expressing nucleotide sequence isolated from the Sargasso Sea
tatgacaaaagatatctatagagttccagataacattaaatcaaattcgctaatgactaatgatgagtataaaaatttatacaatgaatccatagaaaatccagagaagttctggtctgatcaagcacataaatatctagattgggattcagaatggacaaacgtaaaacatgaagattttttaaagggtgaagttagatggtttgaaaatgccaagataaatgcatcaaaaaattgtatagataggcatcttaataaatctggagacaaaattgctatcatctgggagggggatgaccctgaacttttcaaa

SEQ ID NO: 308509 - DNA, 131 bp, Unknown
  Bacterial polypeptide expressing nucleotide sequence isolated from the Sargasso Sea
tgctcccagagacataggttatgtagattctttacctaaaactagaagtgggaaaataatgagaagattgttaaaagctagagaattaggattgcctgaaggggatacatcaactttagaggatgactagg

SEQ ID NO: 308510 - DNA, 223 bp, Unknown
  Bacterial polypeptide expressing nucleotide sequence isolated from the Sargasso Sea
gaaagagaattaaaactctgggtcagaaaacaaattggaccagttgctacacctgattttatacatttttctccaggacttccaaaaactcgatctggaaaaattatgagaagaattctgcgtaagattgctgcaaatgaacacaacgaactaggagatacaacaacattagccgatcctagtgtagttgaaagtttggtaaaaaatagaaaaaatatttaaa

SEQ ID NO: 308511 - DNA, 317 bp, Unknown
  Bacterial polypeptide expressing nucleotide sequence isolated from the Sargasso Sea
agctgcagttgttggatttccacatgaaattaaaggtaatggactttattgttatataactttaaacgcaggtgaaaatcctaatggtgatttagaaagagaacttaaactttgggtacgaaagcaaataggtccaatcgcaaccccagactacattcagtttgcgcctggattaccaaaaacaagatcaggaaaaattatgagacgtattctaagaaaaattgctgcaaatgaacaccatgatcttggtgacacaaccactcttgctgatccatctgtagtagagtctttaattgaaaatagaaaagaaaaatagt

SEQ ID NO: 308512 - DNA, 615 bp, Unknown
  Bacterial polypeptide expressing nucleotide sequence isolated from the Sargasso Sea
ccgcttccgggtttgaccgagaccaagccggggaccgcgactcgcccgttcccagggatcgaggctgctataagggatggatccggagaggacacaacggctggttacctggcaatcacaaagccatggccttcaatgttgcgtacagtttggggcgacgaacagaggttcagagagacgtactggtcgaagtggccgaaagtctattttccaggtgatggagcgaaggtcgacgaagacgggtatttctggattcttggccgtgtagatgatgttctgaatgttgctgggcacaggattgggacaatggaagtggagagtgccttggtagatcatccgactgtggtggagtctgcagtagttgggaaggcacacgagatcaaaggagaatcaatagccgcgtttgtgactctcagagaaggagtcgaaggatcagatgagcttggaactgagctacgggctcatgtgagcgctaagatcggagcaatcgcgaagccggagctcgtggttttcactgcagagcttccgaagactcgttcgggtaagatcatgcgtcgtcttctccgtgacattgcagagggaagagcgataggcgacaccactacgctagcggat

SEQ ID NO: 308513 - DNA, 412 bp, Unknown
  Bacterial polypeptide expressing nucleotide sequence isolated from the Sargasso Sea
aatgaaatcagattttgaaaaaatttataacgaatcaattaaaaatccagaagaattttggaaaaaagtagctgatgatatattttggtttaaaaaaccttcaaaaattttgaataaatctaagcctccatttttcaaatggtatgaggatggagttacaaacacatgttataacgctttagatattcacattgataatggcagaggtgataaaactgctttaatctatgacagtccaattacaggtaataaaaaaaaattcacctacaaagaattaagagaaaaagtttcaaaatttgcaggtgtgttacaaaatcaaggaataaaaaaaggggatagagttatcatttatatgccaatgatacctgaggctgttatcggtatgcttgcttgtggaagaattggagcagtt

SEQ ID NO: 308514 - DNA, 816 bp, Unknown
  Bacterial polypeptide expressing nucleotide sequence isolated from the Sargasso Sea
agaaaagtttcaaaaaaacgacaagcttttaaagcaccctatcaatccaaggatagcgacggtaataccctaattaaagtttccgatagttgggctcaccatgcatacgttaatgagtctaagtataaaaaaaaatacaagctctctattaaagaaaatgaaaaattttgggctaaagaaggaaaaagaatttcttggataaaaaaatatacaaaagttaaagatgtcaaatacagcaaagaagaagttaaaattaaatggtactatgacggtacattaaatgcttctgcaaattgcattgatcgtcatttaaagaaaaacgcaaaaaaaacagctattatttgggttggtgatgatccgtctgactcaaaaaaaatttcatataaagaattacaccaaaatgtttgtaaagctgcaaatggactaaaaagtattggtgttcaaaaaggtgacagggtaacaatttatcttacaatgatacctgagttagcttatgtgatgctggcttgtgcaagaattggagctgtacattcaattatatttggcggcttctcccctgactctatagcaacaagaataaatgattgtgaatctgattatttaataacagcagatgaaggcgttagaggaggtaaaattattccattgaaaaaaatagctgatgacgctttaacacaatgtcctgatgttaagaaatgcgttgtagttcaaagaactggtaatcaagtagattgggataacgaaagagatatttcttataaagaaatgattgcttcagcttcaaacaaatgtgatcctgaggagatgggtgctgaa

SEQ ID NO: 308515 - DNA, 238 bp, Unknown
  Bacterial polypeptide expressing nucleotide sequence isolated from the Sargasso Sea
ccgactgaaggctttaagagtgacctaattcaattagttgccaaagaaatcggtgccattgcaaaaccagatataattcaatggtctcctggattaccaaagacaagatcaggtaaaatcatgagaagaatacttaggaaaatagcatccaatgaagttaacgacctaggtgatactactacactagccgatccttcggttgtggaagagttaatacataatagagagaacaaataat

SEQ ID NO: 308516 - DNA, 145 bp, Unknown
  Bacterial polypeptide expressing nucleotide sequence isolated from the Sargasso Sea
ctgcctaaaacaagatcagggaaaattatgagaagaattttgagaaagattgctgctaacgaacatgatcaacttggagatactactacattagctgacccaagtgttgttcaagaacttgtaaataatagactaaataaataaa

SEQ ID NO: 308517 - DNA, 784 bp, Unknown
  Bacterial polypeptide expressing nucleotide sequence isolated from the Sargasso Sea
ctagatcccccgacttatcactggttgaaagagcacctaaaaattcctgtaattgatcactggtggcaaactgaaactggatggacaatcagcggcaatatggctggtattgaacttctagagactagaccaggttccattacgttgcctgcaccgggttatgacgttcgcgttttggatgaaaatgggctcgaagttggtccaaatcaagagggcgctatcgtcgttaaggggcctttacctccgagcgggtttcccacagtttggcgagatcatgatcgctatgaaaacggttactggaaggactatcctggattttatttaaccggagacggaggatatcgagatgaagacggttacatatatgtcatgggcagaatggacgatgtgataaatgtggctggtcatcgcttgtcaaccggacagatagaagaggtagttgctaagcatacagtgatagccgaatgtgctgttgtaggaattaatgataaggaaaagggtcaggtgcccgtttctctaatagtgcttaaagacggcgcaaatatgactcctgagactctagagaaagagttagttacgatggttcgagaagctgtcgggcccattgctaattttaagcgtatacttatagtagagcggttgcccaaaactcggtctggcaaaattcttcggcagataatgagaaaaatgatagacagggaagaatattcggttccgtcaaccatcgaagatccctctgtcattggagagctcgagacgggcatcgctaattggaagctttagg

SEQ ID NO: 308518 - DNA, 269 bp, Unknown
  Bacterial polypeptide expressing nucleotide sequence isolated from the Sargasso Sea
cctaatgatcggagaggaagaaagtgaaaatttaataaaagacttacaaaattttgttgctaaagagattagcccaattgcaaaacccgatcttattcagtgggcgccaggacttccaaaaacaaggtcaggaaagatcatgagaagaattttacgaaaagttgcatctggagaatttgataatcttggagatacctccaccctggctgatccaggtgtggtagatgatttaataaagaataagcgtgatttaaaaaaaactaactaat

SEQ ID NO: 308519 - DNA, 670 bp, Unknown
  Bacterial polypeptide expressing nucleotide sequence isolated from the Sargasso Sea
ttggttctccaacttttcccaattcctggatttgatatacatattttagacgaagatgcaaatttgtgtaatcccggtgagactggaaatattgttattaagttaccactcccccctggttgctttcctactctatggaatgacgataatcgctttatagaatcttatttaaaaaaatatcaaggttactacttgactggtgatgggggattaattgatatagatggatatgtatttgtgatgggacgagttgacgatgtgattaatgttgcgggacatcgtttgtctacgggtcagatggaagaaattattgcatcacatccggcagtagcagagtgtgcagttgtaggaataaatgacgaactccgtggacaagtaccagtcggttttaccgtcatcaaagatggattcctcgttgatcaagatgaattagaaaaagaaattataggattaattcgtaataaaattggagctgttgcttgttttaggcagtctgttatagtgaaaagacttcctaagactagatctggtaaaattttaagaaaaaatataagacaaatagcctcaaaagaagatttttcaattcctcctaccatagatgatccccttatcattgaagaaattgttgatgttatggagtctgttggtgtaggtatttataaaaaataaa

SEQ ID NO: 308520 - DNA, 592 bp, Unknown
  Bacterial polypeptide expressing nucleotide sequence isolated from the Sargasso Sea
tatggaaataaaaaaacattggaaggataatgcgcttgtaactacaaaagattatgaagatctttatgctttatccataaaagataatgaaggtttctgggaaagtcaaggtgagcgtttagattggattaagaaatattcaaaaataaaagacattaaatacagctcaactgatgtaaagatcaaatggtattatgatggagagctaaacgtatctgaaaattgcattgatagacacgctaaaaataatcccaataaaattgctataatctgggaaggtgatgatccaaacaacactttaaaaattacttacaaggagcttcttttaaatgtttcaagaacagcaaatgctctaaaaaaactaggtgtacaaaagggtgatagagtaacaatatatttaacaatgattcctgaactggcttatacaatgttagcttgtgcaagaattggtgctatccattcaattatatttggtggcttctcttcagaatctattgcaggcagaatcacagattgcaaatcagaatttgtaattactgcagatgaaggaattaggggaggaaaaacaattccattaaagaagattatggat

SEQ ID NO: 308521 - DNA, 278 bp, Unknown
  Bacterial polypeptide expressing nucleotide sequence isolated from the Sargasso Sea
tggactttatggttatgtaactttgaatgctggagaaaaaagtacactgattttagaaagagatttaaaactttgggttagaaagcaaattggtccaattgctacacctgacttaatacagtttgctccaggacttccaaaaactagatctggaaaaataatgcgaagaattttgagaaaaatagctgcaaatgaacatggtcaattaggagatacaaccaccttagcagatccttcggttgttgacagtttggtagacaatagaaaaaatatttaga

SEQ ID NO: 308522 - DNA, 448 bp, Unknown
  Bacterial polypeptide expressing nucleotide sequence isolated from the Sargasso Sea
ttacgtatttgtaatggggcgtgtggatgacgtaattaatgttgctggacatcgtttgtcaactgggcaaatggaagaattaattgcagcccatcctgctgttgcagaatgtgctgtagttggtattgacgatgatctcaggggtcaaattccagttggttttgcagtactcaaagatggtacaaatataagtcagaatcaattggagcaggaaatggtgggcatcatacgtaaacaaattggtgcagttgcctattttaggcagtgtgtgatagttagtcggcttcctaaaacacgttcaggaaaaatacttagaaaaaccattcgtcaattggctaaaggcgaaaatatacctgctccacctactattgacgatccagcgattcttggagaaatgggtcaagtaatgcaaacctgcggcataggcagttttgcatccaaatcatga

SEQ ID NO: 308523 - DNA, 232 bp, Unknown
  Bacterial polypeptide expressing nucleotide sequence isolated from the Sargasso Sea
tggagatttagaaagagaactcaaattatgggttcgaaaacaaatcggtccaatagcaacacccgatcatatacaattttctccaggactaccaaaaacaaggtcaggaaaaattatgagaagaattttaagaaaaatcgcagccaatgaacatcatgatttaggagatacaacaactttggctgacccttctgtagtagattcattagtcgagaatagaaagaataaataa

SEQ ID NO: 308524 - DNA, 643 bp, Unknown
  Bacterial polypeptide expressing nucleotide sequence isolated from the Sargasso Sea
atgagttatcaggatctttatcagcagtccatagaacagccagaagtattctggagaaaacaagctgagctaatcaaatggtatgaatttccagaaaaaatactttcacaggatgagaatggattttttcgctggtttgcaggtggtaaactaaatacctcatatctggcacttgacgctcagatcgaagatggtcgaggtaatcaactggcgctgatttatgattctcctgcaacaaactctcaacgtaaatttacttacaatgagttgcgtgacgaagttgcattttttgccgggggattaaaaaatttaggtgtttgcaaaggtgatcgtgtgattatttacatgccgatggttgcagaagcagtaatcgcaatgcttgcttgtgccaggctggggtctgtgcactcagttgtttttggagggtttgctcctcatgaactggcagtgagaattaacgatgccaaacctaaagtactagtgactgcaagctgcggcatagaatttaccaatattattgaatacaaaccgcttgtagataaagctttggaaatcgcagaatttgctcctgaaaagacagtcgtattgcagcggcctcaagctgaagcagaaatgcaatcaggacgagattatgattgggtta

SEQ ID NO: 308525 - DNA, 247 bp, Unknown
  Bacterial polypeptide expressing nucleotide sequence isolated from the Sargasso Sea
aaggtagcagaagcagcagtcgtaggttacccacacgatattaaaggtaatggattgtattgttatgtaacattaaatgctggtgaaagagaaactggtgaactcgaaagagatctaaaactttgggttagaaaacaaattggtccacttgctacgcctgacttaattcatttcaccccaggacttccaaaaacaagatctggaaaaattattgagaagaattttaagaaaaatcgctgcaaatgaa

SEQ ID NO: 308526 - DNA, 122 bp, Unknown
  Bacterial polypeptide expressing nucleotide sequence isolated from the Sargasso Sea
gcgctgcccgatcgtcgacacgtggtggcagaccgaaaccggcggccacatgatcacgccgctgccgggcgcgacgccgaccgtgcccggttcgtgcacgctgccgctgccgggcacgaacc

SEQ ID NO: 308527 - DNA, 787 bp, Unknown
  Bacterial polypeptide expressing nucleotide sequence isolated from the Sargasso Sea
tatgccaatgattcctgaagcggtaattggaatgcttgcttgtggtagaattggagcagttcattcagtggtctttggtggttttgctccaaatgaactcgctagcaggatagatgattctaaagcaaaaattattttatcagcatcatgtggctatgaaccaggaagaacaattgaatataaacctcttcttaaaaaagcaattgaattagcaaaacataaaccagaaaaatgcataatttatcaaagaaaggattttaaagttgatttagaaaaaaatgaaattgattggaatgatgctgtaaaagaagcaaaacctgtagagtgtgttgagatgaatgctaatgactatgcttatattctttacacatctggtacaacaggtgtacccaagggaatagtcagagatattggtggacatatcgttgcacttaaatggacaatgaaaaatatttataacattgatcctgatgatgtttggtggtcagcgagcgatattggttggatcgttggtcactcatatattgtttatgctcctctgtttcatggatgtacaactgtgctgtttgaaggaaaacctgtgggaactcctgatgctggtgttttttggagaattatttctgaacacaaagttaagtcactctttacagcccccactgcatttcgtgcaattaaaaaagaagaccctaatggaaattttttcaaaaaatatgatttatcttcttttgaatctttattcctcgcaggagaaagagctgacccggatacattaaaatgggcagaaggt

SEQ ID NO: 308528 - DNA, 638 bp, Unknown
  Bacterial polypeptide expressing nucleotide sequence isolated from the Sargasso Sea
attgtctggaaaataccgtgaaatctatgattcgtctataaagagtaaagaaaacttttggaaagaagtctcagaagatattttttggtataaaaaaccatcaaaaattctgaattcttctaatccgccattttataaatggtatgaagacggggtaaccaacacttgttacaacgcgctagattttcatattgataaaggtagaggagataagactgcaattatttacgatagcccaataacaggtacaaaatataatttatcttacaaagaattaagagaaaaagtttctgtttttgctggagctttgaaaaatcaaggaatttcaaaaggggatagagttataatttatatgccaatgattcctcaggcagttgttgctatgcttgcttgtggaagaataggagctattcattccgtagtatttggaggttttgctgcaaatgaattagcaagccgaatagatgattcaaaagcaaaaataattatttctgcatcttgtggttatgaaccaggaagaactgtacattataagcctcttttaaataaagcaattgaaattgcaaaccataaacctgaaaaatgtattatttggcaaagagaaaaagataaagcagagcttgatccaaaaaaagata

SEQ ID NO: 308529 - DNA, 413 bp, Unknown
  Bacterial polypeptide expressing nucleotide sequence isolated from the Sargasso Sea
tttgcatcaatgtaaatcaggaaggaaaaatatgagctaccagaaagaataccgcgaatccattgagaatcctgaagcattctggagccgccaggccgaattgatcacatggtatgagaaaccgaagtcgatcctttcccaggatgaaaagggtttttatcactggttcaagggaggaaaactcaacacgagttacctggccctcgacttccatgtggaaaacgggagggccgatcaggcggctttgatttatgattccccggtcactgaaaccgttcgaagctacaggtaccgtgaattgctggatgaagttgcccgttttgccggggtgttacagaaccagggggttgaaaaaggagaccgggtcatcatctacatgccgatgattccggaagcagtggcggcgatgttgg

SEQ ID NO: 308530 - DNA, 172 bp, Unknown
  Bacterial polypeptide expressing nucleotide sequence isolated from the Sargasso Sea
cctgacttaatacaattttcaccaggattacctaaaactagatcaggaaaaattatgagaagaattttaagaaagatagctgcgaatgaacataaccaattaggtgacacaactacacttgcagatccaagtgttgttaaaagtttagtagataatagaaaaaatatttaaa

SEQ ID NO: 308531 - DNA, 413 bp, Unknown
  Bacterial polypeptide expressing nucleotide sequence isolated from the Sargasso Sea
aaattatagaattacaggtagggtagatgatgttgttattgtttcaggtcataatttgggaacagcaccaattgaggatgtaataaacatgcatgacaatgtggtggaaagcgctcttgttggatatccacatgatataaaaggaaatgcactttatgcttatgtaatattaaaagatgattcaaaaaaagatgatattaaagttgaaataaatcaattgatatcaaagacaattggaccgattgccaaacctgaaaaaatacagttagtccctggtttaccaaagacacgaagtggtaaaattatgagaagaatattgagaaaaattgcctctggtgaaaaagataattttggagatatttcaacattattaaaccctgaaatagtagaacaaatcgttgaaggctcttgat

SEQ ID NO: 308532 - DNA, 520 bp, Unknown
  Bacterial polypeptide expressing nucleotide sequence isolated from the Sargasso Sea
agagactcatatctttcaaaatacccgggctactaccttacaggagatggaggactaatcgataaagatggttatgtatatgtaatggggcgagtggatgatgtaattaatgtagctggacaccgtttgtcaactggacaaatggaggaactaattgcatcacatcctgcagttgcagaatgtgctgttgtaggtattgacgatgagctcagagggcaaattcctgttggttttgcagtacttaaagacggtataaatattagtcaggatcaattggagcaagaaatggtaagcatcatccgcaaagaaataggagcagttgcctattttagacagtccgttatagttagtcggcttcccaaaacgcgatcaggtaaaattcttagaaaaaccatacgtcaattggctaaaggcgaagatgttcctgctccaccgactattgacgacccagcaattcttaaagaaatttgtcaagtaatggaatcctgtggtgtagggagttttgcatcaaaacaatgac

SEQ ID NO: 308533 - DNA, 318 bp, Unknown
  Bacterial polypeptide expressing nucleotide sequence isolated from the Sargasso Sea
atgcgttaaaacatcccgatgtgaccagtgttgagaaagtcattgtgtttcaacgcactggcggcaagattgactgggtagaaggtcgcgatgtgtggtggcattcactggttgaaaccgcatccgaacattgcgctgtcgaagaaatgggcgcagaagatccgctgttcttactctatacctcaggttcaacgggtaatccaaaaggcgtatctttccagatacgccttttggattactctatacctcaggttcaacgggtaatccaaaaggcgtattgcacactactggtggttatatggtgtatgcctccatgac

SEQ ID NO: 308534 - DNA, 97 bp, Unknown
  Bacterial polypeptide expressing nucleotide sequence isolated from the Sargasso Sea
atgacccacgagtatgtgttcgattacaaacccggtgagatttactggtgtactgctgatgtgggttggattactggtcactcctatataggtatat

SEQ ID NO: 308535 - DNA, 277 bp, Unknown
  Bacterial polypeptide expressing nucleotide sequence isolated from the Sargasso Sea
gggttatattgttatgtaactttaaatgctggagaaaaagtaagtggagatcttgaaagagagctaaaactttgggttagaaaacaaataggtccaattgcaacaccagactttattcaattttcaccaggactgccaaaaacaaggtcgggtaagattatgagaagaattcttcgaaaaattgcagcaaatgaacacgaacaattaggtgatactactactttggcagatccaagtgttgttgaaagtttagttaataatagaaaaaatatttaaa

SEQ ID NO: 308536 - DNA, 172 bp, Unknown
  Bacterial polypeptide expressing nucleotide sequence isolated from the Sargasso Sea
ccagatttaatccaaaatgcgcctggtcttccaaaaacaagatctggaaaaataatgagaagaattttaagaaaaattgctgaaggcgatctatcaaatcttggagataccacaacccttgcagacccatcggttgttaaatctttaattagcaataaaataagtctatgaa

SEQ ID NO: 308537 - DNA, 235 bp, Unknown
  Bacterial polypeptide expressing nucleotide sequence isolated from the Sargasso Sea
atcccgatgcgttttggtcaagcatggtttgcgagtagactggataaaacccttcactaaaatcaagaatgtatcatacgaacacccgaatgtttcaataaagtggtttgaggacggtgagctaaatgtttcggctaattgtattgatcgacatctcaaaagtcgcgctgagcaaacagctattatatgggaaggggacaacccctcagagagcaagtatgtaacctacaacgaa

SEQ ID NO: 308538 - DNA, 778 bp, Unknown
  Bacterial polypeptide expressing nucleotide sequence isolated from the Sargasso Sea
catgcctaaaaaaaagaaaaaaaaatccaaagtaaaaaaaaaatcttctaaaaaagttaataagaaaactaaaacaaaaaaggtttcaaaaaaaaagaaaagtaaaaaagagaatggttcttctccacctgaagtagtcataaaaactaaaccagagtgggtaaaagcaagtttggcaaataaaagtaaataccaacaaaaatactctcaatctataaaaagtaatgatgatttttggaggaaagagggaaaaagaattacttggataaaaccctataaaaaaatcaaagatgttaagtacagtactaaagaagtaaaaattaaatggtatgaagatggaactttaaatgcatcagctaactgtattgatagacatttaaaagataaaaaagataaaactgcaattatttgggttggcgatgatccaaaagatagtcaaaaaataacttacaaacaattacaccaaaaagtttcaaaggctgcaaatggtttaaaaaaacttggaattaaaaaaggagatcgagttacaatttatttgaccatgatcccagaacttgcaattttaatgctagcatgtgtgagaattggagcagtgcattcaataatatttggtggtttttcggcagaatcgatttctggtagggttaatgattgtgaatctgaatatatcatcactgctgacgaaggtgttagaggtggaaaaacaatcccgttaaaatatacaactgatgaagctctaacaagttgtccaaatgttaaaaaatgtattgttgttaaa

SEQ ID NO: 308539 - DNA, 373 bp, Unknown
  Bacterial polypeptide expressing nucleotide sequence isolated from the Sargasso Sea
cgagtggttcggggaggggaagctcaacgtgtcgtacaactgcgtggaccggcacgtcctcgcgggccacggcgaccgcaccgctctcatctgggagggcgacgacagccgcgagtccaggcacatctcctacaaaacgctccaggaggaggtgagcaagctggccaacgttctgaagcacgacctcggcgttcaaaagggcgaccgcgtgtccatttgcctgcccatgatccccgaaacggtattctccatgctggcatgcgcccgcatcggcgccgtgcactcggtgatcttcggggggttcagcgccgacgccgtgagcggtcgcgtggtggactgccaatccaaagtcgtcataacggcggacgggtaa

SEQ ID NO: 308540 - DNA, 504 bp, Unknown
  Bacterial polypeptide expressing nucleotide sequence isolated from the Sargasso Sea
attgagatcaaaaaaagttgaattaactgaagaaacaaaagaagtaatttataaagtaaaaactgattgggttaaaaaagcaattgttaacaaatctgaatatgaaaaaaaatataaacaatctttgaaagataatgacggattttggaaaaaagaaggtaaaagaatctcatggatgaaaccttacacaaagataaaagatgtaaaatacagcaaatcagatgttcacataaaatggtattatgatggaacattaaatgcatcagcaaattgtatagatagacatttaaaaagaaataaagataaaactgcgataatttgggttggggacgatccaaaagtacaaaaaaaaatatcttataaacaattacatcaagaggtttcaaaggtagcaaatggtttaaaagaattaggtgtcaagaaaggagatagagttactatttatttaacaatgattccagaattagcatacacaatgttggcatgtgcaagaataggagcgat

SEQ ID NO: 308541 - DNA, 353 bp, Unknown
  Bacterial polypeptide expressing nucleotide sequence isolated from the Sargasso Sea
tatgaacgatatttataaaattaaagatgaatggcttaaaaatgcaaagattagcaaagcacagtatgaaaagatgtataaagagtcagtttctaataatgaaaatttttggtcagaacatggcaaaagaatagattggtttaagccatataccaaaattaaagatgttttatatagtaagaatgaggtaaaaattaaatggtactttgatggaacaactaacgtatcttataattgtgtagatagacatgctaaaaacacaccagataaaactgcaataatttgggaaggtgataacccaacaaaagtaaaaaaaataagttacaaagaacttcaatctaaagtttgtaaaa

SEQ ID NO: 308542 - DNA, 242 bp, Unknown
  Bacterial polypeptide expressing nucleotide sequence isolated from the Sargasso Sea
tgagcccgatgatgagctgaccaaagaaatccgtgcctgggtacgtacagaactgagcccaattgcaacaccggatatgatccaatggtctcgcggtctgccgaaaacccgttcaggtaagattatgcgtcgtatcctgcgtaagattgcagccaatgagcatgagcaattaggcgacacgtcaacgttggcggatccgtcggttgttgatacactcatagaggagcgtcttaacaagtaaa

SEQ ID NO: 308543 - DNA, 652 bp, Unknown
  Bacterial polypeptide expressing nucleotide sequence isolated from the Sargasso Sea
caaccgaaactggggcgcaattatgtgcgcaaattatgcaacaacaaatattagaccaggatcaatgggaaaaccttttccaggtgtaactatggggattttagacgaccaatataatgaattaggtgctggagaaagtggaatacttgctgtaagaccaggctggccttctcaaatgtttgcttattggcagcaagatgaaatgtataattctcgatttaaaaaaggatggtatattactggtgatcaggcttctattgatgaggatgggtatttttggttccaaggaagagcagatgatgttattaatacagcaggtcatctagtaggtccatttgaagtggaaagtgcactaattgaacacaaagctgtggcagaagccggagtcataggtaaacccgacccaatagctatggaagtagtaaaagcctttgttaccctaaatcctgattatgaagctactgatcaattgagacgagagttaataggatttgctcgagacaaactatctgctggagtagcaccacgcgaaattgactttatcgatgttatgcctaaaacaagatctggtaaaattatgcgtagacttctaaaagctcgtgaattaggactacccgagggagacacttcaactttagaagacgacggatag

SEQ ID NO: 308544 - DNA, 182 bp, Unknown
  Bacterial polypeptide expressing nucleotide sequence isolated from the Sargasso Sea
aatcgcaaaacctgatatcattcaatgggcgccaggtctgcctaaaacgagatctgggaaaatcatgcggcgcatactcagaaaagtcgccgccaacgaaatggatgccctaggagacattagcaccctggccgatccttccgtcgtcgacgatcttataaaaggcagaaatagcaaatagt

SEQ ID NO: 308545 - DNA, 466 bp, Unknown
  Bacterial polypeptide expressing nucleotide sequence isolated from the Sargasso Sea
tatgtcactagataagaaaaattcaatcaataacatccttgaagaaaggagaattttttctccttctaaagaatttgcagaaaaatcaaatattagatccgaaaaagaattacttagtctaaaaaaacaatcattagataatccaattcgattttgggattctttcgctagatcagaaatagattggtttgagccatttcaaactgtattagatagcgataatgctcccttttttaagtggtttaaagaagggaaactcaatattacacataattgcttagatagacatattaagagaggacttggagggaaaactgcactgatatgggaaggtgaaccaggagatagcaaaaaatatacatatgaagaacttctaaaagaggtatgcaaagctgctaatgcattaaaagcaattggagtaaaaaaaggagatttggtttgtatttatatgcccatgattcctgaa

SEQ ID NO: 308546 - DNA, 289 bp, Unknown
  Bacterial polypeptide expressing nucleotide sequence isolated from the Sargasso Sea
cattaaaggtcaagggatttatgcttatgtcactcttatggttgatgaaaatttttcagaaaatcttaaaaatgaattaataaattttgtttcaaaagaaattgggccaattgctaaaccagatttacttcaaaatgctccttcacttccaaaaactagatcaggcaaaataatgcgaagaatcttaagaaaaattgctgaaggtgattttgacaaccttggagatacctcaactttagcagaacccgctgtggtaaatgacttaatgctaaataaacaaagcttatga

SEQ ID NO: 308547 - DNA, 697 bp, Unknown
  Bacterial polypeptide expressing nucleotide sequence isolated from the Sargasso Sea
actttcaaaaaagtaaaaagaaaaactaaagttagaaaaaaacgttctaaaaaattaaaaaaaaagattaaaaaaagaaaagatgatggaaattcaactcctgatattattattaagactaaacctgaatgggcaaaacaaagtttagcaaacaaaactcaatatcaaaaaaaatataatgactccataaaaaacaatagtggattttggaaaaaagaaggaaaaagaattacttggattaaacgttacaaaaaaattaaagatgtaaaatacagtagtaaagatgttaaaattaaatggttctatgatggtactttaaatgcctctgcaaattgcattgatagacatttaaaagataaaaaagacaaaacagcaataatttgggttggagatgatccaaaagataatcaaaaaataacttataaacaactttatcaaaaagtttctaaagcagcaaatgggttgaaaaaattaggaattcaaaaaggagatagagttacaatttatcttaccatgattcctgaattagcaattttaatgcttgcgtgtgcaagaatcggtgctgttcattcaattatttttggtggtttttcagcagattctatttcgggaagagtaaacgattgtgaatcagagtatattattacagcagatgaaggtgttagaggtggtaaaactattccactaaaatctacaa

SEQ ID NO: 308548 - DNA, 250 bp, Unknown
  Bacterial polypeptide expressing nucleotide sequence isolated from the Sargasso Sea
gcaggcgaagaaagttcgttagatttagaaagagatctaaaactatgggttagaaaacaaataggtcctatagctacgcctgacttaattcaattttcaccaggacttcctaaaacaagatctggaaaaattatgagaagaatattaagaaaaattgctgcgaataaacacgaccagttaggcgacacaacaacattagcagatccaagtgtagtgaaaagtttagtaaataatagaaaaaatgtttaaa

SEQ ID NO: 308549 - DNA, 539 bp, Unknown
  Bacterial polypeptide expressing nucleotide sequence isolated from the Sargasso Sea
aatgcggaaagacgagctgagtgaatttgagaatgcttatactgaatcaatcaaagagcctgaaaaattctggtttacagcagctcaagaaattgattggttcaaaacaccgacaaaaacactagatattagtaccgctccgcacgggcactggttcgtagacggggagctgaatacttgttttaacgcactagatcgacatataaacgctgggcggggggaaaatgccgctctaatatacgatagccccgtaacttcaaccctaaaaacgttttcttttagagagttgcgagatcaagtcgccttatgtgcgggtggtctgactgaactgggagttggtaggggcgacagggtcatcatctacatgccaatgattcctgagacaattattgcaatgcttgcttgtgcgcgtattggtgcaattcatggcgttgtatttggcggatttgcttctgctgaactcgcagttcgaatagatgacgctaggccaaaagctatagtatcggcgtcatgcggtatcgaggttaataaagttatcc

SEQ ID NO: 308550 - DNA, 709 bp, Unknown
  Bacterial polypeptide expressing nucleotide sequence isolated from the Sargasso Sea
tatggctaaaagatcaaaaaaaaaaagaagtaaaatatcaaagagaaaaaaaataagtaataagaacaaaaaacaaaagttatctgaaaaaaatcaagatttaatagtaaaaacaaaatctgattggataaaaaaagccataattaataaaaaacaatacgaaaaaaaatatagttactctttaaaaaataacgatgatttttggaaaaaagaaggaaaacgtattaactggattaaaccttataaaaaaataaaaaatataaaatatagtaagtctgaagttagtattaaatggtattatgatggtacccttaacgcttctgcaaattgtattgatagacatttaaaaaagaataaagataaaacagctattatttgggttggagatgatccaaaagttcaaaaaaaaattacttacaaacagcttcatcacgaagtctctaaaacagcaaatgctttaaaagaattaggtattaaaaaaggtgacagagttacaatttacctaactatgatacctgagttagcgtatacaatgctagcctgtgcaagaattggtgcaatacactctattatatttggcggtttttctcctgacagtatttcaggcagaataaatgactgtaaatcagattatgtagtaacagcagatgaaggattaagaggaggaaaaactattccattaaaatctatcactgatgaagcattagtt

SEQ ID NO: 308551 - DNA, 874 bp, Unknown
  Bacterial polypeptide expressing nucleotide sequence isolated from the Sargasso Sea
tatgccaaaaaaaaagaaatcaaaaaagaaaaaagctaaaaaggtaaagaaaaaaaaatcttctaaaaaaagaagaaaaataaaaagagtttcaaaaacaaaaagaacttctgtcaaaagatctaaaaagaaaaatattgataaaatatcatctaatgagcaaattattaaaactaaacctgaatgggtgaaaagaagtttagcgaataaagctcagtatcaaaaaaaatattctgattctattaaaaataataattcattttggaaaaaggaaggaaagagaattacttggataaaaccttacaaaaaaattaaagatgttaaatatagtaaagacgaagttagaattaaatggtttgaagatggcactttaaatgcatctgctaattgcattgatcgtcatttaaaagataaaaaagacaaaactgcaattatttgggtaggagatgatcctaaagacactcaaaaaatttcttataaacaattacatcaaaaggtttcaaaggctgcaaatggtcttaaaaaacttggaatacaaaaaggtgaccgtgttactatttatctgacgatgatacctgaattagcgatcttgatgttggcttgtgcaaggataggtgccgtacactctataatttttggtggtttctctgcagaatcaatttcaggaagagttaatgattgtaagtcagaatatataattacagctgatgagggagtgagaggaggcaaaactattccattaaaagcaacaactgatgaagctttatctaattgtccagatgttaaaaaatgtattgtagtaaagagaactggtaattacgtgtactgggatcaaggtagagatgtttggtatcacgacttaattaaagatgtt

SEQ ID NO: 308552 - DNA, 745 bp, Unknown
  Bacterial polypeptide expressing nucleotide sequence isolated from the Sargasso Sea
ttgaattctgaaaaatttgatattggcttaggaaataatgattctactataagagactctggaaaaaaagactatatttcattttggaatgaatgtgcaaaatcattgtcttggtttgaaccttgggctgaaaccttacaatggaatcctccttttgcacgatggtttacaggtggaaaaattaatgccgcatataatgccctagacatacaccaagattctaaatctaaaaaatctgcaattttgtgggaaggtgaagatggaactgataggaaaattacataccatgaaatgtttgttcaggttcaaaaactggctaatgttctaaaatctctaggagtcaaaaaaggtgatcgagtgacaatttatcttccgatgattcctgaacttccaatttctatgcttgcatgtgcacgaataggtgctgttcacactgttgtattttctggatttagcgccacttcgctttcagatagagtagaggactcacaatctaaagtaatcatcacagctgatggcggatatagaaaagggaaaataattaatcttaaacaaattgttgatgaatctgcgtcatcagtccaatttgtaaaaaatgtcattgtctatcaacgaacaggtcaggaaattcagatgaatgaaaaagatctactttggtctgatgtaatggattctgcctctcctgaatgtgatgctgaagttctagatagtactgattcattatacattttgtatacatctggca

SEQ ID NO: 308553 - DNA, 298 bp, Unknown
  Bacterial polypeptide expressing nucleotide sequence isolated from the Sargasso Sea
tttggttggctatcctcatgatataaaaggaaatgcactctatgcttatgtaattttaaaagatgaatctacaagagataatattaaaacagaaataaatcagttaattgcaaaaaccatcgggccaatagccaaacccgaaaaaattcaattagtgcctggtctacctaaaacaagaagtggtaaaattatgagaaggattttaagaaaaattgcctctggagaaaaaagcaaatttggagacatctctacattacttaacccagaaattgtcaatgaaatagttaaaggatcttaa

SEQ ID NO: 308554 - DNA, 884 bp, Unknown
  Bacterial polypeptide expressing nucleotide sequence isolated from the Sargasso Sea
gataccagaagctattatagcaatgttagcagtggcaagattaggagctgtgcattcggtggtttttggtggatttgcttctaaagaattggcagtaagaatcgatgattgcaaacctaaattaattatttctgcttcatgtggttttgaacctaatagagtagtagaatataagcctttattagacgaagcgttaaagattgctgaacacaaagttggaaaatgtataatttatcaaagaaaagactttaatgctgacttaaatcctgaaattgatatagaatggtttgaatttttaaatgatgcagttgatgctgaatgcgttatggtctctgggaaagacccactttatattctttacacatctggaacaactggtcagccaaaaggtgttgtaagagataatggtggtcatgctgtctcactgaaatggtcaatgaaaaatatttacgggttagacccaggtgaggtgttttgggctggatcagatataggttgggtagttggtcattcttacattgtttacgctccattatttcatggttgttctacaattttatatgaaggcaaacctgtgggcacaccggatgcaggggctttttggcgagtaatagaagattataatgtgaaggttttctttacagctcctacagctttaagagcagtaaaaaaagatgatccaaaaggagattttataaatagaagcaaattatcaaatttaaaagcactctttttggcaggtgaacgagctgatcctgatacggtcacatggttagagcagcaacttggtattccagtaattgatcattggtggcaaactgaaacggggtggccaattgcatcaaacccaattggaattgagaacttacctctaaaaaagggat

SEQ ID NO: 308555 - DNA, 550 bp, Unknown
  Bacterial polypeptide expressing nucleotide sequence isolated from the Sargasso Sea
atgccaaaaaaaaaatctaaaaaaagaaaacaaaaaagaaaacaaaaaagaaaaaagaaaaaaattttagaaaaaaaaactaatgagctaatatataaaactaaaagtgactgggtaaaaaaagcattaataaataaatctggttatgaaaagaaatattctcaatcattgaaagataatgatagcttttggagaaaagaaggaaaaagaattacatggattaaaccatatacaaaaatcaaagatgtaaaatatagtaaatctgaagtgaacataaaatggttttatgatggtacattaaatgcttctgctaattgtatagataggcatttaaaaaaaaataaagataaaacagctataatttgggttggtgatgatcctaaggtacaaaaaaaaataagctataaacaattacatcaagaagtatcaaaaactgcaaatggattgagagagattggagttaaaaaaggtgatagagttacaatatatttaactatgatacctgagttggcatatacaatgctagcttgtgcaagaattggagctatac

SEQ ID NO: 308556 - DNA, 877 bp, Unknown
  Bacterial polypeptide expressing nucleotide sequence isolated from the Sargasso Sea
tttgaattgggcagaggtaatgtctaatgagaaaggaaaaaaaagtaaatgcgcttcattagactcagaagatcctctttatattttgtacacatctggtacaacaggaatacctaaaggcattgtcagaacaaatggtggtcatgccgttgctttatataatagcatgaaaatgacctatgatattaaaaaggatgatgttttttgggctgcgtctgatgtaggttgggtagttggacactcatatatagtttatgctccattattgttcggttgtactactgttttatatgaaggaaaaccaataggaactccagatgctggacaattttggagagtgatttcagaacataatgtttctactatgttcacagcacctactgcaattcgtgcaataaaaaaaatagatccacagggaaaagaaataaaaaaatataaatttaataattttaaatatttatttttagctggagaaagagctgatccagaaacaataaaatggtcaactgatcaccttaaagttccagtaattgatcattggtggcaaacagaaactggttggtctatagcgggaaattttccagaatttgggatttttgaaattaaatatggttctactggtaaagcagctccaggatatcaagttgaagtattagatgagaaaggaaaaaatttagaaaaagaaaaaatgggtaatttggttataaaattacctcttccacctgggtgcagttcaagcatatggaatgatcctgaaagattctttaaagcttatctagaaaaatacaacggttactataatacttctgatgctggagtaattgataaagatggatatatatcagtaatgtccagaactgatgatattataaattgt

SEQ ID NO: 308557 - DNA, 656 bp, Unknown
  Bacterial polypeptide expressing nucleotide sequence isolated from the Sargasso Sea
ttataaagtaaaaggtgattggataaaaaaagctaccgttaacaaatcagaatatgagaaaaaatataaacaatcattaaaggataacgatagtttttggaaaaaagaaggtaagagaataacttggataaagccttattcaaaaattaaagatgttaaatacagcaagtctgatgttcacataaaatggtattatgacggaactttaaacgcttcagcaaattgtatagatagacatttaaaaagaaacaaagataagactgcaataatttgggtaggtgatgatcctaaggttcaaaaaaagatttcttataaacaattacaccaagaagtttcaaaagctgcaaatggtttaaaagaattgggagttaaaaagggtgatagggtaactatatatttaacaatgatacctgagttagcttatactatgctagcttgtgcaaggataggtgcaattcattctattatttttggtggcttttctcccgatagtatttcaggaagaattaacgattgtaaatccgattatgtaattactgcagatgaggggataagaggaggtaaaactattcatttaaaatcaataactgatgaagctttggttgattgccctaaatgtaaaaaaatgtattgttgtaaaaagaactggaaataga

SEQ ID NO: 308558 - DNA, 443 bp, Unknown
  Bacterial polypeptide expressing nucleotide sequence isolated from the Sargasso Sea
atgttatttgaaaaaatatccaggttactacttaactggtgatgggggtttaattgacaaagatggatatttatttgttatgggacgtgttgacgatgttattaatgtcgcgggacatagactttctactggtcagatggaagaaattattgcctcacatccggcagttgcagaatgtgcagtcgtaggaatagatgacgaaatccgaggacaagtaccagtcgggttttcagttatcaaagatggtttttcaataaatcaaaatgaattagagaaagaaattataggattaattcgtcataaaattggggctatagcttgttttaaacggtctgttatagtaaatagacttccaaagactagatctggtaaaatattaagaaaaaacattcgacaaattgcttcaaaagaagaattttcaattcctcacaacaatagatgat

SEQ ID NO: 308559 - DNA, 229 bp, Unknown
  Bacterial polypeptide expressing nucleotide sequence isolated from the Sargasso Sea
gatcttgaaagagaattgaaactttgggtaagaaaacagataggacctttggcaaccccagactttattcaatttgctcctggtcttccaaaaactaggtctggaaaaataatgagaagaatattaaggaagattgctgctaatgagtatgatcaattaggagatacaactactttagcagatccaagcgtcgtaaaaagtttagttgagaatagaaaaaataattaga

SEQ ID NO: 308560 - DNA, 144 bp, Unknown
  Bacterial polypeptide expressing nucleotide sequence isolated from the Sargasso Sea
tttatttattctttacacctctggttccactggtaaacccaaaggggtattacatactactggtggttatattatgtattctgctataacacacaaatttatatttgattatcaagatggtgaggtttactggtgcacagctga

SEQ ID NO: 308561 - DNA, 286 bp, Unknown
  Bacterial polypeptide expressing nucleotide sequence isolated from the Sargasso Sea
aaagggtaatggtctttattgttatgttaccttaaatgctggagaaaaaagtactcttgatttagagagagatttaaagttatgggtaagaaaacaaattggtccaatagcaacacctgatttaattcaatttgctcctggacttccaaaaacaagatctggtaaaatcatgagaagaattttaaggaaaatagctgctaatgaacatggtcaactgggagatacaacgaccttggcagatccttctgtagtcgatagcttagtagacaatagaaaaaatatttaa

SEQ ID NO: 308562 - DNA, 340 bp, Unknown
  Bacterial polypeptide expressing nucleotide sequence isolated from the Sargasso Sea
tgtattacataaaaatgtttctgaagcggctgtcgttttttttcctcatgacattaaagggcaaggtatttatgcatatgtaactcttatgaccgggcaagattacaatgaaaatttaaaaaaagagcttattgcgtgggttaaatccgtaatcggcccaatagctgcacctgatgtaatacaatgggcgcccaaccttcccaaaacaaggtcaggaaaaataatgagaagaattctcagaaaggttgcctgcaaagaagaagagtctataggtgatacttcaacacttaatgatccaagtgttgtaaatgagttagttgataatagaggaaaaaactaa

SEQ ID NO: 308563 - DNA, 730 bp, Unknown
  Bacterial polypeptide expressing nucleotide sequence isolated from the Sargasso Sea
ttggtttataaaactaaaaaagactggatcagtaaagcaacggtaaataaatctcaatacgaaaaaaaatataaaacatcaatttcagataatgaaaatttttggaagaaagaaggtaaaagaattaattggatcaaaccttatacaaaaataaaagatgtaaaatatagtagctcagatgtaaaaataaaatggttttatgatggaactttaaatgcatctgctaattgcatcgatagacatttaaaaaaaaacaaagataaaaccgcaataatatgggttggggatgacccaaaagtacaaaaaaaaatttcatataaagaattacataaagaagtatcaaaagcagctaatggattaaaaaaaataggagttcaaaaaggggatagagttacaatttatttaacaatgatacctgaacttgcattcacaatgctagcttgcgctaggattggagcaattcattcaataatatttggaggattttcaccagatagtatttctggaagaattaacgattgtaattctgattatgtgattactgcagatgaagggataagaggaggaaaaacaatacatctgaaatctataatggatgaagctttggtggaatgcccaaaagtgaaaaaatgtgtagtagtaaaaagaactggaaatagaataaattgggatcaaagcagagatgtttggtaccatgaaatgatccaaaatgtttctgctaaatgtgatc

SEQ ID NO: 308564 - DNA, 104 bp, Unknown
  Bacterial polypeptide expressing nucleotide sequence isolated from the Sargasso Sea
aactatgccaaaaacaagaagtggcaaaattatgagaagattacttaaggctagggaattaggtcttccagaaggagacacttcaacacttgaggatgactaaa

SEQ ID NO: 308565 - DNA, 317 bp, Unknown
  Bacterial polypeptide expressing nucleotide sequence isolated from the Sargasso Sea
agctgcagttgtgggatatgaacatgaaataaaaggtcaaggcatatattgttatgtaactctgatgttgggagaagagcttagtgaagaccttaagaatgatctaattcaattagttgctaaagaaattggtgccatagctaaaccagatataattcaatgggctcctggattaccaaagacaagatcaggtaaaatcatgagaagaatacttaggaaaatagcatccaatgaagttaacgacctaggtgatactactacactagccgatccgtcggttgtggaagagttaatacgtaatagagagaataaataat

SEQ ID NO: 308566 - DNA, 296 bp, Unknown
  Bacterial polypeptide expressing nucleotide sequence isolated from the Sargasso Sea
tgatataaaaggatggggaatttatgcatatatcacattaaagactgattttaatgagtctaatgaattaaaaaaagaattaatagatgaagtaagaaaagtagttggcccaatagcctcgcctgatttaatacaatgggcgccaggtttaccaaaaacaaggtcaggtaaaataatgagaagaatacttagaaaaattgctgctgatgaaagcgatcaattaggagatgtttctactttagctgatccagcagtagttcaagatttagttaatgctaggttaaataaaaaataat

SEQ ID NO: 308567 - DNA, 433 bp, Unknown
  Bacterial polypeptide expressing nucleotide sequence isolated from the Sargasso Sea
atgacaaataaagatttatataaaccagcattagacattgttaaaaactcccatgccaatgaaacaatttataaaaaaatgtacagagaatctattaattctccagaagaattttggaaagaacatggtcagcggattgattggataaagccttatacaaaagttaaagatgtatcatatgagaaagaaaatcttcatatcaaatggtatgaagacgggactcttaatgcaagttttaattgcttagatagacaccttaagacgaatggaaaaaagactgcaattatttgggaaggtgataatccaaacgagtctaaacatataagttatagtgacctctataaagatgtttgtaaattttctaatgtcttaaaagatgctggcgccaaaaaaggagaccgtataactatttatatgccccatgatccctgaa

SEQ ID NO: 308568 - DNA, 349 bp, Unknown
  Bacterial polypeptide expressing nucleotide sequence isolated from the Sargasso Sea
aatggaaatagaatctgctttggtaagtcataaatcagttgcagagtctgcagtcgttggcaaaaaagatgatttaaaaggtgaagttatagtagcttttgtatctctagagaaagacgtgaacggttcctcagaattagtagagaatttaaagaaacatgttgttaatgaaattggagttatcgcaaagcccgaaaaaataataatttctgactctcttcccaaaacacgtagtggaaaaattatgaggcgaattttaagatctttggctgctggagaaaaaattagtggtgatataagcactctcgaagatagttctgttttggaaaagctgaaagaattatcttaa

SEQ ID NO: 308569 - DNA, 247 bp, Unknown
  Bacterial polypeptide expressing nucleotide sequence isolated from the Sargasso Sea
ggagaagagccaaatggagagcttgagagagaattaaaactttgggtaagaaagcagattggtcctcttgcaactccagatataattcatttttcacctggattaccaaaaacaagatctggtaaaattatgagaagaattctaagaaaaatagcagcaaatgaacatgaacaacttggagatacaacaactttagctgatccaagtgttgttaaaagtctggttgaaaatagaaaaaatatttaaa

SEQ ID NO: 308570 - DNA, 769 bp, Unknown
  Bacterial polypeptide expressing nucleotide sequence isolated from the Sargasso Sea
catgcctaagaaaagaaaaaaaaaaaagatagcttcaaaaaaaactaaagagactatttataagacgcaaaaagactggataagcaaagcaattgttaataagtctcaatatttaaaaaaatataatgagtcgattaagaataatgatgggttttggaaaaaagaaggaaaaagaataaattggattaaaccttataaaaaaattaaagacgtaaagtacagtaaagatgatgttcatattaaatggttttatgatggtacattgaacgcatcagcaaattgtatagatagacatttaaaaaagaatgctgataaaactgcaattatctgggttggtgatgatccgaaagttcaaaaaaaaattagctataaagaattacataaggaagtttctaaagctgcgaatggtttaaaaaatttaggagttcaaaaaggagatagagtaacaatttatctaactatgattcctgagctggcatatactatgcttgcatgtgctagaataggtgcaattcactcgataatatttggtggtttttctccagatagtatttcaggcagaattaatgattgtgagtcagattatgtcataactgcagatgaaggtgtaagaggtggtaaaacgattccattgaaatccataacagatgaagccttagagaactgtcctaatgttaaaaaatgtattgtagtaaaaagaactggaactaaaaaaatagattggtttaatgacagagatgtttggtatcatcacatgactaagaaagtc

SEQ ID NO: 308571 - DNA, 589 bp, Unknown
  Bacterial polypeptide expressing nucleotide sequence isolated from the Sargasso Sea
atggcaaattatgagcagatttatcgagaggccttgagaaataatgaagcgttttggctcgatgctgcgtcggccattgattggacgaaggaaccaaaaaccgcgttagataagaaaaatccccctctttatcgttggtttcctgacggcgaaatgaacacttgtttcaatgcggtggatcgacatgtactcgctggacgtggaacgcaaaacgctattatttatgactcgcccattactggacaaaaatcttcaacaacctatgcggaattaaaaaaccagacggagagatttgcaggcatgctggctagcctcggcgtcactcgaggggacagggttatcatatacatgccaatgattcctgaagcgatcgtagctatgcttggttgtgcacgcattggggcattgcattctgtggtgttcggtggttttgccgcggcagaattggcaaagcggtttgatgattcaaccccaaaagttgtgattagcgcttcatgtgggcatgagccgggaagaattgttgaatacaagccgcttcttgatgccgcaattgagtttgcaaggcacaaaccaactaattgtgttatag

SEQ ID NO: 308572 - DNA, 735 bp, Unknown
  Bacterial polypeptide expressing nucleotide sequence isolated from the Sargasso Sea
aatgcaaagaataaaaaccttatctgaatatttcaaaaaatacgaattaagcgaaaaagatcctgaaaaattttggtctcaaattgctgattcattcttatggaaaaaaaagtgggacaatgtccttgagtcggattttgaaaatgcagattttaagtggtttaaaaatgctcaattaaatattactgaaaatatttttgagagaaacctttctgaaagaggggacaagactgcaatcatttgggagccaaatgatcctaaagagtcaccgatttatttatcatacaaagaactttacgagcaaacatgtactttttctaatgctcttagaagtaaaggaatcaaaaaaggagacagagtaattatctacatgccaatggttccagaggcagctattgccatgcttgcttgtgcaagagtgggtgcagttcactcagttgtttttgcaggcttttcagctgcatctttagctgatcgaataaatgactgtgaagcaaaaatggtattaacatctgatggaaactttagaggtaataagacaattcctgttaaagatgtagttgatgaagctcttgaaaaatgttcatcaataaaaagtgttattgttttagaaaggacaaaacaaaatattaatatggaggacggaagagacttttggtggcatgaatgtattgaggatgagcctaacacatgtgattctgaagttatggattcagaggacttattatttattct

SEQ ID NO: 308573 - DNA, 639 bp, Unknown
  Bacterial polypeptide expressing nucleotide sequence isolated from the Sargasso Sea
attaaaaaataatgcaaatgcaacatctgcatggttcaaagacgctgagaaagatagattagagtactggaagcaacaggcacttaatagaataacttggtttaaagaacctaccgaagtattagatgattcaaatgcaccattttttaagtggtttagtgatggggagctaaacctttcttacaattgccttgatagacatttagaaacagatggagatagagtcgcatattactgggaaggtgaacctggagatactcaagagattacctatagagatctttatgaaagagtatgcaagttatcaaatgcacttaaaagtttaggagttcaaaaaggagataggatagctatttatcttggcatgaccccggagatagtagtttcgatgcttgcctgtgcaagaattggagcagtgcactctgtagtatttggtggattttcagctgaggcactagctgatcgtataaatgatgctgaagcaaaggtagttataacagctgatggcgcatggagaagaggagaaattgttcctctaaaggagaacgtcgacaactcattagaacttacagaatttatagaaagtgtggttgtagttaaaagaaccgaacaagaagtaaatatgaaagatggaagaga

SEQ ID NO: 308574 - DNA, 505 bp, Unknown
  Bacterial polypeptide expressing nucleotide sequence isolated from the Sargasso Sea
aatgagagaatttaaattatctaatccccttttgtctcaagatcagtacgaggaaatgtatgctgaatcattcaataataaagaacaattctggtctaagattgcaagatcacaactctcttggtttaaagatttcactaaaattaaaaatactaattacgatggagatgtatctatcaagtggtttgaggatggagaattgaatgtttgttataactgcgtggatagatatgcagaaacacgacccgaagaaatagcaattatttgggagggtgatgagaccagtcaaaacaaaacttacacttacaaagatttaaaatcagaaataagtaaattttctaatgttttaaaaaaacttggcgtccaaaaaggtgatgttgtcacaatttatttaactatgatacctgaagttgcatttgctatgttggcttgtgcaagaataggggcaatacattctgttatatttggaggcttcgctccggagtcattgcatgacgcattatag

SEQ ID NO: 308575 - DNA, 250 bp, Unknown
  Bacterial polypeptide expressing nucleotide sequence isolated from the Sargasso Sea
tgatgaaggggtgaagaatatacaggaagaactaaaaaaagaacttcttaattgggtttgtaagataattggaccgattgctaccccagataaaatacaatgggcaccaagcttacccaaaacacgatctggaaagataatgagaagaattttgagaaaattggcttgtaatgaagaggattctattggagatataagtacactaaatgacccaaatgttgtaaatgaactaataaaaaatagagattaa

SEQ ID NO: 308576 - DNA, 190 bp, Unknown
  Bacterial polypeptide expressing nucleotide sequence isolated from the Sargasso Sea
attgggtccaatagcaactcctgacttaattcaatttgctccaggactaccaaaaacaagatctggtaaaataatgagaagaattctaagaaaaatagctgccaatgaacatggtcaattaggagatacaaccactttagctgatccctctgttgttgaaagcttggtagataataggaaaaatatctag

SEQ ID NO: 308577 - DNA, 436 bp, Unknown
  Bacterial polypeptide expressing nucleotide sequence isolated from the Sargasso Sea
atggctacgaaatatcaagaaatttatcaaagatctattgaaaaacctgagaccttttggtcggaagttgctagtgatattttttggtacaaaaaaccctcaaaaattttaaatgctaataatcctcctttctatacgtggtttcaggatggaactactaacacttgctataacgctgttgatctgcatgtagaaaatggaaaaggagataaagttgctattatttacgatagcccaataacaaaatcacaaaaaaaaataacttatactcaactaaaagatcaagtttcaatttttgcaggagcattagtaaagcaaggtataaaaaaaggagacagaattataatttatatgcccatgattccggaagctgttatagcaatgcttgcctgtggaagaatcggagcagttcattctgtagttttcggtggctttg

SEQ ID NO: 308578 - DNA, 596 bp, Unknown
  Bacterial polypeptide expressing nucleotide sequence isolated from the Sargasso Sea
catgaaatttgagcaaatttacaataaatctataactaaacctgaggaattttggcgtgaaatatcagaagatatattctggtttaaaaaaccaactaagattttaaataaaactaatcctccattctataaatggttcgaggacggaactacaaacacttgctataatgctctagatttccatattgataacggtttaggagaaaaaactgcacttatttacgatagcccaattacaggtaacaaagcaaaatttacttacaatgaattaaggtcaaaagtttctaaattcgcaggtgctttaaaaaatcaaggactacaaaaaggtgatagggctatcatctatatgccaatggtgcctgaagctgttgttgctatgttggcatgtggaagaattggggtaattcattcagttgtatttggaggatttgcttctaatgagctagcaagtcgtatagacgacagcaaagcaaaaatactaataactgcttcttgtggttttgaacctggaagaacagtagaatatagaccgcttgtggatggagcgcttaaacttgctaaacattcaattgaaaaagtcatcttctttcaaagaa

SEQ ID NO: 308579 - DNA, 781 bp, Unknown
  Bacterial polypeptide expressing nucleotide sequence isolated from the Sargasso Sea
catgccaaagaaaaaaaagaaaaaatctaaagtaagaaagaaaaggtcaaaagttagaaaaaaaacttccaaaaaaacgaaaaaaaaaattaaagcaaaaaaagaaaacggaaatatacctcctgaagttattattaaaacaaaaccagaatggataaaaagtagcttagcaaataaaagcaagtaccaacaaaaatatactcaatcaattaaaaataacgacgaattttggagaaaagaaggaaagaggattacatggataaaaccatataaaaaaattaaagatgtaaaatacagttcaaaagaggttaaaattaaatggtttgaggacggaactctaaacgcttctgcaaattgtattgatagacaccttaaagataaaaaggataaaactgcaattatttgggttggtgatgatccaaaagaaagtcaaaaaattacttacaaagaacttcataaaaaagtttctaaagcagcaaatggtcttaaaaaattaggaattaaaaaaggagatcgtgtaacaatttatttaactatgatccctgaacttgcaattttaatgctagcttgtgtaagaattggtgcagtacattcaataatttttggaggtttttcagcagaatcaatttcaggtagagttaatgattgtgagtcagaatttataattactgcagatgaaggtgtgaggggaggtaaagttattcctcttaaagatactactgatgaagctttattgaattgtccaaacgttaaaaaatgtattgtcgttaaaagaactgga

SEQ ID NO: 308580 - DNA, 649 bp, Unknown
  Bacterial polypeptide expressing nucleotide sequence isolated from the Sargasso Sea
cctgggaacatgtacaaaggctctgccgggaatagaaataggaataatagataataatggaaatgaaattttttcaaagaatgaaggaggtaatctagtaattaagaaaccatggccctctatgctcagaggtatttggggtgataaaaatagatatatagatacatattggaaaaaatataacaataaatattacgtaactggagacacggctagatatgatgaatacgggaatatatggattatgggaagatcagatgatgttgttaatatttctggacatcgtctaggaacaatggaaattgaatctgcgattgtttcgcatgaatttgtagctgaatccgcggtagtgagctataaacatgaaataaaaggcgaggcaattcatgcattcgttacgcttggagaaaaatattcaaaagatattggtcctgacgttgccgaagaaattagagaatgggttaaagataaaataggatcaattgcaaaacctgataaaatatctttttcaacatcattacctaaaacaagatctggaaagataatgaggagacttcttaggaatattgcacgtggagaagacatttctggtgacacctcaacactcgaaaatgaagatatattggatcagttaaagaaaagtttataa

SEQ ID NO: 308581 - DNA, 294 bp, Unknown
  Bacterial polypeptide expressing nucleotide sequence isolated from the Sargasso Sea
atgatattaaaggacaaggcatctattgctatgtaacgcttatggcaggtgaaccccaaagtgatgagttaaaagattctcttgttggtcttgtttctaaagagatagggccaattgcaaaacctgacataattcagtgggctcctgcattaccaaagactagatcaggtaaaattatgagaagaattcttagaaaaattgcttctaatgaaattgaagatctaggggatacaacaactttagctgaaccttctgtagttgaagatttaataaaaaatagggaaaattactaaa

SEQ ID NO: 308582 - DNA, 493 bp, Unknown
  Bacterial polypeptide expressing nucleotide sequence isolated from the Sargasso Sea
acgttacaaaaatgtttatttttcagcttatccaggttattattttcctggagatggagcatttagagatgaagatggaaattatagaattactggtagggtagatgatgttgttattgtttcaggccataatttgggaacagcaccaattgaggatgtaataaatatgcatgataatgttgtagaaagtgctcttgttggatatccacatgatataaaggggaatgcactttatgcatttgttattcttaaagatgattccaaaaaagatgatatagaggttgaaataaataaattaatatcaaaaacaattggtccgattgccaagcccgaaaaaatccaacttgttcctggacttcccaaaacacgaagtggtaagattatgagaagaattttaagaaaaattgcttctggtgaaaaagataattttggagatatttcaacattattaaaccctgaaatagtagaacaaatcgttgaagtttctcaatag

SEQ ID NO: 308583 - DNA, 817 bp, Unknown
  Bacterial polypeptide expressing nucleotide sequence isolated from the Sargasso Sea
ttgcatcaatgtaaatcaggaaggaaaaacatgagctaccagaaagaataccgcgaatccattgagaatcctgaagcattctggagccgccaggccgaattgatcagatggtatgagaaaccgaagtcgatcctctcccaggatgaaaagggtttttatcactggttcaagggaggaaaactcaacacgagttacctggcccttgatttccatgtggaaaacgggagggccgagcaggcggctttgatttatgattccccggtcactgaaaccgttcgaagctatacgtatcgtgaattgctggatgaagttgcacgttttgccggggtgttacagaaccagggggttgaaaaaggagaccgggtcatcatctacatgccgatgattcctaaagcagtggtcacaatgttggcttgtgccaggcttggagcgattcactctgtggtttttggaggcttcgccccgaatgagttggcgatccgtattgatgatgcaaaaccaaaagcactggtaacggcttcctgcgggatagaatttaccaatatcattgaatacaaacctctggttgatgaagcacttcgcatctccagtcatgctcctgaaaccgtcatcctccttcaacggtcacaagcaaaggcttcgatgcaggcagggagggacttagactggaatgatctgatgtcatctgcgaatcctgcagatccggttcttatggatgccaccgatccgctttacattctttatacttcaggtacaaccgggctgccaaagggtgtgatacgggaaaacggtggccatgccgttgccctcaaataca

SEQ ID NO: 308584 - DNA, 812 bp, Unknown
  Bacterial polypeptide expressing nucleotide sequence isolated from the Sargasso Sea
tatgccaaaaaaaaagaaaaagaaaagcaaggtaagaaaaaaaaagtctaaagttagaaaaaaaacctcaaaaaaggttaaaaaaaaatctaaagttagaaaaaaaacttccaaaaaattaaaaaaaaaaaataaagcaaaaaaagaaaacggaaatacacatcctgaagttgttattaaaacaaagccagaatgggttaaaagtagcttagcaaacaaaagtaaataccagcaaaaatattctcaatctataaagagtaatgatgaattttggagaaaagaaggaaaaagaattacatggataaaaccttataaaaaaattaaagacgtaaaatacagtacaaaagaagtaaaaattaagtggtttgaagatggtactttaaatgcttcagcaaattgtattgatagacacttaaaagataaaaaagataaaactgctattatttgggtgggtgatgatccaaaagatagtcaaaaaatttcttataaacaacttcaccaaaaagtttcgaaagcagccaatggtttaaaaaaattaggaattaaaaaaggtgaccgtgtaacaatttatttaactatgataccagagttagcaattttaatgctggcctgtgtaagaattggtgcagttcactctattatttttggtggtttttcagcagactctatttctggaagagttaatgattgcgagtctgaatacatcattactgcagatgaaggagtgcgaggtggaaaaactattccactgaaatatacagtcgatgaagctttaatgagttgtccaaatgttaagaaatgtattgttgtta

SEQ ID NO: 308585 - DNA, 835 bp, Unknown
  Bacterial polypeptide expressing nucleotide sequence isolated from the Sargasso Sea
gtctatttacagcggccacaagctaaagtaataatacaatctgaacgagattacgactggtatgagctggttaatcagtctgaacctattgctccggttgcagttgaggctactgatcctttgtatattctttatacttcaggaacaacaggacttcctaaaggagttgtaagggataacggtggacatgctgttgctttaaaatacagtatgaaagcagtctataatactgatccaggggatgtatactgggcaggttcagatgttggatgggtggttggacactcctatattgtttatgcaccgctacttcatggttgtactacaatagtttacgagggaaaaccagtacgtacgccagatgcaggagcattttggcgtgtaatatcagagtataaggtaaatacatttttcactgctcccactgcttttcgtgctgtaaaaaaagaagaccctgaggcaaaacttaaaaaatcttatgatataagttcactcaggactttgttcttggcaggagaaagacttgaccctcccacttatcattggctgaaggaaattttgaaggaagattcagatgaaggtatccctgtggttgatcactggtggcagactgaaactggttgggcgatttgctcaaatccaatgggtattgagccacatccagtaaaaaatggttctcctacagttccaatgccaggttacaatgtgcaggtgttggacgatgatgggagtaccagcaaaccaggagaaactggaaacatagtgattcatcttcctttacccccaagctgtttaccaactttgtggaatgataataaacgctttaagcaatcat

SEQ ID NO: 308586 - DNA, 807 bp, Unknown
  Bacterial polypeptide expressing nucleotide sequence isolated from the Sargasso Sea
catgggcgggcacgctgtcgccctccactggacaatgcagaacatctacgatgtgaaaccgggcgaagtctactgggccgcatcggatgtcggctggatcgtcggccattcgtacatcgtctatgccccgttgctgcacggcaatacgacggtgctttttgaagggaagccggtgggcacaccggatgccggcacattctggcgcgtgatcgccgaacataaagttgcctgcatgtttacggcaccgacagccattcgggcgatcaagcaacaggaccccgacggagaattcgcgaagcattacgacctgagccaccttcggtccctgtttcttgccggcgagcgctgtgatccaccgacacttgcgtgggccgaagctattctcggtgtgccggtcatcgatcactggtggcagacggaaaccggctgggcgatagcctcgaactgcctgggcatagaaacactgccgatcaaggctggctccgcagcacgcgccacgcccggctgggatgttttggtactggatgccgacggtcatgaaatggcagccggtgaggtcggcgcgatcgcctgccgcctgccgttgccgcctggcacactgcccggtctgtggcaggctaatgaccgttacaagcatgcatatcttgatcggttcgaaggcttttatgaaaccggtgacgcagggtatatcgacgaggatggctacattttcgtcatggcgcggacggacgacatcatcaatgtcgcagggcatcggctttcgacaggcgcaatggaggaagtactggccgcccatcccgacgtagc

SEQ ID NO: 308587 - DNA, 642 bp, Unknown
  Bacterial polypeptide expressing nucleotide sequence isolated from the Sargasso Sea
gttgctttataaaactaaaaaagactggattagtaaagcaattgtaaataaatcacaatatgaaaaaaaatataaaaattctatttctgataatgataatttttggaaaaaagaaggaaaaagaataaattggataaaaccttatacaaaaataaaagatataaaatatagtagctcagatgttaagattaaatggttttatgatgggacattaaatgcgtcagctaattgtattgatagacatttaaaaaagaataaagataaaactgcaattatatgggttggagatgatccaaaaattcaaaaaaaaatttcatataaagaattacataaagaagtctcaaaagcagctaatggattaaaaaaaattggtgttcaaaaaggggatagagttacaatttatttaacaatgatacctgaacttgcatacacaatgttagcttgtgcaaggattggagctattcattcaattatatttggaggattctcaccagatagtatttcggggagaataaacgactgtaaatcagactatgtggttacagctgatgaaggtgtaagagggggaaagattatacatcttaaatcaattatggacgaagctttagtagagtgtccaaaagtaaaaaaatgtgttgttgt

SEQ ID NO: 308588 - DNA, 781 bp, Unknown
  Bacterial polypeptide expressing nucleotide sequence isolated from the Sargasso Sea
ggatactcttgaatggactgaaaaaatgctaaaggtaccagttgtcgatcactggtggcaaacggaaacaggatggcccatagcttctaattgccttgggatagagctcttggacatcaagcccggctcgcctacttgcgccgtgccgggctggaaaattgatgtgctcgacgaatcttgcaagccggttcctcctggggaaataggtgcaatttcactaaagttgccgttgcctccagggtctcttccaacactttggcaaaatgacaaacgctttgtggatagttatttaacaaggtatccaggttattatgaaacaggggatgctggtattatagaccaagacggctatctgcacgttttatccagaactgacgatataataaatgttgccggtcaccgcctttctacgggaggtatggagcaagttctcgcagaacaccaagatgtagccgagtgtgctgtcttaggtgtaagcgatcaattaaaggggcaagtcccgttaggacttttagttttaaaggacggtgttaatacggagcacaagcaaatcatagaagacgttataaggatggtacgtgctgaaattggccccgttgcggccttcaaagtcgccgtgattgtaaagagattacctaaaaccagatcaggcaaaatactaaggggaatcattcaaaaaattgctgactctgcagactatgatctccctgctaccattgatgatcctcatattttaatggaaataaaagaagcactccaaaatataggctacgccacataa

SEQ ID NO: 308589 - DNA, 862 bp, Unknown
  Bacterial polypeptide expressing nucleotide sequence isolated from the Sargasso Sea
aaaaaaaaagtctaaagttagaaaaaaaacctcaaaaaaggtgaagagaagatctaaagttagaaaaaaaacctcaaaaaaggtgaagagaagatctaaagttagaaaaagatcttctaaaaaaccaaaaaaaagaattaaaacaaaaaaggaaaatggaaatacacctcctgaagttgttattaaaacaaaaccagaatgggttaaaagtagcttagcaaacaaaagtaaataccagcaaaaatattctcaatctataaagagtaatgatgaattttggagaaaagagggaaaaagaattacttggataaaaccttataaaaaaattaaagacgtaaaatacagtacaaaagaagtaaaaattaaatggtttgaagatggtactttaaatgcttcagcaaattgtattgatagacatttaaaagataaaaaagataaaactgctattatttgggttggagatgatccaaaagatagtcaaaaaatttcttataaacaacttcatcaaaaagtttctaaagcagcaaatggtttaaaaaaattaggaattaaaaaaggtgatcgtgtaacaatttatttaacaatgataccggagttagcaattttaatgctagcttgtgtaagaattggtgcagtccattcaattatttttggtggtttttcagcagactctatttcgggaagagtaaatgattgcgaatctgaatacatcataacagctgatgaaggagtgcgaggtggaaaaactataccactgaaatatacagtcgatgaagctttaatgagttgtccaaatgttaagaaatgtattggtgttaaacgaacaggtaattacattaactgggatcaaaatagagatgtt

SEQ ID NO: 308590 - DNA, 232 bp, Unknown
  Bacterial polypeptide expressing nucleotide sequence isolated from the Sargasso Sea
ctggcgagctagaagagatttaaaactttgggttagaaaacaaattggacctttagcaactccagacctaattcattttactccaggtcttccaaagacaagatcaggaaaaataatgagaagaattctaagaaaaattgctgctaatgaacatggtcaattaggagatacgactactttagcagatccaagtgttgttgatagtttagttgataatagaaaaaatatttaa

SEQ ID NO: 308591 - DNA, 371 bp, Unknown
  Bacterial polypeptide expressing nucleotide sequence isolated from the Sargasso Sea
ttctggacatagaattggtacagctgaagtagaaggagctataggtgctgcatctggagtagctgaagctgcagtgattggatatagtcatgaaatcaaaggcgaaggcatttatgcttttgttacattaatgacaggagtagaagcttcagcagagattgaacaagatatcttaagtactgtgacaaaaattattggtcctcatgcaaagccaagtgctattcaattttgttcagggcttccaaaaacaagatctggaaaaattatgagaagaattttaaagaaaattgcccaaaatgaaacggacgatttgggcgatacttcgacacttgcagatccaagtgttatagatagtttattacaaaaataat

SEQ ID NO: 308592 - DNA, 823 bp, Unknown
  Bacterial polypeptide expressing nucleotide sequence isolated from the Sargasso Sea
atcccaagatccactttatattttatatacatcaggcactactggcgaccctaaaggaatggtaagagaaaatggtggtcacgctgtagctttaaaaaatagtatgagtatgatatatggcattaattctgatgataccttttgggctgcttcagatattggatgggtggtaggtcattcatatatagtctatgggcctttgttgaagggttgtactactgttttatttgaaggaaagcctgttggaaaccctgatgcaggagcattttggagagtaataagtgaacataatgtgtccgtaatgtttacagctcccacagctctaagagcaattaaaagagaagacccagaaggaaaacatataaaaaaatatgatttaaacaattttaaaatgcaatttttagctggtgaaagagcagaccctgcaactatagaatgggcaaaaaaacacttaaatgttccaattattgatcactggtggcaaacagaaactggatgggctattgcgggaaatttttcaggacttggcatttttgatattaggcctggttcaacaggaaagccttctccaggatttgatgtttgctgtttagatgaaaaaggtaatattaaaccatttgatgaaataggtagcctagctataaagcttcctttaccaccaagttgcagctcaacattatggcaagataaaaaaagatataatatatcttatctgaatgaatttaaaggatggtattccagtgcagacgccggatatatagataaagacgggtatatatgggttatgtctagaacagacgacatcattaactgtgcaggacat

SEQ ID NO: 308593 - DNA, 943 bp, Unknown
  Bacterial polypeptide expressing nucleotide sequence isolated from the Sargasso Sea
tgcggggacgttttggagaattatttctgagtataaagtgaaggtgttattcacggctccaacggctcttagagctgtgaagagagatgatccaaatggtgagtttattaaaaaatttgatttaacatccttgcagtccctatttcttgctggagaaagagctgatcctgacacggtgttatggttggaaaaaaaattgaaagttcctataattgatcattggtggcaaactgaaactggctggccggtggcagcaaaccctttaggaatagaaccacttccaattaaaataggctctccaactacagctatgccaggatatgatgttagggttttatcagaaaatggcaaagaagttcctaggggttcattaggagcaatctcaataaaattacctttgccaccagggtctttacctagtttgtggaatgcagatgatagatttatagaggcttatttatcaacttttgaaggtttctacgaaacaggagacgcaggttatcaagacgaagatggttatttatatattatgtcaagaactgatgatgtaataaatgttgcaggtcataggctttcaacaggcgcaatggaagaaactttatctaatcacgtagatgtagctgaatgtgcagttgttggtgtttcagatgatttaaaaggacaagttccattaggacttatatgcctgaataatggatgtaataaaactcatgaggatgtgtgtaaagaagttgtagatttagtccgaaatgaaataggcccagttgctgcatttaaatcagtggctgttgtctctgcacttccaaagactagatcaggaaaaattttaagagccactataagaaaaatagctgataaagttgaatgggaaatgcctgccacagtagatgatccccaagtttttaaagaaattgaagaagttttaaaaccattaggctattaa

SEQ ID NO: 308594 - DNA, 1181 bp, Unknown
  Bacterial polypeptide expressing nucleotide sequence isolated from the Sargasso Sea
tatgaaatataaatcagtttataatcaatggagaaatgaccctgaaaaatattggcaaaatttggcaaatgatatttcttggaaagtttttccaaaaactatcttaaacaagaaaaatgaatatctttatgaatggttccctgatggcatcttaaatacttgttataatgcagttgataaaaacatagttgaaggaaggggtaatcaagttgctatttattatgaaagcccaattaccaatagcaaaagtaaaattacctataatgatttaagggacaaagtttccaaatttgcaggtggtcttaaaaaacttaacattgaaaaaggagatagagtaatcatttacatgccaatggtacctgaagctatcattgcaatgttagccgtagcaagattgggggcagttcattctgtagtttttggaggatttgcctctaaagaattggcagtaagaattgatgattgtaaaccaaaattaataatttcagcatcatgcggttttgaacctaatagagtagtaaaatataagcctttattaaacgaagcattaaacatcgccaatcacaaagttagtgattgtataatttatcaaagaaaaggttttgaggccgacctaaatccagaaattgatatagagtggtttgagtttttaaaggatgtagatgaagaagaatgtgtgatggtttatggtaaagacccactttacattctctatacttctggaactactggtcagcctaaaggtgtggttagagacaatggtggtcacgctgtatccttaaaatggtcgatgaagaacatttatggtttaaatcctggtgaggtattttgggcaggatcggacattggttgggtagtgggacattcatatattgtttatgctcctctgtttcacggatgttctacagtgttatatgaaggtaaacctgttggcacacccgatgcaggagctttttggcgtgtaattgaaaattataatgtaaaggttttttttactgccccaactgctttaagagccgtaaaaaaagaggacccaaaaggaaagtttattaatcaaagtaaattatcaagtttaaaagcactttttttagctggtgaacgagctgatcctgatactgtaacatggctagagaagcaactttctattccaataatagatcattggtggcaaactgaaacag

SEQ ID NO: 308595 - DNA, 766 bp, Unknown
  Bacterial polypeptide expressing nucleotide sequence isolated from the Sargasso Sea
aatgtcagataagatctttccagtaccaaaaaaatctaatcttgttccgcttatttctgaggagaaatacagtgaactttatagattctccatagataacccaaaagaattttggggtgagcaagctctatctaggttaaattggataaagccttttgatgatgtgctttccacaaatatggaaaaagctgagtttgagtggttttctaatggaaagttaaatgcttgctttaattgcgttgacaaacatcttgaaaataatggcaatgacatcgctttcatttgggaaagtgacgatggcagcacatctaaaaaaattacttacaacgaattatatgaagaggtatgtcgattatctaatttacttaaatcaagaggaataaaaaaaggagatagggtgtgtatttacatgcccatgattttggaggctatttattcaatgctggcctgcgcaagaattggtgcggtacattcagtagtttttggaggattttctgtcgaatcattgaaagacagaattcttgattctgattgtcaaacgataattacagcaaatgaaggattaagaggaggtaaaaaagttcctctaaaaaataatgtggactccgcagtagagcaatgtcccaatgttcacactgttatatttgttaaaaatacagatactgcaattaatataaatcctgagattgatgtagcctactctgacgtaatttcaaattttgaacctcactgtgaatgtgagccaatggattctgaagatccactt

SEQ ID NO: 308596 - DNA, 655 bp, Unknown
  Bacterial polypeptide expressing nucleotide sequence isolated from the Sargasso Sea
attggtggcaactgaaactggagcgattatgtgtgctaattatccatcagaaaacatcaaacctggttctatggggcaacctttccctggtatcactatgggaattcttgatgatcaatataatgaattaccagcagatgcaagtggaattttagcagttagaccaggatggccttcacaaatgtttgcatactggaaacaagatgacatgtacaactcaagatttaagaaaggttggtacataactggagatcaagcttctagggataaggatggatatttttggtttcaaggtagagctgatgatgttataaatactgctggccacttggtaggaccttttgaagtagaaagtgcgcttatagagcatccagcagtcgccgaggcaggagttataggtaaaccagatccaattgcaatggaaatagttaaagcttttgttagcttaaatcctggatttgaacaatctgatgacttgagaaaagagttaataagatttgctagagaaaaactttctgctggagtagctcctagagaaattgattttctagaaactatgccaaaaacaagatcaggtaagataatgagacgtttattaaaagctagagaactgggagagccagaaggtgatatatctactttagaagatgattaa

SEQ ID NO: 308597 - DNA, 542 bp, Unknown
  Bacterial polypeptide expressing nucleotide sequence isolated from the Sargasso Sea
catggcagataatacatttaagcctcaacctaaaatctcggaaagagcacatatctcttcattggaacaatatggagaactctacaagcgttcaatcaatgacccaacagagttctgggaggaaattgctcaaagacttgattggtataagccttggaataaggtgagggagtttgactttgttaacggggaaatagaatggttctctggaggagaattaaatgcttgttataattgtatagatagacatatcaatgaaggtcatggtgaagatattgctattatttgggaagggaatgacccaaatcaatctagaaaattttcctataatgatcttttgaaagaagtatctcaatttgcaaatgccctaaaagaactaggcgtgcagaaaggggatagagtttgtttatacatgcaaatgattcctgaattagctatcgcagttttggcgtgcgcacgtattggtgcagttcattctgtggtttttggagctttctcaagtgactctttgagagaccgtattaatgattcggaatgcaaaa

SEQ ID NO: 308598 - DNA, 235 bp, Unknown
  Bacterial polypeptide expressing nucleotide sequence isolated from the Sargasso Sea
tggtgatcttgaaagagatttaaagctttgggtaagaaagcaaataggaccaattgctactcccgacgttatccaatttgctcctggtttaccgaaaacaagatctggaaaaataatgagaagaattttaagaaaaatagctgcgaacgaacctgataacttaggcgatacaacaacattagctgatccaagtgttgttacttcgcttgtagaaaatagacaaaataaaggttaa

SEQ ID NO: 308599 - DNA, 374 bp, Unknown
  Bacterial polypeptide expressing nucleotide sequence isolated from the Sargasso Sea
aatgaagtctgattttgatcaaatttataaggaatctataaataatcctgaaaaattttggcaagagatatctaatgatattttctggttcaaaaagccttctaaaatattaaataaatctaatccacctttctacaagtggtttgaagatggaacaacaaacacttgttataatgctttagatttacatgtagacaatggcagaggtgataaaactgccttaatttatgatagtccaataactggaaacaaaaaaaaattttcatatttagaattaaaagaaaaagtttcaaaatttgcggggtcattagataatctaggtattaaaaaaggtgatagagtaataatttatatgcctatgataccagaagcag

SEQ ID NO: 308600 - DNA, 201 bp, Unknown
  Bacterial polypeptide expressing nucleotide sequence isolated from the Sargasso Sea
taagaaagcagattggtccaatagcaactccagacttaattcaatttgctccaggacttccaaaaacaagatcaggtaaaataatgagaagaattcttagaaaaattgctgctaatgaacatggtcaattaggagatacaacgaccttagcagacccttcagtcgttgatagcttggtagacaatagaaaaaatatttaga

SEQ ID NO: 308601 - DNA, 221 bp, Unknown
  Bacterial polypeptide expressing nucleotide sequence isolated from the Sargasso Sea
aagagaactaaaattatgggttagaaaacaaataggtccattagcaactcctgacttaattcactttactccagggcttccaaaaacaagatctggaaaaataatgagaagaattcttagaaagattgcagcaaatgaacatggtcaattaggtgacactactactttagctgatccaagtgttgttgatagtttagttgacaatagaaaaaatacttaga

SEQ ID NO: 308602 - DNA, 458 bp, Unknown
  Bacterial polypeptide expressing nucleotide sequence isolated from the Sargasso Sea
tttggctggaaattacaaaaaaacctatgattcgtcaataaaagatatggaaagtttttggaaaactatatctgaaggtattttttggttcaaaaaaccctcaaaaattctcaattcttcaaatcctcctttttacaaatggtttgaggatggtattactaacacttgctacaatgctgtagacgtacatatcgataatggtcgcggtgataaaacagctataatttatgatagcccgattacaggaactaaatataaattatcctacaaagacctcaaagagaaagtttcaaattttgctggagcactaaaaaatcagggaattaaaaaaggggatagagtaattatctatatgccgatgatacctcaggcagttattgcaatgttagcatgtggtagaaaaggagcaattcactcagttgtattggagggtttgcagctaacgaatagcaagcaga

SEQ ID NO: 308603 - DNA, 726 bp, Unknown
  Bacterial polypeptide expressing nucleotide sequence isolated from the Sargasso Sea
catgcctaaaaaaaagaaaaaaaaatctaaagtaaaaaaaaaatcttctaaaaaagttaagaaaagaactaaagtaaaaaaggtttcaaacaaaatcaaaaaaaaaacaaaaagcaaaaagaagactaaaaaagagaatggttcttctcctcctgaaatagttataaaaactaaaccagaatgggtaaaagcaagtttagcaaataaaagtaagtaccaacaaaaatattcacaatctatcaaaagtaacgatgatttttggagaaaagaaggaaaaagaattacttggataaaaccttataaaaaaatcaaagacgttaagtacagcactaaagaggtaaaaattaaatggtatgaagatggaactttgaatgcttcagctaactgtattgatagacatttaaaagataaaaaagataaaattgcaattatttgggttggcgatgatccaaaagatagtcaaaaaattacttataaacaattacaccaaaaagtttccaaagctgcaaatggtttaaaaaaacttggaattaaaaaaggagatcgagttacaatttatttaaccatgatcccagagcttgcaattttaatgttggcatgtgttagaattggagcagtccattcaattatatttggtggtttttctgcagaatcgatttcaggaagagtaaatgattgtgaatctgaatatataatcactgctgatgagggagttagaggaggaaa

SEQ ID NO: 308604 - DNA, 658 bp, Unknown
  Bacterial polypeptide expressing nucleotide sequence isolated from the Sargasso Sea
atgaatgaaaaaatagagaatttattaaacgaagatcgtttatttgaaccaagtgaagaattaaaaaataatgcaaatgcaacatctgaatggtttcaagatgctgaaaaagatagattagaatactggaagcagcaggcacttaatagaataacttggtttaaagaacctaccgaagtcttagatgattcaaatgcaccattttttaagtggtttagtgatggggagttaaacctttcttacaattgccttgatagacacctagaaacagatggagatagagtcgcatattactgggaaggtgaacctggagatactcaagagatcacctatagagatctttatgaaagagtatgtaagttatcaaatgcacttaaaagcttaggagtccaaaaaggagataggatagctatttaccttggtatgacgccggagatagtagtttctatgcttgcttgtgcaagaattggagcagtgcactctgtagtatttggtggattttcagctgaagcactagctgatcgtataaatgatgctgaagcaaaggtagtgataacagctgatggcgcatggagaagaggagaaattgttcctctaaaggagaacgtcgacaactcattagaactaacagaatttatagaaagtgttgttgtagtaa

SEQ ID NO: 308605 - DNA, 545 bp, Unknown
  Bacterial polypeptide expressing nucleotide sequence isolated from the Sargasso Sea
aatgaaagaaaaattatttaaaccactaaaagaattatctcaaaaagcacatgttggttccttagaggaatataataatgaatatgacaggtcaattaaagatcaaaatttgttttgggaagaaaaagctgagagaattagttggtataaaaaatgggacagcgttggatcttttgattacgtaaatggtgtaattaaatggtttgatggcggaaaactgaatgtaagctataattgtcttgaccgacatgttgaatcaggtaaaggtgatagaactgcattaatctgggaaggtaataacccggaagagaataaaactttttcatataatgatttacttatcgaagtaaaaaagttttcaaatgtcttaataggattaggtatccaaaaaggggatagagtttgtctttatatgcaaatggttcctcaattaccaatagcaatgttagcatgcgcacgcatcggtgctgtccattcagtagtttttggagcatttagttcagactctttaagagatagaattaatgattcaacttgtaagatac

SEQ ID NO: 308606 - DNA, 290 bp, Unknown
  Bacterial polypeptide expressing nucleotide sequence isolated from the Sargasso Sea
cataaaaggtcaaggcatctatgcatacgttacactcaatgcaggagaagaaacttcagatgaattgtataaagaacttgttgcatgggttagaaaagaaattggcccaatcgcatcacctgatcttattcaatgggctccaggtcttccaaaaactcgatcagggaaaattatgagaagaattttaagaaagattgctgaaaacgattacagtaatttaggagatacatctacactagcagagccggctgtagtcaatgatctagttgaaaatcgaatgaacaagtaac

SEQ ID NO: 308607 - DNA, 382 bp, Unknown
  Bacterial polypeptide expressing nucleotide sequence isolated from the Sargasso Sea
aatgtccaataaatttaaagacttatacaaaaaatcaatcgaaaatcctgaaatcttttggcaagaggcatctagagatatattttggtttaaagaacctactaaaatcctaaacaaatctaacgcacctttttataaatggtttgaagatggagtaacaaatacctgttataatgcattagatattcatattgaccaaggtaatggggaaagaacagctttaatatacgatagtcctattacagacaataaaagtaagttcacttacaaggaattaaaattaaaagtttccagatttgcaggagctcttgaaaaatcaggggtcaataaaggagatagagtaattatttacatgccaatgatacctgaagcagtgattgcc

SEQ ID NO: 308608 - DNA, 349 bp, Unknown
  Bacterial polypeptide expressing nucleotide sequence isolated from the Sargasso Sea
aatggaaatagaatctgctttggtaagtcataaatcagttgcagagtctgcagtagttggcaaaaaagatgatttaaaaggtgaagttatagttgcttttgtatctctagagaaagacgttaacggttcttcagaattaatagaaaatctaaagaaacatgttgttaatgaaattggaattatcgcaaagcctgaaaaaattataatttctgactctcttcccaaaacacgtagtggaaaaattatgaggcgaattttaagatctttggctgctggagaaaaaattagcggtgatataagcactcttgaagatagttctgttttggaaaagctgaaagaattatcctaa

SEQ ID NO: 308609 - DNA, 208 bp, Unknown
  Bacterial polypeptide expressing nucleotide sequence isolated from the Sargasso Sea
ttgtgcgcgagcgaaattggggcaaatgcaaaacctgatttcatacagtgggcgccgggcctccccaaaacaaggtctggaaagattatgcgacgcattcttcggaaaatagctgccaatgatttctcgaatcttggagacacctcgaccctggcggacccagaagtggttgaagatttgatgaactcgcggcaagcttttgactagt

SEQ ID NO: 308610 - DNA, 406 bp, Unknown
  Bacterial polypeptide expressing nucleotide sequence isolated from the Sargasso Sea
atgtccttaaagtttaatgaaatttacgaaaattctataaataatcctgaaaaattttggcaggaagcttcggaagatatcttttggtttaaaaaaccaacaaaaattttaaataaatctaatccacctttctttaaatggttcgaagatggtgtcacgaacacctgttataacgctttagacatccatattgaccaagggagaagtaaaaaaacagctttaatatacgatagtccgattacaggcaataaaagccagttcacttatgaggaattaaggtcaaaggtctctaagtttgcaggggcattgaaagctcaaggcactaataaaggtgaccgggtgattatttatatgccaatgatccctgaagcagtagttgctatgcttgcttgtgctagaattggtg

SEQ ID NO: 308611 - DNA, 415 bp, Unknown
  Bacterial polypeptide expressing nucleotide sequence isolated from the Sargasso Sea
tatggatatcaattttaaagaaatttatcaaaaatcaatatcaaaaccagaagaattttggagtgaaatttcaaatgatatattttggtttcaaaaaccaaccaaaattcttaataaatcaaatcctcctttttataaatggtttgaagatggcaaaacaaatacatgctttaatgctttggatattcatattgaccaaggaaaaggtgacaaaactgcattgatttatgacagtccaataacaggtaataaaaaaaaattcacatataaagagctaaaagaaaaagtttcaaaatttgctggggctttaaaaaaccaaggtgttaataaaggcgatagaattatcatctatatgccaatgatacctgaagctgtggtcgcaatgctagcttgtggtagaattggagcaattcat

SEQ ID NO: 308612 - DNA, 472 bp, Unknown
  Bacterial polypeptide expressing nucleotide sequence isolated from the Sargasso Sea
atgaaatttgatatcgatagttttgttaaccccaatttaaaagattttttagaataccaatctttatataatgattccgtaaaggatcctagcaatttttttcttaaacaggctttaaaagaaattgattggattaaggaaccaacgaaaggctcaacaggttctttatcttctccaaaatggtttgaagatggcatgttaaatatttcctataactgtattgatagacatgcagagaatcatccagaaaaaactgcaattatttggcaaggagatgaaagagaaaaaaatgaaaatatttcatacatacaattacaaaaacaggtatgcaaactagcaaatggtttgaaatcaataggtgtttcaaaaggagacagagtctgcatttatatgccaatggtgcctccagcagcatatgcaatgtttgcttgcatgcgtattggcgcaattcattctgttgtatttggaggat

SEQ ID NO: 308613 - DNA, 280 bp, Unknown
  Bacterial polypeptide expressing nucleotide sequence isolated from the Sargasso Sea
cagggcatctacgcatacgtgacgctcaatgcaggagaagaaacatcagataaattgtataaagaacttgttgcatgggttcgaaaagaaattggtccaatcgcttcaccagatttaatacaatgggcgccaggtcttccaaaaactcgatctggtaaaatcatgagaagaattttaagaaagattgctgaaaacgattacagtaatttaggagatacatctacactagcagagccagctgtggtcaatgatctggttgaaaatcgaatgaacaagtaac

SEQ ID NO: 308614 - DNA, 439 bp, Unknown
  Bacterial polypeptide expressing nucleotide sequence isolated from the Sargasso Sea
gttgcatgaatgtaaatcaggaaggaaaaacatgagctaccataaagaatatcgtgaatccattgagaatcctgaagcattctggagccgccaggccgaattgatcatatggtatgagaaaccgaagtcgatcctctcccaggatgaaaagggtttttatcactggttcaagggaggaaaactcaacacgagttacctggccctcgatttccatgtggaaaacgggagggccgagcaggcggctttgatttatgattccccagtcactgaaaccgttcaaagctacacgtatcgtgaattgctggatgaagttgcccgttttgccggggtgttacagaaccggggggttgataaaggagaccgggtcatcatctacatgccgatgattcctgaagcagtggtcgcaatgttggcttgtgccaggctggagcgattcact

SEQ ID NO: 308615 - DNA, 370 bp, Unknown
  Bacterial polypeptide expressing nucleotide sequence isolated from the Sargasso Sea
aatgtccgataatatcaaaataccagtatttgaaaattttaaagatagcgctcatttaactaaagataaatatgaagaagcttataaatttgctttggataatcctgaagccttttgggaaaaagaagggaaaagaataaactggataaacccttatacgatggtcaaagatgtgacatggtccaacaacgatgtaaatattaaatggtattatgatggaaccttgaatgcgagttataattgtatcgatagacatctatcagataaatctgatcaaattgcgattatttgggagggtgatgatccaaatgagtcaaaaaaaattacatataaagaattacaccaaaaagtttctaaatttgcaaatatg

SEQ ID NO: 308616 - DNA, 310 bp, Unknown
  Bacterial polypeptide expressing nucleotide sequence isolated from the Sargasso Sea
gcagttgttggaatagagcacgaaataaaaggtcaggcaatatacgcttatgtaattttaaaagataatgataaagataagaaaataattaatattgaaattcttgaagaggtttctaaaataataggaaaaattgctaagccagaggttattcaatttacaagagacttgcctaagactagatcgggaaaaattatgagaagaattttaagaaaaatagcaaataatgaatttaaaaatttaggcgatacaacaacactcgcagatccctcaatagtagaggagctaataaagaataaaaatgaatgat

SEQ ID NO: 308617 - DNA, 1141 bp, Unknown
  Bacterial polypeptide expressing nucleotide sequence isolated from the Sargasso Sea
tgcaacagatccactttacattctttatacttcaggtactactggtctgcctaaaggagttgtaagagataatggaggtcatgcagttgcactcaaatatagtatgaaagcaatattcaattctgaacctggtgatgtttattgggcaggttccgatgttggatgggttgtaggacactcgtacatagtttatgctcccttgattcatggttgtacgactgttctctatgaaggtaagccagtaaaaacaccagatgctggctcattctggagggtaatttcagaacatcaggttaacacttttttcactgcaccaactgcatttcgtgcagtcaagaaggaggatcctactgcaaaattaaaagaaaaatatgacataagttgtctaagatctttgtttttagctggtgagcgattggaccctccaacatacgaatggcttacagaaatcctaaatatacccgtcatagatcactggtggcaaaccgaatccggttggccgatgtgttcgaacatgatgggtcttgatccttatccggtaaaaattggttcgcctacttttcctgtccctggatatgatgtgaaggttttagatgatgaaggaaactcatgcaaatctagtgaaactggaaacatagttgttaagctacctttaccaccaagctgtctgccaactctttggaatgatgacaaacgctttagagattcatatctttcaaaatacccaggatactacctgactggagatggagggctaatcgatgaagatggatatttatttgtaatgggcagagtagatgatgtaattaatgtcgctggacatcgtttgtcaacaggacagatggaggaattaattgcagcacatcctgcggttgcagaatgcgctgtggttggtattgatgataatctaagggggcaaatacctgttggtttttctgtgctaaaggacggtataaatgtaagtcaggatcaattggagcaggaaatggtgggtatcatacgcaaagaaattggggcagttgcctattttaagcagtgcgtaattgttagtcgacttcccaaaacacgttcaggaaaaatccttagaaaaaccatacgccaattggctaaaggggagaatgtacctgctcccccaactatg

SEQ ID NO: 308618 - DNA, 562 bp, Unknown
  Bacterial polypeptide expressing nucleotide sequence isolated from the Sargasso Sea
aagattatgtatagctcaatcttggccaggtcaaatgagatctgtttatggagaccatgatagatttatagaaacatacttttctcagtttgatggaaaatattttactggagatgggtgtaaaagagataaagacggatactattggataacaggaagagttgatgatgttattattgtatcaggacataatctaggaaccgccgaaatagagagtgcctttgttgcacatccaaaagttgccgaagctgcagtggttggatacccgcatgatataaaaggaaatgggttatattgttatgtaactctaaatgtaggagaaaaacatgacggagacttagaaagagaattaaaaaattgggtaaaaaaaaacataggagcacatgctcgtccagattttattcaatttgcacctgggctgccaaaaacaaggtctggaaaaataatgagaagaattttaagaaagattgctgctaatgaacatgaacaacttggagacacaacaactttagctgatcctagcgttgttaaaagtctggttgataatagaaaaaatatttag

SEQ ID NO: 308619 - DNA, 1026 bp, Unknown
  Bacterial polypeptide expressing nucleotide sequence isolated from the Sargasso Sea
attaggagtaaaaaaaggtgacagagttacaatttatttaactatgattccagaattagcttttacaatgttagcatgtgctagaattggtgcaattcattcaattatttttggtggattttctgctgaaagtattgctggaagaataaacgattgtaaatctgattatgttgtgactgctgatgagggaattagaggtggaaaaacaatacctttaaaagcaactactgatgaagcattaattcattgtccaaatgttaagaagtgtatagtagtaaaaagaactggaaatagaataaattgggatgaaagtagagatgtttggtatcatgaaatgataaagaaggtctctgcaaactgtgaaccagaagagatgaatgctgaagatcctttattcatactttacacctctggttctactggaaaaccaaagggtgtgctgcatactactggtggatatatggtttatgcttcgatgacacaccaatatatttttaattataaaccaaaagatatttatttttgcagtgcagatataggttggataactggtcatagttatattatttatgggccgcttgcgaatgctgcaacaacaataatgttcgaaggaataccaacatatcctgactcatcaagatggtggcaaatagttgataagtataaggtaaacattttttatacagcaccaacagctataagagcacttatgagagaaggagatggtccggttaaaaaaacatcaagaaagtctttaaaattactaggaactgtaggagaaccaattaatcctgaagcttggcaatggtattataagactataggtgatagtaggtgtccaattgttgatacttggtggcagactgaaacaggaggaatactaataagtcctcaaacaggtgcaatagatcttaaaccgggatcagcaacaaaacctttttatggaataaaaccagttattgtagacaaagatggccaggtattaaaaggagaagcacaaggtagattatgtattgctcagtcttg

SEQ ID NO: 308620 - DNA, 886 bp, Unknown
  Bacterial polypeptide expressing nucleotide sequence isolated from the Sargasso Sea
gatattggatgggtgacaggacatagttatataatttatggacctctctcaaatggcgcaactactataatgtttgagggtataccaacttatcctgatagctctcgttggtggcaaataatcgataagtataaagtaaatattttttatactgcgccaacagcgataagagcattaatgagggagggtgatagaccagtaaagaaaacttctagaaaaagtcttaaattacttggaactgtcggtgaaccaattaacccagaagcttggcagtggtattacaaaactgttggtgactctaggtgtccaattgtagatacatggtggcaaactgaaacaggtggaattttaattagtccacaaacaggagccatagatctaaaacctgggtcagctacaaaacctttttacggaataaaacctgttatagttgataaagagggaaaagtcctaaaaggtgaggctcgaggtagattatgtattgctcaatcttggccaggtcaaatgagaactgtctatggggatcatcaaagatttatagatacttatttttcgcaatttgatggaaaatattttacgggcgatggatgtagaagggataaagatggatattattggattactggaagagttgatgatgttataattgtatctggtcataatttaggtacggctgagatcgaaagtgcatttgttgcccatcctaaagttgctgaggcagccgttgtaggatatccacacgacattaaaggtaacggattatattgctatgtaactttaaatgttggcgaggagccaaatggagagcttgaaagagatttaaaattatgggtaagaaaacaaataggtcctatagctactcctgatttaattcattttttcacct

SEQ ID NO: 308621 - DNA, 991 bp, Unknown
  Bacterial polypeptide expressing nucleotide sequence isolated from the Sargasso Sea
ttgggtggagatgatcctaaagatagtcaaaaaatttctataaaacaacttcatcaaaaagtatcaaaagctgctaacggtctaaaaaaattaggcgttaagaaaggagaccgagttacaatttatttaactatgattcctgaattagctattttaatgttggcttgtgctagaattggagcagttcattcaattatatttgggggtttttctgcagactctatttcaggtagagtaaatgattgtgagtctgaatatatcattacagctgatgaaggggtaagaggtggaaaaactattcctcttaaagatactacagacgacgcactattagattgccctaatgtaaaaaaatgtattgttataaaacgaacaggtaatgatatccgttggaattataatagagatgtttggtatcacgatttaattaaagatgtatcaaacaagtgtgaaccggaagagatgaatgctgaagatcccttattcattctttatacttcgggatcaacaggtaaacctaaaggagttttacatacaacaggtggatatatggtttatgcttcaatgacacatcaatatattttcaattataaagctaaggatatttattggtgcactgcagatattgggtgggtaactggtcatagttatataatttatggaccacttgctaatggagctactacaataatgttcgaaggaataccaaattatcctgacacatcaagatggtggcaaattgtagataaatataaagttaatattttttatacagcaccaactgccataagagctttgatgagagagggagataaaccagttaaaaaaacttctagaaaatcacttaaattgttaggaacagttggggaaccaattaatccagaagcttggatgtggtattataaaacagttggaaattctaattgcccgatagtggatacttggtggcaaacggaaacaggcggaataatgattgctcctcaaacaggtg

SEQ ID NO: 308622 - DNA, 868 bp, Unknown
  Bacterial polypeptide expressing nucleotide sequence isolated from the Sargasso Sea
atgactcatcaatatatttttgattataagcctaaagatatttattggtgcactgcagatattggttgggtgaccggtcatagctatattatttatggaccattatctaatggtgcaaccacaattatgtttgaaggagttccgaattatcctgatagttcaagatggtggcagatagtggataaatataaagtaaatattttttatactgctcctacggcaataagagctttaatgagagaaggcgatgagccagtaaaaaaaacaagcagaaaatctttaaaattactaggtacggttggagagcctattaatccagaggcctggatgtggtattataaaactgtaggtgatgggcgttgtccaattgttgatacttggtggcaaactgaaactgggggaattttaattgcacctcaacctggtgcgatagatcttaaaccaggctcagcgacaaagcctttttatggaattaagcctgtgatagtggatgaagctgggaaagttcttaagggcgcatgtaaaggaagattatgtatgtcagcttcttggccaggtcaaatgagaacagtctatggtgaccatcaaagattcatagatacttatttttctcaatttgatggaaaatattttacaggtgatggatgtcgaagagataaagatggatattattggataaccggtagagttgatgatgttataattgtttctggacataatttgggaactgctgaaattgaaagtgcgtttgtagctcatcctaaagtggcagaggctgcagtagttggttaccctcatgacattaaaggaaatggactttattgctatgatactcttaatgctggagagcaagcggatggagatttag

SEQ ID NO: 308623 - DNA, 634 bp, Unknown
  Bacterial polypeptide expressing nucleotide sequence isolated from the Sargasso Sea
aaaccttttatgggtattaagcctgcaatggtagacaaggatggaaaggaaataaaaggagcaggtgaaggaagactgtgtattactcaatcttggcctggtcaaatgagaactgtctatggtgatcatcaaagatttattgacacttatttttcacaatttgatggcaaatactttacaggagatggatgtagaagagacaaggatggatactactggataacaggtagagttgacgatgttataattgtttcgggtcataatttaggaactgcagaaattgaaagtgcttttgttgcacatccaaaagtggctgaagctgcagtggttggctatccacatgatataaaagggaatggtttatattgttacgttactttaaatgcaggggaaactgaaactggtgaactggacagggatttaaaactttgggtgagaaaacaaattggaccattagcaactcctgacttaattcattttactcctggtcttccaaaaacaagatcgggaaaaattatgagaagaattttaagaaaaattgctgctaatgaacatgatcagttaggtgacacaactactttagctgacccaagtgttgtaaatagtcttgttgaaaatagaaaaaatatttaaa

SEQ ID NO: 308624 - DNA, 899 bp, Unknown
  Bacterial polypeptide expressing nucleotide sequence isolated from the Sargasso Sea
attgtatctaattaacattgattttgcttattttttaaaaataaatacaatttatgatttaaaaaagaaccaaatacaaaatatcgaatcaaaaataatgtctaacaattttcaagaaatttatgagcaatcaataaataatccagaaaaattttggcaagaagcagctgaagatatcttttggttcaaaaaaccaacaaaaattttaaacaaaactaaacctccattttataaatggtttgaagatggtgttacaaatacttgttataatgctttagacatacatattgatcaaggcaaaggaaatcaaactgcactaatatatgatagccctataactggaaacaaaagtaagttcacttttgaagaactaaaatcaaaagtttcaaaatttgcaggtgctcttagagctcaaagcgttaataaaggtgatcgagtaatcatttacatgccaatgatacctgaggcagtgattgcaatgctagcgtgtgctaggattggggcaattcattctgttgtcttcggtggttttgcttcaaacgaacttgctagcagaatagatgatagtaaagctaaattattagtaaccgcttcatgtggttttgagccaggtagaactgttgaatacaagccgctagttgacgaagctgtaaaactagcaaatcataaaattaataagatgattttatttcaaagaccaggtcatgaagtaaaattaaataatccaaatgaagttagctgggaagaagttgtctcaaatgcagaagatgctgactgcgtagaaatgaattcaaatgaatttgcttacattctttatacttcaggaacaactggaacacctaaaggaatagttagagacataggaggccatatagttgcacttaagtggactatgaaaa

SEQ ID NO: 308625 - DNA, 765 bp, Unknown
  Bacterial polypeptide expressing nucleotide sequence isolated from the Sargasso Sea
aaaaaacttggtatcaaaaaaggagatagagtaacaatttatcttactatgataccagaattagctatattaatgttagcttgtgcgagaattggagcgatacattcaataatatttggtggattttctgcagaatctatatctggtagagtaaatgattgtgagtcagaatatgtcattactgctgatgaaggagttagaggtggaaaaactattcctttaaaagcaactactgatgaggcattaataaattgtccaaatgttaaaaagtgtatcgttgtaaaaagaacagggaattatgttttctggaatagtgaaagagacgtttggtatcatgaactaatcaaagatgtttctagtcattgcgaaccggaagaaatgaatgctgaggatccattgtttatactttacacctcaggatctacgggaaaaccaaagggagtacttcatacaactggtggatatatggtttatgcatcaatgactcatcaatatatatttaattacaaaccgaaagatatttactggtgtacagcagatattggttgggtaacagggcatagctatattatttatggacctctatcaaatggagcaacaactattatgttcgaaggggtgcctaattaccctgatagttcaagatggtggcaaattgtagataaatttaaagttaatacattctatactgcaccaacagctataagagcattaatgagagagggcgatgaacctgttaataaaacttcaagaaaatctctaaaa

SEQ ID NO: 308626 - DNA, 931 bp, Unknown
  Bacterial polypeptide expressing nucleotide sequence isolated from the Sargasso Sea
gccttaatttgggaaggtgatgagccaggaaactctaaagagataactttcaaagaattgcactctgaggtttgtaggtttgcaaatatccttaaaacacttcaaattaaaaaaggctccagagtttgtatttatatgccgatgattcctgaagctgcatttgcaatgtttgcatgtgcaagaattggtgcgatccactcagttgttttcggtggattttctccagaatctttaaaggataggattctggatgctgattgcagaattgtaattactgctgatgagggtgttcgaggcggtaaaaaggttcctttaaaagataatgttgatgaagccctaataaattgtcctgatgttaagaatgtaatcgttgttaatcgaaccggcggaaaaattaattggtttgaggatagagatctttggtttcatgaactaaaagataaagttgatgatgtttgcgagcctgagccgatggattctgaagacccgctctttattctttatacatctggatcaacggggaagccaaaaggagttttacacacaacggctgggtatcttttaggagcacatatctcttttaagtatttatttggattcaatgaaaatgataaatattggtgcacagcagatgttggctggattactggacatacttatattctttatggccccttatcaaatggggctacttcacttatgtttgaaggcgtgcctacatatccaactgcatccagatgttgggaaatatgtgatgagcatgaaataaatattttttatactgccccaactgccataagagctctgatgtcgctaggagatgagtttgttggaagcacctcgagaaaatcgattaaagttctgggtactgtcggtgaaccaataaatcctgaagcatgggactggtattactcggttgtaggaaataaat

SEQ ID NO: 308627 - DNA, 793 bp, Unknown
  Bacterial polypeptide expressing nucleotide sequence isolated from the Sargasso Sea
ttgtattgatagacatttaaaagataaaaaagataaaactgctattatttgggtaggagacgatccaaaagatagtcaaaaaatttcttataaacagcttcaccaaaaagtttctaaagctgcaaatggtttaaaaaaattaggaattaaaaaaggagatcgagtaactatttatttaactatgataccagagttagcaattctaatgctggcctgtgtaagaattggtgcagtacattcaattatttttggaggtttttcagcagattctatttcgggaagagtgaatgattgtgaatctgaatacatcattactgcagatgaaggagtgcgaggtggaaaaactattccactgaaatatacagttgatgaagctttaatgagttgcccaaatgttaagaaatgtatagttgtaaaacgaacaggtaactacatcaactgggatcaaaatagagatgtttggtaccatgatctaataaaagacgttgctaatcattgtgaacctgaagaaatgaatgcagaagatccgttatttattttatatacttcgggttcaacgggaaaacctaaaggagttcttcatactactggtggttatatggtttatgcatcaatgactcaccaatatattttcaattacaaaccaaaagatatttattggtgtacagctgatattggctgggtaactgggcacagttatattatttatgggccactttcgaacggtgcaacaaccataatgtttgaaggaattccaaattatcctgatacttcaagatggtggcaaatagtt

SEQ ID NO: 308628 - DNA, 1052 bp, Unknown
  Bacterial polypeptide expressing nucleotide sequence isolated from the Sargasso Sea
cctcctttctacaaatggtatgaggatggggtaacaaatacgtgctacaatgccttagatatacatattgatcagggtagaggagaaaagacagctctaatttatgatagtcctattacgaataacaaaaaaaagtacacctacaacgaattaagacaaaaagtatctaaatttgccggcgctttatcaaagcaaggagtgataaagggagatagagtaatcatttatatgcctatgatacctgaggcagttattgctatgttagcatgtggtagaattggagcaattcattccgtagtatttggaggttttgcctcaaatgagcttgctagtagaattgatgatagtaaggctaaagttttggtcactgcctcatgtggatttgaacctggaagaacagtcgaatacaaaccattagtagatgaagctattaaaatggcatctcacaaaattgaaaagatgatactttttcaaagatctggtcacgaagtcaaattaactgctcctaaagagataagttgggacgaatctttatcaaacgctaatgaggttgactgtgttgagatgaaatctaatgaatttgcatacatactttatacatcaggcacaactggtataccgaaagggatagtaagagatattggtggtcatatagtagctttgaagtggactatgaaaaatatttacaatattgatactgacgatatttggtggtcagcaagtgatattggatggattgttggtcactcttacatagtttatgcacctctatttaaaggatgcaccacagttctatttgaaggtaaaccagtaggtactccagatgctggtgctttttggaaaataatatcagattataaagttaaatctctttttactgcaccaacagcttttagagctatcaagaaagaagatcctgatgggaaatttttcaagaagtatgatttaagtgcatttgagtcattgtttttagctggtgaacgagctgatcctgatacaattaaatgggcagagaatttgcttaatgtgcccgtaattgatcactggtggca

SEQ ID NO: 308629 - DNA, 991 bp, Unknown
  Bacterial polypeptide expressing nucleotide sequence isolated from the Sargasso Sea
attgtttatcggtccgttagctaataaagcaacaagtgttatgtatgaaggggcaccaaatgcaccagatgagaaaagactatggagcattattgaaaagtataaagtcaacattttttatacagctccaactgcaataagggcatttatgaaatggggtgtagagcaccctcaagcccatgatttaagttcactaagaatattaggtactgtaggagagcctataaatccggaagcatggatgtggtatcacgagaatatcggtggtgagaattgtgcaattgttgacacatggtggcaaacagaaactggctcaataatgatttccccattaccaggtgtgacaagcactaaacctggatctgcttgcggaccactaccaggtatcgaatcaattgttattgacaatgatggaaatgaagtaggcaaaggtgagggaggctttttagctgtaaaatctccttggccatcaatgttaagaactgtttatggagatgatcagaggtatatagacacttattggtcacaacataatggtttatattttgctggtgatggagctaaatatgatgacgaaggttatatctggctgttaggacgtgtagatgatgtaatgaatatatccggacatagaatatcaacagcggaagttgaaagtgctttagtttcccatccagcagtagcagaagctgcagtaattggtagaagtgatgaaataactggagaagctattgccgcatttgtttcattgattggaactgatgaaggcaatgaagatctaattgccgatcttagacagcacgtaagtgataaaattggtccaattgctaaaccaaaaagtattgttataacagctgatttacccaaaactagaagtggaaaaatcatgcgcagacttttaaaagatatttcagaagaaagaaagctcggtgatgtaacaacattagcaaatgcagatattgtatctgaattacaaacaagagcatcggag

SEQ ID NO: 308630 - DNA, 616 bp, Unknown
  Bacterial polypeptide expressing nucleotide sequence isolated from the Sargasso Sea
acctgcattgttgatgctgatgggaacattttagacgatgaatgcagcggcaatttagttatatgcgactcatggcccggacaaatgcggacagtatatggtgatcacaaaagattcgaaagcacatatttttcagcatacgaagaaatgtattttacaggtgatggatgccggagagactcggatgggtactactggataacaggcagagttgatgacgttataaatgtttcaggtcataggctcgggactgcggaagtagagtccgctcttgtttcaaacaaaaaagtatccgagtctgcagtcgttgggttccctcacaatattaagggtcagggtatctatgctttcgttagtctgaaagctggtgttgactttgaagatgaggcaatttcaaaagagctcaatagcactgttagagatgtaattggaccaattgcttcacccgatcacatacaaataacaccatccttgccaaaaacgaggtcaggaaaaattatgcgtcgtatcttacgcaaaattgctgaaaataattttggtgatttaggcgatacctcaacactcgccgatccaacagtcgttgatgatctaattaataatagaaagaataaataat

SEQ ID NO: 308631 - DNA, 837 bp, Unknown
  Bacterial polypeptide expressing nucleotide sequence isolated from the Sargasso Sea
attaaaggtaactcaattttataccgcgccgactgcaattcgcgctttgatgtcttttgaggaggattttcccggaaaatacaatctttccacgttgcgtgtgttagggtcagtgggagaacctattaatccggaagcttggcgttggtaccataaaaaaataggaaaaggtcggtgtccgattgtggatacatggtggcaaacagaaacaggaggaattttgatcactccattacctggatgtacgccgactaagccaggctcggcgacgtttcctttctttggagttaagcctgtgattattgaggccgagacgggcaagattttaaaaggaaatggagttacaggggtgctggcattagaggaaccttggcctggccaaatgcgaaccatttacaaggatcaagatagatttgaagaaacttatttcaaaatctatccaggatattattttacaggagatggttgtcgccgcgatgaagatggttacttctggatcaccggtcgcgttgatgatgttattaatgtatcaggtcatagaattggaacggcagaagtagaatctgctttagttttacatgatgctatttcagaagcggccgtagttggatttccgcatgaaattaaagggcaggggatctatgcttatgtttcgcttagagagggaattagtgcaaatgaaaatttaaaaaaagacttggtcaattttgtgcgtaaggagattgggcccatagcagcccccgatgttattcactgggcacctaatcttccaaagacgcgatctggcaaaatcatgcgacgcattttgcgcaaaatagccgctaacgaagcagataa

SEQ ID NO: 308632 - DNA, 784 bp, Unknown
  Bacterial polypeptide expressing nucleotide sequence isolated from the Sargasso Sea
gttgtattcggaggtttttctgcagaagctctagctgacagaattaatgatgcggaagcaaaagttgtaattacatcagatggtgcttggagaaggggagatatagttcctttaaaacaaaatgttgatgactccctaaagcttaccgatcacatagagagcgtcatagttgtaaagagaactgagaatgaagtaaccatggttgatggtagagactattggtatagcgaacttgtagataagcaggaagctgattgtgaaccagaagtaatgaatgcagaggacatgttatatatcctctatacatcaggtacaactgctaagccaaaaggaatcgtccacacacaggctggatatcttacgggtgttactacaacacattctgcagtatttgatgtaaaggaagatgacatctattggtgtgctgcagactgtggttgggtaacaggtcatagttatattgtgtatggacctttagcaaacaaaacaacaagcgttatgtatgagggtgcaccaaatgcaccagatgaaaaaagattatggagtatcgttgaaaaatataaagtaaatatattttacactgccccaactgcaattagagctttcatgaagtggggagttgagcatccgcaagcacatgacttaacgtcactcagattgttaggcactgttggtgagccaattaatccagaagcctggatgtggtaccacgaaaacataggaaatgaatcatgtgcaattgtagatacatggtggcagacggagactggttcaataatgatta

SEQ ID NO: 308633 - DNA, 646 bp, Unknown
  Bacterial polypeptide expressing nucleotide sequence isolated from the Sargasso Sea
ctggatctgcacaaaacctttctatggaattaagccagtgcttgtagacaaaaacggtaaagaaattaaaggagctggcgaaggaaggttgtgcatagctcaatcatggcctggacaaatgagaactgtttatggtgatcatcaaagatttatagatacatacttttcgcagtttaacggaaaatattttactggtgatggatgtcgaagagataaagatggttattactggatcactggtcgagtagatgatgtaattattgtttcgggacataatcttggaactgctgaaattgaaagtgcatttgttgctcacccaaaagtagctgaagctgctgtagttggttaccctcatgatattaaaggtaatgggttgtattgttatgtaaccttgaatgcaggagaaaatgaaactggtgagctagaaagagatctaaaactttgggttagaaaacaaatcggacctttggcaactccagatctaattcattttactccaggtcttcctaaaacaagatctggaaaaataatgagaagaattctaagaaagattgctgctaatgagcatggtcaattaggagatacaactactctagcagatccaagtgttgttgatagtttggttgataatagaaaaaatatttag

SEQ ID NO: 308634 - DNA, 913 bp, Unknown
  Bacterial polypeptide expressing nucleotide sequence isolated from the Sargasso Sea
agtcaaaaaaggagatagagtaataatttatatgcctatgattcctcaatctgttgtagctatgttggcgtgtggacgaattggagctattcactcagttgtttttggaggtttcgctgctaacgaattagctagcagaattgatgactcgaaagcaaaaattattatttctgcttcatgtggttatgaacctggaagaacagttcattataaaccccttttaaataaagctatcgaaattgcaaatcataagcctgagaaatgtataatttggcaaagggaaaaagataaagcagagcttgatcctaaaagagatattgattggcttgaagctttaaaaggagcaaaacctgctgaatgtgaaaaaatgaattcaaacgattacgcatatattctttatacatctggaactactggaactcctaagggaatagttagagatattggtggtcacatcgtagctttaaaatggactatgaaaaatatttacaacatagaacaagatgacgtttggtggtctgcaagtgatattggatggatagttggtcactcgtatattgtttatgctccactattttatggatgtacaacagttttatttgaaggtaaaccggtgggaactcctgacgcaggtattttttggaaaataatatcagaatacaaagtaaaatctttatttacagctcccacggcgataagagcaattaaaaaagaagatcctgatggaaagtttttcaaaaaatatgatttatctaaatttgatactttatttttagccggtgaacgtgctgatccagatacaatcaaatggttcgagaaactttcaaatgctcctgttattgaccactggtggcaaacagaaactagttgggcgataagtgctaattgtgctggaatagaaaagtttccaatt

SEQ ID NO: 308635 - DNA, 811 bp, Unknown
  Bacterial polypeptide expressing nucleotide sequence isolated from the Sargasso Sea
acctgaattggcatatacaatgcttgcttgtgccagaataggagcaattcattcaattatatttggtggattttcaccagacagtatttctggaagaataaacgattgtaaatcagattatgtaattactgccgacgaaggtataagagggggaaaaatcattcatctgaaatcaattatggatgaagctttagtagaatgtccaaaagtaaaaaaatgcgttgtagtaaaaagaactggaaacagaattaattgggactctagtagagacgtttggtatcatgaaatgatccaaaatgtttctgctaaatgtgagcctgaagaaatgaatgcggaagatccattgtttatactttatacttctggatcaactggaaaaccaaaaggagttttgcacacaacaggtggctatatggtttatgcatcaatgacacatcaatatatatttaattataagccaaaagatatttattggtgcacagctgacattggttggataacaggtcatagttatataatttatggaccgttatcaaatggagcaactacgataatgtttgaaggaattccaacttatcctgataattctagatggtggcaaattgtagataaatataaagtaaatattttttatacagctccaacagcaataagagctttgatgagagatggtaataaaccagtaaaaaaaacatcaagaaaaacactaaaattgttaggtactgtaggagagcctataaatccagaagcttggcaatggtattataaaacagtaggtgactcaagatgcccaatagttgatacatggtgg

SEQ ID NO: 308636 - DNA, 760 bp, Unknown
  Bacterial polypeptide expressing nucleotide sequence isolated from the Sargasso Sea
atggtatttaaaaccgtgggagactctaaatgccctatagtagatacatggtggcaaactgaaactggtggaatattaataagcccacaaactggagcaatagatttaaaaccaggatcagctactaaacctttttacggtataaaaccagttatcgttgaccaggaaggaaaagtcttaaaaggtgaagccagaggaagattatgtatagctcaatcctggcctggacaaatgagaactgtttatggcgatcacaataggtttatagaaacttatttttcacaatttgatggtaaatattttacaggagatggttgcagaagagataaagatggatattactggattacaggtagagttgatgatgttataattgtatcaggacataatttaggaactgcagaaatagaaagtgcatttgttgcacatccaaaagttgctgaagcagctgtggttggttatccacatgatattaaaggtaatggcctttattgttatgtaacattaaatgtaggtgaaaatcctgatggagatcttgaaagagaattaaaactatgggttagaaaacaaattggaccaatcgcaacacctgaccttatacatttttctccgggccttcctaaaacaagatctgggaaaattatgagaagaattttgagaaaaattgcagcaaatgaacacgagcaacttggtgatacaacaactttagccgacccaagtgtagttaaaagtttagttgataatagaaaaaatatttaaa

SEQ ID NO: 308637 - DNA, 799 bp, Unknown
  Bacterial polypeptide expressing nucleotide sequence isolated from the Sargasso Sea
aggaactgttggtgaaccaattaatcctgaggcatggaagtggtactttgaaattccaggaaatagcaattgtcctatagttgatacttggtggcaaacagaaactgggggtattctaattgctcctcaaactggagctattgaattaaagccaggttcagctacaaagccattttatggaattaaacctagcatagtagataaagaaggtaatgaattagatggagaatgtgaaggtatgttatgtatttcccaatcttggccaggtcaaatgagaactgtatatggtgatcatgaacgctttgtttctacttatttctctcaatttgatggaaaatattttacaggagatggttgtaaaagagacaaagacggatattactggataacaggtcgagtagatgatgttattattgtctcgggtcacaatttaggaacagcagaaatagaaagtgcttttgtttcacataaaaatgtatctgaagcagctgtagtaggatatccacatgacatcaaaggaaatggtttatattgttacgtttctttaaatgtcggagtggaacaaagtgacaatttaatcaaggaactgaaaaatgttgtacgtgaaaaaattggtccaattgctactcctgatataattcattttacatctggcttacctaaaaccagatcgggtaaaatcatgagaagaattttaagaaaaattgcagctaatgaacatgatcaacttggagatacttcaactcttgctgatccaagtgtggtagatgatttaatttcaaatagattaaacaaataa

SEQ ID NO: 308638 - DNA, 898 bp, Unknown
  Bacterial polypeptide expressing nucleotide sequence isolated from the Sargasso Sea
gtaaacattttttatacagcaccaactgctatcagagctttgatgagagaaggtgataagcctgttaagaaaacatcaagaaaatcactgaaattgttaggaacggtaggagagccaatcaatccagaagcgtgggagtggtattataaaacagttggagattctaactgtccaattgtcgatacttggtggcaaacagaaacaggaggaatattaattagtccacaaacaggtgctattaatttaaaacctggatcagctactaaacctttttacggtattaaaccagtgatagtagataaaaatggaaaaactttaaaaggtgaggcagagggacgtttatgtattgcacagtcatggcctggccaaatgagaacggtttatggagatcaccaaagatttatagacacctatttctcacaatttgatggaaaatatttcacaggtgatgggtgtcgtagagataaagacggatattattggattactggaagagttgacgatgtaattattgtgtcgggtcataatttgggaactgctgaaatagagagtgcttttgtagctcatccaaaagttgctgaagctgctgttgttggatatcctcatgatattaaaggaaacggtttgtattgttacgttacattgaatgtaggagaaaaatctacacttgatttagagagagatctaaaactttgggttcgaaaacaaattggtccaatagctacaccagacttaatacaattttcacctggtcttccaaaaactagatcgggcaagattatgagaagaattctcagaaaaattgcagcaaatgaacatgatcaattaggtgatacaactactttagccgatcctagtgtagtaaaaagtttagttgaaaatagaaaaaatacttaaa

SEQ ID NO: 308639 - DNA, 337 bp, Unknown
  Bacterial polypeptide expressing nucleotide sequence isolated from the Sargasso Sea
ctgcatccagttgtagctgaagctgctgtggtgggctttgagcatccaataaaaggacaaggcatatatgcttttgttactttaatggtaggtgaagaattttcagatgaattatcagcagaattaagaaactttgttggcaaagaaattggtcctattgcaaaacctgacttaattcaaaatgctcccggtctaccaaaaactagatcaggcaagattatgagaagaatattacgtaaagttgctgaaggtgatttcgaaaacttaggtgatacgacaactcttgctgagcctgctgtggtttctgatcttataaataataaaaaaagtttatgaa

SEQ ID NO: 308640 - DNA, 643 bp, Unknown
  Bacterial polypeptide expressing nucleotide sequence isolated from the Sargasso Sea
aatgacagaaaagttgattgagtccatattgaatgagtctagaagctttgccccttcaaaaaagtttatcaaccaagccaatattgaaaaagaagaggagaaaagattaagggaagaagcttcacacaatcacattgaatattgggctaaattagccagggcccatttgcattggtttctcccatttaacaacatactggatgaatcaaatgcgcccaattatgaatggttcaatgacggagagatcaacgcttcttttaattcacttgatataaatgccaataaaaatccagaaaaaactgcaattatatttgaaacagaggatggaaactctgagcgcatcacatacaaagaccttcttttaagaacctgtcaatttgccaatggccttaagaagcttggtgtaatgccgatggatagggttgtgatatatatgcccatgtgccccgaggccgtgattgcgatgcaggcatgcgcaagaattggcgcaatacactctgttgtttttggagggttttcatcaaatgcgctcaaggacaggatagaggacgcccaatcaaaaattgtgattactgctgatggagcatatagaggcggaagcgttattccacttaaacaagcaacggatgaggcggtgacaaac

SEQ ID NO: 308641 - DNA, 664 bp, Unknown
  Bacterial polypeptide expressing nucleotide sequence isolated from the Sargasso Sea
ttgggtaaaaaagaactcatttttaaaacaaaacctgagtggtcaagaaatgccttggttaacaaatctgagtatgagaaaaaatatgaaaaatcgataaaaaataacgatgaattttggaaaaaagctggaaaaagaattacttggataaaacaatataataaaataaaaaatgttaaatatagcaaagaagatgtaaaaattaagtggtacgaggacggtactttaaatgcatcagcaaattgtatagatagacatttaaaagataaaaaagataaaacagcaattatatgggttggagataatccaaaagaatcaaaaaaaatttcttataaacaactacacaaagaagtttctaaaaccgcaaatggtctaaaagaattaggagtaaaaaaaggtgatagggtaactatttacttaacaatgatacctgagctagcaattacaatgttagcatgtgcaagaattggggctattcattcaattatatttggcggtttttcaccagactcaattgctggaagaattgatgactgtaaatctgattatgtaataacagccgacgaaggtcttagaggtggaaaaacaatcccattaaaagatatcactgatgaagctctttctaaatgtagagatataaaaaaatgtatagtagtcaaaagaa

SEQ ID NO: 308642 - DNA, 507 bp, Unknown
  Bacterial polypeptide expressing nucleotide sequence isolated from the Sargasso Sea
taaaaagatttatagatacatacttttctcaattcgatgggaaatattttactggagacggatgtagaagagataaagatggatattattggatcacaggaagagttgatgatgtaataattgtatcaggacataatctaggtacagcagaaattgaaagcgcttttgtagcacatcaaagagtggcagaagcagcagtggttggtttcccccatgatattaaaggaaatggattatactgctacgtaactttaaatgcaggtgaacaaccgagtggtgatttagaaagagatttaaagctttgggtaagaaaacaaattggtcctatagctactcctgatataattcaatttgctccagctttgcctaaaacaagatctggaaaaatcatgagaagaattttaagaaagattgctgccaatgaatataatcaattaggcgacacaacaacccttgcagatccaagtgttgtagaatctttaatagaaaatagacaaaataaataaa

SEQ ID NO: 308643 - DNA, 691 bp, Unknown
  Bacterial polypeptide expressing nucleotide sequence isolated from the Sargasso Sea
tatgtcggataaattcaataaaatttacaatcattcaataaaaaatcctgaaaaattttggcaagacgcggctgaggacatcttttggtttaaaaaaccaacaaaaattttaaataaatctaatccacccttctataaatggtatgaagatgggataactaacacttgttacaatgctctagacattcatattgatcaaggtcgaggaaaaaatactgctcttatctatgatagccctataacaggcaacaaaagtaaatttacctacgaagaacttagatctaaagttgcaaagtttgctggagcattaaaagctcaaggggttaacaagggtgatagggttattatttatatgccaatgatccctgaggcagtaattgcaatgcttgggtgtgcaagaattggtgcaatacattcagttgtctttggtggatttgcatctaacgaacttgcaagcagaattgatgatagtaaagcaaaactattagttactgcatcatgcggttttgagcctggaagaacagttgaatataaaccgctagttgatgaagccataaaaattgcaaaacataaaatagagaagatgattttatttcaaagaccaagccatgaagtaaaattaaatacaccaatagaaattagttgggatgaggtggtatcaaatgctgaagctgctgattgtgtgagatga

SEQ ID NO: 308644 - DNA, 322 bp, Unknown
  Bacterial polypeptide expressing nucleotide sequence isolated from the Sargasso Sea
tgatgttgcagaagctgccgtagtaggatatccacacgacattaagggaaattcaatctatgcttttgtaacgctgagaacgggaagagagattaccgaaaataccagaactgaaattgctaaactcgtaagagctgatattggaccccatgccactcctgaaaaaatacagtttacagagggtctaccaaaaacacgttctggaaaaattatgcgaagaattctaagaaatattgcatccgataatatcgatgacttaggagacatttctacgttagctgatcctagtgttgttgaatcgctcgtaaataatcgaatttaa

SEQ ID NO: 308645 - DNA, 967 bp, Unknown
  Bacterial polypeptide expressing nucleotide sequence isolated from the Sargasso Sea
atggctgaaaataatcctgataaagttgctattatttgggagggtgatgatccaaatgaaacaaagaaaataacctacaaagaccttctaattaatgtatctaaagcagcaaatgtactaaaaaaaattggagtaaaaaaaggtgatcgagtaacgatatacttaacaatgatacctgagttagcttatattatgttagcttgtgcaaggattggtgctgtacactcaatcatttttggtggtttttcttctgagtctattgccggtagaataaaggattgtagatctgaatatgttgtaacagcagatgaaggaattagaggtggtaaaactattcctttgaaattaactacagataaagcattggagtcatgccctgatgttaaaaagtgtttggttgttaaaagaacaaataaagaaatagaattaaaaaaggatagagatttattttatgatgatatcataaaagaagttgatagcatttgtgaaccagaagttttaaatgcagaagatcctttgttcattttgtatacctcaggatcaactggtaaacctaaaggtgttatgcatacatcaggtggatatatagtttatgcttcaatgacacatgaatatatttttaattataataatgaagatatatattggtgtactgcagatataggttggattactggacacagttatataatttatggacctctagctaatggtgctacgactttgatgttcgaaggtgtccctaattatcctgacttctcaaggttttggcaaataattgacaaacataaagtaaatatattttacacagcgcctactgccattagagccttaatgagagaaggtgatgattatgtaacaaaaactaatagatcatctttaaaacttttaggaacagttggtgagcctattaatccagaagcttggaagtggtattttgaggtaccaggaaattcaaaatgtccaa

SEQ ID NO: 308646 - DNA, 490 bp, Unknown
  Bacterial polypeptide expressing nucleotide sequence isolated from the Sargasso Sea
aacatatttttcacaatttgatggaaagtattttacaggtgatggatgtagaagagataaagatggctattactggataactggaagagtcgatgatgtgataatagtatcaggtcacaatttaggaactgcagaaattgaaagtgcgttcgttgcgcatcctaaagtagctgaagctgcagtggttgggtacccacatgatattaagggtaacggactttactgctacgttactttaaatgctggagaaaaaaatactttagatttagagagagagttaaaattatgggttagaaaacaaattggtccaatagcaactcctgacttaattcaatttgctcctggactgccaaaaacaagatcaggtaaaataatgagaagaattctaagaaaaattgctgctaatgaacatggtcaattaggagatacgaccactttagctgatccttctgttgttgaaagcttagtagataatagaaaaaatatttag

SEQ ID NO: 308647 - DNA, 925 bp, Unknown
  Bacterial polypeptide expressing nucleotide sequence isolated from the Sargasso Sea
tggtattatgatggaactttaaacgcatcagcgaattgcattgatcgtcatttaaagaaaaataaagataaaacagcaattatttgggttggagatgatccaaaagtacaaaaaaaaattagctataaacaattacatcaagaagtttcaaaagcagcaaatggattaaaagaaataggagtaaaaaaaggagatagagttacaatttatttaacaatgatacctgaactagcatatacaatgttagcatgtgcaagaataggtgctgttcattcaattatctttggaggtttttcagcagacagtatttctggaagaattaatgattgtaagtctgactatattattactgctgatgaaggtgttagaggtggaaaaactatacatttaaaagaaacagttgatgaagctcttttgaattgtccaaatgttaaaaagtgtattgtggtaaaaagaactggaaacagaattaattgggatgaaactagagatgtttggtatcacgatataactaaaagggcttctaagaattgtgaacctgaggaaatgaatgcagaagacccgttgtttattttatatacatctggatccacaggaaaaccaaaaggagttttacacacgactggtggttatatggtttatgcctcaatgacccatcaatatatttttaattataaaccaaaagatatatactggtgcacagctgatattggctgggttacaggtcacagttatattatttatggacctctttcaaatggagcaacaacaattatgtctgaaggtattcctaattatccagattggtcaaggtggtggcaaatagtagataagtttaaagtaaatatcttttataacgccccaacagcaataagagctatgatgagagaaggggatgagcctgtaaaaaaaacatcaagaaaaa

SEQ ID NO: 308648 - DNA, 509 bp, Unknown
  Bacterial polypeptide expressing nucleotide sequence isolated from the Sargasso Sea
agagagatatttagagagttattgggaatatatttccattaaaggagaaaaaaatgtttattttgctggagatggagcacgcattgatgaagatggatatatatggattatgggtagagttgatgatgtcataagtgtttcaggacatcggttaggaacaatggaaatagaatctgctttggtaagtcataaatcagttgcagagtctgcagtagttggcaaaaaagatgatttaaaaggtgaagttatagttgcttttgtatctctagagaaagacgtgaacggttcttcagaattagtagagaatctaaagaaacatgttgttaatgaaattggaattatcgcaaagcctgaaaaaattataatttctgactctcttccgaaaacacgtagtggaaaaattatgaggcgtattttaagatctttggctgctggagaaaaaattagcggtgatataagcactcttgaagatagttctgttttggaaaagctgaaagaattatcctaat

SEQ ID NO: 308649 - DNA, 883 bp, Unknown
  Bacterial polypeptide expressing nucleotide sequence isolated from the Sargasso Sea
acattaatgtttgagggcgtgcctaattatccaaatttctcaaggttttgggaagtaatagataagcataaagtaaatattttttacacggcaccaacagcaattagagcattaatgagagagggtgatgattatgtaaaaaaaacatcaagatcttctctaaaattacttggaactgttggtgagccaataaacccagaagcttggaaatggtattatgaagttccaggaaattcaaaatgtcctattgtagatacatggtggcaaactgaaactgggggaatattaatatcacctcaaagtggggctattgatttaaaaccaggctcagcatctaaacctttttatggaattgaaccatgtatagtaaataaagatggtgaagagcaaactggtgaagcagagggaatgttatgtcttcaaaattcttggcccggtcaaatgcgcagcgtgtatggtgatcataaaagatttatatcaacttatttttcacaatttgatggaaagtattttactggagatgggtgtaggagagacaaagatgggtattattggattaccggaagagttgatgatgtaataattgtatcaggtcacaacttaggaactgcagagattgaaagtgcttttgtttctcacccaaaagtatctgaggctgctgttgttggatatcctcatgatataaaaggaaatggattatattgttatgtttctcttatagttggaacagaaagtaatgaagatttaaagaatgaattaattcagactattagatcaaaaattggtcctattgccacccccgattttatacattttgccgatgggctacctaaaacccgttcaggaaaaataatgagaagaatattaagaaaaatgcagcaaa

SEQ ID NO: 308650 - DNA, 783 bp, Unknown
  Bacterial polypeptide expressing nucleotide sequence isolated from the Sargasso Sea
agatgttttatatagtaaggatgaggtaaaaattaaatggtactttgatggaacgaccaatgtatcttataattgtgtagataggcatgccaaaaatacaccaaataaaactgcaataatttgggaaggtgatgacccggctaaagtaaaaaaaataagttataaagaattacaatctgaagtttgtaaaattgcaaatgtcttaaaaaaaattggtgtaaaaaagggtgatagagtaaccatctatttaacaatgatacctgaattggcatatgtaatgcttgcatgcactagaattggagcaatacattccataatatttggtggtttttcttctgactcaatagctggaagaattaaagattgtaattctgaatatattgtaacagcagatgaaggaattagaggtggaaaaaatattccacttaaagaaataacggatagagctctagatagctgtccggatgtaaaaaaatgtttagttgttagatatacagaaaataaagttaatatgattgataaaagagatacatatatcgatgaattaatttctgatgttgatgattattgtgagcctgaggaaatgagtgctgaagatccgctttttatcttatatacatctggctcaacaggaaaaccaaagggtgtcctgcacacaacaggtggttatattgtttatgcgtctatgactcatgaatatatttttaattataagaagaatgatatctattggtgtacagcagacattggttggataactggacatagttatataatttatgg

SEQ ID NO: 308651 - DNA, 934 bp, Unknown
  Bacterial polypeptide expressing nucleotide sequence isolated from the Sargasso Sea
atgtatgcgcgctcaattaatgattctgatgtattttgggaagagcaagccgaagaatttataacttggttttcgaagtgggatattattcaagagtggaattttagtgatattacaataagctggtttaagaatgctaaattaaatgttagttataattgtattgatcgacatttagaaaaaagaggagatcagattgcaattatttgggaaggcgatgatcctgatgatcaaaagtatattacttaccgtgaattacacgaagaagtttgtaagttttccaacgttttaaagtcacgtggaattaaaaaaggcgattgtatatccatttatatgccaatggttcccgaagcagcagttgcaatgctcgcttgtactcgtattggcgctatacactctgtcgtttttggtggtttttcaccagagtcactcaaagaccgcatattggactctgattgcaaactgatagttacagcagatgagggcattcgtggcgggcgtttcataccgcttaaagaaaatgttgatatagctcttactgaatgtccaaatgtgcacactactgttgttattcagcgaactggtagaaaaattgcttggaataaaaatcgtgatgttttttatcatgaggcaatggaaaaagtttcgtctaattgcccagcagaagaaatggacgcagaggatcctttattcattttatatacttctgggtcaaccggaaaaccaaaaggcgttctacattcaacagctggttatctcttattcactgcaatgacacataagtatgtattcgattatcgtgataatgatatttattggtgtacagctgatgttggttgggttactgggcactcatatataatctacggcccactttgtaatggagcgacaacactaatgtttgaaggagtgccaacttacccagatgcaagtc

SEQ ID NO: 308652 - DNA, 252 bp, Unknown
  Bacterial polypeptide expressing nucleotide sequence isolated from the Sargasso Sea
atgttggtgtggattcaacagatgatttaattcaagatttaaaaaatactattagagaaaaaattggtcctattgctacacctgattttattcatattactgctggtttaccaaaaacaagatctggaaaaattatgagaagaattttaaggaagattgcttcaaatgattttgaaaatttgggagatacttctactttggcagatccatctgttgtagaaaatcttattgaaaaaagaaaaaataaataaa

SEQ ID NO: 308653 - DNA, 817 bp, Unknown
  Bacterial polypeptide expressing nucleotide sequence isolated from the Sargasso Sea
atgtcagagaaatttagcaaaatttacgatttttctattaaagatcctgaaaaattttggcaagaggctgctaacgatatcttttggtttaaaaaacctacaaaaattttaaataaatctaatccccctttttacaaatggtacgaagatggggtgaccaatacatgttataacgccttagattttcatattgaccaaggaaaaggaattaaaactgctctaatttacgatagtcctattacaggaaacaaaagtaagttcagttatgaagaattaagatcaaaagtctcaaagtttgcgggtgcacttaaggatcaaggtgttagtaaaggggatcgagtaataatttacatgccaatgatacctgaagcagtagttgcaatgctagcttgtgcaagaattggtgccatacactcagtagtgtttggaggttttgcttcaaatgaacttgcaagcagaattgatgatagtaaggctaaaattttagtgaccgcttcatgcggttttgaacctggacgaactgttgaatacaaacctttggtagatgaagcaatcaaacaagctcaacataaaattagtaagatgattttatttcagagaaaaggtcacgaagtaaaattaaatgcgccaatggagattagttgggatgaagcacatgctaatgccaaagatactgattgtgttgaaatgaattcaaatgaatttgcctacatactttatacctcaggtacaactggaacaccaaaaggtatcgtaagagatattggtggccacatcgttgcattaaaatggacgatgaaaaatatttataacattg

SEQ ID NO: 308654 - DNA, 994 bp, Unknown
  Bacterial polypeptide expressing nucleotide sequence isolated from the Sargasso Sea
taaaaaaggagatcgagttacaatttatttaaccatgatcccagagcttgcaattttaatgttagcatgtgttagaattggagcagtccattcaattatatttggtggtttttctgcagaatcgatttcaggaagagtaaatgattgcgaatctgaatatataatcactgctgatgagggagttagaggaggaaaaactattccattaaaatatacaaccgatgaagctctcacaagttgtccaaatgtaaaaaaatgtattgtggttaaacgaacaggaaattacatcaattggaatgaggaaagagatgtttggtatcatgatttaattaaagatgtttcaaatcattgtgagcctgaagaaatgaatgctgaggatcctttatttattttatatacctcaggatcaactggtaaaccaaaaggagttcttcatactacgggtgggtatatggtatatgcatcaatgacccatcaatatatttttaactataagccaaaagatatttattggtgtactgctgatattggatgggtaacgggtcatagttatattatttatggaccccttgctaatggtgctacaacaataatgtttgagggaattcctaattatcctgacacttcaaggtggtggcagatcgttgataaatataaagttaatattttctatactgctccaacagcaatcagagctttaatgcgtgagggtgataagccagttaaaaaaacctctagaaagtctcttaaattgcttggcactgttggtgaaccgattaatccagaggcttggatgtggtattataaaacagttgggaactcaaagtcaccgattgttgatacttggtggcaaacggaaacaggtggaatactaatagcccctcaaactggagctattccattaaaacctggttcagctacaaaaccgttctatggaattaagcctgttatcgtcgataaaaacggcaaagagataaaaggagctggcgaagga

SEQ ID NO: 308655 - DNA, 733 bp, Unknown
  Bacterial polypeptide expressing nucleotide sequence isolated from the Sargasso Sea
tggtaagccaaaaggcgtattgcatactactggcggttatatggtttatgcctcactgactcatcaatatatttttgattataaacctaaagacatttatttttgcagtgctgatattggttgggtaactggtcatagttatattatttatgggcctttatctaatgcggctaccacgattatgtttgagggtatcccaacttatccagatttttcgagatggtggcaaataattgataagtacaaagtaaatattttttatactgcgcctacggcgattagagcgttgatgaaagaaggcgatgaaccagttaaaaaaacaagcagaaagtcacttaaattattaggaaccgtgggagaaccaattaatcctgaggcttggatgtggtactacaagattgttggtgactcaaaatgcccaattgttgatacatggtggcaaactgagacaggtggaattttaattgcccctcagccaggtgctatagatttgaaaccaggatctgcaacaaaaccattttatggtattaaacccgcaatagtagatgagacgggaaaagttttgaaaggtgcttgcaaaggaagattatgcttaaccgcatcgtggcctggacaaatgagaactgtttacggtgatcacgatagatttataaagacttatttttctcaatttgatggtaagtattttacaggagatggctgtaggagagacaaagatggttattactggatc

SEQ ID NO: 308656 - DNA, 449 bp, Unknown
  Bacterial polypeptide expressing nucleotide sequence isolated from the Sargasso Sea
tggctgcagaagagataaagatggatactactggattacaggtagagttgatgatgtaataatcgtgtcaggacataatttaggaactgcagaaatagaaagtgcatttgttgcacatccaaaagttgctgaagcagctgtcgttggctatccacatgatattaaaggtaatggcctttattgttacgtaacattaaatgtaggagaaaatcctgatggagatcttgaaagagaattaaagctgtgggttagaaaacagattggaccaatcgcaacgcctgatcttatacacttttctcctggacttcctaaaacaagatctggaaaaattatgaggagaattttaagaaaaattgcagcaaatgaacacgaacaacttggtgatacaacaactttagccgacccgagtgtagttaaaagcttagttaataatagaaaaaatacttaaa

SEQ ID NO: 308657 - DNA, 901 bp, Unknown
  Bacterial polypeptide expressing nucleotide sequence isolated from the Sargasso Sea
cgtggcggcaagaaagtgccgctcaaggccaacgtcgacgacgccctgaccaaccccgagacccgcagcatccagaaggtcatcgtggtgcagcgcaccggttccgaaatcaagtggaaccagcatcgtgacatctggtacgaagacctgatgaaggtggctggcagcgtctgcgcacccaaggaaatgggtgctgaagaagccctgttcatcctctacacctccggttccaccggcaagcccaagggcgtgctgcacaccaccggcggctacctggtatacgcctcgctgacccatgagcgcgtgttcgactaccgtccgggcgaagtcttctggtgcaccgccgacatcggttgggtcaccggccacacctacctggtctacgggccgctggccaacggtgccactaccgtgatgttcgaaggcgtaccgaactatccggacgtttcccgcgtggccaagatcgtcgacaagcacaaggtcaacatcctctacaccgccccgactgccattcgcgccatgatggccgagggcaaggccgcggtcgaaggcgccgatggttccagcctgcgtctgctcggttcggtcggtgagccgatcaacccggaagcctggcagtggtactacgagaacgtcggtcagagccgttgcccgatcgtcgacacctggtggcagaccgaaaccggtgcctgcctgatgaccccgctgccgggtgcccatggcctcaagccgggctccgctgcacgtccgttcttcggcgtacagccggcgctggtggacaacctgggcaacatcatcgaaggcgctgccgaaggcaacctggtgatcatcgactcctggccgggtcaggcacgtaccctgtacggcgaccacgaccgcttcgtcgacacctacttcaaga

SEQ ID NO: 308658 - DNA, 867 bp, Unknown
  Bacterial polypeptide expressing nucleotide sequence isolated from the Sargasso Sea
gagcatttatgaagtggggagttgaacatccaaaagctcacgatttaagctcattaagattacttggatctgttggagaaccaataaaccctgaagcgtggatgtggtatcacgaaaatattggaaatgagcaatgcgctattgttgatacatggtggcagacagaaactggctccattatgatttcacctctgcctgggataaccagtacaaagccaggatcagcatgtggaccattacctggggttgactctgtcattattgatgaaaaaggcaatgaagttgggaaaggtgaaggaggttatcttgcaattaaatctccttggccatccatgttaagaactgtatatggagacgataaaagatatattgatacatattggtctcaacacgaaggcctgtactttgccggtgatggcgctaaatatgacgacgatggttatgtgtggcttcttggaagagtagatgatgtaatgaatatctctggtcatagaatttctactgctgaagtagagagcgcactagtctctcatgaatctgttgctgaggctgccgtaattggcagatccgatgaaataagtggagaagcaattgctgcatttgtttcattgattggaacagatgcaggagatgaaaaattaatatcagaattaaggcaacatgtaagcgacaagattggacctatagcaaaaccaaagagcattgtaataacagctgatcttccaaaaacaagaagtggaaaaataatgagaaggttattaaaagatatttcagaagaaagaaaattgggtgatgtaactacacttgcaaatgctgatattgtctctgaattgcaacagaggtcatcagaaagtgatgaagattaat

SEQ ID NO: 308659 - DNA, 887 bp, Unknown
  Bacterial polypeptide expressing nucleotide sequence isolated from the Sargasso Sea
tatgaaaatacaaaaacattggaaggataacgctcttgtaactcccaaagattatgaagacctttatactagatctataaatgacaatgatggtttctggaaaaaacagggtgaacgtttagattggattaaaaaatattccaaaataaaagatattaaatatagctcaacagatgtaaatattaaatggtattacgatggtgaactaaacgtatctgaaaattgcattgatagacatgctaaaaataatcccaataaaattgctataatctgggaaggcgatgatccaaaaaacactttaaaaattacttacaaggagcttcttttaaatgtttcaagaacagcaaatgctttaaaagaattaggtatacaaaagggtgatagagtaaccatttatttaacaatgattcctgaacttgcttatacaatgttagcttgcgcaagaattggtgctgttcattcaattatatttggtggcttctcttcagaatctattgcgggcagaatcacagattgtaaatcagaatttgtaattactgcagatgaaggaattagaggtggaaaaacaattccattaaagaaaattatggacgaggcacttaaaaattcttcaaatattaaaaaatgcatagttgtaaaaagaactggaaacattgttaacatggaaaaagaaagggatgtttatttagatgatatcttaaaaaatgttagtgatcattgtgaaatagcaacaatgaatgctgaagatcctttatttattctctatacttctggctcaactggaaagcctaaaggagtgcttcatacatcgggaggttatttagtttacgcctcaatgacacatgaatatatatttaattataaagaaaatgatatttattggtgta

SEQ ID NO: 308660 - DNA, 947 bp, Unknown
  Bacterial polypeptide expressing nucleotide sequence isolated from the Sargasso Sea
atggtttatgcttctatgactcatcaatatattttcaattataaaccgaatgacatttattggtgtacagcagatattggatgggtaactggtcatagctatataatttatggaccattagctaatggtgcaacaactattatgttcgaaggtgttccaaattacccagatagttcaaggtggtggcagatagtagacaagtacaaggtaaatactttttatacagcgccaacagctataagggccttgatgagagaaggtgatggcccagttaataaaactactagaaaatccctaaaactattaggaactgttggagagcccataaatccagaagcgtggatgtggtattacaaaactgttggtaattcaaaatgtccaatagtcgatacatggtggcaaacggagacgggaggaattcttattgcaccacaaactggagctattccacttaaacctggatcggcaacaaaacctttttacggaattaaaccagtgctggtgaataaagatggtaaagaaataaaaggtgaaggtgaaggtaggctttgtatagctcaatcttggcctggtcaaatgagaacagtttatggtgatcatcaaagatttattgatacatatttttcacagtttgatggaaaatatttcactggagatggatgtaaaagagataaagatggctactattggataactggtagagtagatgatgtaattattgtctctggtcataaccttggtactgctgaaattgaaagtgcctttgttgcccatcccaaagtagctgaggctgctgtggttggatatcctcatgatattaaaggaaatggtttatattgttacgtcaccctcaatgcaggtgagagtgagacaggagatttagatagagaattaaaactttgggtgagaaaacaaatagggcccttggcaacaccagatctaattca

SEQ ID NO: 308661 - DNA, 819 bp, Unknown
  Bacterial polypeptide expressing nucleotide sequence isolated from the Sargasso Sea
tagaatcgttaagattactaggtactgtaggagaaccaatcaatcctaaggcttgggagtggtatcattcaaaaataggttcttcaaaatgtccagtagttgatacatggtggcaaactgaaacaggagctaatatgattgcgccgatacctggcgttactaatactatccctggtacttgtaccaaaccattaccaggtattgatgtagggattgtagacaatgatggtatagaaattgatgaaccaaataaaggtggtaatttagtaatcagacaaccatggccctcaatgctcagaggaatatggggcgataatcagcgatatcttgatacatactggaagaaatactctaataaattttatgtaactggagacactgctcgatttgacgaactggggaatatttggattatgggtagagccgatgatgttgtgaatatatctggtcataggctaggaactatggaaattgaatcgtccattgtctctcatgagtatgtagctgaggctgcggtagtaagttttaagcatgaaattaaaggagaggcaatacatgcgttcgttacgctgaaaaataattattctcaacataatacgaaagaattcgcagatgaaattagggattgggtaaaagaaaaaataggctcaattgccaaaccagaccgtatatcattttctagcagtcttccaaaaacaaggtctgggaaaataatgagacgacttcttagaaatttagcaagggatgaaaatattactggtgatatttctacgcttgaaaacgaagatgtaattacccaactcagaaaaactttataac

SEQ ID NO: 308662 - DNA, 937 bp, Unknown
  Bacterial polypeptide expressing nucleotide sequence isolated from the Sargasso Sea
gcggggtcctgctccttacccttccaggagaagcactgcgcagtctgctgtgaccgacgccaacaccaccatcgaaagcgtgctgcaggagcagcgggtgttcgagccgccagcagacaccgccgccaaagcgcgcatcggcagcctcgaggcctaccgggccatggccgatgccgccaaaaacgatcctgatgcgttctggggtgaggccgcccgtcgagaactgcattggttcgagcccttccacaccgtgctcgattggtcgaatcctccgttcgcgcgctggtttgagggcggcaccaccaacctctcctacaactgcctggaccgtcatctcgatgggccaacggcgcagaagacagcgttgatctgggaaggagaaccgggggatgtgcgccgtttcacctaccaggaactgcatgccgaggtgtgcaaagccgccaatggcctcaaggccatgggcatcggcaagggtgaccttgtggcgctctacatgccgatggtgccggaagcggcgatcgccatgctcgcctgcgcccgcatcggtgcaccccattcagtggtgttcggcggcttttccgccgaagccctgagggatcggctcaacgatggtgaagtgaaagcggtgatcaccgctgatggcggcttccgcaaagacaagccggtgtcactcaagcccgcggtggatgcggcgctggccaatggcgcctgcccctcggtgaccggcgtgcttgtggtgcagcgcaccaagcaggacgtggagatggtctccggtcgtgatcagtggtggcatgacctggtcgagggtcagagtgccgactgccccgctgagccgatggtcagcgaggaccgactgttcgtgctctacacctccggctccaccggcaagcccaagggtgttgtgcacaccaccgccggctacaaccctctggggccc

SEQ ID NO: 308663 - DNA, 907 bp, Unknown
  Bacterial polypeptide expressing nucleotide sequence isolated from the Sargasso Sea
aatgaaaaaatattctgttccaaaaaatttccactcgtctgttggacataatagtcttgatagctatcaatttttaagagaaaatgcagagcaagattctaagtcctattgggagtcagttgcagagcgcattgattggtttgataagtggacagatgttaataatacagattattctaaagcacatattgagtggtttacagatggaaagttaaatgcgtcttacaattgtattgataggcatattgaaaacggtttaggagaaaaaacagctcttatttggcaatcaaatgatccagctatctcaacaaatgtcacgtataatgaattacttgaaaaagtttcattatttgctaatggattaaaacgagctggaattaaaaaaggtgatcgtgtatgcatttatatgcaaatgattcctgaagctattgtagcaatgcttgcttgtgcacgaattggagcagtgcattcagttgtttttggagcattttcaagcgacgccttaaaaaatagaattaatgattcagaatgtaagctacttattacgcaagataacggagtacgtggatccaaatttgatattccaatgaaagaaaatgctgataaaattgcagataaatgcccttccttaacaacagtagtaatggttgaacgttctggtaatgatatgtttatgaaagaaggtagagatattacttggaaccaatttattgatggatgttcaagtgaatgtcctgctgaagtgatggacgcagaagatccattatttattctatatacttctggatcaactggaaaaccaaaaggggtaatgcacaccacaggtggatatcttgtctatgcttcacatactcatgaattagtttttgattatcacaaagatggatatctactggtgtactgctga

SEQ ID NO: 308664 - DNA, 652 bp, Unknown
  Bacterial polypeptide expressing nucleotide sequence isolated from the Sargasso Sea
tctgactatgatacctgagcttgcttatacaatgctagcatgtgccaggataggtgcagttcactcgataatatttggtggtttttctccagatagtatttcaggtagaattaatgattgtgagtccgattatgtaataactgcagacgaaggagttagaggtggcaaaacaattccattgaaatctattacagatgaagccctgcagagctgcccaaatgttaaaaaatgtattgtggtaaaaagaactggtactaagaaaatagattggtttaatgatagagatgtctggtatcatcaaatgactaagaaagtttcatccaaatgtgaacctgaggaaatggttgctgaagatcctctattcattctttatacatctggttcaacaggaaaaccaaaaggagttctacatacgactggtggatatatggtttatgcatcaatgactcaccaatatatttttaactacaaaccaaaagatatttattggtgtacagctgatattggatgggttactggacacagctatattatttatggtccactagccaacggcgccacaacaataatgtttgaaggaataccaacatatcctgattcatctagatggtggcaaatagttgataaatataaagtcaatatattctatact

SEQ ID NO: 308665 - DNA, 919 bp, Unknown
  Bacterial polypeptide expressing nucleotide sequence isolated from the Sargasso Sea
aatttatttaacaatgataccagagttagcaattttaatgctggcctgtgtaagaattggtgcagtccattctattatttttggaggtttttcagcagattctatttcaggaagagtaaatgattgtgaatctgagtacatcataactgctgacgaaggagtgcggggtggaaaaactataccacttaaatatacagtcgatgaagctttgatgagttgtccgaatgttaggaaatgtattgtagttaaacgaacaggtaattacattaactgggatgaaaatagagatgtttggtatcatgatttaatcaaagacgttcctaatcattgtgaacctgaagaaatgaatgcagaggatcctttatttattttatacacttcgggatcaacaggtaaacctaaaggagttcttcacaccactggtggttatatggtttatgcatcaatgacccatcaatatattttcaactataaaccaaaagatatttattggtgcactgctgatattggttgggtaactggacatagttatattatttatgggccactttcgaatggggcaacgactataatgtttgaaggaattccaaattatcctgatagctcaagatggtggcaaatagttgataaatataaggtaaatactttttatactgcaccgactgcaattagagctttaatgcgtgagggagataaaccagttaaaaagacatctaggaaatcactcaaacttttaggaacggtcggagaacctataaatccagaggcatggatgtggtattataaaactgtaggtaattctgaatgcccaattgtagatacttggtggcaaacagaaactgggggtatcatgattgcaccacaaacaggtgctattcctcttaaacctgtatctgcaacaaaaccattcaatggaatt

SEQ ID NO: 308666 - DNA, 712 bp, Unknown
  Bacterial polypeptide expressing nucleotide sequence isolated from the Sargasso Sea
cttggtggcaaccgaaacaggtgggataatgatttctcctcaaactggtgctatccccttaaaacctggttcagcaacaaaacctttttatggaattaagcctgttcttttagataaaaatggtaaagaaattaaaggtcctggcgaaggacgtctttgtattgctcaatcatggccgggtcagatgagaactgtttatggcgatcatcaaagatttatagatacttatttctctcaatttaatggaaaatattttactggcgatggttgtagaagagataaagacggatactattggatcacaggaagagtcgatgatgtaatcattgtatctggacacaatcttggtactgcagaaattgaaagtgcatttgtagcgcacccaaaagtggctgaagctgccgttgttggttatcctcacgatattaagggtaatggattgtattgctatgttactttaaatgctagtgagaaagaaaccggagagcttgaaagagatttaaaactttgggttagaaaacaaataggtccgcttgcaactccagacttaattcattttacacctggtctaccaaaaacaagatcgggtaagatcatgagaagaattttaagaaaaattgcagccaatgaacatgatcaattaggggatactactaccttagctgaccctagtgtcgttgaaagtttggttgataacagaaaaaatatttaa

SEQ ID NO: 308667 - DNA, 871 bp, Unknown
  Bacterial polypeptide expressing nucleotide sequence isolated from the Sargasso Sea
aaaattaaaaaaaaaaattaaagcaaaaaaagaaaacggaaatacacctcctgaagttattattaaaacaaaaccagaatgggttaaaagtagcttagcaaacaaaagtaaataccagcaaaaatattctcaatctataaagagcaatgatgaattttggagaaaagaaggaaaaagaatttcatggataaaaccttataaaaaaattaaagacgtaaaatacagtacaaaagaagtaaaaattaaatggtttgaagatggcactttaaatgcttcagcaaattgtattgatagacacttaaaagataaaaaagataaaaccgctattatttgggtgggtgatgatccaaaagatagtcaaaagatttcttataaacaacttcaccaaaaagtttcgaaagcagctaatggtttaaaaaaattaggaattaaaaaaggtgaccgtgtaacaatttatttaactatgataccagagttagcaattttaatgctggcctgtgtaagaattggtgcagttcattcgattatttttggtggtttttcagcagactctatttctggaagagttaatgattgcgagtctgaatacatcattactgcagatgaaggagtgcgaggtggaaaaactattccactgaaatatacagtagatgaggctttaatgagttgcccaaatgttaagaaatgtattgttgtaaaacgaacaggtaattacataaactgggatcaaaatagagatgtttggtttcatgatttaattaaagacgtaccaaatcattgtgaacctgaagaaatgaacgctgaagatcctttgtttattttatatacttcgggttcaacaggtaaacctaaaggagttcttcatactact

SEQ ID NO: 308668 - DNA, 427 bp, Unknown
  Bacterial polypeptide expressing nucleotide sequence isolated from the Sargasso Sea
tggttattactggatcactgggcgagttgatgatgttataatcttttctggtcataatttaggaacagctgaaatagaaagtgcttttgttgcacataacaaagttgcagaagctgcggtagttggattccctcaccagattaaaggaaatggactctactgttatatcactttaaatgcaggtgaaaatccaagtggagatttagaaagagaattaaaattatgggtaagaaaacaaatagggcctatagctacaccagattacattcaatttgctccaggactacctaagacaagatccggaaaaattatgagacgaatattaagaaaaattgcagctaatgagcaccatgatcttggcgatacaacaactttggctgatccatctgtagtagaatctttaattgaaaaaaggaaagagaaataa

SEQ ID NO: 308669 - DNA, 868 bp, Unknown
  Bacterial polypeptide expressing nucleotide sequence isolated from the Sargasso Sea
aatgctgaagatccattattcatttctttacacatctggttcaactgggaaaccaaaaggtgtgctacatacaactggtggatatatggtttatgcatcaatgactcaccaatatatttttaattataaacctaaagatatttactggtgcacagctgacataggttgggttacaggacatagttatataatttatggtccacttgctaatggtgcaactacaatcatgtttgagggaatacctacttatcctgatacatctagatggtggcatatagttgataaatataaagttaatattttttatacagctccaacagcaatcagagctttaatgagggaaggtgataagcctgtaaagaaaacatctagaaaaactttaaaacttttaggtactgttggtgaaccaattaaccctgaagcttgggaatggtattacaaaaccgttggtgaaagcagatgcccaatcgttgatacttggtggcaaacagaaacaggtggaattttgatcagtcctcaaactggtgccatagatttaaaacctggttccgcaacaaaaccattttacggaattaaaccagagatcctagataaagatggaaaggttttaaaaggagaagcgcaaggtagactttgtatttcacaatcatggcctggacaaatgagaagtgtatatggtgaccatcaaagatttatagatacttatttttcacagtttgatggaaagtactttacgggtgatggctgcagaagagataaggatggatactattggattactggaagagtagatgatgtaattattgtttctggtcataatttaggtactgcagaaattgaaagcgcgtttgtagctcatccaaaagta

SEQ ID NO: 308670 - DNA, 700 bp, Unknown
  Bacterial polypeptide expressing nucleotide sequence isolated from the Sargasso Sea
tatgcaaaacaagtttaaagaaatttatgacaattcaatcaaaaatcctgaaaaattttggaaagaagcttctgaagatatcttttggtttaaaaaaccaacaaaaattttgaatacatctaatcctcctttctataaatggtatgaagatggagtcacaaacacttgttacaatgctttagatattcatattgatcaaggtagaggtaaaaaaactgcattaatctacgatagccctatcactggtaaaaaaagtcaatttacttatgaggagttaagatcaaaagtttctaaatttgcaggggcattaaaaaatcaaggcgctaataaaggagatagagtaataatttatatgccaatgatcccagaggcagtagttgccatgcttgcttgtgctagaattggtgcaattcactcggtggtcttcggtggatttgcctcaaatgagcttgcaagcagaatagatgacagtaaagcaaagttattggtaactgcttcatgtggttttgagccaggaagaactgttgaatacaaaccacttgttgatgaagcaataaaaatagccactcacaaaattgaaaagatgattttattccaaagacctaaccatgaggttcatttaaacacaccaaaagaggtcagctgggaggaagttgtctccaaagctaaagatactgactgtgttgagatgagttcaaat

SEQ ID NO: 308671 - DNA, 837 bp, Unknown
  Bacterial polypeptide expressing nucleotide sequence isolated from the Sargasso Sea
gtgtctgctgatgttggttggatcacaggccatagttatatagtttatggccctttttctaatggagctacaacattaatgtttgagggagttccaagaccctctaatttaggtgctttttgggaaattgttcagaaatacaaggtgtcgattttttatactgctccaactgcaattagagcatttatgaagtctggacgagaaattcctgatcaatataatcttgaaagtcttagacttttgggcacagttggagaaccaattaatcctgaggcatggatgtggtacaaagatgttattggtaaaaataaatgtcccatagttgatacttggtggcaaactgaaactggtggtgtgatgattagccctttgcctggagttgttgcgacaaagcctggttcagctacctatcccttacctggaattgaagttgaagttgtcgataagaatggagataaagtaatggataacgagggaggctatttaattatcaagaagccttggccagggatgatgagaacaattcatggaaatccagaaagatacctagagagctattgggaatatatatcatttaaaggagaaaaaaatgtttattttgctggagatggagcacgcattgatgaagatggatatatatggattatggggagagttgatgatgttataaatgtttcaggtcatcggttaggaacgatggaaatagaatctgctctcgtaagtcatgaattagtcgcagaagctgctgttgtaggaagaagagataatttaaaaggagaagttatagttgcatttatatctttagaaaaagatgtgcatagttctccagaattagta

SEQ ID NO: 308672 - DNA, 754 bp, Unknown
  Bacterial polypeptide expressing nucleotide sequence isolated from the Sargasso Sea
cgaaaatattggaaatgagcaatgcgctattgttgatacatggtggcagacagaaactggctccattatgatttcacctctacctgggataaccagtacaaaaccaggatcagcatgtggaccattaccaggggttgactcagtaattattgatgaaaaaggcaatgaagttggaaaaggtgaaggaggttatcttgcaattaaatctccttggccatccatgttaagaactgtatatggagacgacaaaagatatattgatacatattggtctcaacacgaaggcctgtattttgccggtgatggcgctaaatacgatgatgatggttatgtttggcttcttggaagagtagatgatgtaatgaatatctctggtcatagaatctctactgctgaagtagagagcgcactagtctctcatgaatctgttgctgaggctgccgtaattggcagatccgatgaaataagtggagaagcaattgctgcatttgtttcattgattggaacagatgcaggagatgaaaaattaatatcagaattaaggcaacatgtaagcgacaagattggacctatagcaaaaccaaagagcattgtaataacagctgaccttccaaaaacaagaagtggaaaaatcatgagaaggttattaaaagatatttcagaagaaagaaaattgggtgatgtaactacacttgcaaatgctgatattgtctctgaattgcaacagaggtcatcagaaagtgatgaagattaa

SEQ ID NO: 308673 - DNA, 776 bp, Unknown
  Bacterial polypeptide expressing nucleotide sequence isolated from the Sargasso Sea
aatgagagagtttaaattatctaatccccttttatctatagatcagtacgaggaaatgtatgctgaatcatttaaagataaagagcaattctggtctaagattgcgaaatcacaactctcttggtttaaagatttcactaaaattaaaaatactaattacgatgggaatgtggctatcaagtggtttgaggatggagaattgaatgtttgttataactgcgttgacagatatgctgaaacgcagcccgaagaagtagcgattatttgggagggtgatgagactagtcaaaataaaacttatacttacaaagagttaaagtcagaagtaagtaaattcgctaatgttttaaaaaaacttggtgtccaaaaaggtgatgttgtcacaatttatttaactatgatccctgaggttgcttttgctatgttggcttgtgcaagaataggggcaatacattctgttatatttgggggcttcgccccagaatctattgcaggacgtattaaggattgtaagtctcagtttgtaattactgctgatgagggaattcgcggtggtaaaataattccattaaaaaaatatattaacacagcattagaggactgtgatgactctataaaaactttagtagttcgatacactaatactaaagacgacttacatcgggttaataatttttattatgatgaattaattaaagaagtggatgatcaatgtgagtgtgtctctatgaacgctgaggatcctcttttcattttatatacatctggcttcactg

SEQ ID NO: 308674 - DNA, 796 bp, Unknown
  Bacterial polypeptide expressing nucleotide sequence isolated from the Sargasso Sea
gttgggggagccaataaatccggaagcatggatgtggtatcacgaaaatatcggtggcgagaattgtgcgattgtagatacatggtggcaaacagaaactggttcaataatgatatccccacttccaggtgtgacaagtactaaacctggatcagcttgcggaccactaccaggtatcgaatcaattgtaattgacaatgatggaaatgaagtaggcaaaggggaaggtggctttttggctgtaaaatctccttggccatcaatgcttagaactgtctatggagatgatcaaagatatttggatacttattggtcacaacatgatggtttatattttgctggtgatggagctaagtatgatgaagaaggttatatatggctcttaggtcgtgttgatgatgtaatgaatatatctggacacagaatatcaactgctgaggttgaaagtgctttagtttcccatcaagcagtagccgaagctgcagtaattggcagaagtgacgaaattactggagaagcgatcgctgcgtttgtttcattaattggaactgatgatggcaatgaagaactcattgctgatctcagacagcatgttagtgataaaattggaccaattgctaaaccaaaaagcattgttattacagctgatttaccaaaaactagaagtggaaaaatcatgagaaggcttttaaaagatatttctgaagaaagaaagcttggggacgttactacattagctaatgcagatatcgtatctgaattacaaactagagcatcagaatctgacgatgaatga

SEQ ID NO: 308675 - DNA, 898 bp, Unknown
  Bacterial polypeptide expressing nucleotide sequence isolated from the Sargasso Sea
acttcatataagtaaagacgaagaaggtaatgtattaatacaggtgtcggaccatgggagtaatcaagcttatgtaaataaattaaaatatcaaaaaaaatacaatacttccgttaaagaaaatgatgcattttggaaaaaagagggaaaaaggattaattggataaagccgtattcaaaaattaaagatgtaaaatacagtaaagaagatgtaaagattaaatggtattacgacggtacattaaatgtttcggcaaattgcattgatagacatttgaaaaagaatggaaaaaaaactgcaataatttgggttggtgacgatcccggggatcaaaaaaagattacatacaaagaactacacaaaaacgtttgtaaagcagctaacgcacttaaaagtattggagtacaaaagggagatagagttacaatctatctaaccatgataccggagcttgcttatacaatgctagcttgcgcgagaataggtgcaatacactcgataatatttggaggtttttcacctgactcgattgcgacaagaatcaatgattgtaaatcagattatctaataactgcggatgagggtgttagaggaggcaaaattattcctctcaaaaaaattgctgatgaagcccttttacaatgtcctaatataaaaaaatgtgttgttgtcaaaaggactggcaaccaagtgaattgggaaaacgaaagagacgtttcttatgaggagcttatctcaaaagtatcagcaaaatgtgaacctgaggagatgaatgccgaagatccactattcatattgtatacctctggatctactggtaagccgaaaggagtattacacacatctgggggatatttagtatacgcctcaatgactcatcaatatatttttgattac

SEQ ID NO: 308676 - DNA, 400 bp, Unknown
  Bacterial polypeptide expressing nucleotide sequence isolated from the Sargasso Sea
gatgatgtaattattgtttctggtcataatttaggtactgcagaaattgaaagtgcgtttgtagctcatccaaaagtggctgaagcagcagtagttggttacccacacgacataaaaggaaacggactatactgttatgtaactttaaatgctggagaaaaaagtactcttgatttagagagagatttaaaactttgggtaagaaaacaaattggtccaatagcaactcctgacttaattcaatttgctccagggctaccaaaaacaagatcgggtaaaataatgagaagaattctaagaaaaattgctgccaatgaacatggtcaattaggtgatacaaccactttagctgatccctctgttgttgaaagcttggtcgataatagaaaaaatatttaga

SEQ ID NO: 308677 - DNA, 880 bp, Unknown
  Bacterial polypeptide expressing nucleotide sequence isolated from the Sargasso Sea
actgcgattagggccctaatggcacaaggtgatgattttgttaatactacaaagagagactctttaaagatacttggcactgttggtgagcctatcaatcctgaagcatgggattggtattataaaatcgttggtaaaagcaaatgtcatgtgattgatacttggtggcaaactgaaactggttctgtattaatctctcccattgcgggaataactcctgtaaagcctggttcagctactcttccattttttggtgtcaaacctgctgtagtcgacaacaatgacaaaattcaaaatcgaggaaaaggaaatttagtattactacgttcttggccaagtcagattagaacagtttatggagatcataaaagaatgcttgagacatatttttctcaatatgatgaatgttactttaccggtgatggtgctgagattgatcaagatgggtatttttggattactggaagagttgatgatgtcttaaatgtttctggacatagattggggactgcagaaatagaaagtgcactagtattacatcctaaggttgctgaatcagcagtagttggagtagagcatccaatcaaaggtcaaggtatttatgcttttgtaacactaatgaacgacactgagctaaatgataagcttcaggatgatcttaaaaaatttgttgcagatgaaattagtccaattgcaaaacctgatttgatacagttctctccaaacttaccaaagactcgctctggaaaaattatgcgaagaatattgagaaaggttgcagcagatgagattaacgacttaggcgatgtcacaacactagctgattcaggtgtattagaggatttaattgaaaatagattaaatctagagactaattaaa

SEQ ID NO: 308678 - DNA, 440 bp, Unknown
  Bacterial polypeptide expressing nucleotide sequence isolated from the Sargasso Sea
gtgccagcgtgacgaagatggttactattggataactggtagagtagatgatgtattaaatgtctcaggccataggataggaaccgctgaggttgagggcgccatagggaaggcaaacggtgtcgctgaggctgccgtagttggatttccgcatgaaattaaaggtcaaggtatttttgcatttgtaacactaatgactggagttaatccttctgataaaatcaaattagagattttagatacagtaactaaagatattggccctcatgccaaacctgatagtatacagttctcgcctgcactgccaaaaacgagatctggtaaaataatgcgtaggattttaagaaaaatagcagagggtgattacaataatatgggtgatatatctaccttggcagatccaggtgtagtaaaaagtcttatttcggaaaatcagtaag

SEQ ID NO: 308679 - DNA, 961 bp, Unknown
  Bacterial polypeptide expressing nucleotide sequence isolated from the Sargasso Sea
tggtttgagggtgtaccaaattacccggatagttcaagatggtggcaaatagttgataaatataaagttaatatcttttacactgcacctactgctataagagctttaatgagagagggtgataaacctgtaaaaaaaactagtcgtaaatcacttaagctattaggtacagtaggtgagccgatcaatcctgaggcttggatgtggtattataaagtagttggagaaaaaaaatgtcctatagtcgatacttggtggcaaacagaaactgggggaatattaatatcgcctcaaccaggagcaattaacttaaaacctggttcagcaactaaaccattttacgggatcaaacctgcaattgtagatgagtcaggaaaaatattaaaagggccctgtaaaggaaggctttgtttgcttcaatcctggccaggtcaaatgcgaactgtctacggtgaccaccaaagatttatagatacgtacttttcccaattcgatggaaagtattttactggtgatgggtgtaggagagataaagatggttactattggataacaggtagagtcgacgatgttataattgtttcagggcataatttgggtacagctgaaatagaaagcgcttttgttgctcacacaaaagtagctgaagctgcagtagttggatatcctcatgatattaaagggaacggtctttattgttttgtcacgcttaattctggagagaaaccagatggagatctagaacgagaactaaagctttgggtaagaaaacaaattggacctattgcaacaccagatcacatacagttttcacctggattaccaaaaactagatcaggaaaaattatgcgacgtatcttaagaaaaattgcagccaatgaatatcgtgatctaggggatacgactactttggccgacccgtctgttgttgaatctttggtcgataatagaaaaaataaat

SEQ ID NO: 308680 - DNA, 990 bp, Unknown
  Bacterial polypeptide expressing nucleotide sequence isolated from the Sargasso Sea
tccactcttcattctgtacacttcaggttcaacagggaaacccaaaggtgttttgcacacaactgctggatatcttgtttatacttctatgactcatcaatatgtgtttgattatcatgatggagacatatactggtgtacagctgatattggctgggttacaggacacagctatatcctgtatggtccgctggctaatggggccactacactaatgtttgaaggagttccaaattatcctgattttgggcgattctgggacatttgcgataaacacaaagttaatattttttatacggcgccaacagcaattcgggccattgcaaaagaaggtgatgaattggtcaacaaacgggatttaagttctttaagattgttaggcactgtaggggagcctatcaatcccgaagcatggctctggtatcaaagggtagtaggacacggtaattgtccgattgtagatacatggtggcagacagaaacaggaggaattttgattaccccactccctggagcaacacgtaccaagccgggttctgccacacgtccttttttcgggatccaacctgtattagtggacggagacggaaatgagattgacggagctgccagcgggaatttatgtattaaacatccttggcctggtcaaatgcgtactgtatatggtgatcatgagagatttatccagacatatttcagcacatacaaaggactatactttacgggtgatggttgtcgtcgggacgaagacgggtattactggatcactggacgcgttgatgatgttctaaatgtttcaggacatagaatgggtaccgctgaactagaatcagcactggtgcttcatgaaaatgttgctgaagcagcagttgtcggtttccctcatgaaatcaagggacagggcatttatgcctttgtaacattaaatacaggagttgaacccactgaagaattgcaaaaagaattaatacaactagttcgcaaggagat

SEQ ID NO: 308681 - DNA, 499 bp, Unknown
  Bacterial polypeptide expressing nucleotide sequence isolated from the Sargasso Sea
tttgttgaaacttatttttctcagtttgatggaaaatattttactggtgatgggtgtagaagagatattgatgggtattattggatcactggaagagtagatgatgttataatagtttcagggcataatttaggtacagcagaaatagaaagtgcttttgtttcacatccaaaagtatctgaagcagcagtagttggatatccacatgatataaaaggaaatggtttgtattgttatgtatctttaaatgctggagaagaatcttcaaatgagcttaataaagaattaaaacaattagttcgtgaaaaaatcggacctatagcaactccagacttaatacattttacagaaggtttgccaaaaacaagatcaggaaaaattatgagacgaatattaagaaaaattgctgctaatgaacatagtcagcttggtgatacttctacattagctgatcctggagtagttggtaatctggtaaaaaacagattgaatcagtaat

SEQ ID NO: 308682 - DNA, 721 bp, Unknown
  Bacterial polypeptide expressing nucleotide sequence isolated from the Sargasso Sea
atggcagaaaacttaattgcggcccaagcatctaatccacatctaaaaaactttgatgaatataaaaagctttatgatcaatcaattgaaaatcctaaagaattttttaaaaaaatcgcaaatgaaaacctttcttggataaatgattttactgaagttcataacaatagatttgcgaatgcaaagtggtttgctgatggaaaaataaatgtaagtgaaaattgtattgataggcatctcaaagataagtcaaaaaaaatagctttgatatgggaaggagatgaacccggaaattcaaaatcattcacttttcaagaattacatgaagaagtatgtagattctcaaatgtattaaaaaatctaaaagtatctaaaggatcgagagtttgtatatatatgccaatgattcctgaagctgcatttgcaatgttagcttgtacaagaattggagcaattcattctgtagtttttgggggattctctcctgaatctttgaaagatagaattttagatgcggattgtgaaattgttattactgcagatgaaggtgttcgaggaggaaaaatagttcctctaaaatcaaacgtggatgaagcattagaaaattgtccagatgttagaaacacgatcgttattaaaagaacaggaaataaaataaactggaataatgataaagatctctggtatgaagatcttataaaaagtgtatcaacttcatgtg

SEQ ID NO: 308683 - DNA, 927 bp, Unknown
  Bacterial polypeptide expressing nucleotide sequence isolated from the Sargasso Sea
gatccattattcattttatataccatctggatctacaggaaagccaaaaggggttttacacactactggtggttatatggtttatgcctcaatgacccatcagtatattttcaattataaaccaaaagatatatattggtgtaccgcagatattggttgggtcacaggtcacagttatattatttatggacctctttcaaatggtgcaacaacaattatgtctgaaggtattccaaattatccagattggtctaggtggtggcaaatagtagataagtataaagtaaatattttttatactgcaccaaccgcaataagagccatgatgagagaaggagatgggcctgtaaaaaaaacatcgagaaaaagtctaaaactacttggaactgttggagaaccaataaatcctgaagcctggcaatggtattttaaaactgtgggtgattctagatgtccagtagttgatacttggtggcagacagaaactggtggaattttaataagtcctcaaactggtgcaatagacttaaagcctggatcagcaacgaaaccattttatgggattaaacctgaaatacttaataaggatggtaaggttctaaaaggagaagctcaaggaagattatgtatagctcaatcttggccaggtcaaatgagatctgtttatggagaccatgatagatttatagaaacatacttttctcagtttgatggaaaatattttactggggatgggtgtaaaagagataaagacggatactattggataacaggaagagttgatgatgtcattattgtatcaggacataacttgggaactgcagaaatagagagtgcctttgttgcacatccaaaagtcgccgaagctgccgtagttggatacccacatgatataaaaggaaatggattatattgttatgtaactct

SEQ ID NO: 308684 - DNA, 847 bp, Unknown
  Bacterial polypeptide expressing nucleotide sequence isolated from the Sargasso Sea
gtaccaaaaaaatggtctcgaagtgcttatgttgataaaagccagtacgaaaaaaaatataaattatcaattaaaaataatgaagagttttggaaaaaagaagggaaacgaattgattggataaaaccatacaccaaaataagagacgtcaaatatagtaaaactgatgttaaaataaaatggttttatgacggaactcttaatgcttcagcaaactgtatagatagacatttatctgataaaaaaaataagactgcaattatttgggtgggtgacgatccaaaagattctaaacaaattagttacaaagagcttcataaaaatgtttgcaaaactgcaaatgccttaaaagaactcggtataaaaaagggagaccgggtaactatatatttaactatgattcctgaattggcatataccatgttagcctgtgcaagaattggagccattcattcaataatttttggtggattttctccagactcaattgctggaagaattaatgattgtcaatctgattatattgttactgctgatgaaggtgttaggggaggaaaaataatacctttaaaaaaaataactgatgaagctttggaaaaatgtcctgatgtaaaaaaatgtatcgtagtaaaaagaacaggaaataaagttaattggattgaggatagagatgtttcatatgacgagattgtaaaaatagcttctgataaatgtgaaccagaggaaatgagtgcggaagatccgctgtttattctttacacatctggatctacaggaaaacctaaaggagtactgcatactacgggagggtacatagtttatgcttctatgactcaccaatatattt

SEQ ID NO: 308685 - DNA, 659 bp, Unknown
  Bacterial polypeptide expressing nucleotide sequence isolated from the Sargasso Sea
aatgaaatcaaattttaatgaaatttaccgaaactctattgataaacctgaggatttctggaaagaaatttcaaatgatatcttctggtttaaaaaacccacgaaaatcctaaataataacaaaccacctttttacaaatggtttgaggatggcattacaaatagttgctataatgctttggattttcacattgatgagggtagaggtgacaaaacagctttaatttacgacagtcccataactgggaataagggtaaattctcctttaaacaattaaaggataaagtttctaaatttgcaggtgcactatcaaatcagggagtaaaaaaaggtgatagagttattatttacatgccaatgataccagaggcagtggttgcgatgcttgcatgtggaagaattggtgctattcactctgttgtttttggtggttttgcatcaaatgagctagcgagcagaattgatgatagtaaagcaaaagttttggtcaccgcttcatgtggttttgaaccaggtagaactgttgaataccgtccacttatagatggtgctttaaaattatctaaacacaaagttgaaaaggttattttttttcaaagacaaggtcatgaaatcaaactaaatgcccctttagaaattagttgggaagactctttat

SEQ ID NO: 308686 - DNA, 506 bp, Unknown
  Bacterial polypeptide expressing nucleotide sequence isolated from the Sargasso Sea
ccaaagatttataaatacttatttttcacaatttgatggaaagtattttactggtgatggatgtagaagagatgaggatgggtattattggattactggaagagtagatgatgtaattatagtatcaggccataatcttggtactgcagaattagaaagtgcttttgtagctcatccaaaagttgctgaagctgccgttgtgggttatccacatgatattaaaggaaatggtttgtattgttatgtaactctgaatgcgggagaaaatccatctggtgatttggaaagagatttaaaactttgggtaagaaaacaaattggtccaattgctacgcctgatttaatccaattttctccaggtctaccaaaaacgaggtcgggaaaaataatgagaagaatactaagaaaaattgctgctaatgaacatgatcagcttggagataccacaaccctagcagatccaacagtagttgagagtttagtagaaaataggaaaaataaataag

SEQ ID NO: 308687 - DNA, 901 bp, Unknown
  Bacterial polypeptide expressing nucleotide sequence isolated from the Sargasso Sea
cgcataccgttaaaggctaacaccgacaaagcactggaacagtgtcccggggtcaagtctgttgttttagttagaagaacaaatgctgaagtgaccttctatacagaacgggatgttgactatacggaagcacgcaaacaggtaagtgcggagtgtgaaccagaagtaatggacgctgaagatcccctttttattttgtatacctctggctcaaccggaaagccgaaaggtgtattacatacaactggtggctatatggtttacgcatcacttacccaccagtatgtatttgactacaaagagcaggatatttattggtgtaccgctgatgtcggctggataacaggtcacagctacataatttatggaccattaagtaatggcgcggttacgttgatgtttgaaggtgtccctaactaccctacctcagcacgtttctggcaaatctgtgataagcatcaggtaaatattttctatacggcaccgactgctatcagatcattaatgcgagaaggcgatgagccggtgtcgtcaacggaccgaagtagtctgcgtctactcggaacagtaggtgagccaataaacccagaagcatgggaatggtactaccgcaccgttggcgagtctcgttgtccagttgtagatacctggtggcagactgaaacaggtgggattctgatcacaccactgccaggagcaacacctcttaaaccaggctccgccgcctttcccttctttggaattagtccaggagtagttgataatgaaggtaatcttatcgaaggtgaagcagttggcaacttatgcctattagactcgtggccaggccaaatgcgaaccgtctacggagatcaccagcggtttgtagatacctattttaagcaatactcaggcaaatact

SEQ ID NO: 308688 - DNA, 829 bp, Unknown
  Bacterial polypeptide expressing nucleotide sequence isolated from the Sargasso Sea
tatggtggataatacatttaagcctcagcctaaaatctcggaaagagcacatatctcttcattggaacaatatggagaactctacaaacgttcaatcaatgacccaatagagttctgggaggaaattgctcaaagacttgactggtataagccttggaataaggtgcgggagtttgattttgttaatggggaaatagaatggttctctggaggggaattaaatgcttgttataattgtatagatagacatatcaatgaaggtcatggtgaagatattgctattatttgggaagggaatgacccaaatcaatctagaaaattttcctataatgatcttttgaaagaagtatcccaatttgcaaatgccctaaaagaactaggcgtgcagaaaggggatagagtttgtttatacatgcaaatgattcctgaattagctatcgctgttttggcgtgcgcacgaattggtgcagttcattctgtggtttttggagccttctcaagtgactctttgagagatcgtattaatgattcggaatgcaagatcttggtaacgcaggatactggcgttcgagggaccaagcaaaatattccgatgaaggaaaatgctgatcaggctttgtttgatactccatctatcgaacatgttatagttgtacgaaggacaggagagcctgttaatatggatgccaagcgtgatctttggtggcatgaagcaacatcgggagtcagtgcaaaatgtgaacctgtggctatggactctgaagaccctctttttatcttatacacgtctggatcgacaggtaagcctaaaggtgtattgcacacaaca

SEQ ID NO: 308689 - DNA, 807 bp, Unknown
  Bacterial polypeptide expressing nucleotide sequence isolated from the Sargasso Sea
tgtgaatctgattatttaattacagcagatgaaggaattagaggaggtaagattattccactaaaaaaaatagcagatgatgcgttaacacaatgtccagaagttaagaaatgtgtcgtggttcaaagaaccggcaaccaagtagattggaacaacgaaagagatatttcttataaagaaatgatttcctctgcctcaagcaaatgtgatcctgaagagatgagtgcagaagatccattatttatactttatacctcaggctcaactggaaaacccaaaggagttctacatactacaggtggttatatggtttatgcatcaatgactcatcaatacatttttgattataaaagtaatgatgtttactggtgcactgctgacattggttgggtaactggacacagttatattatctatggacctctatccaatggagcaactactattatgtttgaaggaattccaaattacccggatagttcgcgttggtggcaaattgtagataaatataaagtcaacattttttacactgcaccaactgcaattagagctttgatgagagaaggggataaaccagttaaaaaaacaaatagaaaatcattaaaattattgggcactgtgggagaacctataaatcctgaggcctggatgtggtattacaaaactgttggggactcaagatgtccaatagtagatacttggtggcaaactgaaactggaggcatattaatttctcctcaacctggagctatagatcttaaaccaggttctgcaactaaaccattttacggaataaaacctgtaata

SEQ ID NO: 308690 - DNA, 857 bp, Unknown
  Bacterial polypeptide expressing nucleotide sequence isolated from the Sargasso Sea
gcattttagtgaaaaatataattattcaataaaatcaaatgatgtattttggtcagaagaaggaaaaaaaataaattggataaagcctttttcaaaagttaaagatgtatcatatgaccttaatgaccttcacataagatggttttatgatggctctcttaatgtatcttctaattgcctagatagacacttagaaagtagagaaaatcagatagctattatctgggaaggcgatgacccaaacgaaacaaaaaaaattacctacagagagttatacgaggaggtttgtaagttctctaatgctctaaaagccaatggcgcaaaaaaaggtgataggataacaatatatatgccaatgatccctgaagctgcagttgcaatgctagcttgtgctaggataggcgctattcattcagtcgtttttggaggattttctcctgactcactagctggtagaattactgattgtgattcaaatattatcattaccgcagatgaaggtgtacgtgggggtaaaataatacctcttaaagaaaatacagatgcggctttaaagttatgcagctctataaaaaaatgtattgtagtgaaaagaacagggaatgatattaaatgggttgaaggtcgtgatgtttggtatcacgaagccatgtcaaaagttgataatgagtgtcaaccagaggaaatggatgctgaggatcccctatttatactatacacctctggttcaactggaaagccaaagggtgtattacacacaactgctggatatatagtttacgcttcaataactcataaatatgtatttaactacatagatggtgacatttactggtgcacagctgatgttggatggg

SEQ ID NO: 308691 - DNA, 757 bp, Unknown
  Bacterial polypeptide expressing nucleotide sequence isolated from the Sargasso Sea
tactttgaagttccaggaaattcaaaatgtccaattgtagacacatggtggcaaactgagacaggtggaatactaatatcacctcagacaggggctataaaattaaaacccggttctgcttcaaaacctttttatggaatcgaaccatgtattgttgataaagatggtaatgaattagaaggtgaatgtgaagggatgttatgtatgaagcgttcatggcctggtcaaatgcgaactgtttatggagatcataaaagatttattgatacttatttttctcaatttgatggaaaatattttacaggcgatgggtgcaaaagagacaaagatggatattattggattacaggtagagtagatgatgtgattattgtatcaggtcataatttaggtacagctgaaattgaaagtgcgtttgtatctcataaagatgtttctgaagcagcagtggttggctatcctcatgatgttaagggaaatggtctctactgctatgtatctcttaaagtaggtgttgattcttcagagaatttaattttagaattaaaaaaaactattagagaaaaaataggcccaattgcttcgccagattttatacatattacagctgggttaccaaagacaaggtctggaaaaattatgagaagaattttaagaaaaattgcttcaaatgaatttgaaaatttaggtgatacttctactttagcagatccttctgttgtagataatttaattgaaaatagaaaaaataaataaa

SEQ ID NO: 308692 - DNA, 676 bp, Unknown
  Bacterial polypeptide expressing nucleotide sequence isolated from the Sargasso Sea
cctcaaacaggagccatcccattgaaacctggttcagcaacaaaacctttctatggaataaagcctgtcatcgttgataaaaacggaaaagagataaaaggcgctggagaaggaagactttgtattgctcaatcatggccaggtcaaatgagaactgtttatggagaccatcaaagatttatcgacacatatttttctcaatttaatggaaaatattttactggtgatggatgtagaagagataaagacggatattactggatcactggacgagttgatgatgtaattattgtatctggacataatttgggtaccgctgagattgaaagtgcatttgttgctcatccaaaagttgctgaagcagcagtagttggttacccacatgatattaagggaaatggtttatattgttatgtcactttaaatgcgggagaaactgaaactggagatcttgagagagatttaaaactttgggtcagaaaacagattgggccacttgcaactccagacttaatacattttactccaggacttccaaaaactagatcgggtaaaataatgagaagaatattaagaaagatcgctgcaaacgaacatggacaattgggagacaccactactttagctgatccgagtgtagttgatagtttagttaataatagaaaaaatatttaaa

SEQ ID NO: 308693 - DNA, 763 bp, Unknown
  Bacterial polypeptide expressing nucleotide sequence isolated from the Sargasso Sea
atgtctagtaaattcaatgatatttatcaaaaatcaataaacagccctgaagaattctggggaaatgctgcacaagatattttttggtttaaaaaaccgactaaaattttaaataagtctaacccccctttctacaaatggtacgaagatgggataactaatacatgttacaatgcattagatatccacatagatctaggaaaaggaagtaaaactgctttaatttacgatagccctattacaggaaacaaaagtaagttcacttatgaagaattaagatcaaaagtatcaaagtttgcaggtgcacttaaagatctaggtgtaaataaaggtgaccgagtcataatttacatgcctatgataccagaagctgttgttgctatgctagcatgtgcaagaattggagcaatacattcggttgtgttcggtggatttgcctcaaacgagcttgcaagtaggattgatgatagtaaagctaagcttttagtgactgcctcatgtggtttcgagccaggaagaactgttgaatacaaaccacttgtagatgaagcaataaaacaagctcaacataagattagcaagatgatcttattccaaagaaaaggtcatgaagttaaacttaatgcaccaatggagataagttgggatgaagctcatgccaatgcgaaagatactgattgtgttgaaatgaattctaatgaatttgcttacatactttacacatcaggcactacaggaacaccaaaaggtatcgtaagagaca

SEQ ID NO: 308694 - DNA, 919 bp, Unknown
  Bacterial polypeptide expressing nucleotide sequence isolated from the Sargasso Sea
atacccgagcttgcctacactatgctggcttgtgcaagaattggtgctatacattctattatttttggtgggttctcaccagatagcatatctggcagaatgaacgactgtaaatcagattacgttataactgcggatgaaggacttagaggtggaaaaataatccctttgaaatcaattactgacgaagctctacttaactgcccaaatgttaaaaaatgtatagttgttaaacgaactggaaatagagttaattgggatgaaagccgggatgtttggtaccacgagataactaaaaaagcatcctcaacatgcgaaccagaggaaatgaacgctgaagaccctcttttcattttatatacatcgggatctactggtaagccaaaaggagttttacatacaactggaggctacatggtttatgcatccatgactcatcaatacatatttaattataagcctaaagatgtttattggtgtacagcagatattggctggataacaggtcatagctacataatttatggtccacttgcaaatggtgcaactacaattatgtttgagggaattcctacttatccagatacatcaaggtggtggcaaatagttgataagtacaaagtaaacattttttatactgcaccaacagctattagagctttaatgagagagggtgaagggccggttaaaaaaacttcaaggaaaactcttaaattattaggaactgtaggagaaccaataaatccagaagcctggcaatggtactttaaaacagttggtgattcgagatgtcctattgtggatacttggtggcaaactgaaactggtggaattttgataagtcctcaaactggtgcaattgacctaaagcctggttctgcaactaagccattttatggaataaacctgctattgtaga

SEQ ID NO: 308695 - DNA, 805 bp, Unknown
  Bacterial polypeptide expressing nucleotide sequence isolated from the Sargasso Sea
aatcagttgaaagaaaaagtcgctttatttgccggagctttaaaaaaacaaggcgtaagcaaaggagatagagttataatctatatgcctatgataccagaggcagtagtagctatgctagcttgcgggagaattggtgcggtccactcagttgtatttggtggctttgctgcaaacgaattagcaagcagaattgatgactctaaagctaaaatacttgttaccgcctcttgcggctatgaacctggacgaactgttcattacaaacctttagttaataaagcattggaattagcaaatcataaaattaaaaaatgtataatttttcagagagaaaaggataaagcagaattaaatcctgcgattgatattacctgggacgatgctcataaaaatgcaaaacctgcagagtgcgaaaaaatgaatgcaaatgattatgcttatattctttatacatcaggaactacgggtcttccgaaaggaatagttcgtgatataggtggacatatagttgcattaaaatggactatgaaaaacatttataatatcaaccctgaggacgtgtggtggtctgctagtgatattggctggatagttggtcactcttatatagtatacggtccattattttatggttgtacgacagttttgtttgaggggaaaccagtaggaactcctgatgcaggagttttttggagaatgatttcagagcataaagtaaaatctctttttacagcgccaacagctataagagctataaaaaaagaggatcctaacggagaattttttaaaaagtatgatttga

SEQ ID NO: 308696 - DNA, 957 bp, Unknown
  Bacterial polypeptide expressing nucleotide sequence isolated from the Sargasso Sea
gcaggctatttacgctatgcaagcgtgtgcgcgtattggtgctattcactctgtagtatttggtggtttctctccatcagcgattgctgaccgaattaatgactcaggcgctaaagtggtaattacttcagacgaaggtcgccgtgctggcaactgcgtaccacttaaagcaaatgttgatgaagcggtatcacaagactcagtaaccaccgttgagcacgttattgttcatcagctaacgggtggtgaagttgaatggaatagtcatgatgtttggtggcatgagcttgtcgctgacttaccagccgagtgcgaaccagagccaatgaatgcagaagatccgcttttcattctttatacttcaggctcaacgggtcaaccaaaaggtgtggttcatactaccggtggttaccttgtttatgcatcgatgacacatgaatatgtgtttgatcttaaagaagacgatattttctggtgtagtgccgatgtgggctggatcacaggtcacagctacattgcttatggcccattagtgaatggctgcacgcaagtcgtatttgaaggtgtaccaacttacccaacagcgggccgtatgggtgaagtaattgataagcacaacgtgactatcctttacacagcaccaactgctattcgtgctctaatggcgaaaggcgatgagccaacagcgacttcaactcgtaaaagtcttcgtgttatgggttctgtaggtgagccaattaacccagaagcgtgggcatggtattacgagcatattggtaacgaaaactgcccaatcgtagacacctggtggcaaacagagactggcggcatcatgatcacaccattaccaggtgcgacagatatgaagcctggctcagcaacacgtccattctttggtattgcaccagcactatttgatgctgaaggtaatacactagaaggcgcgggtgacggtaa

SEQ ID NO: 308697 - DNA, 544 bp, Unknown
  Bacterial polypeptide expressing nucleotide sequence isolated from the Sargasso Sea
ctcctggcctagtcaaattagaagcgtctatggtgatcatgaaagaatgatatcaacttactttaaaacatatgaagatatttattttactggtgacggagcaagacgagatgaagatgggtatttttggataacaggtagagttgatgatgttctaaatgtatctggccacaggcttggaacagcagagattgaaagtgctttagtactccatgattctgttgcggaggcagcggtggtaggatttcaacatccgattaaaggacaaggtatttatgcatttgttaccttaatgaaaggtgaagattttaatgatgctcttgaacagaaactaacaaaatttgtttcaaaagagataggtcctattgcaaaacctgaccttattcaaaatgctcccggtcttcctaaaacaagatctggaaaaattatgagaagaatattaagaaaaattgctgaaggtgatttcgataatcttggagacacaaccactcttgcagagcctgctgttgttgcatctttgcttgaaaatagcaaaaaactatga

SEQ ID NO: 308698 - DNA, 545 bp, Unknown
  Bacterial polypeptide expressing nucleotide sequence isolated from the Sargasso Sea
tttgtctgaaaattacaaaaaaacctatgattcgtctatcaaaaatagagagaatttttggaaaaccatatctgaggatattttttggtacaaaaagccatcaaaaattttgaattcttcaaatcctcctttttacaaatggtttgaagatggtgttacaaacacttgttacaatgctgtagatttacatgtcgataatggtcgtggagataaaacggctataatttacgatagtcctattacaaaaacaaaatacaaattaacttacaaagaattaaaagaaaaagtttcattttttgctggagcattaaaaaatcaaggaattaaaaagggagatagagttataatttatatgccaatgattcctcaggcagtaattgctatgttggcgtgtggaagaattggagcaattcattctgttgtatttggtggttttgctgctaacgaactagcgagcagaattgacgactctaaagcaaaaattatagtttcagcttcttgtggttatgaacctggaagaacagttcattataaacccttattaa

SEQ ID NO: 308699 - DNA, 972 bp, Unknown
  Bacterial polypeptide expressing nucleotide sequence isolated from the Sargasso Sea
ctgcatagatagacatctcaaaaaaaatggaaataaaactgccattatatgggttggggatgatccttcggaccaaaaaaaaatatcatataaagaattacataaaaatgtttgtaaagcagccaatgcacttaaaagtattggcgttcaaaaaggagatagagtcactatttacttaacaatgattccagagctggcttatgtaatgttagcttgtgcaagaattggcgcggtacactcaattatttttggaggtttctcaccagattcgattgctacacgaattaatgattgtaagtcggactacattattacggcagatgaaggtgtaagaggaggaaaaatcattcctttaaagaaaattgctgatgaagctttattacaatgcccaaatgttaaaaagtgtgtggtagtaaaaaggactgggaaccaagtaaattgggaaaatgatagagatttatcttatgaagatttgatctcaaaagcttcggctaaatgtgagccagaagaaatgaatgccgaagacccattgtttattttgtatacttcaggatctacaggaaaaccaaaaggagttttgcatactacaggaggatacatagtttacgcttcgatgactcatcagtacatttttgattataaacctaaagacatttactggtgtactgccgatattggttgggttactggacacagttatataatttacggtccactctctaattgtgctacaactattatgtttgaaggtgtaccaaattatcctgatagttccagatggtggaagatagtcgacaaatataaagtaaatattttttacactgcgccaacagcaattagagcattgatgagggaaggggatggcccagttaagaaaacaagtagaaaaaccttaaaactattaggaactgttggtgaacctataaatcctgaagcttggttatggtattataaaactgtaggtgactctaa

SEQ ID NO: 308700 - DNA, 328 bp, Unknown
  Bacterial polypeptide expressing nucleotide sequence isolated from the Sargasso Sea
aaagttgcggaggctgcagtagttggatgtccacatgatataaaagggaatggattatattgttatgtaactttgaatgtaggagaagaacctagtggagatttagaaagagaattaaaattatgggtaagaaaacaaattggtcctattgctactccggattttattcagtttgcacctggactaccaaaaacaagatctggaaaaataatgagaagaattctaagaaagatagcagctaatgaacatgaacaacttggagatacaacaactttagctgatccaagcgttgttaaaagtttagttgataatagaaaaaatacttaga

SEQ ID NO: 308701 - DNA, 337 bp, Unknown
  Bacterial polypeptide expressing nucleotide sequence isolated from the Sargasso Sea
gcacatccaaaagtagctgaggccgctgtagttggttaccctcatgatattaaagggaatggtttatattgttatgttactttaaacgctggagaaaccgaaactggtgaactagagagagatcttaagctttgggtaagaaaacaaataggacctctagcaactccagatcttattcattttactccaggacttccaaaaacaagatctggaaaaataatgagaagaattctaagaaaaattgctgcaaatgaacatggtcaattaggtgatacgacaactctagctgacccaagtgttgtagatagtttagttgaaaatagaaaaaatatttaaa

SEQ ID NO: 308702 - DNA, 682 bp, Unknown
  Bacterial polypeptide expressing nucleotide sequence isolated from the Sargasso Sea
agtcttgctagtaaaccccagtaccaaaacaaaatataatgaatctataaaaaataataatactttttggaaaaaagaaggaaaaagaattacatggatcaaaccttataaaaaaattaaagatgtcaaatacagtaaagaagaagtaaaaataaaatggtatgaagatggaacgctaaatgcttcagcaaattgtattgatagacatctaaaagataaaaaagataaaactgcaataatttgggtgggtgatgacccaaaagatatacagaagatttcttacaaacaattacatcaaaaagtttctaaagcagcaaacggtttaaaaaagttaggtattaaaaaaggggatagagtaacaatttatcttacaatgatccctgaacttgctattttaatgttagcttgcgcaagaataggtgcaatacattcaataatctttggaggtttttcagctgagtctatttcgggaagggtaaatgattgtaaatcagaatatataatcacagctgatgagggtgttagaggaggaaaaactattccattaaaagcaacaacagatgaagcattaacaaattgtcccgatataaaaaagtgtatagtagtcaaaagaactggaaattatgttttttggaataatgatagggacgtttggtatcatgatttgataaaagatgttcca

SEQ ID NO: 308703 - DNA, 846 bp, Unknown
  Bacterial polypeptide expressing nucleotide sequence isolated from the Sargasso Sea
tttgatcaagaaagagacattgtggtggacagacctcatctcagattgtccttctgagtgtgatccagagccccttaatgctgaacacccattatttatcctctacacctcaggttccacaggcaaacccaaaggaattcaacactccacagcgggatatattttgcatgcaaaaacgactttttcttgggtatttgatatcaaggaggaggatgttttctggtgtactgcagatgtgggctggattacgggacacacttatgttgcatatggccccctgctcgcaggcgctacaattcttatctatgagggcgctcctacttttccagatgtgggaagattttggaagatttgcgaaaagcatgccgtgaccattttttatactgcacctactgccatcagagccttaatgaagcatggagatgagattccaaacagctatgatttatcaaagctacgcttgcttggcaccgtcggcgaaccgataaaccctgaagcttggatgtggtatcacagtattattggccaagagcgttgcccaatagttgatacttggtggcagactgagacaggcggggcaatgattagcccccttccaggtattacaaacaccaagcccggatcttgcacaacaccggtaccaggtattgatgttgatattgtgaatgaatctggcgaatcggtcgaagaaccaaaccaaggtggatacctcgttatcaaaaaaccatggccctcgatgctcagaaccatatggggagacaatcaaaggtatattgacacctattgggacaagtttgacggaagatactatgttgcaggagacagcgcatacaaagatgaagatgg

SEQ ID NO: 308704 - DNA, 901 bp, Unknown
  Bacterial polypeptide expressing nucleotide sequence isolated from the Sargasso Sea
taaagacaaaaaagataaaactgcaattatttgggttggggatgatccaaaagaaagtcaaaaaatttcctacaaagagcttcataaaaaagtttctaaggcagcaaatggtctaaaaaaattaggtataaaaaaaggggatcgagttacaatttatttaaccatgattcctgaactagcaattttaatgctagcatgtgtaagaattggtgcagtacattcaataatttttggaggtttttcagcagaatcaatctctggtagagttaatgattgtgagtcagaatttataattactgcagatgaaggtgtaagaggaggtaaaattatacctcttaaagatactactgatgaagctttattaaattgtccaaacgttaaaaaatgtattgtcgttaaacgaactggaaattctgttagttggaattatgatagagatgtttggtaccacgatttaattaaagacgttagcaaccattgtgaacctgaagaaatgaatgctgaggaccctttatttattttatatacctcgggttcaacaggtaaaccaaaaggagttcttcacactactggaggttatatggtttatgcgtcaatgactcatcaatacatttttaactacaaaccaaaagatatatattggtgcacagctgatataggttgggtaactgggcatagttatattatttatggaccattagctaatggtgcaacaacaataatgttcgagggtgttccaaattatcctaatagttcgagatggtggcaaatagttgataagtataaagtaaacactttctatactgcaccaactgcaattagagctttaatgcgtgaaggagataaacctgtaaagaaaacttctagaaaatcattaaaacttctaggaacggttggagaa

SEQ ID NO: 308705 - DNA, 856 bp, Unknown
  Bacterial polypeptide expressing nucleotide sequence isolated from the Sargasso Sea
aatgcgtgaaggtgataaaccagttaaaaaaacttctagaaaatcactaaaattacttggaactgttggtgagccaattaatcctgaggcttggatgtggtattacaaaacagttggtaactctaagagcccgattgtagatacttggtggcaaactgagaccggaggaatactgatagctcctcaaactggagccattccattaaaacctggttcagcaacaaaacctttctatggaattaagcctgtcattgtcgataaaaccggaaaagagataaaaggtgctggagaaggaagactttgtattgctcaatcatggcctggacaaatgagaactgtttatggagaccaccaaagatttatcgacacatatttttctcagtttaatggaaaatattttactggtgatggatgtagaagagataaagatggatattactggatcactggacgagttgatgatgtaattattgtatctggacataatttgggtacagctgaaattgaaagtgcatttgttgctcatccaaaagttgctgaagcagcagtagttggttacccacatgatattaaaggaaacggtctatattgttatgtcactttaaatgcaggtgaaactgaaactggagatcttgaaagagatttaaagctttgggtcagaaaacagattggaccacttgcaactcctgacttgatacattttacaccgggtcttccaaaaactagatcaggtaaaataatgagaagaattttaagaaagatcgccgcaaacgaacatggacagttaggtgacaccactactttggctgatccaagtgttgttgatagtttagttgataatagaaaaaatatttaa

SEQ ID NO: 308706 - DNA, 532 bp, Unknown
  Bacterial polypeptide expressing nucleotide sequence isolated from the Sargasso Sea
tatggaaattaaaaaagagtggcttgaacatgcaaaggttaataaagataaatattattcaatgtatgataattctcttcaaaacaatgataaattttgggcagatcaagcacaaagggtcgattggattaaaaaatttacaaaaataaaagatataaaatattctaaggatgatgttagcattaaatggtttgaagacggcaatcttaatgtatgttataattgtatagacaggcatgctgaaaataatcctgataaagttgctataatttgggaaggagacgatccaaatgaaacaaagaaaataacctacaaagaccttctaataaatgtatcaaaagcagcaaatgtactaaaaaaaattggagtaaaaaaaggtgatcgagtaaccatatacttaacaatgatacctgagttagcatatattatgttagcctgcgcaagaattggagcagttcactcaataatatttggaggcttttctgcagagtcgatcgcaggtagaataaaagattgtaatcagaatatgtag

SEQ ID NO: 308707 - DNA, 905 bp, Unknown
  Bacterial polypeptide expressing nucleotide sequence isolated from the Sargasso Sea
acaaaaatattctcaatctataaagagtaatgatgagttttggagaaaagaaggaaaaagaatcaattggataaaaccttataaaaaaattaaagacgtaaaatacagtacaaaagaagtaaaaattaaatggtttgaagatggtactttaaatgcttcagcaaattgtattgatagacatttaaaagataaaaaagataagactgctataatttgggtaggagatgatccgaaagatagtcaaaaaatttcttataaacaacttcatcaaaaagtatcgaaagctgcaaatggtttaaaaaaattaggaattagaaaaggtgatcgtgtaacaatttatttaactatgataccagagttagcaattttaatgctggcctgtgtaagaattggtgcagttcattcgattatttttggaggtttttcagcagattctatttcgggaagagtgaatgattgtgaatctgaatacatcattactgcagatgaaggagtgcgaggtggaaaaattattccactgaaatatacagtcgatgaagctttaatgagttgcccaaatgttaagaaatgtattgttgtaaaacgaacaggtaactacatcaactgggatcaaaatagagatgtttggtatcatgacctaattaaagacgttcctaatcattgtgaacctgaagaaatgaatgcagaggatccgttatttattttatacacttcgggttcaacaggtaaacctaaaggagttcttcatactactggtggttatatggtttatgcatcaatgactcatcaatatattttcaattacaaaccaaaagatatttattggtgtacagcggatattggctgggtaactgggcacagttatattatttatggaccacttttcgatggagccacgactataa

SEQ ID NO: 308708 - DNA, 718 bp, Unknown
  Bacterial polypeptide expressing nucleotide sequence isolated from the Sargasso Sea
tgatacttggtggcaacagaaactgggaggtatattaattagccctcagactggagcaattgacttaaaacctggatcagcgacaaaaccattctacggcataaaaccattaattgttgataaagatggtcatacaataaaaggtgaagggcaaggaagattatgtattgctcaatcttggccaggccaaatgagaaccgtatatggagatcaccaaagatttatagaaacatatttttctcaatttgacggaaaatattttactggtgatggatgtagaagagacaaggatggttattattggattacaggaagggtagatgatgttataattgtctctggacacaatctaggaactgcagaaattgaaagtgcatttgttgctcactcaaaagttgcggaagctgcagtagtaggatatccgcatgatattaaaggtaatggattatactgttatgttactttgaatgttggtgaaaatcctgatggagacttagaacgagaattaaaactatgggttagaaaacaaattggcccaatagcaacaccagactttattcaattttcacctggactacctaaaactagatcgggtaaaattatgagaagaatattaagaaaaattgcagcaaacgagcatgagcagttaggtgatacaactactttagcagatccgtctgtagtaaaaagtctggtagacaacagaaaaaatacttaa

SEQ ID NO: 308709 - DNA, 807 bp, Unknown
  Bacterial polypeptide expressing nucleotide sequence isolated from the Sargasso Sea
aggcatttaaaagataaaaaagataaaactgctattatttgggtaggagacgatccaaaagatagtcaaaaaatttcttataaacagcttcaccaaaaagtttctaaagctgcaaatggtttaagaaaattaggaattaaaaaaggcgaccgtgtaacaatttatttaaccatgataccagaattagcaattttaatgctggcctgtgtaagaattggtgcagttcactcgattatttttggaggtttttcagcagactctatttcgggaagagtgaatgattgtgagtccgaatatatcattactgcagatgaaggagtgcggggtggaaaaactataccactcaaatatacagtcgatgaagctttaatgagttgcccaaatgttaagaattgcattgttgtaaaacgaacaggtaattatattaactgggatcaaaatagagatgtttggtttcatgatttaattaaagatgttcctaatcattgtgatcctgaagaaatgagcgcagaggatcctttgtttatcttatatacttcgggttcaacaggtaagcctaaaggtgttctacatactactggtggctatatggtttatgcttcaatgactcatcaatatattttcaactacaaaccaaaagatatttattggtgcactgctgatattggttgggtgactggacatagttatattatttatggaccactttctaatggtgcaacaactataatgtttgaaggaattccaaattatcctgatagttcaaggtggtggcaaatagttgataaatataaagtaaatactttt

SEQ ID NO: 308710 - DNA, 892 bp, Unknown
  Bacterial polypeptide expressing nucleotide sequence isolated from the Sargasso Sea
tttgtctggaaaatacgagaaaatctatgattcgtctatcaaaaatagagagttcttttggaaagaagtttcagaagacattttttggtataaaaaaccgtcaaaaatactgaattccacaaatcctcctttttataaatggtatgaagatggaataaccaacacttgttacaacgctctagattttcatatagacaggggcagaggagataagactgcaattatttacgatagtccaattacaggcactaaatacaaattaacatataaagaattaagagaaaaagtttctatttttgcaggagctttaaaaaatcaaggaatttcaaaaggagatagagttataatttatatgccaatgattcctcaagctgttgttgctatgcttgcttgtggaagaattggagctattcactcagtagtatttggaggttttgcagcaaatgaattagcaagtagaatagatgattcgaaagcaaaaattatcatttctgcctcttgtggttatgaaccaggaagaactgttcattacaaacctcttttaaataaagcaatcgaaatttcaaatcataaacctgagaaatgtattatttggcaaagagaaaaagataaagcagagcttgatccaaaaaaagatattgattggatggaagctttaaaaggagcaaaaccaactgaatgcgaaaaaatgaattcaaatgactatgcttacatactttacacttctggaacaacaggtgctcctaaaggaatagttagagatattggtggacacattgtagcgttgaaatggacaatgaaaaatatttataatattgatcaagacgatgtttggtggtctgcaagtgatattggttggatagtcggacactcttacattgtgtatgctccg

SEQ ID NO: 308711 - DNA, 809 bp, Unknown
  Bacterial polypeptide expressing nucleotide sequence isolated from the Sargasso Sea
tacattttttggaataatgaaagagatgtttggtatcatgacttaattaaagatgtatcaaatcattgcgagccagaggaaatgaatgcagaagatcctttatttatactttacacctcgggatcaactggtaaaccaaaaggtgttttacacactactggtggttatatggtatatgcttccatgactcatcaatatatatttaattataagcctaaagatatctattggtgcacagctgatattggttgggttacaggtcacagctacattatttacggtccactttctaatggagcaactactataatgtttgagggtgttccaaattatccagatagttcaagatggtggcaaattgtagataaatataaagtaaatacattttatactgcacctacagctataagagcattaatgagagagggagacggacctgtaaaaaaaacttcaagaaaatcactaaaattactaggaacagttggtgagccgataaacccagaagcttggatgtggtatttcaaaactgttggaaactcaaaatgcccaatagtagacacttggtggcaaactgaaactggtggaatattaattgccccacaaactggtgctataccgttaaagcctgggtctgcaacaaaacctttctacggtattaaacccgttttggttgataaagatggaaaagaaattaaaggagcaggtgagggtaggctttgtattgctcaatcttggcctggtcagatgagaacagtttatggtgatcatcaaagatttattgatacttacttttctcaatttgatggaaa

SEQ ID NO: 308712 - DNA, 466 bp, Unknown
  Bacterial polypeptide expressing nucleotide sequence isolated from the Sargasso Sea
tactatttcactgggggatggatgtaaaagagatgaagacggctattattggatatctggaagagtagatgatgttataaatgtttctggtcatagaatggggacagctgaagtagaaagcgccctagtttctcatgaaaaagtatctgaagcggctgttgtaggctttcctcatgaaattaaaggtcaaggaatttatgcgtatgtaacccttaatgctggagaaagcggtaacgaagaaattagaaaagagttaataaaatgggttagaaaagaaattggtccaatagctagcccagatttaattcaatttgcaccaaatttacctaaaacaagatcaggaaaaatcatgcgccgtatcttaagaaaaatcgctgaaaatgattattcagaattaggtgatacatcaacgctagcagaaccgatggtagtcgatgaattaatagaaaatagacaaaataaatag

SEQ ID NO: 308713 - DNA, 595 bp, Unknown
  Bacterial polypeptide expressing nucleotide sequence isolated from the Sargasso Sea
tatgtcttttaagtttaatcaaatttatgaaaattctataaaaaatcctgaaaagttttggcaagaagaaagtgaaaatatcttttggtttaaaaaaccaacaaaaattttaaataaatctaatccacctttctataaatggttcgaagatggtttaactaacacttgctataacgctttagacattcatattgaccaaggaagaggacaaaaaactgcattaatttacgatagtcctataacaggcaataaatcaaagttcacttatgaggaacttagagcaaaagtatcaaaatttgctggatccttaaaaaatcaaggtgttaataaaggagacagagtaattgtttacatgccaatgatacctgaagcagtagttgctatgcttgcttgtgcaagaattggggccatacactcagttgtctttggtggatttgcctctaatgaacttgcaagcagaatagatgatagtaaagcaaaattattagtcacggcctcatgtggttttgagcctggaaggacagttgagtacaaacctttggtagatgaggcaataaaaatagcaaaacataaaattgataagatgattttgttt

SEQ ID NO: 308714 - DNA, 780 bp, Unknown
  Bacterial polypeptide expressing nucleotide sequence isolated from the Sargasso Sea
aatgtatgaaaaaaaatacaaagagtctttgagaaataataatgatttttgggaaaaagaaggaaaaaggattacttggattaagccttatacaaaaattaaagatataacatacagcaaaacagacgttagtattaaatggttttatgatggaacattaaatgcatctgcaaactgtatagatagacacttaaaaaagaataaagacaaaactgctattatttgggttggagatgatcctaaagttcaaaaaaagataagttacaaacaattgcacgatgaagtttcaaaagctgcaaatggattaaaaaaacttggtgtacaaaaaggggatagagttactatttatttaacaatgatacctgaattggcgtacacaatgcttgcatgtgcaagaattggagcaatacattcaataatttttggtggattttcaccagatagtatagctggaagaataaatgattgtaaatcagattatattgttaccgcagatgaaggtttaagaggtggtaaaaccatctctttaaaatctattaccgacgaagctttaattcactgtccaaatgtaaaaaaatgtatagtggtaaaaagaactggaaatagaattaattgggatgaacgtagagatgtttggtatgatcaaatgatcaaaggcgttccaactgtttgtgaacctgaagaaatggatgctgaagatcctttgtttatattatacacttctggatctactgggaaacccaaaggtgttctgcatacaacaggtggttatatggttta

SEQ ID NO: 308715 - DNA, 873 bp, Unknown
  Bacterial polypeptide expressing nucleotide sequence isolated from the Sargasso Sea
gatgataccagagttggcttacgttatgttagcctgcgcaagaattggcgcggttcactcaataatatttggaggtttttctgcagaatcgatagcaggtagaataaaagattgtaaatcagaatttgtaataacagcagacgaagggattagaggtggaaaaactattcctttgaaattaactacggataaagcactagaaacatgtccagatgttaaaaaatgtttagttgttaaaaggacaaataaagaaatagagctaaaaaaagatagggatatattttatgaagatattttaaaagacgttgatagtttttgtgagccagaagtcttaaacgctgaggatcctttattcattttatatacctctggatcaactggaaagcccaagggtgttatgcatacaactggtggttatatagtttatgcttcaatgacacatgaatatatctttaattacaatgaaggagatatatactggtgtactgcagacataggctggattactggtcacagttatataatttatgggccactcgctaatggtgctacaactttgatgttcgagggtgttcctaattatcctgacttctcaagattttggcaaatagttgataaacataaagtaaatatattttacactgccccaacagctatcagagctttaatgagagaaggagatgattatgttacaaaaactagtagatcatctttaaaacttttaggcacagttggtgagcctattaatccagaagcatggaagtggtactttgaaataccagggaattcgaaatgcccaattgtggacacatggtggcaaactgagacaggtggaatattaatatcacctcagactggtgctataaagttaaa

SEQ ID NO: 308716 - DNA, 652 bp, Unknown
  Bacterial polypeptide expressing nucleotide sequence isolated from the Sargasso Sea
tatgaatttaacatttaaagaaatttatgactcctcaataaaaaatcctgaagaattttggaaaaatatatctgaagatgtgttttggtttaaaaaaccaaataaaatattaaacaattcaaaacctcctttctataaatggtttgaggatggagttaccaactcatgttataatgcattagatcatcacattgaacaaggcaaaggcaataaagttgctttaatttatgatagtccaataactggaaataaagctaagtttacatttaatcaactaaaaggaaaagtatcaaaatttgcaggagctttggataaacttggaattaaaaaaggagataggattgttatatatatgccaatgataccagaagcagttgttgcgatgcttgcatgtggtagaattggagcaatacactctgttgtttttggtgggtttgcatcaaatgaacttgctagcaggatagatgacagtaaggcaaaaattcttataacggcttcatgtggttttgaaccaggaaaaacagttgagtacagaccattggttgatggagcattaaagctttcaaaacataaattagaaaaagtaatattttttcaaagaaaagatcatgaggtaaaattaaatgcccctcaagagattagttggggatga

SEQ ID NO: 308717 - DNA, 835 bp, Unknown
  Bacterial polypeptide expressing nucleotide sequence isolated from the Sargasso Sea
aattgggataatgagagagatgtgtcttatgaggatctcataaaaaatgcatcagataaatgtgaacctgaagagatgggcgctgaagatccaatgtttattttatacacatctggatcgacaggtaaacctaaaggagtcttgcataccactggcggttatatggtttatgcctccatgacacatcaatatatttttgattataagaataaggatatttactggtgtaccgcggatataggctgggtaacaggtcatagttatattatatatgggccactatctaatggtgcaaccacaataatgtttgaaggagttcctaattacccagatagttctaggtggtggcagatagttgataaatacaaagtaaatatattttacactgcaccaactgctataagggctttgatgagagaaggagacgcgccggtaaaaaaaaccagccgtaagtctcttaaattattagggacagtaggagaaccaataaatcctgaagcttggatgtggtattacaatattgttggagagaaaaaatgtcctatagttgacacgtggtggcaaacagaaactggtggaattttgatttcgcctcaacctggagcaataaatttaaaacctggatcagcaacaaaaccattttatggtattaaacccgctatagtagatgaagcgggtaaagttttaaagggtccatgtaaaggaagactttgtatgcttcagtcctggcctgggcagatgcgaacagtttatggagatcaccaaagatttattgatacttatttctctcaatttgatggaaaatattttactggggatggtgtagacgagataa

SEQ ID NO: 308718 - DNA, 517 bp, Unknown
  Bacterial polypeptide expressing nucleotide sequence isolated from the Sargasso Sea
cggagatcacaaaagattcatagatacatatttttcacaatttgacggtaaatactttacaggcgacggttgtcggagagataaagatggttattactggatcactggtagagttgatgatgtaataatagtttctggacataatttaggtacagcagagatagaaagtgcattcgttgcacacccaaaagtagctgaagctgcggtagtaggttaccctcacgatattaaaggtaacggtctatattgttatgttactctgaatgctggagaacatgcagatggtgatttagaaagagaattaaagctttgggttcgtaaacaaatcggtccaatagctacgccagatttaattcaattttccccaggtttacctaaaacaagatcaggaaaaataatgagaagaattttaagaaaaattgcagccaatgaacataacgagttaggagacactacaaccttggctgacccatcagtagttgattctttaattgaaaatagacaaaataaagattag

SEQ ID NO: 308719 - DNA, 421 bp, Unknown
  Bacterial polypeptide expressing nucleotide sequence isolated from the Sargasso Sea
ttattggatcactgggagagtggatgatgtaattattgtatcaggacataatttaggaaccgcagaaattgaaagtgcgtttgttgcacatcctaaagtagcagaagcagctgtagttgggtatccgcatgatattaaaggaaatggtctctactgttatgtaactctaaatgctggtgaaacagaaacaggagaacttgaaagagatttaaaactttgggtaagaaaacaaattggacctttagcaaccccagaccttgtgcattttaccccaggtcttcctaaaacaagatctggtaaaataatgaggaggattttaagaaaaattgctgctaatgaacatgagcaattaggtgatactaccactttggcagatcctagtgttgtaaacagtttggttgaaaatagaaaaaatatttaa

SEQ ID NO: 308720 - DNA, 846 bp, Unknown
  Bacterial polypeptide expressing nucleotide sequence isolated from the Sargasso Sea
aaagataaagtatctaagtttgcaggtgcattatcaaatcaaggagtaaaaaaaggcgaccgagtaattatttacatgccaatgataccggaggctgttgtggcgatgctagcatgtggaagaattggtgctattcattctgttgtttttggaggctttgcatcaaatgagcttgcaagcagaatagatgacagtaaggcaaaagtattagtaaccgcttcgtgtggatttgaaccaggtagaactgttgagtatcgtccactaatagatggcgcattaaaacttgctaagcataaagtagaaaaagtaattttttttcaaagacaaggtcatgaaataaatcttaatcccccaatagaaattagttgggatgagtctctttataatgcaaaatatactgattgtgtagagatgggctcaaacgaatttgcatatatcctttatacgtctggcactactggcgtgcctaaagggatagttagagatattggaggacatatagtagctcttaaatggactatgaaaaatatttataatattgatgcaaacgatgtttggtggtctgcaagtgatatagggtggattgtgggtcactcttatatagtatacgctcctttatttaaaggctgcacaacagttctatttgaagggaaacctgtaggaactcctgacgctggagtattttggagagtgatatcagaacataaaattaaatctctttttactgcaccaactgcttttagagctataaaaaaagaagacccagatggaaagtttttttctaaatacgatttgagctctttcgagtctttatttctagcccggggaaagagccagacccctgat

SEQ ID NO: 308721 - DNA, 635 bp, Unknown
  Bacterial polypeptide expressing nucleotide sequence isolated from the Sargasso Sea
taaacttttttttggaattgagccatgtattgttaacaaagatggtcaagaacttgaaggtgagtgtgaaggaatgttatgtctaaaaagatcatggcctggacaaatgaggactgtatatggagatcataaaagattcattgaaacatatttttcacaatttgatggtaaatactttactggagatggttgtaaaagggataaggatggttattattggattactggtagagttgatgatgttataatagtatctggacacaatctaggaacagcagaaatagaaagtgcttttgtatcacatcctaaagttgctgaagcggcagtggttggttatcctcatgaaattaaaggtaatggattatactgttatatttctctaaatgtaggagtagatagttcaaaaagtttagttaatgaattaaaacaaactattagagaaaaaattggacctatagcttcgccagacttcatccacgtaactagcggattgcctaaaacaagatcaggcaaaataatgagaagaatacttagaaaaatagcatctaatgattttgaaaatttaggtgatacatcaactttagcagatccttctgtagttaaaacccttattgatgaaagagaaaataaatgat

SEQ ID NO: 308722 - DNA, 907 bp, Unknown
  Bacterial polypeptide expressing nucleotide sequence isolated from the Sargasso Sea
agaaaaaaaattaaaaagaaaaaatctaaaaaaagaaaagtaaaaacaagaaaaaaaagattaaaaaaagttaaatctaaaaaaattgaaaatacagaattaatttataaaccaaaaagtgattggataaaaaaagctatagtaaataaatctggatatgaaaaaaaatattcagagtctttaaaaaacaacgataacttttggaaaaaagaaggcaaaagaattacctggatcaaaccatatacaaaaattaaagattataaatacagcaaaaccgatgttaatattaaatggttttatgatggaactttaaatgcttcagctaactgtattgatcgtcacctaaagaaaaataaagataaaactgcaataatttgggttggtgatgatccaaaagttcagaaaaaaattagctacaaacaattacatcaagaggtttcaaaggcagcaaatggattaaaagaaataggagtaaaaaaaggggatagagttacaatttatttaactatgatacctgagttggcatatacaatgctagcatgtgcaagaataggagcagttcattcaattatttttggaggtttttcagcagatagtattactggaaggattaatgattgcaaatctgactatgttattactgctgacgaaggtgttagaggaggaaaaattatacatttaaaagcaacagttgatgaagctcttttgaattgtccaaatgtaaaaaagtgtgttgtagtaaagcgaactggaaacagaattaattgggatgaaagtagagatgtttggtatcacgatataactaaaaaagcttcaaagaattgtgagcctgaggaaatgaatgctgaagatccattatttattttatatacatctggatccacaggaaagcctaaaggagtttgca

SEQ ID NO: 308723 - DNA, 379 bp, Unknown
  Bacterial polypeptide expressing nucleotide sequence isolated from the Sargasso Sea
ggacataattttgggaactgcagaagtagagagtgcctttgtagcacactcaaaagttgcggaggctgcagtagttgggtgtcctcatgatataaaaggaaatggattatactgctatgtaactttaaatgtaggagaagaacctagtggtgacctggaaagagaattaaagttatgggtaagaaaacaaattggtgcaattgctaccccagatttcattcagtttgcacctggactacccaaaacaaggtctggaaaaattatgagaagaattttaagaaagattgcagctaatgaacatgaacaacttggggatacaacaaccttagctgatccgagtgtagttaaaagtttagttgataatagaaaaaatatttag

SEQ ID NO: 308724 - DNA, 490 bp, Unknown
  Bacterial polypeptide expressing nucleotide sequence isolated from the Sargasso Sea
atgaaaatcagctacaatgacatttatcaaaattctatccaaaaacccgaagaattttggcaaaatatttcaaacgatattttttggttcaaaaaaccaactaaaattcttaataaatctaatcctccattctataaatggttcgaagatggtatcaccaactcttgttacaatgctgttgatcttcacatagaaaaaggcatgggagaaaatatagctctaatttatgatagtcccatcacagataaaaaagcaaaaattacttataatgaactaaaaaaaaaaatttctaagtttgcaggagcattggacaaatatggcatcaaaaaaggagatagagtaattatttatatgccaatgattcctgaggcagttattgctatgcttgcatgtggaagaattggagcaattcattctgtcgtttttggtggctttgcatcaaacgaacttgctagcagaatagatgatagcaaagctaagatcttgataa

SEQ ID NO: 308725 - DNA, 762 bp, Unknown
  Bacterial polypeptide expressing nucleotide sequence isolated from the Sargasso Sea
tctacaggtaaacctaaaggagttcttcatactactggtggttatatggtttatgcttcaatgacacatcaatatatttttaactacaaaccaaaagatatttattggtgtactgctgatattggttgggtaactggacatagttatattatttatggaccactttcgaatggtgcaacaactataatgtttgaaggaattccaaattatcctgatagttcaaggtggtggcaaatagttgataaatataaagtaaatactttttatacagcaccaactgcaattagagcattaatgcgagagggagataaaccagttaaaaaaacatctagaaaatcccttaaacttttgggaacggtaggagaaccaataaatccagaggcttggatgtggtactataaaactgtaggtaattctaaatgcccaattgtagatacttggtggcaaacagaaaccggaggtataatgattgctcctcaaacaggtgcaattcctcttaaacctggatctgcaacaaaacctttctatggaattaagccagtgcttgtggataaaaacggtaaagaaattaaaggcgctggtgaaggaagattatgcatagctcaatcatggcctggacaaatgagaactgtttatggtgatcatcaaagatttatagatacatacttttctcaatttaatggaaaatatttcactggtgatggatgtcgaagagataaagatggatattactggatcactggtagagtagatgatgtaatt

SEQ ID NO: 308726 - DNA, 669 bp, Unknown
  Bacterial polypeptide expressing nucleotide sequence isolated from the Sargasso Sea
ttttttggtggattttctcctgatagtatagctggaagaataaacgactgtaagtcagattatattgtaactgcagatgaaggattaagaggtggcaaaactattcccttaaagtcaattactgatgaagctttaatacattgtccaaatgtaaaaaaatgcattgttataaaaaaaaccggaaatagagttaattgggatgaaagaagagatgtttggtataatgagatggtcaaaggtatgtcaactcactctgagccagaagaaatgaatgcggaagatcctttatttattttatacacatctggttccactggaaaacctaaaggtgttcttcatacaacaggtggctatatggtttatgcttcaatgacacatcagtatatttttaattataaaccaaaagatatttattggtgtaccgctgatattggatgggtaactggacatagttatataatttatggacctcttgcaaacggcgcaacaactataatgtttgagggcattccaacttatcctgactcttctagatggtggcaaatagttgataaatacaaagttaatattttttatacagcaccaactgccattagagctttaatggctcaaggtgaaggtccagttaaaaaaacatcaagaaaaactttaaaattattaggtacagta

SEQ ID NO: 308727 - DNA, 789 bp, Unknown
  Bacterial polypeptide expressing nucleotide sequence isolated from the Sargasso Sea
taattatagaccaaaagatatttattggtgcactgcagatataggttgggtaacaggacacagttatattatatacggacctcttgctaatggagcaacaactataatgtttgaaggagttccaaattatcctgatagttcaagatggtggcaaatagttgataaatataaagtgaatactttttatactgctccaacagctataagagcattaatgagagaaggagatggaccagttaataaaacatctaggaaatcacttaaattattaggtacggttggagaaccaattaatccagaagcatggatgtggtattataatatagttggaaattccaattgtccgattgtggacacttggtggcaaactgagacaggaggaattatgattgctccccaaacaggagctattcctttaaaacctggatctgcaacaaaacctttttatggaataaaaccttgtttaatggataaagatggaaaagaaataaaaggagctggcgaaggacgactttgtatttctcaatcatggccgggtcaaatgagaacagtttatggtgaccatcaaagatttatagacacttatttctctcaatttgatggaaaatatttcactggagatggatgtagaagagataaagatggttattattggattacaggaagagtagacgatgtaattattgtttcaggtcacaatcttggaacagcagaaatagaaagtgcctttgttgcacatccaaaagttgctgaagctgcagttgttggctaccctcatgatataaaagg

SEQ ID NO: 308728 - DNA, 823 bp, Unknown
  Bacterial polypeptide expressing nucleotide sequence isolated from the Sargasso Sea
aaatagagaaagccttcgaattttaggtacggttggcgaaccaataaatccagaggcttgggaatggtactaccatgttgttggagatggccgttgccctattatggatacttggtggcaaacagagacaggaggccatttaataacacctttgccgggcgcaactgatctgaaacctggttcagcaacattgccgttttttggaattgaaccttgcttgatgaatgataaaggggaggaagttataggcgctggagaaggtgcgttatgtttcaaacgttcttggccaggtcagatgcgaacggtgtttggcgatcatgaaagatttaaaagtacttattttcaagcatacccaggattgtattttagtggtgatggcgcacgaagagataaagatggttactactggattactggcagaattgatgatgttattaatgtttcaggtcatcgcatgggtactgcagaaattgagagtgctttagtgttacatgataatgttgcggaatcagccgttgttggatacccgcatgaaatcaaaggccaaggtatctatgcatatgtgactctaaatgatggagttaaatctagcaatgaattgaaaagagagcttatcgatcatgtacgtaatgaaattgggcctttcgcaagtcccgatataattcagtggtcaccaggactgccgaaaactcgatctggtaaaattatgcgtcgaattctaagaaaaatagcaacaaacgaaattgataatttaggcgatacaagcacccttgccgaaccggaagttgtaaagaatcttattgagaatagggagataaaataa

SEQ ID NO: 308729 - DNA, 646 bp, Unknown
  Bacterial polypeptide expressing nucleotide sequence isolated from the Sargasso Sea
tatggaaataaaaaaagaatggcttgaacatgcaaaagttaatgaagaaaaatattcttcaatgtatgataattctcttcaaaacaatgatgaattttgggcagatcaagcagaaagggtagagtggattaaaaaatttacaaaaatcaaagatataaaatattctaaagatgatgttagtattaaatggtttgaagacggcaatcttaatgtatcttataattgtatagataggcatgctgaaaataatcctgataaagttgctataatttgggaaggtgatgatccaaatgaaacaaagaaaataacctacggagaccttctaataaatgtatcaaaagcagcaaatgtactaaaaaaaattggagtaaaaaaaggtgatcgagtaacaatatatttaacaatgatacctgagttggcttacattatgttagcctgcgcaagaattggagcagttcactcaataatatttgggggcttttctgcagagtcgatagcaggtagaataaaagattgtaaatcagaatatgtagtgacagcagatgaaggagttaggggtggaaaaactattcctttgaaattaactacggataaagcactagaatcatgtgcggatgtaaaaaaatgtttagttattaaaaggaca

SEQ ID NO: 308730 - DNA, 623 bp, Unknown
  Bacterial polypeptide expressing nucleotide sequence isolated from the Sargasso Sea
tatgaaaaagaattttcaggaaatctacaacaaatcaatagaaaacccggaggaattttggagaaataattcagaggatattttttggttcaaaaaacctacaaaaattttgaataaatcaaatcatcctttttacaagtggtacgaggatggtgttacaaatacttgctataatgctttagacgttcacattgacaaaggtaatggtgataaaactgctttaatctatgatagtcctattaccggaaacaaatcaaaacatacttatatagaattaaaagaaaaagtatctaaattcgcaggtgctttagttaatcaaggtgtcagcaaaggtgatagagtaataatttatatgccaatgatacctgaagcagtaatagcaatgcttgcatgcagtagaataggagcaattcattctgttgttttcggaggatttgcctcaaatgaacttgcaagtagaatagatgatagtaaagcaaaaattttaatcacagcctcttgtggtttcgagccatctagaacagtcgagtacaaacctctcgttgatggggcaatgaaactagcaacacataaagtagaaaaggtaattttttttcaaagaaaagggaatgaggttaagttaa

SEQ ID NO: 308731 - DNA, 780 bp, Unknown
  Bacterial polypeptide expressing nucleotide sequence isolated from the Sargasso Sea
ccagatgaaaaaagattatggagtatcgttgaaaaatataaagtaaatatattttacactgccccaactgcaattagagctttcatgaagtggggagttgagcatccgcaagcacatgacttaacgtcactcagattgttaggcactgttggtgagccaattaatccagaagcctggatgtggtaccacgaaaacataggaaatgaatcatgtgcaattgtagatacatggtggcagacggagactggttcaataatgattacaccgctgccaggcattacgagtacaaaaccggggtcagcatgtggtccaatgccgggcatagatgcagttgttgttgatgaaaatggaaatgaagtttcaaaaggtgaagggggatatttagcaataaaaacaccttggccatcaatgcttagaacaatatttggtgatgagaaaagatatatcgatacttattggtcaaagtatgacgggatgtattttgcaggagatggggcaaaatatgatgatgatggatacttctggcttctaggaagagtcgatgatgttatgaatatctccggccatagaatttcaacagctgaggtagagagtgcacttgtagcacatgaatcagttgctgaagcagctgtaattggaagagctgatgagatttctggtgaggctattgctgcctttgttactttaattggtggttacgagggaaatgaagagctaatttcaacattaagacaacatgtaagcgataaaatgtggaccaatttgcaaaaccaaaaaagc

SEQ ID NO: 308732 - DNA, 473 bp, Unknown
  Bacterial polypeptide expressing nucleotide sequence isolated from the Sargasso Sea
taattataaagggatgtattttactggagacggtgtaaaaagagatcatgatggatacctcagaatattaggaagagttgatgatgtaataaatgtttccggacacaggatgggaacagctgaagtggaaaatgctataaatgaacacgaagaagttgttgaatcagcggttgttggttatccacacgaaataaaaggtgaaggaatatatgcatatgttattgtaaattccaaatcatcagatgaaataattaaaactgaaattacagatgttgtaagaagagttattggacctattgcaaaacctgataaaattcaaattgtgagtggcttaccaaagacaagatctggtaaaattatgagaaggatactaaggaaggttgcaagcaatgactttgataatttaggtgatacatcgactctattgaatcctgatgttgttgatgaaattattaaagggtctagttattgac

SEQ ID NO: 308733 - DNA, 640 bp, Unknown
  Bacterial polypeptide expressing nucleotide sequence isolated from the Sargasso Sea
attgactcaaaaatataaggagatttatcaaaaatctatcacaaatcgagaggatttttggaaagaaatctctaatgatatattttggtataaaaaacctacaaaaattttgaattcccaaaatcctccattttataaatggttcgaagatggagttacgaacacatgttataacgctttagatctacatattgaccaaggtaaaggtgaaaagctggcaattatttatgatagtcccataactggttcaaaagagaatataacttatagtaaattgaaagaaaaagtcgctttatttgctggagctttgaaaaaacaaggcgtaagcaaaggagatagggttataatctatatgcctatgattccagaagcagtagtagctatgctagcctgtgggagaattggtgcagtccactcagttgtattcggtggctttgccgctaacgaattagcaagtaggattgatgactctaaagctaaaatacttgttaccgcctcttgtggctatgagcctggaagaactgttcattacaaacctttagttaataaggcgttggaattagcaagtcacaaaataaaaaaatgtattatttttcaaagagaaaaagatagagcagagttaaatcctgccattgatatt

SEQ ID NO: 308734 - DNA, 216 bp, Unknown
  Bacterial polypeptide expressing nucleotide sequence isolated from the Sargasso Sea
agctgacattggatggataacaggacatagttatattatttatggacctctagctaatggagctactacaataatgtttgaaggaatcccaacttaccctgattcatcacgttggtggcaaatagtagataaatataaagtaaatattttttacacagcaccaacagctataagagcgttaatgagagaaggagatggtccagttaaaaaaacttc

SEQ ID NO: 308735 - DNA, 799 bp, Unknown
  Bacterial polypeptide expressing nucleotide sequence isolated from the Sargasso Sea
actggttggagagccaatcaatccagaagcttggatgtggtattataaaacggttggagactctcgatgtcctattgttgacacttggtggcaaactgaaacaggtggaatacttattgctcctcaacccggagctattgacctgaaaccaggttcagctactaaacctttctacggtattaagccagttttagttgataacgatggaaaagttataaaaggtgaaggaaaaggcagattatgtatggcaagttcttggccaggccaaatgcgtacggtttatggtgatcatcaaagatttattgatacttatttttctcagcatgatggaaaatatttcactggtgatggctgcaaaagagataaagatggatattattggataactggtagagttgacgatgtaattattgtttcaggacacaacattggaactgctgaaatagaaagcgcatttgtagcacatccaaaagtcgcagaagcagcagtagttggatttccacatagtattaaaggtaatgggctttattgttatgtgactttaatagccggagagaacccatcaggagacttagagagggaattaaaacaatttgttaaaagacttgttggagctcattgctacccagacataattcaatttgcacctggattaccaaaaacaagatcgggtaaaattatgagaagaattttaagaaaaattgcagagaacgatcctgacaatttaggcgatacaactactttagcagatccaactgttgttgcttcgctagtagagaatagacaaaataaaggttaa

SEQ ID NO: 308736 - DNA, 910 bp, Unknown
  Bacterial polypeptide expressing nucleotide sequence isolated from the Sargasso Sea
tgcttggagaaggggagatatagttcttctcaaaaagaatgtggatgactccctaaagcttaccgatcatatagagagcgtaatagttgtaaagagaacagaaaatgaagtaacgatggtaaacgggagagactattggtatagcgaacttgtagacaagcaggaagctaattgcgaaccagaggttatgaatgcagaggacatgttatatattctttatacatcaggtacaacagccaagccaaaaggaattgttcacacacaagccggatatcttactggtgttacaaccacacattcagcagtatttgatgtaaaagaagatgacatctattggtgtgccgcagattgcggatgggtaaccggtcatagttacattgtgtacggacctttagcaaacaaaacaacaagtgttatgtatgagggtgccccaaacgcacctgatgaaaaaagattatggagtatcgttgaaaaatataaagtaaatattttttacactgccccaactgcaatcagggcttttatgaagtggggtgttgaacatcctcaagctcacgagttaacctcactaagactattaggtactgttggggaaccaatcaatccagaagcctggatgtggtaccacgaaaatattggaaatgaatcatgtgtaatagtagatacatggtggcagacagaaactggttcaataatgattacacctcttccgggcattacaagtactaaaccgggatcagcatgtggcccaatgccaggcatagatgctgttgttgttgatgaaaatggaaatgaagtctcaaagggcgagggtggatatttagcaattaaaacaccttggccatcaatgcttagaacagtgtttggtgatgaaaagagatatattgatacctattggtcaaagtatgat

SEQ ID NO: 308737 - DNA, 799 bp, Unknown
  Bacterial polypeptide expressing nucleotide sequence isolated from the Sargasso Sea
cccgtttccctgaaaccggctgtggatgccgccctcgccggtggtgcctgtccgtcggtgagcggagttctggtggtgcagcgcaccaagcaaccggtcgagatggtgaagggccgtgacctgtggtggcatgacctggtggctgggcagagcaacgtctgcccagctgaaccgatggccagtgaagaccggctgttcgtgctctacacctccggttccaccggcaagccgaagggggtggtgcacaccactgccggctacaacctctgggctcacctcaccttccagtggatcttcgacatccgggatgaggatgtcttctggtgtacggctgatgtgggctggatcaccggacacagctatatcgtctacggcccgctgtccaacggcgctaccacggtgatgtacgagggagcgcctcgcccctccaagcccggggccttctgggagctgatccagaagcatgggatcacgatcttctacaccgcccccacggcgatccgagccttcatgaagagcggcagggacgtgccggatcagtacgacatgagcagcctgcgtctgctgggaacggtgggagagccgatcaatcccgaggcctggatgtggtacagagacgtgatcggtggcaaccgctgcccgattgtcgacacctggtggcagacggaaaccggtggcgtgatgatcagccccctcccgggcgctacccccaccaagccgggatccgccaccctgccgctgcctggcattcaggccgacatcgtcgatgccgaaggcaacagttgcgggcctgatgaag

SEQ ID NO: 308738 - DNA, 789 bp, Unknown
  Bacterial polypeptide expressing nucleotide sequence isolated from the Sargasso Sea
aattcaattaataacatacttgaagaaaagagaattttccctccatcaaaaaatttcgcagaaaactcaaatattagtactcaagaagaattactaagtctaaaaaaacaagcatcagataatcctattcaattttgggaatcttttgcaaaatctgaattagattggtttgagccatttcaaactgtattagattacaaaaatgctcccttttttaaatggttcaaagaagggaaactcaatattacatataactgcttagatagacacattaagagagggcttggaggaaagacagcacttatatgggaaggcgaacccggagatagcaaaaaatatacttacgaagaacttctaaaagaggtatgcaaagcagctaatgcattaaaaacaattggtgtaaaaaaaggagatttggtatgtatttatatgccgatgattcctgaagcgatgtttgcgatgttagcttgtgcaagaattggcgcgcctcattcagttgtctttggaggattttcttcagaagctttaaaagataggttaattgatggaaatgcaagatatattattaccgctgatggtggttttagaaaagataaagtgattgaacttaagcaagcagttgatgcggcaattgaaaatggggcagataaagttgttgaaaaagttgtggttgttcaacgaaccaaaaaaaatatttcgatggttgatgatagagatttatggtggcacgaattattaaaagatcaaaaagatcattgtgtaccagaaataatgaatagtgaagataga

SEQ ID NO: 308739 - DNA, 424 bp, Unknown
  Bacterial polypeptide expressing nucleotide sequence isolated from the Sargasso Sea
actatttggatcaccggggagagttgatgatgtaattattgtctcaggtcataatcttggtacagctgaaatagaaagtgcttttgttgctcatccaaaagttgctgaggctgctgttgttggataccctcatgatatcaaaggaaatggattatattgttatgtaactctaaatgctggagaaactgagactggagatttagaaagagagttaaaactttgggttagaaaacaaattggccctttagcgaccccagatttaatacattttactccaggtctcccaaaaactaggtccggaaaaattatgagaagaatattaagaaagatagcagctaatgaacatggtcaattgggtgatactaccacacttgctgacccaggagtagtagacagtttagtagaaaacagaaaaaatgtttaa

SEQ ID NO: 308740 - DNA, 892 bp, Unknown
  Bacterial polypeptide expressing nucleotide sequence isolated from the Sargasso Sea
ttggcaaatagtagataagcacaaagtaaatatattttatactgctccaactgctattagggctcttatgcgagaaggtgacgaatatgtaaaaaaaactaaaagatcttctcttaaattattaggtacagttggagaaccaataaaccctgaagcatggaaatggtattttgaaataccaggagattctaaatgtcctatcgtggatacctggtggcaaacagaaactggaggcatattgattgcgccacagactggtgcaataaaattaaaaccaggcagtgcaacaaaaccattttatggaattgaaccttgtattgttgacaaagatggtaatgaattaaaaggagaatgtgaagggatgctatgtataaaagaatcgtggcctggtcaaatgagaagtgtatacggtgatcacaatagatttattaaaacatatttctcccaatttgatggaaaatattttactggagacgggtgtagaagagatgaagacggttattactggattactggtcgtgttgatgatgttataattgtttcaggtcacaacctaggtactgcagaaatagagagtgcatttgtatcacatccaaaagtttcagaatctgcagtagttggatacccacatgaaattaaaggaaatggtttatattgttatgtttcattaaatgcagatactgaagcatcagaaacaataaaaaaagaacttgttcaaactttgagaaataaaattggtcccatagcaactcctgattttattcattttacttcaggtctgcctaagactaggtctggaaaaataatgcgaagaatacttagaaaaattgcagcaaatgaacatgatcaattgggagatacttcaacattagctgatccaagtgtgggtgaa

SEQ ID NO: 308741 - DNA, 463 bp, Unknown
  Bacterial polypeptide expressing nucleotide sequence isolated from the Sargasso Sea
attgagcgcagaaaaaatagcagtaaaaaccaattggaaaaataatgctcatttagataaaaataattatgagaaattttatgagaaatcaattaatgatccagaaggcttttggagtgaacaagctttaaatatagactggtataaaccttttactaaagatgctattaaaaaagttaatttttcaaaagataatctagaaataaagtggttctatgatggcaaattaaacgtctcatataattgcatagataggcacttaaaaactaaaagtgataatactgctataatttgggaaggagacaacccaaatgaaagtaaaaatattacttataaagaattgcacactgacgtgtgtctaatggccaatgtattaaaaaaaagaggagttaaaaaaggagacagaataacaatttatatgcctatgataccagaagcatcctatgcaatgttagcttgtgct

SEQ ID NO: 308742 - DNA, 907 bp, Unknown
  Bacterial polypeptide expressing nucleotide sequence isolated from the Sargasso Sea
gaagcttaatgctgataaagctcttgttgatactccttctataacttctgtggttgttgtaaaacgcactggagtggatataaatatgattgatggtcgtgatgtctggtggcatgagcagatagaaaaagctaatgcaaattgtgatccagttcagatggattcagaagaccctctctttattttatacacttctggcagtactggaaaaccgaaaggtgttttacacactactgggggatatcttgtgtatgcatcttacacccaccatactatctttgattacaaggataatgatgtttactggtgtactgctgatattggctggatcactgggcattcctacattgtttatggtcctctttcaaatcaggctacaactattatgttcgaaggtgtaccaaattatccagatttcggacgtttctgggatgtcgtagataaacatgaagtaaatcaattctacacagcacctacagctcttcgagcactgatgaaggaaggtgatgattgggtaacatctagagaacttggtagtcttagaatacttggaacagttggcgaaccaattaaagaacccgagtggaattggtatcataaaatagttggaaaagagcgttgcccgattgtcgatacatggtggcagacggagactggaggaattttgatctcacccttaccgggagcaactccaactaagccaggctctgctacttttccttttttcggaattcatccagtgctaatgacagatgatggtatagaaatcaagggtaataatgtccaaggcctacttgcattaaaaacatcatggcctggacaaatgcgtacgatatatggtgaccatcagcgtttcattgagacgtatttttctcaatttccaggatattattttacaggcgatgga

SEQ ID NO: 308743 - DNA, 889 bp, Unknown
  Bacterial polypeptide expressing nucleotide sequence isolated from the Sargasso Sea
gtaatcatctatatgcctatgatacctgaagcagttgtagcaatgcttgcgtgtgcaagaattggtgcaattcactctgtagtgtttggtggttttgcttcaaatgaacttgcaagcagaatagatgacagcaaagcaaaagtattagttacagcttcttgtggttttgagcctggaaggacagttgaatacaaacctttagtagatgaagctgttaaacaagctaaacataaaattaataaattgattttatttcaacgacaagggcatgaggttaaattaaatgctccaaatgaagttgattgggatgaagttgtctcaaaagcaaaagatattgattgtgttgaaatgaattcaaatgaatttgcatacatactttacacatctggtacaactggtaccccaaaaggtatagtcagagacacagggggtcacatagttgcattaaaatggactatgaaaaatatttacaacattgatgagggtgatatttggtggtctgctagtgatataggttggattgttggtcattcatacattgtttacgctccattattcaaaggatgcacaacagtattgtttgaaggaaaaccagttggcactccagatgctggagctttttggaaaattatttctgactataaggtaaaatctttatttacagctccaactgcatttagagcaataaaaaaagaagacccagaaggaaaatttttttctaaatatgatttaagtaagtttgaaagtctttttctagctggcgaaagagcagatccagatactattaaatgggctgagaatttgttaaaagttccagtaatagatcattggtggcaaactgaaacaagctgggcgatcagttcaaattgtacaggaattgaaatgatga

SEQ ID NO: 308744 - DNA, 961 bp, Unknown
  Bacterial polypeptide expressing nucleotide sequence isolated from the Sargasso Sea
tactacagatgaagcactaacaaactgtccaaatgttaaaaaatgtattgtagtaaaaagaactggaaattatgttttttggaacagcgatagagatgtctggtaccatgatttaattaaagatgtaccaaattattgtgaacccgaggaaatgaatgctgaagatccacttttcattctttatacatcaggatcaaccggtaaaccaaagggtgttttgcatacgaccggcggatatatggtttatgcgtcaatgactcatcaatacatttttaattataaaccgaaagatatttactggtgtactgctgatattggctgggttacaggccatagctatatcatttatggtccactttctaatggagcaaccacaattatgtttgaaggtataccaaattacccaaacagttccagatggtggcaaatagttgataaatttaaagttaatactttttatactgcaccaacagcaattagggctttgatgcgggaaggggatgagccagttaataagacatctagaaaatcacttaaattacttggtactgttggtgaaccaattaatccagaagcatggatgtggtattacaaaactgttggtaattctaaatgtccaattgtagatacatggtggcaaactgaaactggtggaatcctcatagcacctcaaacaggagctatacccctaaaacctggatcggcaacaaaacctttttatggaatcaaacctgttcttgtaaataaagatggaaatgaaattaagggtgctggggagggaagactttgcatagcacaatcatggccaggacaaatgagaactgtctatggagatcatcaaaggtttatagatacttatttttctcaatttgatggaaaatattttactggtgatggatgtaaaagagataaggatggttattactggataacaggcagagttgatgatgtaatcattgta

SEQ ID NO: 308745 - DNA, 665 bp, Unknown
  Bacterial polypeptide expressing nucleotide sequence isolated from the Sargasso Sea
aatagatttaaaacctggttctgcaacaaaaccattttacggaattaaacctgtcttggttgataaagatggtaaggtaattaaaggagaaggtaaaggacgactttgtatggcctcttcatggcctggccagatgagaacagtctacggtgatcatcaaaggtttatagatacatatttttctcaatttgatggaaaatattttactggggacggttgtaggcgtgacagagatggatactactggataactggaagagtagacgatgtaattatagtttcaggccataaccttggtactgctgaaattgaaagtgcatttgttgctcatccgaaagttgctgaggcagctgtagtaggttttccacacagtattaaagggaatggattatattgttatgtaacacttaacgctggggaaaaaccaactggtgacttagaaagagaccttaaactatgggtaagaaaacaaattggtccaatcgcaactcctgacgtaattcaatttgcacctggtttaccaaaaacaaggtctggaaaaattatgagaaggattttaagaaaaatagctgcaaatgagccagataatttaggagacactactactcttgcagatcctagcgtcgttgcatccttggtagaaaataggcaaaataaaggttaat

SEQ ID NO: 308746 - DNA, 919 bp, Unknown
  Bacterial polypeptide expressing nucleotide sequence isolated from the Sargasso Sea
caattttttcttaaaaaagcaatttcttatctttcgtggtttaaggagccaacagtcgggcataacggaagttttgaggagacgaaatggtttgaagatggaacactaaatataagttataactgtattgatagacacgcaaaaaataatccggacaaaatagcaataatttggcaaggagatcaagaaaatcattttaaaaaaatttcctataaagatcttcttagagaagtttcaaaattggcaaatggcctaaggtctttaggtgtcaaaaaaggcgacagagtttgtatttatatgcccatgattcctgaagcagcatattcaatgtttgcttgtatgagaataggggccattcattctgtagtctttggaggtttttctcctgaagcaatttcatcaagaattctcgacgctgattgtaaatatataataactgcagatgaagggattagaggaggcaaaactattccacttaagttttatgttgataaagctttagaaaaatgtccagatataaaaaaagtaatagttctccaatacacaaaaggaaatatcaattggaatagtaaattagatatcacttatgaggaattagtcacagatcagcccacagagtgtgcgtgtattgagctaaaagcggaagatccttcttttattctatatacctctggctcaacaggaaaacccaaaggagtactgcacacaactgcaggctatcttttaagtgcgaatctttcatttaaatatatttttggaataagagatgacgatatacattggtgcaccgcagatgtgggatggataacaggccatacttatattctttatgggcctctctcaagtggaatcacgacagtaatgtacgaaggagtgcctatgtatcccgatccctcaaggtttttggaagatttgtgat

SEQ ID NO: 308747 - DNA, 594 bp, Unknown
  Bacterial polypeptide expressing nucleotide sequence isolated from the Sargasso Sea
tatgacaaatagttttaataaaatttatcaagaatctattcaaaatcctgaggaattttggaaaaatgtatctgatgatgtcttctggtttaaaaaacctactaagattttgaacaaatctaatcctccattttataaatggtttgaagatggcgttacaaacacctgttacaacgctattgatgttcatattgataaaggtaacggtgagaagactgctttaatttatgatagccctataactaatagtaaagcgaagtatacctacaatgaattaagagaaaaaatatcaaaattcgccggagcacttgataatcaaggtattaaaaaaggtgacagagtaataatttatatgcctatgatacctgaggcagttatagcaatgcttgcttgtgggagaattggtgcaatacactcggtagtctttggtggatttgcttcaaatgaattggcaagcaggattgatgatagtaaagcaaaaattttaatcactgcttcctgtgggtttgagccaggaagaaccgttgaatacagaccattagtaaatggagcattgaaacttgcgaaacataaagttgagagagtgattttctt

SEQ ID NO: 308748 - DNA, 823 bp, Unknown
  Bacterial polypeptide expressing nucleotide sequence isolated from the Sargasso Sea
gatgaaggtatacgtgcgaggtaaaataataccccttaaagaaaatacagatgcggctttaaagttatgcagttctataaaaaaatgtattgttgtgaaaagaacagggaatgatatcaactgggttgagggtcgtgatatttggtatcacgaagccatgtcaaaagttgacaatgagtgccaaccagaagaaatggatgctgaagatcctctatttatactatacacctctggttcgactggaaagccaaagggtgtgttacacacaactgctggatatatagtttacgcttcaataactcataaatatgtatttaactatattgatggtgacatttactggtgtacagctgatgttggatgggtaacaggtcattcgtatattgtttatggccctcttgcaaacggggctacaactcttatgtttgagggcatccccaattatcccacaaattctcgtttttgggaaatagtagacaagcacaaagtaaatattttttatacagcaccaacagcgatacgagccttgatgagagaaggggacgaagctgttaaaaaaacatcaaggtcttccctaaagcttttagggactgtgggtgaaccaattaacccagaggcttggagatggtactatgacgttgttggcaataaaaattgcgagatagtcgatacttggtggcaaactgaaactggaggaattcttattagcccattaccaggagttactccaactaaaccaggctcagcaaccaagcctctttttggagtaaaacctgtaattgttgaccaaaataataacattcttgagggccctgctgaggga

SEQ ID NO: 308749 - DNA, 884 bp, Unknown
  Bacterial polypeptide expressing nucleotide sequence isolated from the Sargasso Sea
tatggcaaaaagatcaaaaaggagaagaaaaagaaagaaaaaatttgggtttgataaacctaaaagtgagctaataataaaaataaaatctgactggattaaaaaagcaattgttaataaaaaggggtacgaaaaaaaatataatgactcaataaaaaataatgattctttttggaaaaaagaaggaaaaagaatcacttggataaaaccttataaaaaaattaaagacgtaaaatatagtaaaaatgaagttagaataaaatggtacgaagatggaactcttaatgcttcagcaaattgtatagatagacatttaaaaaataaaaaagataaaactgcaattatttgggtcggcgataacccaaaagatacaaaaaaaataagttataaacaacttcatagagaagtctcaaaagcagcaaatggtttaaaaagtttaggtattcaaaaaggagatagggtaacaatttatctaacaatgataccagaattagctattattatgctagcttgtgccagaattggagctattcactcaataatttttggaggattttcctcagactctattgctggaagaattaatgattgtaaatcacattatataataactgcagatgaaggggttagaggaggaaaaactattccattaaaagcaataacagatgaagcgcttttaaaatgtcctgatataaaaaaatgcattgtagttaaaagaactggaaattttgtaaattggataaatgggcgagatatttggtatgaagatataattaagaaagcatcaacacattgtgaaccggaagaaatgaatgccgaagatccactgtttatattatatacttctggatcaacaggtaaaaccaaaaggcgttttacacact

SEQ ID NO: 308750 - DNA, 373 bp, Unknown
  Bacterial polypeptide expressing nucleotide sequence isolated from the Sargasso Sea
gtttctgggcataggttgggaacaatggaaatagaatcagctttagtaagtcataaattagttgcagaagctgctgtcgtgggtagaagagatgatttgaaaggtgaagttatagttgcttttgtatctttagaaaaagatgtgaaaagttctttagaattagtggaggaattaaagaaacatgttgttagtgaaattggaattatcgcaaagcctgaaaaaattattatttctgactcacttcccaaaacacggagcggaaaaattatgaggagaattttgagatctttggcagctggagaaaaaattagtggtgatataagtactcttgaagatagttctgttttggaaaagttgaaagaatcatcctaat

SEQ ID NO: 308751 - DNA, 839 bp, Unknown
  Bacterial polypeptide expressing nucleotide sequence isolated from the Sargasso Sea
aatgtatgagggagtgccaagaccctcaaatttgggggctttttgggagattgttcaaaaatataaggtttctattttttatactgcaccaactgcaataagggcatttatgaagtctgggcgtgaaatacccgataaatataatttggagagtcttagacttctgggtactgttggagaaccaattaatcctgaagcatggatgtggtacaaggatgttattggtaaagataaatgccctattgttgatacttggtggcaaactgagactggtggcgtgatgataagtcccttgcctggagtcgttgctacaaagccaggttccgccactttccctctgccaggaatcgaagttgaaattgttgataagaatggagataaggttaaggagaacgagggtggctatttaattattaagaaaccttggccaggaatgatgagaacaattcacggaaactcagagagatatttggagagttattgggaatttattacctttaaaggagaaaaaaatgtttattttgctggagatggagcacgcattgatgaagatggatatatatggattatgggaagagttgatgatgtcataagtgtttcaggacatcggttaggaacaatggaaatagaatctgctttggtaagtcataaatcagttgcagagtctgcagtcgttggcaaaaaagatgatttaaaaggtgaagttatagtcgcttttgtatctctagagaaagatgtgaaaagttcttcagaattagtagagaatttaaagaatcatgttgttaatgaaattggaattatcgcaaagcctgaaaaaattataatttctgactctcttc

SEQ ID NO: 308752 - DNA, 720 bp, Unknown
  Bacterial polypeptide expressing nucleotide sequence isolated from the Sargasso Sea
cgcatatacctataaggagttgttggactggacagcaaggatagcgggaggcctcgtatccctgggcgttagtaaaggtgatcgggtagtgatctatatgcctatggtgccagagaccgtagttgccatgttggcttgtgctcggataggggctatacattctgtggtttttgggggttttgcggcaccggaactggccagtcgaatcgatgatgcggaacccaaggttattttatcggcctcttgtggtattgagttcgaaaaggtaattgaatacaagccgcttctggatgccgcgattgaaatcgcaagtttcaaaccagcgcactgtgtggttttacagcgtcctcagtctcaggcaactttaattgagccccgagatatcgactggaaaagttgggagtccgagtcggagtcggttgggtgcgtggcggttctggcgacggatccactctacattctgtacacgtcgggcacgaccggtaaaccaaagggtattgtcagagacaacgggggtcacgctgtggctttgaaatacagtatgggcgccatttatgatgttgatgttggagatatattttgggctgcctcagatgtgggttgggtcgtgggtcattcttatattgtttatgggccgctcctaaaggggtgcgcgagtattttgtatgagggtaaacctatcagaactccagacgctggcgctttttggagggtcgtctc

SEQ ID NO: 308753 - DNA, 520 bp, Unknown
  Bacterial polypeptide expressing nucleotide sequence isolated from the Sargasso Sea
aatgtcagtcaaattcaacaaaatctataatgagtcaatcaatagcccagaaagattttggagcgaagcatctaatgatattttctggtttaaaaaaccgactaaaattttgaacaaatcaaaccctccattctataaatggtatgaagatgggataacaaatacttgttataatgcccttgacattcatattgataaaggaaatggaaagagaactgcgctcatatacgatagtccaataactaataataaaagtaagtttacatttgaggaattaagatcaaaagtttcaaaatttgctggagcccttaaagaccaaggcgtcaataagggagatagagtaattatttacatgcctatgataccagaggcagttgttgctatgcttgcatgtgcaagaataggagcaatacattctgtagtatttggtggatttgcctcaaacgaacttgcaagtaggattgatgatagtaaagcaaaaatattagtcacagcctcatgtggttttgaacctggaaga

SEQ ID NO: 308754 - DNA, 806 bp, Unknown
  Bacterial polypeptide expressing nucleotide sequence isolated from the Sargasso Sea
tagtatttcaggcagaattaatgattgcgaatctgattatgtaatcactgcagatgaaggagtaagaggtggcaaaacaatccctttaaaatctattacagatgaagctttacaaagctgtccaaacgtaaagaaatgtatcgttgtaaagagaacaggtaccaaaaaaattgattggtacaatgatcgtgatgtttggtatcacaaaatgattagtaaagtttcagcaaaatgtgagcctgaggaaatgaatgctgaagatccattattcattctttacacatctggttcaactgggaaaccaaaaggtgttctacatacaactggtggatatatggtttatgcatcaatgactcaccaatatatttttaattataaacctaaagatatttactggtgcacggctgatataggctgggttacaggacatagttatattatttatggtccacttgctaacggcgcaactacaatcatgtttgaaggaatacctacttatcctgatacatctagatggtggcaaatagttgataaatataaagttaatattttttatacagctccaacggcaatcagagctttaatgagggaaggtgataaaccggtaaagaaaacatctagaaaaactttaaaacttttaggtactgttggtgaaccaattaatcctgaagcttgggaatggtactacaaaaccgttggcgatagtagatgtccaatcgttgatacatggtggcaaacagaaacaggtgggattttgattagtcctcaaactggagcgatagatttaaaacctggttccgcaacca

SEQ ID NO: 308755 - DNA, 932 bp, Unknown
  Bacterial polypeptide expressing nucleotide sequence isolated from the Sargasso Sea
atgagattaatttgggtcgaagacagagatgtttggtatgacgatctaataagatctgcatcaaataattgtgaaccagaagagatgggtgcagaagatccattatttattctttatacgtctggatcaacgggaaaaccaaaaggagtactccatactactggtggatatatggtttacgcttctatgacacaccaatatatttttaactacaaaaaaaatgatatttattggtgttccgcagatattggttgggtaacaggacatagttatattatttatggtccactttctaatggtgccacaaccataatgtttgaaggtgtacctaactaccctgatacatcaagatggtggcaaattgttgataaatataaagtaaatattttttatacagctcctactgcattgagagctcttatgagagaaggtgaaggtccagttaaaaaaacaagtagaaaatctttaaaacttttaggaaccgtaggtgagccaattaatccagaagcttggctttggtattataaagttattggagagtctaaatgtccaatagtagatacatggtggcaaactgaaacaggtggaattttaatatcaccccaaccaggtgcaatggatctaaagcctggttcagcaacaaaacctttttatggaataaaaccagttattgtagatgaaaaaggtaatactttaaaaggagcatgtagaggtagattgtgtattgcgcaatcgtggcctggtcaaatgagaactgtttacggagatcaccaaagatttatagatacttatttttcacaatttgatggaaaatattttacaggagatggatgtagaagagatgaagatggttattattggattaccggtagagttgatgatgtcataatagtatctggtcacaatcttggtacagctgaactaaaaagtgc

SEQ ID NO: 308756 - DNA, 946 bp, Unknown
  Bacterial polypeptide expressing nucleotide sequence isolated from the Sargasso Sea
cgaatagctattatatgggaaggtgatgatccaaacgaaccaaaaaaaattacttatcgtgagttatatgaggaggtttgtaagttctctaatgctctaaaagcgaatggtgcaaaaaaaggtgatagaataacaatatatatgccaatgatccctgaagctgcagttgcaatgcttgcatgtgcaaggttaggcgctattcattcagtagtttttggaggattttctcctgactcactagctggcagaattactgattgtgattcaaatatcattattactgctgatgaaggtatacgtggaggaaaaataatacccctcaaagaaaatacagatgcagctctaaacttatgcagttctgtaaaaaaatgtattgtagtgaaaagaacagggaatgacatcaactgggttgaaggtcgtgatgtttggtatcacgaagccatatcaaaagttgataatgaatgccaaccagaggaaatgaatgctgaggatcctctatttatactatacacctctggttcgactggaaagccaaagggtgttttacatacaactgctggatatatagtttacgcttcaataactcataaatatgtatttaactatattgatggagacatttactggtgtacagctgatgttggttgggtaacaggtcattcatatattgtttatggccctcttgcaaacggtgctacaactcttatgtttgaaggcgttcctaactacccaacaaattctcgtttttgggaaatagtagacaagcataaagtaaatattttttatacagcaccaacagcaattcgagccttaatgagagaaggagatgaggctgttaaaaaaacatcaaggtcttccctaaaacttctaggtacagtgggtgaaccaataaacccagaagcttggagatggtactatgacgttgttggcaataaaaattgcgaga

SEQ ID NO: 308757 - DNA, 889 bp, Unknown
  Bacterial polypeptide expressing nucleotide sequence isolated from the Sargasso Sea
gtaagacgaattaattttaaagctcctacattctcaaaagacagtgacggtaattcagttataaaagtttcagatagttgggcaaatcatgcctatgtgaacgactctaaatataaaaagaaatataagatgtccatcaaagaaaacgataagttttgggctaaagagggaaaaagaattacttggatgaaaaagtatacaaaaattaaagacgtaaaatatagtaaagatgaggtaaaaataaaatggtattatgatggaactttaaacgcttcagctaattgtattgatagacatttaaagaaaaatcctagcaaaacagcaattatttgggttggagatgatcccgctgatacaaagaaaatttcttacagagaacttcatcagaatgtatgcaaagctgcaaacggtctaaaaagtttaggaattcaaaaaggtgatagagtaactatttatctcactatgataccagagctggcatacattatgctagcttgcgcaagaataggtgcggttcattcaataatttttggtggcttttcgccagactccatagcaacaaggataaccgattgtgaatcggagtacttaattacagcagatgaaggagtaagaggaggaaaaataattcctctaaaaaaaattgcggatgaagctttagatcaatgtccaaatgttaaaaaatgtgttgtagtagaaaggacaggaaatcaagttgattggaataatgaaagagacgtttcatacaaagaattaatctcttctgttcctgttaaatgtgatcctgaggaaatgaacgctgaagatcctctatttattctttacacatcaggttcaacaggtaaacctaaaggtgttttacatactactgggtggtatatggtttatg

SEQ ID NO: 308758 - DNA, 859 bp, Unknown
  Bacterial polypeptide expressing nucleotide sequence isolated from the Sargasso Sea
cctgaagaaatgaatgcagaagatcctttgtttatcttgtatacatcgggctcaacaggaaaaccaaaaggggttttgcatacaactgggggatatatggtttatgcttcaatgactcatcaatatatttttgattacaaaccgaaagatgtttatttctgtagtgccgatattggttgggtaaccggacacagctatataatttatggtcctttatctaatggtgcaactaccctgatgtttgaaggcattccaacatatcctgactcatctagatggtggaaaataattgacaaatataaagtaaatattttctacactgcgccaacagccatacgtgctttaatgcgtgagggtgacgggcctgtaaaaaaaaccagccgaaagtctcttaaactattaggtactgttggtgaaccaataaatccagaagcttggatgtggtattacaatgttgtgggagacaaaaaatgtccaatagtcgatacttggtggcaaacagaaactggaggaattttaatttcacctcaacctggtgcaataaatttaaaaccaggatctgccacaaagccattttatggaattaagccagcaattgttgatgaatctggaaaaatattaaaaggtgcttgtaaaggtaggctttgcatgttgcaatcttggccaggacaaatgagaactgtttatggggatcaccaaagatttatagacacatatttctctcaatttgatggaaagtattttactggagatgggtgcagaagagacaaagacgggtattattggataacaggtagagtcgatgatgtaattatagtctcaggtcacaatttggggacagctgagatgaaagtgcatt

SEQ ID NO: 308759 - DNA, 643 bp, Unknown
  Bacterial polypeptide expressing nucleotide sequence isolated from the Sargasso Sea
ctcagcttcaaacctttttttggtattgaaccttgtatagtagataaagaaggtaaagaattagaaggtgaatgtgaaggtatgttatgtatgaaaagatcgtggcctggccaaatgcgtactgtgtatggagatcataaaagatttattgatacctatttttcacaatttgatggaaaatactttactggagatgggtgtaaaagagacaaggatgggtactattggataacaggtagggtcgatgatgtgattattgtatcaggacataacttaggaactgctgaaattgaaagtgcttttgtatcacatgaagatgtgtctgaagccgcagttgtggcttacccccatgaagtaaaaggtaatggcctgtattgttatgtttctcttaaagtaggcgtaccttcatcagatcaactaattttagatttaaaaaaaactataagagaaaaaattggtccgattgctactcctgactttattcatatcactgatggtttaccgaaaaccagatcaggaaaaataatgagaagaattttaagaaaaattgcttcaaatgattttgaaaatttaggtgatacttcaactttagctgatccttcagtagtagataatttaatagagaatagaaagaataaataaa

SEQ ID NO: 308760 - DNA, 847 bp, Unknown
  Bacterial polypeptide expressing nucleotide sequence isolated from the Sargasso Sea
catggtttatgcttcaatgacacaccaatatatttttaattacaaaccaaatgatatttatttttgtactgcagatataggatggataacaggtcacagttatataatttatggtccattatctaatgcagctaccacagtaatgtttgaaggtataccaagttatcctgatagatcgagatggtggcaaatagttgataaatataaagtaaatattttttatactgcaccaacagcaataagagatttgatgagagaaggtgataagccagttaaaaaaacatctagaaaaactcttaaattacttggcacagttggtgaaccaataaatccagaggcatggcaatggtattataaaactgttggggactctagatgtccgattgttgacacatggtggcaaactgaaactgggggaatcttaattagtccccaaaccggtgcgataaatttaaaacccggttccgcaactaagccgttctatggaattaaaccagtaattgttgataagaaagggaaagttttaaaaggagaagctcaaggtagactttgtatagctcagtcatggcccggacagatgaggactgtttatggagatcataaaagatttatagatacatatttttcacaatttgatggaaaatattttacaggagatggatgtagaagagataaagatgggtactactggataacaggaagagttgatgatgttataattgtttcaggacataatcttggaactgcagaaattgaaagtgcttttgtagctcatcctaaagttgctgaagccgcagttgttggatatccacatgatataaagggtaatggattatactgctatgta

SEQ ID NO: 308761 - DNA, 721 bp, Unknown
  Bacterial polypeptide expressing nucleotide sequence isolated from the Sargasso Sea
aatgaacaaggttgatgctagcaattttgtacttgaaccaacaacccaatatgacttttcaattatgcattacacctcaggttctactgggaaaccaaaaggggtacttcatcgccatcaagcagttgttcaacaatggttaactggcaaatgggctttagatctcaaagaaggagatatttatttttgtactgctgatccaggatgggttacgggaacctcttacgggatgatggctccttggacaaactgcgtaacacaaattatttatgaaggtgggtttggtgctgcttcttggtacgaaatcatacaaaaatatggggtaacagtttggtatacagccccaaccgctataagattactcatgagagctggagaagctgttgttcaaagatatgatctttcttcgttaagatttattggttctgttggggaacctttaaatcctgaagctgttgtatggggaaataaaaattataaaatgcccatacatgataattggtggcaaactgaaactggtgcaattatgtgcgccaattatgcaacaacaaatattagaccaggatcaatgggaaaaccttttccaggtataactatggggattttagacgatcaatataacgaattaggctctggggaaagtggaatactagctgtaagaccaggctggccttctcaaatgtttgcttattggcaacaggatgaaatgtataactctcga

SEQ ID NO: 308762 - DNA, 906 bp, Unknown
  Bacterial polypeptide expressing nucleotide sequence isolated from the Sargasso Sea
actgactctattaaaaataacaattcattttggaaaaaagaaggaaagagaattacttggataaaaccttacaaaaaaattaaagatgtaaaatatagtaaagatgaagtaaagattaagtggttcgaagatggcaccctaaatgcatccgctaactgtattgaccgtcacttaaaagacaaaagagataaaactgcgataatatgggtaggggatgatcctaaggacactcaaaaaatttcttataaacaattgcatcaaaaggtttcaaaagctgcaaatggtttaaaaaaactaggaatacaaaaaggtgatcgtgtcactatttatctgacgatgatacctgaattagcgatccttatgttagcttgtgcaagaataggtgcagtccactcaataatttttggtggtttctcagcagagtcgatttcgggaagagtgaatgattgcaaatcagaatatataattacagctgatgagggggtaagaggaggcaaaactatccctttaaaagcaacaacagatgaagctttgtctaattgtccagatgtcaaaaagtgtattgtggtgaagagaaccggtaattatgtatactgggatcaggatcgagatgtgtggtatcacgacttgattaaagatgtgtcaaccacttgtgaacctgaagaaatgaatgcagaagatccgttatttattctttacacttcaggatcaactggaaagcctaaaggagtattgcataccactggaggatatatggtttatgcttctatgactcatcaatatattttcaattataaaccaaatgacatttattggtgtacagcagacattggatgggtaactggtcatagttatataatttatggaccactggctaatggtgcaacaactattatgtttgaaggt

SEQ ID NO: 308763 - DNA, 568 bp, Unknown
  Bacterial polypeptide expressing nucleotide sequence isolated from the Sargasso Sea
caaggtagattatgtatagctcaatctggccagggtcaaatgagatcagtatatggagaccataatagatttatagaaacatacttttctcaatttgatggaaaatattttactggagatggatgtagaagggataaagatggatactattggataactgggagagtggatgatgttattattgtatcagggcataatttaggaactgctgaaatagaaagtgcattcgtagcccatcaaaaagttgctgaagctgcagtagtgggatacccacatgatataaaaggaaatggattgtattgttatgtaactcttaatgttggagaagaacccaatggagacttggagagagaattaaaactttgggttagaaaacaaattggtcctattgctactccagattttattcaattttcacctgggctaccaaaaacaagatcaggaaaaataatgagaagaattttgaggaagattgctgctaatgaacatgaacaacttggagatacaacaactttagctgatccaggtgttgttaaaagtctagttgataatagaaaaaatgtttaaa

SEQ ID NO: 308764 - DNA, 932 bp, Unknown
  Bacterial polypeptide expressing nucleotide sequence isolated from the Sargasso Sea
aaatggattaaaaaatctgggagttcaaaggggtgacagagtaacaatttatctaaccatgataccagaacttgcctacacaatgcttgcatgtgctagaataggtgcagttcactccataatatttggaggtttttcaccagatagtatttcaggcagaattaatgattgcgaatctgattatgtaatcactgcagatgaaggagtaagaggtggcaaaaaaatccctttaaaatctattacagatgaagctttacaaagctgtcccaatgtaaagaaatgtattgttgtaaaaagaacaggcaccaaaaagattgattggtacaatgatcgtgatgtttggtatcacaaaatgacaggtaaagtatcagcaaaatgtgagcctgaggaaatgaatgctgaagatccattattcattctttacacatctggatcaactggaaaaccaaaaggtgtgctacatacaacaggtggatatatggtttatgcatcaatgactcaccaatatatttttaattataaacctaaagatatttactggtgcacggctgatataggctgggttacaggacatagttatattatttatggtccacttgctaacggtgcaaccacaatcatgtttgaaggaatacctacttatcctgatacatccagatggtggcaaatagttgacaaatataaagttaacatcttctacacagctccaacagcaataagagccttaatgagggaaggtgataaacctgtaaagaaaacatctagaaaaactttaaaacttttaggtactgttggtgaaccaattaaccctgaggcttgggaatggtattacaaaactgttggtgatagcagatgcccaatcgttgatacttggtggcaaacagaaacaggtggaatattgatcagtcctcaaactggagcgattgattaaa

SEQ ID NO: 308765 - DNA, 836 bp, Unknown
  Bacterial polypeptide expressing nucleotide sequence isolated from the Sargasso Sea
tatgccagtggctctaaaatcgtcaatgaaaaatatttttgattgtaaacctggtgaagttttcttttgtgcatctgatattgggtgggttgttggccactcgtatcttgtttatgctccacttctaaatggtaatactacaattttatttgaaggtttacccacaatgcctgatccgggcatatggtggtctattgttgaggattatggagttagcacgatgtttacctccccaaccgcaatacgtgttttgaaaaaagagagtgagagatttctaaaaaaatataaaacaaattctctaagaaagttttttcttgccggtgaaccacttgacaaaccaacagccgattgggttgctacaaatttaaaaactacagaaattattgataattattggcaaactgagactggatggccaataatctcagcccagcagcctattcaagaaataaaactgaaaagaggaagtccaagttttgcagtttttggctatgacatagagttactgaacgaggatttaactgtaaacagcaagcctgaaacaaaaggaattttatcaatacgggcacccctaccaccaggctgtcttcagacaatttggggaaatgataagaggtttattgagacctactttacaaaaattaaaggcgagtttttttactctacctttgattatgccaaatttgatcaagatggatttttctttattttaggtagaactgatgatgtaataaatgtttcgggtcacaggttaggaactcgagaaattgaggaagctatccaacaacatgatgatgtagctgaggttgcagttgttggcgtttttgacaatttaa

SEQ ID NO: 308766 - DNA, 636 bp, Unknown
  Bacterial polypeptide expressing nucleotide sequence isolated from the Sargasso Sea
caaaacctttctttggtatccagcctgagatcatggatgctgaaggaaatatattagaaggcgcttgtgaaggatcattgtgtcttgcagattcttggccgggacagatgagaaccgtatacggcgaccataaaagatttattgaaacttatttttctcaatttgatggaaagtatttcaccggtgatggatgtaagcgtgatgaagatggttactattggataaccggacgtgttgatgatgtgattaatgtatccggtcaccgtatgggaacagcggaagttgagtccgctttggttgcgcatccaaaagtcagtgaagccgctgttgttggttatcctcatgacatcaaaggtcagggaatttacgcctacgtaaccttaaacgcaggcgaagaaacttctgatgaattatataaagagttggttgcttgggttcgaaaagaaatcggacccattgcatctcctgatcttattcaatgggcacccggtcttcctaaaactcgttctggtaaaattatgagaagaattttaagaaagattgctgaaaatgaatacagcaatcttggcgatacatctactttagctgaaccagcagtagtcgatgatctgatcgacaatcgaatgaacaagtaat

SEQ ID NO: 308767 - DNA, 747 bp, Unknown
  Bacterial polypeptide expressing nucleotide sequence isolated from the Sargasso Sea
tacctggtaattcaaaatgtccaattgtagatacatggtggcaaactgaaacaggtggaatattaatttcacctcaaactggtgccataaaattaaaacctggttctgcatcaaaacctttctatggaatagaaccatgtattgtagacaaagatggtaatgaattggagggcgagtgtgaaggaatgttatgtatgaagcgttcgtggcctggtcaaatgagaactgtttatggagatcataaaagatttattgatacttatttttctcaatttgatggaaaatattttactggtgatgggtgcaagagggataaagatggatattattggattacaggtagagtagatgatgtaattattgtgtcgggacataacctaggtacagctgaaatagaaagtgcttttgtttctcataaaaatgtttctgaagctgcagtagttggataccctcatgatgttaaaggtaatggtttatactgttatgtttctctcaaggttggagtagatccatcagaagatttagttttagatttaaaaaaaactatcagagaaaaaattggtcctatagctacaccagatttcatacatattacagctagcttaccaaagacaaggtctggaaaaatcatgagaaggattttaagaaaaattgcttctaatgattttgaaaatttaggagatacttcaaccttagcggatccttctgttgtagataatttaattgaaaatagaaaaaataaataac

SEQ ID NO: 308768 - DNA, 949 bp, Unknown
  Bacterial polypeptide expressing nucleotide sequence isolated from the Sargasso Sea
tatggcaaaaaaatcaaaaaaaaagagaaaaagaattattaggaaaaaaagacttagaaaaaaaagcataaaaacatctcgtaaacgatacttaagcaaaaagaacaggttacaaaccaaaacaaataaatctggtgaaaaggtttataaagtgaaatcagaatggttgaaaaaagctttagtgagtaaaaatatttacgaaaaaaaatatagtcaatctttaaaggataacgatggattttggagaaaggagggtaaaagaattgcctggattaaaccttatacaaaaattaaggatgtgaaatatagtagttcagatgtaaatattaagtggttttacgatggaacactaaatgcatcatcaaattgcatagatagacacttaaaaaataataaagataaaacagcaattatgtgggttggagatgatccaaaagtacaaaaaaaaataacttataaacaactccataatgaagtttgtaaaatcgcaaatggtttaaaagaaattggagtgcaaaaaggtgatagggtaacaatttatttaacaatgatacctgaattagcttatacaatgttagcatgtgcaagaatcggagctatacactcaataatttttggtggtttctctcctgacagtatagctggacgtattaatgattgtgagtctgattatgttgtaacagctgatgaaggtattagaggaggaaaacaaatacctttaaaatcgattactgatgaagcattgatgagttgtcctaatgtgaaaaaatgtgttgttgttaaaagaacaggtgctgatattagctggaatgatagcagagatgtctggtatcacgatataacaaagaatgttacatcatattgtgaacctgaggagatgaatgctgaagatcctctttttatattatatacgtcagggtctactggaaaacctaagggagttcttcat

SEQ ID NO: 308769 - DNA, 975 bp, Unknown
  Bacterial polypeptide expressing nucleotide sequence isolated from the Sargasso Sea
ttcgggtagagtgaatgattgcgaatctgaatatataatcactgctgatgaaggtgtgagaggtggaaaaactattccattaaagtatacaacggatgaggcgctaacaaattgcccaaacgtgaaaaaatgtatcattgttaaaagaactggaaactatatcaattggaataacgaaagagatgtttggtatcatgatctaataaaagatgttcctagtcattgtgaaccagaagaaatgaatgctgaggatcctttatttattttatacacttcaggttcaactggtaaaccaaaaggagttctccatactacgggtgggtatatggtttatgcatctatgacccaccaatatatttttaactataagccaaaagatatttattggtgtactgctgatattgggtgggtaacgggacatagttatattatttatgggcctcttgcaaatggtgctacaacattaatgtttgagggaattcctaattatcctgatacttcaagatggtggcaaatcgttgataaatataaagttaatattttctacactgcacccacagcaattagagctttaatgcgtgaaggtgataaaccagttaaaaaaacctctagaaaatctttaaaattacttgggacagttggtgaaccaattaatcctgaggcttggatgtggtattacaaaacagttggtaattctaaaagcccaattgtagatacttggtggcaaactgagactggaggaatactgatagctcctcaaactggagccattccattaaaacctggttcagctacaaaacctttctatggaataaagcctgtcattgttgataaaaacggtgaagagataaaaggcgctggagaaggaagactttgtatttgctcatcatggccaggccaaatgagaactgtttatggagaccatcaaagatttatcgacacgtatttttcccagtttcatggaaaatattttac

SEQ ID NO: 308770 - DNA, 677 bp, Unknown
  Bacterial polypeptide expressing nucleotide sequence isolated from the Sargasso Sea
aatgacagaaaagttgattgagtcgatattgaatgagtctagaagttttgctccttcaaaaaagtttatcaagcaagccaatattaacaacgaagaggcggaaagattaagggaagaagcttcacacaatcacattgaatattgggctaaattagccagggctcatttgcattggtttctcccatttaacaacatactggatgaatcaaatgcgcctaattatgaatggttcaatgatggagagatcaacgcttcatttaattcactggatataaatgccaataaaaacccagaaaaaactgcaattatatttgaaacagaggatggaaactctgagcgcatcacatacaaagatcttcttttaagaacctctcaatttgccaatggccttaagaagcttggcgtagtgccgatggatagggttgtgatatatatgcccatgtgccccgaggctgtgattgcgatgcaggcatgcgcaagaattggcgcaatacactctgttgtttttggagggttttcatcaaatgcactcaaggacaggatagaggatgcccaatcaaagattgtgattactgctgacggagcatatagaggcggaagcgttattccgcttaagcaagcaacggatgaggcggtgacaaactctttgcacaaagtaaaaaatgttgtggtttttg

SEQ ID NO: 308771 - DNA, 625 bp, Unknown
  Bacterial polypeptide expressing nucleotide sequence isolated from the Sargasso Sea
cttgaaagaaagaggaaataaggtagcgattatttgggaagctgacacacctaatgaaagtaaaaaaattacttataatgatcttcatagtgaggtttgcaaatttgccaatggtttaaagtcccttggagtaaaaaaaggagacagagttacaatttatctacctatgattcccgaggctgcttatgccatgcttgcttgtgcaagaattggtgcaattcactctgttgtttttggtggatttgctcccgactctctcagagatagaatagttgattgcggatcgtccacagtaattacggcaaatgaaggtcttaggggaggaaaaactattccgttgctatcaaatgtaagaagtgcaacaactgatttagatattattgaaaatgtccttatagttaatcgtacgaacaaagagattaattaccatgaaaaagaagtatcctatgaagatttagtttcaaaccaaagtaacaaatgtgaaataactgaacaattttctgaagatccactttttattttatacacctctggctctactggtaaaccaaaaggtgttttgcatacctcagccggatatttacttcatgcctcaataagtcataaaactatttttgatttaaaa

SEQ ID NO: 308772 - DNA, 653 bp, Unknown
  Bacterial polypeptide expressing nucleotide sequence isolated from the Sargasso Sea
catgtcggatcaaagttattttcctgtccccaacgacatcgccaaatcagcgcatgttgacaatgatggttacctcgaaatgtacaagaggtccgtcgaagatgcggaaggattctgggcagagcacggcaagcggatcgaatggacgaagccgtatacgcaagtgaaggacgtcacctacgattcggacaatgtcgaaatcaaatggttttacgacgggaaattaaacgtcgcgcacaattgcatcgacagacatttggaagagcgggctgaccaagtcgctatcatttgggaaggtgacgacccgagcgaagacgcgcagatcacgtatcgcgacctccatcagcatgtttgcaaattcgccaacgtcctgaagacccagggcatcaaaaaaggggaccgggtcaccatttacatgccgatgatcccggaggccgcatacgccatgctggcgtgtgcaagaattggggcaatccactcggtggtctttggcggcttttcacccgatgcgctggcgggccgggtagaagactgtgattcgagcgtgatcatcacggcggacgaggcctacgcgggggaagagctgtgccccctcaggcaaatacggacgccgccgccgaactgtgcggtaacatccaaactgtcatcgtcgt

SEQ ID NO: 308773 - DNA, 766 bp, Unknown
  Bacterial polypeptide expressing nucleotide sequence isolated from the Sargasso Sea
ttatgatggaactttaaacgcatctgcaaattgtatagatcgtcacttaaaaaaaaacaaagataaagttgcaattatatgggttggagacgatccaaaagttcaaaaaaaaattacttataaacagcttcattatgaagtttcaaaaacagctaatgccttaaaaggaataggagtaaaaaaaggtgatagagttactatttacctaacaatgattcctgaactagcttatacaatgctagcttgtgcaagaattggggcagttcattcaattatttttggaggcttttcatcagatagcattgccggaagaataaacgattgtaaatctgattttgtaataactgcagatgaaggtgtaaggggaggaaaaaatatacctttgaagtctatcactgatgaagcattgatacattgtccaaatgttaaaaaatgtgttgttattaaaagaactggaaattatatcaattgggataatgacagagatgtttggtatcacgaaattaccaaaaatgcatctccacattgtgaagttgaagaaatgaatgccgaagatcctttatttattctttacacttcaggctcaacaggtaagccgaaaggtgttttacatacaacaggtggttatatggtttatgcttctatgactcatcaatacatttttaattacaaagcaaaagatgtttatttttgtacagctgacattggatggataacaggacatagttatattatttatggaccgctatccaattgtgcaactaca

SEQ ID NO: 308774 - DNA, 457 bp, Unknown
  Bacterial polypeptide expressing nucleotide sequence isolated from the Sargasso Sea
tatgtcagacaaattcaataaaatttacaatcattcaataaaaaatcctgaaaaattttggcgagacgcggctgaggacatcttttggtttaaaaaaccaacaaaaattttaaataaatctaatcctcccttctataagtggtatgaagatggggtaactaacacttgttacaatgctttggacattcatattgatcagggcagaggaaaaaaaactgctcttatctatgatagtccaattacagataacaaaggtaagctcacgtacgcagaacttagatccaaagttgcaaaatttgcaggagcgttaaaagctcaagaggttaaaaagggtgatcgagtaataatttatatgccaatgatccctgaggcagtgattgcgatgcttgggtgtgcaagaattggtgcaatacactctgttgtatttggtggatttgcatctactgaacttgcaagc

SEQ ID NO: 308775 - DNA, 562 bp, Unknown
  Bacterial polypeptide expressing nucleotide sequence isolated from the Sargasso Sea
atgagcgataatgaaaaatttaacgtcagtgccgattggtctgccaacgcccagataaatcaagataaatataatgagtggtatgaaacatcattcaataataatgaagatttttggaacgaacacggcaaacgcatggaatggatgaagccgtatacaaaagtgaaaaacgtttcatttaataaagataacttttcaatcaaatggtacgaagatggtgcacttaatgcttccgccaattgcatcgatcgacatttaaaagataaaggggatcagacagccatcatttgggaaggcgatgatccaaaagactcaaaacacattacttataatgaacttcataaagaagtttcaaaattatctaatgggatgaaatcccttggtgtaaaaaaaggtgaccgtgtaaccatttatatgccaatgattcctgaagcagcatacgccatgcttgcgtgcacacgcattggtgctattcactcagttgtctttggtggcttttctcctgactcacttgcaggacgcatcagcgattgtaaatcgagatattgtgataacggctgat

SEQ ID NO: 308776 - DNA, 892 bp, Unknown
  Bacterial polypeptide expressing nucleotide sequence isolated from the Sargasso Sea
attgaataatgaaagagatgtttggtatcatgacttaataaaggatgtatcaagtcattgtgatcctgaagaaatgagtgctgaggaccctctctttattctttacacttcaggctctactggaaagcctaaaggagttttacatacaactggtggctatatggtctatgcatcaatgacacatcaatatatttttaattataaaccaaaagatatttattggtgtacagctgatattggttgggttactggtcatagctacattatctatggtccactttctaatggagcaactacaataatgtttgagggagttccaaattatcctgacagctctagatggtggcaaatagtagataaatataaagtaaatacattttatactgcgccaaccgcaattagagcattaatgagagagggtgatgggccggttaataaaacctcaagaagatctttaaaattattaggaacagttggtgaacctataaatcctgaggcatggatgtggtattacaaaactgttggaaattcgaaatgtcctatcgtagatacttggtggcaaactgaaacaggtgggattctaattgcacctcaaactggagcaatacctttaaagccaggttcagcaacaaagcctttttatggaataaaaccctctatagttgataaagatggaaaagagattaaaggagctggtgagggacgtttgtgcatttctcaatcatggccaggtcaaatgagaacagtttatggagatcatcaaagattcattgacacttatttttctcaattcgatggtaaatactttactggtgatggatgtagaagagataaagacgggtattattggataactggaagggttgatgacgtaataattgtatctggacat

SEQ ID NO: 308777 - DNA, 520 bp, Unknown
  Bacterial polypeptide expressing nucleotide sequence isolated from the Sargasso Sea
atgaaaaaagaagtttcctataaaacgccgcaaaatattattgataacgcaaacatcaatgaagtcgatttcaatgaactatataaagaatctcttgaaaatcctgataagttttggggcgagcaaggcgagaagtatcttgattggtatcaaaaatggactaaggttcaagaatcagatttttcaaaaggtaaattctcctggttcttgggaggaaagttgaatgcgtcatataactgtatagataggcatcttccagagaaaggaaataacattgctttaatatgggaaggagatgatccaaaagattcaaaaaaaattacttataaagaacttcatagagaggtttgtatattctctaatgtcctaaaatcacgaggaataaaaaaaggggatagggtctgcatatacatgcctatgattcctgaagctacttacgcaatgcttgcttgtgcaagaattggcgccattcactcagttgtttttggtggattttctccagaattctctcaaagataga

SEQ ID NO: 308778 - DNA, 733 bp, Unknown
  Bacterial polypeptide expressing nucleotide sequence isolated from the Sargasso Sea
aaatataaagttaacattttttatacagctccaactgcaataagagctttgatgagggaaggagacaaaccagttaaaaagacaagcagaaaatctcttaaattacttggtactgtaggtgaaccaataaatcctgaagcatggatgtggtattacaggactgttggggactcgaggtgtccgatagtagatacttggtggcaaacagagacaggtggtatacttatttctcctcagccaggagctatagatttaaaaccaggttcagcaacaaaacctttttatggaattaaaccagtcttagttgataaagatgggaaggttgtgaaaggcgaaggtaaaggtagattatgtatgactcaatcttggccgggacaaatgcgaacagtttatggtgatcaccaaagatttatcgatacatatttttcacaatttgatggtaaatatttctcaggtgatggttgcagaagagacaaagatggatactactggattacaggaagggttgatgatgttataattgtttcaggtcacaatcttggtactgcagaaattgaaagcgcttttgttgcgcacccaaaagttgctgaagcagcggtggttggttttcctcatagtattaaaggaaatggtctatattgttatgtaacattaaatgtaggtgagcaaccaactggagatttagaaagagatttaaaactatgggtaagaaaacaaatcggtccaatagcta

SEQ ID NO: 308779 - DNA, 900 bp, Unknown
  Bacterial polypeptide expressing nucleotide sequence isolated from the Sargasso Sea
tataaatggtatccagatggtagtctaaacacatgtttcaatgctatcgacagacacgttctaaatggcaggggagaacaagatgcaatcttgtatgatagtcctgttacaaacacaaaaaagaaaattacctattcagaacttaaacatcaagtatccatttttgctggtgcccttaaaaaattaggcattttaaagggggatcgtgtaataatttacatgccaatgatacctgaagcattagtggctatgcttgcttgtactagattaggagcagttcattctgtagtatttggtggttttgcctcaaatgaattagctgtacgaattgatgattgtaagccaaaaataatagtgtcagcttcatgtgggcacgagccaaatagaattgttgaatataaacccttgcttgacaacgcagttaaaattgccagtcatcaagtggaaaaatgcataatttatcagcgtgaagccctaaatgttaagcttatcccaggccaagatatagattggaatgaggttgtcaaagatgttttattggctgatccagttgaagttagagcaaacgatcctttgtatattctttatacatcgggaacaactggaaaacccaaaggagttgtcagagataatggtggacatgcgatatctttaaaatggtctatgaaaaatatttataatgtagaacctggggatgtatattgggctgcgtcggatattggatgggtagttggtcattcttatatcgtttatgcacctctgcttcatggttgcacgacaattttatttgaaggaaaacccgttgggacaccagatgctgggacattttggagaattatttcagagtataaggtcaaggtgttatttacagctccaacagctctaagagctgtgaaaaga

SEQ ID NO: 308780 - DNA, 470 bp, Unknown
  Bacterial polypeptide expressing nucleotide sequence isolated from the Sargasso Sea
gtcaccggccacacgtacatcacgtacggcccgctcgcatgcggcggcacgcaggtcgtgttcgaaggcgtgccgacctatccggacgccggccgcttctggaagatgatcggcgaccacaaggtcaccgtgttctacaccgcgccgaccgcgatccgctcgctgatcaaggcggccgaggccgacgacaaggtccatccgaagagctacgacctgtcgagcctgcgcatcatcggcacggtcggcgaaccgatcaatccggaagcatggatgtggtatcacaagcacgtcggccaggagcgctgcccgatcgtcgacacgtggtggcagaccgaaaccggcggccacatgatcacgccgctgccgggcgcgacgcccaccgtgcctggctcgtgcacgctgccgctgccgggcatcatggccgcggtggtcgacgaaaccggccaggacgtaccgaacgggcagggcgg

SEQ ID NO: 308781 - DNA, 283 bp, Unknown
  Bacterial polypeptide expressing nucleotide sequence isolated from the Sargasso Sea
agaaaaagtttcaaagtttgcaggtgcattaaaaaatcaaggaataaataaaggggatagagttataatttatatgccaatgattcctgaagcggttattggcatgcttgcttgtgcaagaattggtgcaattcattctgtagtttttggaggatttgcttcaaacgaactaccaagtagaatagatgatagtaaagcaaaagttttactgacagcttcatgtggttttgagcctggcagaacagttcaatataaaccccttgtagatgaagctattaaattg

SEQ ID NO: 308782 - DNA, 565 bp, Unknown
  Bacterial polypeptide expressing nucleotide sequence isolated from the Sargasso Sea
tatgcaaaaaaaatttcaagatatttacgagaattctataaaaaatcctgaaaaattttggcaagaagcctctgaagatatcttttggtttaaaaaacctgtaaaaattttaaataaatctaatccacctttctataaatggttcgaagatggggttacaaacacctgttataatgctttagacacccatattgaccaagggagaagtaaaaaaacagctttaatttacgatagtccgattacaggcaataaaagccagttcacttatgaggaattaagatcaaaggtctctaagtttgcaggggcattgaaagctcaaggggctaataaaggtgatagggtgattatttacatgccaatgatccctgaagcagtagttgctatgcttgcttgtgctagaattggtgcaatccattcggtggtctttggtggatttgcctctaatgagcttgcgagcagaatagatgacagtaaagcaaaaatattagtgaccgcttcatgtggttttgagccgggaagaaccgttgagtacaaaccacttgttgatgaagcaataaaaattgct

SEQ ID NO: 308783 - DNA, 574 bp, Unknown
  Bacterial polypeptide expressing nucleotide sequence isolated from the Sargasso Sea
agctggtgaaggaaggctttgtatttctcaatcatggccaggtcaaatgagatctgtttatggagatcaccaaagattcatagatacttatttctcacaatttaacggaaaatattttactggtgatggatgtagaagagataaagatggatattattggattactggtcgagttgatgatgtcattatagtttccggacataaccttggtactgcagagattgaaagtgcatttgttgctcatccaaaagttgctgaggcagctgtagttggttatccacacgatctaaaaggtaatgctttgtatgtctatgttactttaaatttaggtgaaaaagaaaatggagatttagaaagagaactaaagaatcatgtggctagaacattggggcctatttatagaccagatattatacactttactccaggacttccaaaaactagatctggaaaaataatgagaagaattttaagaaaaattgcagctaatgagcatggacaattaggtgatacaactacattagctgatccaacagttgttgaaagcttggttgataatagaaaaaatatttaa

SEQ ID NO: 308784 - DNA, 1016 bp, Unknown
  Bacterial polypeptide expressing nucleotide sequence isolated from the Sargasso Sea
aattttaatgctagcctgcgcaagaataggtgctgttcactcaatcatctttggtgttttttctgcagagtcgatttcgggtagagttaatgactgcgagtctgaatatataattacagctgatgaaggtgtgaggggtggaaaaacaattcccctaaaagcaacaactgatgaagctttaacaaattgtcctaatgtaaaaaaatgcattgttgtaaaaagaactggaaattatgttttttggaataacgacagagatatctggtatcatgatttaattaaagatgtatcaaatcattgtgaacctgaagagatgaatgcggaagatccattatttattctctacacatctggatcaacaggtaaaccaaagggtgttttacatactactggtggatatatggtttacgcatcaatgacccatcaatatatttttaattataaacctaaagatatttattggtgtacagctgatatagggtgggttacaggtcatagttatattatttatggtccactttcaaatggagcaacaactattatgtttgagggtgtgcctaactatcctgatacgtcaagatggtggcagattgtagataagttcaaagtaaatactttttataccgctcctactgcaataagagctttaatgagagagggagatagtccagttaataaaacttcaagaaaatcactgaaattattaggaacagtgggagaaccgataaatccagaagcttggatgtggtattttaaaactgtaggaaactctaaatgtcctattgttgacacatggtggcagacagaaactggaggaattttaattgctccacaaacaggagccattcctttaaagcctggctcagcaactaaacctttttacggtattaaacctgttttagtggataaagatggtaaagaaattaaaggtgctggtgaaggaagactttgtattgcccaatcttggcctggtcaaatgagaacagtttatggtgaccacaaaaagatttattgat

SEQ ID NO: 308785 - DNA, 874 bp, Unknown
  Bacterial polypeptide expressing nucleotide sequence isolated from the Sargasso Sea
tatagatagacatttaaaagacaaaaaggataaaactgcaattatttgggttggcgatgatccaaaagatagtcaaaaaataacttataaacaattacaccaaaaagtttcaaaggctgcaaatggtttaaaaaaactcggaattaaaaaaggtgatcgagttacaatttatttgaccatgatcccagagcttgcaattttaatgctagcatgtgttagaattggtgcagtccactcaataatatttggtggtttttctgcagagtcaatttcaggtagagtaaatgattgtgagtctgaatatataatcactgctgatgaaggtgttagaggtggaaaaactattccattaaaatatacaactgatgaggccttaacaagttgtccaaatgtaaaaaaatgtattgttgttaaacgaactggtaattacataaattggaatgaagaaagagatgtttggtatcatgatctaataaaagatgtttcaggtcattgtgagccagaagaaatgaatgcagaggatcctttatttattttatatacctcaggttcaactggtaaaccaaaaggagttcttcatacaactggtgggtatatggtttacgcatcgatgacacatcaatatatttttaattataaaccaaaagatatttattggtgtactgctgatataggatgggtaacaggacatagttatatcgtttatggacctcttgctaatggtgcaaccactataatgtttgaaggaattcctaattatcctgatacttcaagatggtggcaaatagttgataaatataaagttaatattttctataccgctcctacagcaattagagctttgatgcgtgaaggtgataaacctgttaaaaaa

SEQ ID NO: 308786 - DNA, 763 bp, Unknown
  Bacterial polypeptide expressing nucleotide sequence isolated from the Sargasso Sea
tatgacaaatagttttaacaaaatttataacgaatctattcaaaatccagaggagttttggagaaatgtgtcggatgatatcttttggtttaaaaaacctaataagattttaaataaatctaatcctccattttacaaatggtttgaagatggggttacaaacacctgttacaacgctattgatgttcatatagacaatggtaacggtaataagactgctttaatatatgaaagtccgataactcacagtaaagcaaaatttacatataatgaattaagggaaaaaatctcaaaatttgctggagcacttaataatcaaggtgtcaaaaagggtgacagagtaattatctatatgccgatgatacctgaggcggttatagcgatgcttgcttgtggaagaattggtgcaatacactcagttgtctttggtgggtttgcctcaaatgaactagcaagtagaattgatgatagtaaagcaaagattttaattactgcatcctgtggatttgaacctggtcgaaccgttgaatatagacctttagttgatggagcattgaaaattgcaaaacataaagttgagagagtaattttctttcaaaggaaagaccatgaagtaaagctcaactctccgattgaaatgagctgggaggaggcacttgttaatgccaaaaataaagattgtgttggggttggtgcaaatgaatttgcaaacattttatatacatctggaactacaggtataccaaaaggtatagtaagagat

SEQ ID NO: 308787 - DNA, 913 bp, Unknown
  Bacterial polypeptide expressing nucleotide sequence isolated from the Sargasso Sea
gagaatataagggtttcaattttttatactgcaccaactgcaataagagcatttatgaagtctgggcgagaaattcctgataaatataatctgaagagtcttagactattgggtacagttggagagccaattaatcctgaagcatggatgtggtacaaagatgttattggtaaaaataaatgtcccattgttgatacttggtggcaaactgaaactggaggtgtaatgattggtcctttgcctggagtggttgctacaaagccaggttcagctacttaccctttgcctggcattgaagttgaagtcgttgataagaatggagataaagtaatggagaacgagggtggttatttaattattaagaagccttggccaggaatgatgagaacaattcatgggaacccacagagatatttagatagttattgggaatatatttcttttaaaggagagaagaatgtttacttcgctggagatggagctcgtattgatgaagatggatacatttggattatggggagagttgatgatgtaataaatgtttctggtcataggttaggaacgatggaaatagaatctgctttggtaagtcataaatcagttgctgaagctgccgttgtgggaagaaaagatgatctaaaaggtgaagtaatagtagcttttgtatctttagaaaaagatataaatatttccacagaattagaagacgaattaaagaaacatgttgttaatgaaattggaattatcgctaagccagaaaaaataataatttctgactctcttcctaaaacacgaagtggaaaaattatgaggaggattttgagatctttggctagtggagaaaaaattagtggtgatttaagcactcttgaagatagttctgttttggaaaagttgaaagaaaaatcttaat

SEQ ID NO: 308788 - DNA, 757 bp, Unknown
  Bacterial polypeptide expressing nucleotide sequence isolated from the Sargasso Sea
tcctgatagcatagctggaagaattaatgattgtaagtctgactatgtcatcactgctgatgagggtataagaggtggaaaaactataccattaaaatcaattactgacgaagcattagtaaactgcccaaatgtaaaaaaatgcattgtggttaaaagaacaggaaatagaattaactgggacgaaacaagagatgtttggtatcacgaaattacaaaaaaagcttcttcatattgtgaacctgaagaaatgaatgctgaagaccctctttttatactttatacatctggttcaactggaaaacctaaaggtgttttgcatacaactggtggctatatggtttatgcttccatgacacatcaatatatttttaattataaaccaaaagatatttattggtgcactgctgacattggatggataacagggcatagttatattatttatggacctttatctaatggagctactacaataatgtttgagggtattcctacttatcctgacacgtctcgttggtggcagatagtagataagtataaagttaatattttttatacagctccgacagcaataagagccttaatgagagaaggagctgccccagttaaaagaacatctagaaaatccttaaaattacttggtacagttggagaacctattaatccagaggcatggcagtggtacttcaaaactgtaggggattccaaatgtccaattgttgatacctggtggcaaacagaaactggtggaata

SEQ ID NO: 308789 - DNA, 565 bp, Unknown
  Bacterial polypeptide expressing nucleotide sequence isolated from the Sargasso Sea
ggaagactttgcatagctcaatcttggcctggacaaatgagaaccgtctatggtgatcatcaaagatttatagaaacatatttttcacaatttgatggtaaatattttactggagacggatgtaggagagataaagatggatattattggattactggaagagtggatgatgtgattatagtttcaggtcataatcttggaacggcagaaatagaaagtgcctttgttgcacatcctaaagttgctgaagcagctgttgttggatatccacatgatattaaaggaaatggcttgtattgctatgtcacattaaatgctggtgaaaaaacttcattggatttggaaagagatttaaaactttgggttagaaaacagataggaccaattgcaacccctgacttaatccaattttcacctggacttccaaaaacaagatctggtaaaattatgagaagaattttaagaaaaattgcaacaaatgaacatgacaaattaggtgatacaactactctagcagatccaagtgttgtaaaaagtttagttaataatagaaaaaatatttaaa

SEQ ID NO: 308790 - DNA, 399 bp, Unknown
  Bacterial polypeptide expressing nucleotide sequence isolated from the Sargasso Sea
tgggtcgtaatgatgatgtgatcaatgtatcaggacataggctaggctctgcagaaattgagagcgcacttgtagaatccccccacgtcgcagaagctgctgttgtcgcagtgccagatgcaatcaaaggagaggctatctttgcttttgttgttgagcgctcccagaacccacttaggcacaattttgagagcgatttacgcaaagtagtagcacaagtgatcagtcctattgccaagccgcaaactattgttagagtgcctgagctaccaaaaacacgtagcggaaaaatcatgcgccgacttttaaagagcttaattgaaggcaaagaagcgcaagagacaagcactctctctaatcccaaaagtttagaagctatcaaagaggtacttttgtgac

SEQ ID NO: 308791 - DNA, 529 bp, Unknown
  Bacterial polypeptide expressing nucleotide sequence isolated from the Sargasso Sea
tgctcccacttttccagatgtcggaaggttttgggatatttgcgagaaacatgctgtcaccattttttatactgcgccgacagcaattagagcattgatgaaacacggagatgaaattccacaaagctatgacttgtccagtctgcgtctacttggaacagtaggtgaaccaataaaccctgaagcttggatgtggtaccacagaattattggtcaagagcgttgtccaattgttgatacttggtggcaaacggagacaggtggagctatgatcagcccccttcctggggtcacagagacaaaacctgggtcatgtacaactgcaatgccaggtattgatgttgatatcctcgatgagctaggagagccagtaggcgaggcaaatcagggagggtatctggttatcaaaaaaccatggccctcaatgttaagaaccatatggggagataaccaaagatatattgatacttattgggaaaaatttgacggaaggtattatgttgctggcgatagtgcatacagagatgag

SEQ ID NO: 308792 - DNA, 754 bp, Unknown
  Bacterial polypeptide expressing nucleotide sequence isolated from the Sargasso Sea
gatgttatttggtaaaaataaatgcccaattgttgatacttggtggcaaactgagactggtggtgtgatgataagccccttgcctggagtcgtcgctacaaagccaggttctgcaactttccctctgccaggaatcgaagttgaaattgtcgataagaatggagataaggttaaggagaacgagggtggctatttaattattaagaaaccatggccaggaatgatgagaacaattcacggaaactcagaaagatatttggaaagttattgggaatatatttcctttaaaggagaaaaaaatgtttattttgctggagatggagcacgcattgatgaagatggatatatatggattatgggaagagttgatgatgtcataagtgtttcaggacatcggttaggaacaatggaaatagaatctgccttggtaagtcataaatcagttgcagagtctgcagtcgttggcaaaaaagatgatttaaaaggtgaagttatagttgcttttgtatctttagaaaaagatgtgaacagttcttcagaattagtagaggatcttaagaaacatgttgttaatgaaattggaattatcgcaaagcctgaaaagattataatttctgactctcttccgaaaacacgtagtggaaaaattatgaggcgaattttaagatctttggcttctggagaaaaaataagcggtgacataagcactctagaagatagttctgttttggaaaagctgaaagaattatcctaa

SEQ ID NO: 308793 - DNA, 902 bp, Unknown
  Bacterial polypeptide expressing nucleotide sequence isolated from the Sargasso Sea
agatcctttatttattctttacacatcaggctcgactggtaagccaaaaggtgtgttacatacaactggtggctatatggtgtatgcatcaatgacacatcaatatatttttaattataaaccaaaagatatttactggtgtacagcagatattggatgggtgactggtcatagttacataatttatgggccattagctaatggagctaccactattatgtttgaaggaatcccaacttatcctgataattctagatggtggcaaatcgttgacaaatataaagtaaatattttttacacagcaccaactgctattagggctttaatgagagatggaaatgaaccagtaaaaaaaacttctagaaaatctctaaagttattaggaactgttggagaaccaataaatcccgaggcttggatgtggtattttaaaacagtcggaaactcaaattgtccaattgtcgatacttggtggcaaacagagactggtgggattttaattagccctcaaactggggctatcaatttaaagcctggatcagctactaaacctttttatggaattaaaccttcaatagtaaataaagatggaaaagaaataaaaggtgctggcgaaggtaggctctgcatttcacaatcttggccagggcaaatgagaagcgtttacggtgatcatcaaagatttatagatacttacttttctcaatttaatggaaaatatttcacaggcgatggcgcaaaaagagataaagatggatattattggattacaggaagagttgatgatgtaataatagtctcaggccacaatcttggtactgcagagatagaaagtgcttttgttgcccatgagaaagtagcagaggcagcagttgtaggttatccacatgacataaagggaa

SEQ ID NO: 308794 - DNA, 562 bp, Unknown
  Bacterial polypeptide expressing nucleotide sequence isolated from the Sargasso Sea
aatgttgtgtattaaaaattcttggcccggtcaaatgagaactgtatacggagatcatagtaggtttgtttcaacctatttttcacaatttgatggaaagtattttacaggtgatgggtgcagaatagataaagatgggtattattggataactggaagagttgatgatgttataattgtctctggtcacaaccttggaactgcagaaattgaaagtgcctttgtttctcatcctaaagtatcagaagctgccgttgttggatacccccatgacataaaaggaaatggattatattgttatgtttctcttatagctggaactgaaagcagtgaagctctaaaaaaagaattggtaaatacaattagattaaaaataggccctattgctacacctgactttattcactttaccaatggtctgcctaaaacacgttcaggaaaaattatgaggagaattttaagaaaaattgctgcaaatgaagaggatcaacttggagatattacaactttggcagatccaagcgtagttcaaaccttaatagaaaacaaattaaataattag

SEQ ID NO: 308795 - DNA, 944 bp, Unknown
  Bacterial polypeptide expressing nucleotide sequence isolated from the Sargasso Sea
tttaaagcaacaacagatgaagcattaagtaattgtcctgatgttaaaaaatgtattgttgttaaaagaacaggtaactatgtttattgggatgacgacagagacgtttggtaccacgatttaattaaagatgttccaagccattgcgaacctgaagaaatgaatgcagaagatcctctgtttattctttacacttctggttctactggcaaaccaaaaggtgttctacatacaacaggtggatacatggtttatgcatctatgacacatcaatatatattcaactataaacctaaagatatttattggtgcaccgctgatattggatgggtcactggccatagttacattatttatggaccattatctaatggagcaacaactataatgtttgaaggagtgcctaattaccctgacagctctagatggtggcaaattgttgataaatttaaggtaaatactttttatactgcaccaacagctatcagagctctaatgagagaaggtgatgatccagtaaataaaacatcaagaaaatcacttaagctattaggaactgttggagaacctattaatccagaggcttggatgtggtattataagacagttggaaattcaaaatgtccaattgtagacacttggtggcaaacagaaacaggtggaattttgattgcacctcaaactggagcgataccgttaaaacctggatcagcaacaaaacctttttatggaattaaaccttgtattgttgacaaagatggcaaagaaatcaaaggtgctggtgaaggaagactttgtatttctcaatcttggccaggtcaaatgcgtacagtttatggtgatcatcaaagatttatagacacgtacttttctcaatttgatggaaaatattttactggagatggatgcagaagagataaagatggatattattggataactgg

SEQ ID NO: 308796 - DNA, 946 bp, Unknown
  Bacterial polypeptide expressing nucleotide sequence isolated from the Sargasso Sea
caaaaagattattgtgaaccagaaataatgaatagcgaagatagactttttattctttatacttcaggctctactggaaagcccaaaggtgtagttcacactacaggtggttataatctttggtcgcatttgacatttaaatggatttttgacttaaaagatgacgacatttactggtgtactgctgatgttggttggattacaggtcatagttacattgtttacgggcctttatctaatggtgttacaaccttaatgtatgagggagtgccaagaccctcaaatttaggtgctttttgggaaattgttcaaaaatataaggtttctattttttatactgcaccaactgcaataagagcatttatgaagtctggacgtgaaatacctgataaatataatttggagagtcttagacttttgggcacagttggagaaccaattaatcctgaagcatggatgtggtacaagaatgttattggtaaagataaatgccctattgttgatacttggtggcaaactgagactggtggtgtgatgataagccccttgcctggagtcgttgctacaaagccaggttcggctactttccctctgccaggaattgaagttgaaattgtcgataagaatggagataaggttaaggagaacgagggtggctatttaattattaagaaaccttggccaggaatgatgagaaccattcacggaaacccagagagatatttggagagttattgggaatatattttctttaaaggagaaaaaaatgtttattttgctggagatggagcacgcattgacgaagatggatatatatggattatgggaagagttgatgatgtcataagtgtttcaggacatcggttaggaacaatggaaatagaatctgctttggtaagtcataaatcagttgcagagtctgcagtcgttggcaaaaaggatgatt

SEQ ID NO: 308797 - DNA, 991 bp, Unknown
  Bacterial polypeptide expressing nucleotide sequence isolated from the Sargasso Sea
ctgcaattgcattgatagacatttaaaggataaaaaagataaaactgctattatttgggttggagatgatccaaaagatagccaaaaaatttcttataaacaacttcatcaaaaagtttctaaagcagcaaatggtttaaaaaaattaggaattaaaaaaggcgatcgtgttacaatttatttaactatgataccagagttagcaattttaatgctggcctgtgtgagaattggtgcagttcattcgattatttttggaggtttttcagcggactctatctctggaagagttaatgattgcgaatctgaatatataatcactgctgatgaaggagtgcggggtggaaaaactataccgctgaaatatacagttgatgaagctttaatgagttgcccaaatgttaagaaatgtattgttgtaaaacgaacaggtaattacataaactgggatcaaaatagagatgtttggtttcatgatttaattaaagacgttcctaatcattgtgagcctgaagaaatgaatgcagaggatccgttgtttattttatatacgtcgggttcaacaggtaaaccaaaaggagttcttcatactactggtggatatatggtttatgcatcgatgactcatcaatatattttcaactacaaaccaaaagatatttattggtgcactgctgatattggttgggtaactggacatagttacattatttatggtccactttcgaatggtgcaacgactataatgtttgaaggaattccaaattatcctgatagctctagatggtggcaaatagttgataaatataaagtgaatactttttatacagctccaactgcgattagagcattaatgcgtgagggggatagaccagttaaaaaaacgtctaggaaatcactcaaacttttaggaacggtaggagaaccaataatccagaggcttggatgtggtactataaaactgtgggtaattccaaatgccctattgtag

SEQ ID NO: 308798 - DNA, 697 bp, Unknown
  Bacterial polypeptide expressing nucleotide sequence isolated from the Sargasso Sea
gattggtttgagccatttcaaactgtattagataaagaaaatgcgcccttttttcaatggttcaaagaagggaaactcaatattacatataactgcttagatagacacattaagagagggcttggaggaaagacggcacttatatgggaaggcgaacccggagatagcaaaaaatatacttacgaagaacttctaaaagaggtatgtaaagcagctaatgcattaaaagcaattggtgtaaaaaaaggagatttggtatgtatttatatgccgatgattcctgaagcgatgtttgcgatgttagcttgtgcaagaattggcgctcctcattcagttgtcttcggaggattttcttcagaagctttaaaagataggttaattaatgggaacgccagatttgttattactgctgatggtggctttagaaaagataaggtgattgaacttaagaaagcagttgatgcagctattgaaagtggggcagataaagttgttgaaaaagtagttgttgttcaacgaacccaaaaaaatatttcgatggttgatgatagagatttttggtggcacgaattgttaaaagatcaaaaagatcattgtgaaccagaaacaatgaatagcgaagatagactttttattctttatacttcaggctctactggaaagcccaaaggtgtagttcacactacaggtggttaca

SEQ ID NO: 308799 - DNA, 943 bp, Unknown
  Bacterial polypeptide expressing nucleotide sequence isolated from the Sargasso Sea
atatttggtggtttttctccagatagtatttcaggtagaattaacgattgtgaatcggattatgtaatcactgcagatgaaggagttagaggcggcaaaacaattccattgaaatcaattacagatgaagccctgcagagctgcccaaatgttaaaaaatgtattgtggtaaaaagaactggtactaagaaaatagattggtttaatgatagagatgtttggtaccatcaaatgactaaaaaagtatcatccaaatgtgaacctgaggaaatgagtgctgaggatcctctattcattctttacacttctggttctactggaaaaccaaaaggagttcttcatacaactggtggttatatggtttatgcatcaatgactcaccaatatatttttaactacaaaccaaaagatatttattggtgtactgctgatattggatggataactggacacagctatattatttatggtccacttgccaacggcgccacaacaataatgtttgagggaataccaacttatccagatacttcaagatggtggcaaatagttgataaatacaaagttaatattttttatactgcaccaactgccataagagctttaatgagagaaggcgataagcctgtaaagagaacttcgagaaaaactcttaaacttttaggtacagttggagaaccaataaaccctgaagcttgggaatggtattttaaaaccgttggggatagtaagtgtccaattgttgatacctggtggcaaactgagacaggtgggatattaataagtccacaaacaggcgcaatagatttaaaacctggttctgcaacaaaaccattttatggaataaaaccagaaatattagataaagaaggaaaagtcttaaaaggagaagcccaaggaagattatgtattgcacaatcttggccaggacaaatgagaaccg

SEQ ID NO: 308800 - DNA, 724 bp, Unknown
  Bacterial polypeptide expressing nucleotide sequence isolated from the Sargasso Sea
aatgaaaagtgatcgagattatagctacacttctcttatggcggatgcatcagaagatagtactcccgaggcaatgaatgcagaagaccctctgtttattttgtacacttctggttcaactggaaaaccgaaaggcgttttgcatacgtcaggaggctatctcgtttgggcatcgttaacacatgagtatgtttttgactatcatgacggcgatatatactggtgtacagcagacgtaggatgggtgactggccacagttatatcgtttatggacccctagcaaatggtgccacaacggtaatgttcgaaggagtaccaacttatcccgatgcatctcgtttctggcaagtttgtgacaaacataaaattaaccaattctacacggcaccgacagctatacgagcattaatggggcaaggctccgaatttgttaaaaaatgtgatttatcgtcattaaaagtgcttggcaccgtaggtgaacccatcaatcctgaggcttggaattggtataatgaagtagtgggtaaaggcaggtgtccaattgttgatacatggtggcagaccgaaactggcggccatttacttactccgatacctggtgcaattgctacgaagccagggtcggctaccttcccattcttttcgatacaaccagtaattctcgaccctcaaagcggtcaagaattaactgaaaaggaatgtgaaggcgtattgtgtataaaa

SEQ ID NO: 308801 - DNA, 652 bp, Unknown
  Bacterial polypeptide expressing nucleotide sequence isolated from the Sargasso Sea
aactgggggaatactaatagctccacaaactggagccatagaattaaagcctggttctgcaacaaaaccattttatggaattaaacctgttattgtagataaaaatggtaatgaattaactggagagtgtgagggaatgttatgcattgcaaaatcatggcctggacaaatgagaactgtatatggagatcatgaaaggtttattcaaacctatttttcacaatttgatggaaaatattttactggcgatggatgtaaaagagattcaaatggttattactggattactggacgtgtagatgatgttataatagtatctggtcacaatcttggtacagctgatattgaaagtgcttttgtatctcattctaaagtttcagaggctgccgtagtaggatttcctcatgaaataaaggggaatggattatactgttatgtttcattaaatgcaggcgaaaaatcatctgaggatttaaaaaaagaattaatacaattagttcgtgaaaaaattggtccaattgcaagtccagatttaattcactttacttcaggattacctaaaactaggtctggaaaaataatgagaagaattctaagaaaaatagcagccaatgaacatgatcaacttggtgatacttctactttagcagat

SEQ ID NO: 308802 - DNA, 884 bp, Unknown
  Bacterial polypeptide expressing nucleotide sequence isolated from the Sargasso Sea
ttgtattgatagacatttaaaagataaaaaagataaaactgcaattatttgggttggagacgatcctaaagatacacaaaaaatttcttacaaacaacttcatcaaaaagtttcaaaagctgctaatggattaaaaaaactgggaatccaaaaaggagatagagttacaatatatttaactatgatacctgaacttgcaattttaatgttagcttgtgcgagaattggggcaattcattcgataatttttggaggtttttcagctgaatctatttctggaagagtaaatgattgtaaatcagaatatattataactgcagatgaaggtgttaggggtggaaaaacaataccattaaaagctacaacagatgaagcattaacaaattgtcctgatgttaaaaaatgcattgttgttaaaagaactggaaattatgttttttggaatagtgatagagatgtttggtatcatgatttaattaaagatgttccaaatcattgtgaaccagaagaaatgaatgctgaagatcctttgtttattctttatacatcaggatctacaggtaaaccgaaaggtgttttacatacaactggtggatatatggtttatgcatctatgactcatcaatatatttttaattataagcctaaagacatttattggtgcactgcagatattggatgggtaactggtcatagttatataatttatggaccactttctaatggagcaacaacaattatgtttgaaggaattccaacttatcctgatagatctagatggtggcaaattgtagataaatttaaagttaatacattttatactgctccaacagctatacgagatttaatgagacatggaagtgaaccggtaaacaaaacatcaa

SEQ ID NO: 308803 - DNA, 721 bp, Unknown
  Bacterial polypeptide expressing nucleotide sequence isolated from the Sargasso Sea
gttgatacttgggtggcaaacagaaacaggcggaattttgatcagccctcaaactggtgcaatagatttaaaacctggttctgcaacaaaaccattttatggaattaaaccagaaattcttgataaagacggcaaggttttaaaaggagaagcacaaggtagactttgtatttctcaatcatggcctggacaaatgagaagtgtatatggtgaccatcaaagatttatagatacttatttctcacagtttgatggaaaatatttcacaggagatggatgtagaagagataaagatggttactattggatcactggaagagtagatgatgtaattattgtttcaggacacaatttaggtactgcagaaattgaaagtgcctttgtagctcatccaaaagttgctgaagcagcagtagttggttatcctcatgatattaaaggaaacgggctatactgttatgtaactttaaatgctggagagaaaagcactcttgatttagaaagagatttgaagctatgggtgagaaaacaaattggtccaattgcaactcctgacttaattcaatttgctccaggtcttccaaaaactagatctggaaaaataatgagaagaattttaagaaaaatcgctgctaatgagcatggtcagttaggagatacaaccactttagctgatccttcagttgttgaaagtttagtagataatagaaaaaatatttaa

SEQ ID NO: 308804 - DNA, 957 bp, Unknown
  Bacterial polypeptide expressing nucleotide sequence isolated from the Sargasso Sea
gcttgcctgtgcacgaataggcgctattcattcaataatttttggaggtttctctcccgactctattgccacaagaataaatgattgcgagtctgattatttaattactgcagatgaaggtgtaagaggaggaaaaataatccctcttaagcaaatagcggatgaagcactgcttcagtgtccaaatgtaaaaaaatgtgtagtagttaaaagaacgggaaatcaagtaaattgggatcatgagagagacgtttcttacgaagaacttatttcaaatgtttctggaaaatgtgagccagaagaaatgaatgctgaagatccattatttattctttacacctcaggttcgactggcaaaccaaaaggagttttgcatactactggaggatacatggtttatgcttcaatgactcatcaatatatttttgattataaacctaaagatatttatttttgtagtgccgatataggatgggtgacaggacatagttatataatatatggacctctttctaatgcagctacaactataatgtttgaaggtattcctacttatccagattactctagatggtggcagattattgataaatataaggtgaatattttttataccgcacctactgcaataagagctttgatgaaagaaggtgatggaccagttaaaaaaacaagcagaaaatcattaaaattattaggaactgttggagagccaataaatccggaagcatggatgtggtattatcaaactgttggggagtctagatgtcccattgttgacacttggtggcaaacagaaaccggcggtatattaatttctccgcaaccaggtgctatggacttaaagcctggttcagcaacaaaaccattttatggcatcaagccagcgatagtggatgaaacaggaaaaattttaaagggtgcctgcaaaggaagattgtgtatgactgcatcctg

SEQ ID NO: 308805 - DNA, 529 bp, Unknown
  Bacterial polypeptide expressing nucleotide sequence isolated from the Sargasso Sea
attcgtacggtttacaaagatcacgagcggttcatggacacctacttctcgaccttcaggggccactacttcacctccgacggatgccgccgggacaaggacgggtactactggatcacagggcgggttgatgacgtactgaacgtatccgggcatcgcatgggcacggccgaagtggagagcgcattggtagcgcaccccgatgtagcggaggcagcggtggttggttatacccacaatatcaaaggccaagggatctattgctacgtaaccctgaacgccggcatcgagggcacggatgagaagaaagcggaaatggtcaagcaagtgcgtgcagagatcggaccggtggcgacgcccgacctaattcagtgggcaccggggttaccaaagactcggtcaggtaagatcatgcgccgcatacttcgcaaaattgccgagaacgactattccaatctaggtgacacctcgactctcgctgaacctgccgtggtcgatgatctcatcgaaaaccgacagaacaagtaag

SEQ ID NO: 308806 - DNA, 580 bp, Unknown
  Bacterial polypeptide expressing nucleotide sequence isolated from the Sargasso Sea
tgaaaataatgttgaaggaaatttatgtataaaatttccttggccatcgatattaagaacaacttatggggatcataaaagatgtaaggagacttatttttcgacatattctaacatgtattttactggtgatggtgcaaaacgtgatcatgacggttatttaagaattcttggccgagttgatgatgtgataaatgtttctgggcatagaatgggtaccgctgaagtggaaaatgcaataaatgaaaattcaaaagtaatcgaatcagcagttgtaggatttcctcatgaaataaaaggtcaaggaatttatgcttttgccatttgccaaaaaaatgataatgatactgttcagaccctagaagaagagataaaattaactgtcaggtctattattggtccaattgcaacacctgaaagagttcaaattgtttcaggtctaccaaagacgagatctggaaaaattatgagaagaattttaaggaaagttgctagtaaagatgtctcagatttaggagatatatcaactcttttaaatccaaaggttgttgaagacataataaagggtgcgggtttataa

SEQ ID NO: 308807 - DNA, 526 bp, Unknown
  Bacterial polypeptide expressing nucleotide sequence isolated from the Sargasso Sea
tatgacagtcaaatttaacaaaatttatcaagagtcaattcaaaatcctgagaagttttggcaaaatgtgtctgaggatatcttttggtttaagaaaccaaaaaaaattttaaataaatctaaacctccattttataaatggtttgaagatggagtaacgaacacctgttacaacgcaattgatactcatattgatcatggcaagggagaaaggactgccttaatatatgatagtccaattacaaacaacaaatcaaagttcacttataatgaattgagaaatagagtttcaaaatttgcaggagcacttgataatcaaggtatcaaaaaaggtgatagagtaattatttacatgccaatgataccagaagccgttatagcaatgcttgcatgtggaagaattggagcaatacattcggttgtctttggtggatttgcatcgaatgagctagcaagtaggattgatgatagtaaagctaagattttaattactgcctcttgtggatttgagccagggagaacagtt

SEQ ID NO: 308808 - DNA, 565 bp, Unknown
  Bacterial polypeptide expressing nucleotide sequence isolated from the Sargasso Sea
gaaagattatgtatagctcaatcatgccccggacaaatgagaactgtttatggtgatcatcaaagatttatagatacatacttttctcaatttaacggaaaatattttacaggtgatggatgtcgaagagataaagatggatattactggatcactggtcgagttgatgatgtaattattgtttcaggacacaacctaggaactgctgagattgaaagtgcttttgttgcccatccaaaagtagctgaagctgctgtagttggttaccctcatgatattaaaggtaatggattgtattgttatgtaaccttgaatgtaggagaaacagaaacaggcgaacttgaaagagatctaaaactttgggttagaaaacaaataggacctttagcaaccccagatcttattcattttactccaggtcttcctaagactagatcaggaaaaataatgagaagaattctaagaaaaattgctgctaatgagcatggtcaattaggggatacaaccactctagcagatccaagtgttgttgatagtttggttgataatagaaaaaatatttaaa

SEQ ID NO: 308809 - DNA, 936 bp, Unknown
  Bacterial polypeptide expressing nucleotide sequence isolated from the Sargasso Sea
gttgcgagatcaggtcgctttatgtgcgggcggtctgattgaactgggagttgttagaggtgacagggtcatcatctacatgccaatgattcctgagacaattattgcaatgcttgcttgcgcccgtataggtgcaattcatggggttgtatttggcggatttgcttctgctgagctcgcagttcgaatagatgatgctaggccaaaagccataatatcggcgtcatgcggtatcgaggttaatagagttatcccttatatgccgctgctaaacgatgctatagagatcgcaaatcacaagcctagtaacgtaatcgtcgtacaaaggtctgagcttgaatccacactaaacaaaggaagggatttggactggaacgacgttttggacaatgctacacccgctgagtgtgttcccctaaaatccacagatccgttatatattctttacacatctggcacaaccggactgccaaagggtgtggtgcgagataatggtggtcacgctgttgctctgaattattcaatgaaagccatttacaatgttgacgcgggtgatgtttattgggcagcttcggatgttggctgggtcgttggacattcatatatagtatatggacccttactaagagggtgtacaaccgttttgtatgagggtaaaccagttggtactccagatgcgggggctttttggaggataatttcggatcataaagtaaaatctttctttacagccccaacagcatttagagcaataaaaaaggaagatccagatgctgggtttattaaaaaatacgacttaagtcattttgagctattgttcctagcaggcgaaaggactgatccagacacgttggagtgggctcaggaaaaactccagagaccagtaatagatcattggtggcaaacagagactggctggtctattgctgctaactg

SEQ ID NO: 308810 - DNA, 754 bp, Unknown
  Bacterial polypeptide expressing nucleotide sequence isolated from the Sargasso Sea
cccgaaagtatgaatgcagaagaccctctatttatcttatatacatctggttcaactggtaaaccaaaaggtgttatgcatacgactggtgggtatcttgtttatacttcttttactcatgaaaaaatatttgattacaaacctggtgatatttattggtgtacagctgacattggatggattacaggtcattcttatatcgtatatggtcctcttgcaaatagggcagttagtataatgtttgaaggcgtacctaattatcctgactatggaagattttgggatgtagttgataagcataaagtgaaacagttttatacagctcccactgcactaagagccttgatgaaagagggtaatgatcatgtaacaagtcgagatctatctactttacgattgttaggtacagtaggagagccaattaaagaacccgagtggatgtggtatcataatattgtaggaaaaggaaaatgtccaattgtagatacttggtggcaaacagaaactggaggtatattaattgcaccgctcccaggagctacgcctacgaagcctggatcagcaacaaatccattttttggtattgagcctgttctgcttacagaagatggaaaagagattgaaggaaataatgttcaaggtcttttagcaatcaaacactcatggccaggtcaaatgcgaacggtttatggtgatcatcaacgatttattgatacatatttttcacaagtacctggttactattttactggtg

SEQ ID NO: 308811 - DNA, 346 bp, Unknown
  Bacterial polypeptide expressing nucleotide sequence isolated from the Sargasso Sea
gcttttgtcgcgcaccctaaagtagcggaagcagcagtagttggatatcctcacgatataaaaggtaacggactttactgttatgtaactttaaattcaggcgaaaaatcttctggtgacctcgaaagagatttaaagctttgggttagaaaacaaattggaccaattgcaacacctgatttaattcaatttgcacctggattgccaaagacaagatctggtaaaattatgagaaggatattgagaaaaattgcagcaaacgaacatgatcaactaggtgatacaacaacattggctgacccatcagtggttgaaagtttagtagaaaataggaaaaataaatagt

SEQ ID NO: 308812 - DNA, 949 bp, Unknown
  Bacterial polypeptide expressing nucleotide sequence isolated from the Sargasso Sea
aaaggaatcaaaaaacaaatcactatgaaaaccagttttgatgagatttatcaaaattctatccaaaaacctgaagaattttgggaaaatatttcaaatgatattttttggtttaagaaaccatcaaagattctaaataaatcaaatcctccattctataaatggtttgaagatggcataacaaactcttgttacaatgcagttgatttacatattgatagtggcaaaggagaaaaaatagcattaatttacgatagtcctataacaggtaataaagctaagcttacatataatcagctgaaagaaaaagtatctaagtttgctggagcattagacaaccaaggtatcaaaaaaggagatagagtaataatttatatgcctatgataccagaagctgttattgcaatgcttgcatgtggaagaattggagcaattcattcagttgtttttggtgggtttgcatcaaatgagcttgctagcaggatagatgatagtaaagcaaaaattttaataaccgcatcttgtggttttgaaccaggaagaactgtagaatacagacctcttgtagatggtgccttaaaacttgccaagcacaaagttgagaaagttattttctttcaaagaaaagatcatgatgtcaaactaaatgagcctctagaaataagttggaaagaagcattagttaatgccaaagacaaagattgtgttgaaatggggtcaaacgaatttgcctacatcttatacacatcgggaacaacgggaattccaaaaggtatagttagagacattggaggacatattgtagctcttaaatggacaatgaaaaatatttataacatcgacgaagatgatgtttggtggtcagcaagtgatattggatggattgttgggcattcttatattgtttatgctcctctttttaaaggatgcactacagttctattgaagg

SEQ ID NO: 308813 - DNA, 679 bp, Unknown
  Bacterial polypeptide expressing nucleotide sequence isolated from the Sargasso Sea
aagtccccaaactggtgcaatagaccttaaaccaggttctgctacaaaacctttttatggaattaaaccagaaattgttgacaaggacggcacagtattaaaaggcgaagctcaaggaagattatgtattgctcaatcatggccaggacaaatgagaaccgtgtatggagatcacaacagatttatagaaacatatttttctcagtttgatggcaaatattttacaggtgatggctgtagaagagataaagatggatactattggataactggaagagttgatgatgttataattgtatcaggtcataacttaggtacagcagaaattgaaagtgcttttgtagctcatccaaaagtagctgaagcagcagttgtaggatatcctcatgacatcaaaggtaatggtctttattgttatgttactttaaatgctggagaaaaacatgatggtgaattagaaagagaactaaaactttgggttagaaaacaaataggaccaatagccactccagattatattcaattttctccaggacttccaaaaactagatctggaaaaattatgagaagaatattaagaaaaattgctgcaaacgaacatgatcaactaggagatacgactacgcttgcagaccctagtgttgttaagagcttagttgaaaatagaaagaatacttaa

SEQ ID NO: 308814 - DNA, 888 bp, Unknown
  Bacterial polypeptide expressing nucleotide sequence isolated from the Sargasso Sea
tatgatagcccaatcacaaatttcgaaaaaaaaaataacttataaagaattacaagacaaagtttcaatttttgcaggagctttatcgaaacaaggcatcaaaaaaggtgacagggtcataatttatatgccaatgatcccagaagctgtaattgcgatgcttgggtgtgcaagaattggtgctattcactccgtggtatttggaggtttcgcagcaaacgaactagcgagtagaattgatgactctaaagcgaaaattattttatctgcttcgtgcggatatgaacctggaaaaacaattgaatataaaccacttcttaaaaaagctatcgaattagccaaacacaaacctgaaaaatgtattatttatcaaagaaaagattttaagactaatctagaaaaaaatgaaattgactggaacgacgccataaaagatgtaaagcctgttgagtgtgttgaaatgaacgctaacgactatgcttatattctttatacatctgggacaacaggcgttcctaaaggaattgttagagatattggcggacatatcgtagctctcaagtggactatgaaaaatatttataacatcgatccagatgatgtttggtggtcagcgagcgacattggttggattgttggtcactcatacattgtttatgctcctttatttcatggatgtacaacagtactttttgaaggaaagcctgtaggaactccagatgccggagtcttttggagaattatttctgaacacaaagtaaaatcactttttacagcccctaccgcatttcgtgcaattaaaaaagaagatcctaatggaactttttttaaaaaatatgatttatctaaatttgaatctttatttctcgcaggagaaagagctgaccc

SEQ ID NO: 308815 - DNA, 596 bp, Unknown
  Bacterial polypeptide expressing nucleotide sequence isolated from the Sargasso Sea
gtggtattatgatggaactttaaatgcttcagcgaattgtatagatagacatttaaagaaaaatccaagtaaaactgcaatcatttgggtcggtgatgatcccgctgatacaaagaaaatttcatacaaagaattacaccaaaacgtatgcaaagctgcaaatggtctaaaaagtttaggcatacaaaaaggagatagggttacaatttatctgacaatgatccctgaattagcttacacaatgttagcttgtgcaagaattggggctgttcattcaattatttttggtggtttttcacctgactcgatagctactagaattaccgattgcgaatctgaatatttaataactgcagatgaaggagttagaggtggaaaaataattccgttaaaaaaaattgctgatgaagctttagatcaatgtcctggagtaaaaaaatgtgtagttgttgaaagaactggaaatcaagttgactggaataatgaaagagatgtttcttataaagagctaatttcatcggttccatcaaaatgtgatccggaagaaatgaatgccgaggatccattatttattttatatacctcaggttctacag

SEQ ID NO: 308816 - DNA, 628 bp, Unknown
  Bacterial polypeptide expressing nucleotide sequence isolated from the Sargasso Sea
tatagaggcggaagcgttattccgcttaccctttcaacggatgaggcggtgacaaactctttgcacaaagtaaaaaatgttgtggtttttgaaagaacaggagaaaaaatagaatttgatcaagaaagagacgtttggtggacagacctgatctcagattgtccttctgactgtgatccagagccccttaatgctgaacacccattgtttatactctacacctcaggttccacaggcaaacccaaaggaattcaacactccaccgcagggtatattttgcatgcaaaaacgactttttcttgggtatttgatatcaatgaagatgatgttttctggtgtactgcagatgtgggctggattacaggacacacttatgttgcatatggtcccctgctcgcaggcgctacgattcttatctatgagggcgctcctacttttccagatgtgggaagattttggaagatttgcgaaaagcatgccgtgactattttttatactgcacccactgccatcagagccttaatgaagcatggagatgagattccaaaaagctataatttatcacagctacgcttgcttggtaccgtcggcgaaccgataaaccccgaagcttggatgtggtatcaca

SEQ ID NO: 308817 - DNA, 906 bp, Unknown
  Bacterial polypeptide expressing nucleotide sequence isolated from the Sargasso Sea
ccagtgccctgctgcctgatttatcagcggccgcagctgcaggccgagttagtgccgggtcgcgatttagactggcagcaacagctcagccaagccagcccggcggcctgtgtgccggttgccgccacagatccgctgtatattctgtacacctcaggcaccaccggcaaacccaaaggtgtggtgcgcgataatggcggccatgcggtggcactccattacagcatgcaggccatttatgatatgaaccctggcgatgtgtttttcgccgcttctgatgtcggttgggtggttggtcactcttatattgtgtacggcccgctgtttgccggttgcaccacagtgttgtacgaaggcaaacctgtgttcacgccagatgccagcgcgttctggcgcatctgcgcccagtatcaggtcaaagtgttattcgccgccccgacggcgtttcgcgccatccgcaaggaagatccggaagcgttattacagacctacgatttatccaagctgaaatatatttttatggccggtgaacggctcgatcccgccacttatcactgggtgcgggaaaaaatagccaaacccgtcatcgaccactggtggcaaaccgaaaccggctggcccatcagcgccaatctggccggtgtggaattacttccggccaaagcgggctctgccacagtgccggtgccaggttttgtgctggatattcttgctgacaacggccaggtgctgccagctgggcaacaaggttttatcggcttaaaactgccactgccgccgggctgtctcagcactatttggggcaatgatgagcgttttgttgacggttacctgacgacctttgatggttattacgccagcggtgacggtggttatctcgacgaagacggttatctgtttgtgatg

SEQ ID NO: 308818 - DNA, 796 bp, Unknown
  Bacterial polypeptide expressing nucleotide sequence isolated from the Sargasso Sea
atggcggacccccagatcgaatccgttctgcaagaggagcgcgtgtttgcgccaccgcagtcgctctcagctgatgcggccattggctcattagaggcctatcaggccttggtggcccaggcggaggctgacccggacgcgttctggggccagcaggccaaagagagcctgcattggtttcagccgtttgaccaggtcctcgattggagcaatccaccctttgcccgctggtttgaaggtggcaccaccaatctttcctacaactgcctcgaccgtcatctcaacgggccaaaggctgacaaaacggcgctgatctgggaaggcgaacctggcgacgtgcgtcgtttcagctaccgagagctgcatggcgaggtctgccgtgcagccaatgccctcaaagcgctgggcattggtaaaggcgatcttgtggccctgtacatgccgatggtgccagaggcagccattgccatgttggcctgcgctcgcatcggtgctccccattcagttgtgtttggaggattctcagccgatgcccttcgtgatcgcctcattgatggtgaagccaaagccgtcatcactgctgacggtggattccgcaaggacaaaccggtttctttaaagcctgcagttgatgaggccctggccggtggggttgtcccctcagtgcaagccgtgctggtggtacagcgcactaaagaagccgtgaccatggaacctggtcgggatcattggtggcatgaccgggtccctcagcaatcgagtgattgtcctgctgagccaatggctagcgaagacc

SEQ ID NO: 308819 - DNA, 817 bp, Unknown
  Bacterial polypeptide expressing nucleotide sequence isolated from the Sargasso Sea
tctattaaaaatcgagaagaattttggaaaaaagtatctgaagatattttttggtataaaaaaccctcaaaaattttaaattctgagaatcctcctttttataaatggtttgaagatggtgtaactaatacttgctacaatgctttagatcaccacattgaacaaggcagaggagaaaaattagcagtaatttatgatagccctataacaggtgtaaaacaaaaaattacttataaagaattaagagataaggttgctatgttttctggtgctttaagaaaacaaggtgttaataagggtgatagagtaattatctatatgccgatgattccagaggctgtaattgcaatgttggcttgtggaagaatcggtgcagtgcattctgttgtgtttggaggcttcgctgctaatgaattagcaagtagaattgatgactcaaaagcaaaattaattgtttctgcgtcctgtgggtacgaacctgggagaaccgttcattataaacctttagtcaataaagcgcttgaacttgcatcacataaacctagtaaatgtataatttttcaaagagaaaaagataaagcagaattaaactcagctatagatattacttgggaggacgcacataaagatgttcaacctgcggaatgtgaaaaaatgaatgctaatgactatgcttatattctttatacttctggtactaccggattacccaaaggaatcgtaagggacatcggaggtcatatagttgcgttaaaatggacaatgaaaaatatttataacatagatcaagatgatgtttggtggtcagccaagtgat

SEQ ID NO: 308820 - DNA, 917 bp, Unknown
  Bacterial polypeptide expressing nucleotide sequence isolated from the Sargasso Sea
gattagctcatgtgattgtgtggaacatgtcttcatgtaccgtcatacgaatgcagatgtggatttcaatgggcctctcgatgttgatcttggaaaagcaatggaaactgaagattctgtatgtgaagcggaaattatggagagtgaagagccactgtttattctttatacatctggttcgacaggtaaaccaaagggactgcagcacagctctgctggctatcttttgtacacgatgcttactcataaatacgtttttgattatcaggaagatgacgtctatgcgtgtgttgctgatataggatggataacaggacatagttatgtcgtctatggtccacttgctaatggagctacaacagttatgtttgagtctatacctacatatcctgatgctggacgctactgggatatggttgagagacttaaaatcacacaattttatactgcaccaacggcaattcgtgcgattgcacgaatgggggatagttttgtagaaaaatacgatcgttctagtttacgcgtgttaggaagtgtaggagagcctattaatccagagagctggaattggtattacagtgtagtcggtaacaatcattgtaacattgtcgatacatggtggcagactgaaaccggtggagttatgataacgcctttaccaggagcgacaccaacgaaacccggatcagcaacatttccattctttggtgtagaaccggtgatattagatgataagggtaatgagttagagggtaatggtatttcaggacttttagctattaataaaccttggccttcgatcgcacgcacaatctatggagatcatgagcgctatatgcaaacctacttaagcccatttaaaggatactattttacaggagacggatgtcgtcgtgatgaggatggatattactgga

SEQ ID NO: 308821 - DNA, 676 bp, Unknown
  Bacterial polypeptide expressing nucleotide sequence isolated from the Sargasso Sea
tccctacccggtgcaattgctcaaaagccgggttcagcaactaaacctttctttggaattcaaccagagattcttgatgctgagggaaatattttagaaggtgcatgtgaaggatctttatgtcttgcagattcatggcctggacaaatgagaactgtatatggtgaccatcaaagatttattgaaacttatttttcacaatttgaaggaaaatattttacaggagatggatgtaaaagagatgaagatggctactattggattacaggacgtgtagatgacgtgattaatgtttcaggtcatcgcatgggaacagctgaagtagaatcagctttagttgctcatccaaaagtaagtgaagctgcagtagttggatacccacatgatattaaaggtcagggaatatatgcttacgttacacttaatgccggtgaacaaacgtctgatgaattatataaagaactggttgcttgggttagaaaggaaatcggtccaattgcctctcctgatttaattcaatgggcaccaggattaccaaaaactagatcaggtaaaataatgagaagaattttaagaaaaattgctgaaaatgattacagtaatttaggtgacacttcaacacttgccgaaccagcagtcgtagatgatttagtagaaaacagaatgaataaataac

SEQ ID NO: 308822 - DNA, 867 bp, Unknown
  Bacterial polypeptide expressing nucleotide sequence isolated from the Sargasso Sea
ttataacgccttagacattcatattgatcaaggtaggggtaaaaaaactgctttaatatacgatagcccaatcactggtaacaaaagccaattcacatatgaacaacttagatcaaaagtttctaattttgcaggagcgctcaaagatcaaggtgtaattaaaggtgatagagtaattatttacatgccaatgataccggaggcagtgatagctatgcttgcttgtgcaagaattggggcaattcactctgttgtctttggtggctttgcatcaaatgaactcgctagtagaattgatgatagtaaagcaaaaatattagttactgcatcatgtggatttgaacctggaaggacagttgaatataaacctcttgtagatgaagccgtaaagctggctgatcataaaatcgagaagatgattttatttcaaagatcgggtcatgaagtaaaattaaatggtccattagagatcagctgggaagaggcaatttcgaatgcaaaagatgctgactgtgttgagatgaattcaaatgaatttgcttatattctctatacttcaggaacaactggaacacctaagggtatcgtgagagatattggtggtcacatagttgctttgaaatggactatgaaaaatatctacaatattgatactgatgatatttggtggtcggctagtgatattggatggattgttggacattcttatattgtctacgctccattatttaaaggatgcacaactgttctgtttgagggaaaaccggttggcacacctgatgccggggctttttggaaaatcatatcagactataaagtaaaatctctttttacagcccctactgcatttagagcaattaagaaaga

SEQ ID NO: 308823 - DNA, 663 bp, Unknown
  Bacterial polypeptide expressing nucleotide sequence isolated from the Sargasso Sea
aatgaatagaacttatcaagaaatttacagcgaatctctaaaaaatcctgaggaattttggcagaaaatttctgaagatgtgttttggtttaaaaaaccaaccaaaattttgaaaaaagataacccacctttctataagtggtttgaggatggtgtaacaaatacatgctacaacgccttagaccttcatattgatcaagggagaggtgataagactgctttaatctatgacagtccaattacaggtaataaatcaaagtttactttcaaagatttaaaagaaaaagtttcaaaatttgcaggagctttagataaacaaggagttaaaaaaggagatcgagtaataatttatatgccaatgataccagaggcggtgattgctatgctagcatgtgggagaattggagcaattcactctgttgtattcggtggttttgcctcaaatgaattggctagtagaattgatgacagtaaagctaaaattttaatcacagcatcgtgtggatttgaacctggaagaacagttgaatatagaccacttgtagatggggctttaaaattagcaaatcaccaagttcaaaaagtaatattatttcaaagaaaagatcacgaggtagaattaaataaaccactagaaataagttgggatgaagcgctatctgg

SEQ ID NO: 308824 - DNA, 957 bp, Unknown
  Bacterial polypeptide expressing nucleotide sequence isolated from the Sargasso Sea
tataaatggtttgaagatggcaaaacaaatacatgctttaatgctttggatattcatgttgacaaaggtaaaggtgacaaaactgcattgatttatgacagtccaataacaggtaataaaaaaaaattcacatataaagaactaaaagaaaaagtttcaaaatttgctggggctttaaaaaaccaaggtattaataaaggcgatagagttatcatatacatgccaatgatacctgaagctgtggtcgcaatgctagcttgtggtagaattggagcaattcattcagtagtatttggtggatttgcttctaatgaattagcaagtagaatcgatgacagtaaagcaaagttattgataactgcttcatgcggatttgaaccaggaagaactgttgaatataaacctttggtcgatgaggctataaaacttgcatctcataaacttgaaagaataatacttttccaaagatccggtcatgaagtaaagttaaaccctccttttgaaattagttgggaggaatctttatctaacgctcaaaacgttgattgtgttgaaatgaattctaatgagtttgcatatatcttatatacatcaggaactactggtgtaccaaaaggaatagtaagggatattgctggacatatagttgctttaaagtggactatgaaaaatatttacaatattgattccgatgatgtgtggtggtcagcaagcgatattggttggatagtaggtcattcttatattgtttatgcaccgttgtttaaaggttgcacaactgtactttttgaaggtaaaccagttggaacaccagatgcgggtgttttttggagagtaatttcagagcacaaaataaaatctttatttactgcacctacagcttttagggctattaaaaaagaagatcccgaaggtaaatttttttctaagtatgatttaagaaatttcgaaagttta

SEQ ID NO: 308825 - DNA, 612 bp, Unknown
  Bacterial polypeptide expressing nucleotide sequence isolated from the Sargasso Sea
catggaaaaaataaattctctttcaagctatttcaaagaatatgagaacagcatagaaaatcctgaaaagttttggagtaaagttgcagaaacttttaaatggcaaaagccctgggacaatttattttcatgggattttgacgggcccgatgtaaagtggtttgaaaacgcaaaattgaatataactgaaaacatttttgaacgtctcattgatacccacagtgaaaaaacagctattatatgggagcccaacgatccaaaagaaaaagcaataaatatcacctatcgagaattgtttgacaaaacatgccaattttctaatgctcttgaatctgaagggataaagaagggagatagagttatcatatatatgcctatgatacctgaggcagctatagctatccttgcttgtgctagaattggagctgtgcactctgtagtttttgcagggttttcttcttctgcactagcagacagaattaatgattgtgaggctaaaatggtactcacttctgatggtaattttaggggagctaaaaacattaaagtgaaagctgttgtagatgaagctctagaaaaaacaaaaacagttaaaaaagtcattgtttgtga

SEQ ID NO: 308826 - DNA, 987 bp, Unknown
  Bacterial polypeptide expressing nucleotide sequence isolated from the Sargasso Sea
acatacaaacaattgcatatcgaagttgtaaagattgcgaatgtttaaaagaaataggagttcaaaaaggtgacagggttacaatctacttaaccatgataccagagttagcttatactatgctagcttgtgcaagaattggggctatccattcaattatttttggggggttttctcctgatagcatagctggacgtataaatgactgtaagtctgattatgtagtaacagctgatgaagggattagaggtggtaaaactattcatttaaaatcaattacagatgaggcattaatgagttgtccaaatgtaaaaaagtgtgtcgtagttaaaagaactggtaatgatgtaagttgggatagcagtcgtgatgtttggtatcatgacataacaaaaaaagtatcttcgtattgtgaacctgaggaaatgaatgcagaagacccactttttatcttatatacttctggctcaacagggaaacctaaaggtgttcttcatacaacaggtggatatttggtttacgcgtcgatgacgcatcaatatatttttaattataagccaaaagatatttattggtgtaccgctgatataggctgggttacaggccatagctatataatttatggaccacttgcaaatggagcaacaacattaatgtttgaaggtataccaacttatcctgactcttctaggtggtggcaaatcattgacaaatataaggtcaatattttttacacagcgccaacagctatcagggctttaatgagggaaggagataaacctgttaaaaaaacatcaagaaaaacactcaaattattgggcactgttggtgaacctataaaccccgaagcgtgggaatggtattataaaacagttggagactcaaagtgtcctatagttgatacttggtggcaaacagagactggtggcattttgatcagtccacaaactggagcaatagatcttaagccaggattccgctactaaa

SEQ ID NO: 308827 - DNA, 397 bp, Unknown
  Bacterial polypeptide expressing nucleotide sequence isolated from the Sargasso Sea
tgacgtaattattgtatctggtcataatttaggaactgcagaaattgaaagtgccttttttgcacatccaaaagttgctgaggcagcagttgttggatatccacatgatataaagggaaatggattatattgctatgtaacattaaatgccggcgaagaacatgatggagatttagaaagagaattaaaactttgggttagaaaacagattggtccaatagcaacaccagattttatacaatttgctccagggcttccaaaaactagatctggtaaaatcatgagaaggattttaagaaagattgccgctaatgaacatgaacaactaggcgacaccacaactctagcagaccctagtgttgtcacatctttggttgataatagaaaaaatacttaa

SEQ ID NO: 308828 - DNA, 886 bp, Unknown
  Bacterial polypeptide expressing nucleotide sequence isolated from the Sargasso Sea
gggtgacagagtaactatttatttaacaatgattccagaactagcatacacaatgcttgcttgtgcaagaataggagcggttcattctataatttttggtggtttttcgcctgactcaatagcaacaagaattaacgattgcgagtctgactacttaattactgcagatgaaggcgtaagaggaggaaaaattattcctcttaaaaaaatagctgatgaagcgttatctcagtgtcctaatgtaaaaaaatgcatagtagtgaaaagaacgggaaatcaagtaagttgggatgatgagcgagatgtttcttatgaagagcttataaaaaaagtatcagctaaatgtgacccagaagaaatgagcgctgaagatcctttatttattctctacacttcgggatcaacaggaaaacctaaaggcgtacttcatacttcaggaggatatttagtttatgcctcaatgacacatcaatatatatttgattataaacctaaagatatttattggtgtacagcagatattggctgggtaaccgggcatagctatataatttatggaccattatctaatggcgcaacaacaattatgttcgaaggtgttccaaattatccagatagttctagatggtggcaaattgtagataagtataaagtaaatattttttatacagcacccacagctataagagcattaatgagagagggtgacaaacctgttaaaaaaacaagcagaaaatctttaaaattacttggcaccgttggggaacctatcaatccagaagcctggatgtggtattataaaactgtaggtgacggacgttgcccaatagttgatacttggtggcaaactgagactggaggaattttaatcgcacctcaaccgggg

SEQ ID NO: 308829 - DNA, 943 bp, Unknown
  Bacterial polypeptide expressing nucleotide sequence isolated from the Sargasso Sea
agaaaagtaaaaaaatctagaaaaaaatctagaaaagtaaaaaaatctagaaaaaaatctagaaaagtaaaaaaatctagaagagtaaagaagtctagaaaaagaaaagtttcaaaaaaacgacaaaattttaaaacaccaattcaatccaaagatagtgaaggtaacacgctaattaaagtctctgatagttgggctcatcatgcttatgttaatgagtctaaatataaaaaaaaatacaaactctcaattaaagaaaatgaaaaattctggagtaaggaaggaaaaagaatttcttggatcaaaaaatatacaaaaattaaagacgttaaatacagcaaagaagaagttaaaattaaatggtactatgatggtacattaaatgcttcagcaaattgcattgatcgtcatttaaagaaaaacccaaaaaaaactgctatcatttgggttggagatgaccccgctgactctaaaaagatttcatataaggaattgcatcaaaatgtttgtaaagcagcaaatggattaaaaagtatcggtgttcaaaaaggtgacagggtaacaatttatcttacaatgataccagagttagcttacataatgttagcttgtgcaagaattggagctgtacattcaattatatttggaggtttttctcctgactcgatagcaacaagaataaatgattgtgaatctaattacctaataactgcagatgaaggtgttagaggaggtaaaattatcccactaaagaaaatagctgatgaggctttaacacaatgtcctgaggttaggaaatgtgtggtagttcaaagaaccggcaatcaagtagattgggataatgaaagagacatttcttataaagaaatgatttcttcagcttctaacaaatgtgatcccgaggaaatgaatgctgaagatccattgtttattctttacactt

SEQ ID NO: 308830 - DNA, 781 bp, Unknown
  Bacterial polypeptide expressing nucleotide sequence isolated from the Sargasso Sea
aagttgtaaaaatcgcaaatggttaaaaagaattggagtacaaaaaggtgacagagtaacaatttatttaacaatgatacctgaattagcatacacaatgctagcatgcgcaagaattggagctatacactcaataatttttggtggtttctctcctgacagtatagctggacgtataaatgattgtgagtcagactatgtggtaacagctgatgaagggataagaggaggcaaaactatacctttaaaatcaatcgcagatgaagcattgatgagctgtgctaatgtaaaaaaatgtgtagttgttaaaagaacaggtgctgatattacctgggatgatagcagagatgtctggtatcacgatataacaaaaaatgtttcttcatattgtgaacctgaagagatgaatgctgaagatcctctttttatattgtatacatcaggttctaccggaaaacctaagggagttcttcatacaacaggtggctatttagtttatgcgtcaatgacacatcaatatatttttaattacaaaccaaaagatatttattggtgtactgcggatattgggtgggtcacaggtcatagctatataatttatggacctttagcaaatggggctacaacattaatgttcgagggaatacctacttatccggactcatctagatggtggcagatagtagacaaatataaggtcaacattttttatactgcaccaacagcaattagagccttaatgagagagggagataagcctgttaaaaaaacttcaagaaaa

SEQ ID NO: 308831 - DNA, 805 bp, Unknown
  Bacterial polypeptide expressing nucleotide sequence isolated from the Sargasso Sea
aaaccgtatacaaaaattaaggatgtaaaatacagcaagacagatgttaatataaaatggtattatgatggaactctaaatgcttctgcaaattgtatagaccgacatttaagaaaaaataaagataagactgctattatatgggtgggggatgatcctaaaatccagaaaaaaattagttataaacagctacatcaagaagtttcaaaaaccgctaacgctttaaaagatttaggtattaagaaaggtgatagggttaccatttatttaactatgatacctgagttagcttatactatgttggcctgcgcacgtataggcgctatacattcaattatttttggtggtttttctcccgatagtattgcgggtagaattaatgattgtaaatcagattatgttattactgctgacgagggtttaagaggtggcaaaactatacccttaaaatcaattacagatgaagccctgattcattgtccaaatgtaaagaaatgtattgttgtcaaaagaacaggaaatagaattaattgggatgaaagtagagatgtttggtataacgaaataattaaaaaagcatctccagtttgtgatccagaggaaatgaacgctgaagatcctttatttatcttatacacttcggggtcaaccggaaaaccaaaaggcgtacttcatactactggcgggtacatggtttacgcatcaatgactcaccaatatatttttaactacaaaccaaaagatatatactggtgcactgccgacataggttggataactggtcatagctatataatttatggcc

SEQ ID NO: 308832 - DNA, 880 bp, Unknown
  Bacterial polypeptide expressing nucleotide sequence isolated from the Sargasso Sea
tagtactcaagaagaattattaagtctaaaaaaactagcatcagataatcctattcaattttgggaatcttttgcaaaatctgaattagattggtttgagccatttcaaactgtattagataacgaaaatgcgcccttttttaaatggttcaaagaagggaaactcaatattacatataactgcttagatagacatattaagagagggtttggaggaaagactgcacttatatgggaaggcgaaccaggagatagcaaaaaatacacttacgaagaacttctaaaagaggtatgtaaagcagctaatgcattaaaagaaattggtgtaaaaaaaggagatttggtatgtatttatatgccgatgattcctgaagcgatgtttgcgatgttagcttgtgcaagaattggcgctcctcattcagttgtcttcggaggattttcttcagaagctttaaaagataggttaattgatggaaacgccagatttgttattactgctgatggtggttttagaaaagataaggtgattgaactaaagcaagcagttgatgcggccattgaaagtggggcagataaagttgttgaaaaagtagttgttgttcaacgatcccaaaaaaatatatcgatggttgatgatagagatttttggtggcacgaattattaaaagatcaaaaaaatcattgtgaaccagaaataatgaatagcgaagatagactttttattctttatacttcggggtctactggcaagcccaaaggtgtagttcacactacaggtggttataatctttggtcccatttgacatttaaatggatttttgacttaaaagatgatgatatttactggtgtactgctgatgttggttggatacaggtcata

SEQ ID NO: 308833 - DNA, 923 bp, Unknown
  Bacterial polypeptide expressing nucleotide sequence isolated from the Sargasso Sea
tgcccatgatcccgcaagcagtgatcgcgatgcttgcttgcgctcgtttgggagctgtgcactctgtggtgtttggtggctttgccgcaaatgagcttgcagtacgaatagatgacgcaaaaccggtagttattgttactgcgtcatgtggcattgaaggcaataaagttctaccgtacaaacctcttgttgatgaagcaatatcattagcagagcacaaaccacaggcatgcgtgttgtatcaacgccctcagttaattgctgagttaaatgaagcaactgaccacgattggctctctctggttgaagctagcgtgccagcttctcctgttgccgtcgatgcaactgacccgctttatgttctttatacttcaggtacaaccggtaaacccaagggggtcgttcgagataatggcgggcacgcggttgctctccattattcaatgggcgcgatttacggtattagtgagaacgatattttttgggctgcatcggatgttggttgggtggtcggtcattcatatattgtctatggcccgctcataaaaggcgcaacgacggtactgtacgaaggaaagcccattggcactcctgatgccggtgcattttggcgtatgatagagtctcacaaagtgaatgtgctttttgcagctccaacagcatttagagcgatacgaaaagcggaccctgatgctgagtttttatctaaatacaatacgtcgagcttgcgtaccttatttatggcgggtgaacgtctagatccgccaacatatttctgggcgagcgagaaggttggtgttcccgttatcgaccattggtggcaaaccgaaactggctggccaatttgttcaaacccgatggggcttgagccaatggctacgaaacccggttcatcaagcgtgcctacacctgggttaacgtaa

SEQ ID NO: 308834 - DNA, 797 bp, Unknown
  Bacterial polypeptide expressing nucleotide sequence isolated from the Sargasso Sea
catgttggcttgtgcaagaataggtgcaatacattcagtaatatttggaggcttcgccccagactcaattgcaggacgaattaaagattgcaaatctcaatttgtaattactgccgacgaaggtgttcgaggtggaaaaataattccactaaaaaagtatattaatacagctttagagagttgtgatagttcaataaaaactctagttatccaatatacaaatactcaagatgaactacataaaaataataatttttattatgatgaattagttaaagaggtaaatgatcaatgtgaatgcgtatcaatgaacgcagaagatcctcttttcattttatatacttctggctctactggtaagccaaaaggtgttcttcatactacagggggatatttggtttacgcatcgtttacacataagtactcctttgactatcaccctggggatatctactggtgtacagcagatgcaggctggatcacaggacattcttattcagtctatggtccattagcaaacggaggtaaaacattattatttgaaggcgtgcctaactatcctgatttttctcgtttctgggaggtttgcgataaatataaagttaatattttctacactgctccaactgtattgagatctttaatgaaagaggggagctcttatattgaaaagtgtgatctaagttctttgagaattttagggacagttggtgagccaattaatccagaagcttggagttggtattcgtcgatagttggtaaggacaaatgtcctattattgatacttggtggcaga

SEQ ID NO: 308835 - DNA, 322 bp, Unknown
  Bacterial polypeptide expressing nucleotide sequence isolated from the Sargasso Sea
tgcggaggctgcagtagtaggctatccgcatgatataaaaggtaacggcttatattgttatgtaactttaaatgcaggagaaaaagagtcattagatcttgagagagatttaagattatgggttagaaagcaaattggaccaatagcaaccccagatctaattcaattttctccaagcctgccaaagacaagatctggaaaaattatgagaagaattttaagaaaaattgcagcaaatgaacatgaacaactaggagacactactactttagcagatccaagtgttgtaaaaagtctagttgaaaatagaaaaaacgtttaa

SEQ ID NO: 308836 - DNA, 964 bp, Unknown
  Bacterial polypeptide expressing nucleotide sequence isolated from the Sargasso Sea
ttatgcttctatgacacatcaatatatattcgattataaggctaacgacatttattggtgcactgctgatataggttgggttacgggtcatagttatattatttatggacctctctctaatggtgcaacaactataatgtttgaaggagttcctaactatccagatagctctagatggtggcaaatagtagataaacataaagtaaatattttttataccgctccgacagcaataagggctttgatgagagaaggtgacaaacctgtaaaaaaaactagtagaaaaacacttaaattattgggaacggttggtgaaccaataaaccctgaggcttggatgtggtattacaaaacagtaggggactctaggtgtcctattgttgatacctggtggcaaactgaaactgggggaatattgattgcgcctcaacccggagcgatagatttaaaacctgggtcagcaacaaaacctttttatggaatcaagccagtattggttgataaggatggtaaaataattaagggtgaaggtaaaggaaggctttgcatggcttcttcatggccaggacagatgagaaccgtttatggcgatcaccaaagatttattgatacttatttttcacaatttgacggtaaatattttactggtgatggatgtagaagggataaagacggttactattggataacaggaagagttgatgatgttattattgtttctggtcacaaccttggaacagctgagatagaaagtgcttttgttgcccatccaaaggtagctgaagcagccgttgttggttttccacatagtataaaaggtaatggattatattgttatgttactttaaacgctggtgaaaatcctactggagatttagaaagagatcttaaactttgggtcagaaaacaaatcggtccgatagctacaccggatgtgattcaatttgcgcctggattacaaaaa

SEQ ID NO: 308837 - DNA, 517 bp, Unknown
  Bacterial polypeptide expressing nucleotide sequence isolated from the Sargasso Sea
ttacggagaccatgaaagatttataaaaacatatttttctcaatttgatggtaaatattttactggtgatggatgtagacgagataaagatggatactattggataacaggaagagtggacgatgtaattattgtttcgggacacaatctaggcactgcagaaattgaaagtgcgtttgttgctcatacaaaagttgctgaagctgctgttgttggtttccctcacgatataaaaggaaatgggctttattgttatgttactcttaatgctggtgaaaaccctgatggagatttggaaagagaactcaagttatgggtaagaaaacaaattggtccaatagcaacaccagatcatatacaattttctccaggactaccaaaaacaaggtcgggaaaaattatgagaagaattttaagaaaaatcgcagccaatgaacatcatgatttaggagatacaacaactttggctgatccctctgtagtagattcgttgatcgagaatagaaagaataaataa

SEQ ID NO: 308838 - DNA, 835 bp, Unknown
  Bacterial polypeptide expressing nucleotide sequence isolated from the Sargasso Sea
aggagatgatcctaaagatactcaaaaaatttcttataaacaattacatcaaaaagtttcaaaagctgcaaatggtcttaaaaaacttgggatacaaaaaggtgatcgtgttactatttatctaacgatgatacctgagctagcgatcttaatgctggcttgtgcaagaataggtgccgtccactcaataatttttggtggtttctctgcagagtcaatttcaggaagagtgaatgattgtaaatcagaatatataattactgcagatgagggagtaagaggaggcaaaactattcccttaaaagcaacgacagatgaagctttatctaattgtccagatgttaaaaaatgtattgtagtaaagagaactggtaattatgtatattgggatcaagatcgagatgtctggtatcacgacctaattaaggatgtaccaaatcattgtgagcctgaagaaatgagtgcagaggatcctttatttattctctatacatcaggatcaaccgggaagcctaaaggagtattacataccactggaggatatatggtgtatgcttctatgactcatcaatatattttcaattataaaccgaatgacatttattggtgtacagcagatattggatgggtaactggtcatagctatataatttatggaccattagctaatggtgcaacaaccattatgttcgaaggtgttccaaattacccggatagttcaaggtggtggcagatagtagacaaatataaagtcaatactttttatacagcgccaacagctaaaagggccttgatgagagaaggtgatggcacccagttaataaaactactagaa

SEQ ID NO: 308839 - DNA, 649 bp, Unknown
  Bacterial polypeptide expressing nucleotide sequence isolated from the Sargasso Sea
catggatgaaaaaatatattatcccgatttaacaaattccaaatcatttaaaattgataaaaataaatataaggaaatgtatcaagaatctatctcaaatccagaagaattttggagaaagatgggaaatagaattgattggattactcctttttcaaaagttaaggatacttctttttctcatgatgatgtttccataagatggtatgaagatggatcacttaacgtaagttataattgtattgaccgacatcttgaaaaaaaaagggataaagttgctataatttgggaatcagatgagccaagtttatcaaaaaacattacctatggagaattgtacaagcaagtttgtcgtttatcaaatatatataaagaattaggtgtgaataagggagatcgagttattctttatatgcctatgataccagaggcagcatatgctatgttagcttgtgctagaataggtgctgtacattcagtagtttttggaggtttttcaccagaagcactagcaagtagaataactgattgtggagcctctttagtggtaacagctgatgaagggcctagaggtggaaaatcggtacctctaaaagagaatgtaaataaagctctagaaatttcaggggatataaaaactctagttgtt

SEQ ID NO: 308840 - DNA, 352 bp, Unknown
  Bacterial polypeptide expressing nucleotide sequence isolated from the Sargasso Sea
agaatcagcactggtgcttcatgaaaatgtggctgaagcagcagttgttggtttccctcatgaaatcaagggacagggtatttatgcctttgtaacattaaacacaggagttgagccgactgctgaattgcaaaaagaattagtacaactagttcgaaaagagatcgggccgattgcttcttttgatgtagttcaatgggcaccgggacttccaaagactcgttccggaaaaataatgcgtcgcattttgcgtaaaattgctgaaaatgaaatggaaagcatcggcgatacttccacacttgctgatccgtctgtagtagatgatttaatttccaatcgtcctgcaaattaa

SEQ ID NO: 308841 - DNA, 700 bp, Unknown
  Bacterial polypeptide expressing nucleotide sequence isolated from the Sargasso Sea
agtaaaagttaaaaagaaaaagtcttttaagaaaaaaaaaattataaaaaaaaaatctgatcaaagtgtagaaaaagaattaatttacaaaactaagaaagattggatcagtaaatctacagtaaataaatctcaatacgaaaaaaaatataaatcttcgctttcagataatgatgctttttggaaaaaagaaggaaagagaattagttggattaaaccttatacaaaaattaaagatgtaaaatatagtaattcggatgttagaataaaatggttttatgatggaactttaaacgcttctacaaattgtattgatagacatttaaaaaaaaacaaagataaaactgcgataatatgggttggcgacgatccaaaaattcaaaaaaaaattacttataaagaacttcacaaagaagtatcaaaagcagcaaacggattaaaagaaataggtgttaaaaaaggggatagagttacaatttatttaactatgatacctgagttagcatacacaatgcttgcttgtgctagaattggagctattcattcaattatattcggaggattttcaccagatagtatttctggaagaattaacgattgtaaatctgactatgtaattactgctgatgaaggtgtaagaggaggaaaaacaatacacctcaagtcaattatggatgaagctttggttaaatgtacgaaa

SEQ ID NO: 308842 - DNA, 667 bp, Unknown
  Bacterial polypeptide expressing nucleotide sequence isolated from the Sargasso Sea
aatgacagaaaagttgattgagtcgatattgaatgagtctagaagttttgctccttcaaaaaagtttatcaagcaagccaatattgacaacgaagacgcgcaaagattaagggaagaagcttcacacaatcacattgaatattgggctaaattagccagggctcatttgcattggtttctcccatttaacaacatactggatgaatcaaatgcgcccaattatgaatggttcaatgacggagagattaatgcttcttttaattcactggatataaatgccaataaaaacccagaaaaaactgcaattatatttgaaacagaggatggaaactctgagcgcatcacatacaaagatcttcttttaagaacctctcaatttgccaatggccttaagaagcttggcgtagtgccgatggatagggttgtgatatatatgcccatgtgccccgaggctgtgattgcgatgcaggcatgcgcaagaattggcgcaatacactctgttgtttttggagggttttcatcaaatgcactcaaggacaggatagaggatgcccaatcaaagattgtgattactgctgacggagcatatagaggcggaagcgttattccgcttaagcaagcaacggatgaggcggtgacaaactctttgcacaaagtaaaaaatgtt

SEQ ID NO: 308843 - DNA, 730 bp, Unknown
  Bacterial polypeptide expressing nucleotide sequence isolated from the Sargasso Sea
aatgggtcaaaagtttaatcaaatttatgaaaattctataaaaaatcctgaggatttttggaaaaatgtttctgaagatattttttggtttaaaaaaccaactaaaattttaaataaatctaatccaccattttataaatggtacgaggacggtgtaacaaatacttgttacaacgccttagatcatcatattgatcaaggcaaaggtgaaaggattgcattgatatatgacagtccaattacaggtaacaaagctcaattcacatttaaccaagtaaaagcgaaagtttctaaatttgcaggagcgcttgacaatcttggtgtcaaaaaaggagatagggttattatttatatgccaatgataccagaagctgtggtagctatgttagcttgtgggagagtcggggctatacattcggttgtttttggtggttttgcttctaatgagttggcaagtagaattgatgatagtaaagctaaacttttaattacagcttcatgtggttttgaacctggacggactgtagaatatagacctttagtagatggcgctttaaaaattgcaaagcatcaagtggaaaaagtaattttttttcaaaggaaaggtcatgaactcaagttaaatgcaccaaaagaaataagctgggacgaagctttatcaaatgcaaaagataaggattgtgttgagatgtgttcaaaccgactttgcctacatactatatacatctgg

SEQ ID NO: 308844 - DNA, 625 bp, Unknown
  Bacterial polypeptide expressing nucleotide sequence isolated from the Sargasso Sea
aatgaataataattttaaaaaaatttatgaaaattcaattaaagaacctgaaaatttttggagagagatcgctgatgatatcttttggtttaaaaaacctaaaaaaattttaaacaaatcaaagccacctttctataaatggtttgaagatggaacaacaaatacatgttataatgctttagacatacacatagatggaggtagaggtgataaaacttgcctaatttatgacagcccaattacaggaaataaaaaacaatttacttataaagaattaagagaaaaagtttcaaaatttgctggagctttaacaaaccaaggtattaaaaaaggagacagggcaataatttatatgccaatgattcctgaggcagtagtagcaatgctcgcatgtggaagaatcggagctattcattcagttgtttttggtggatttgcttcgaatgaattagcaagtcgaatagatgacagtaaggcaaagatattaattactgcctcttgtggttttgaaccaggaaaaacagttgaatataaaccattggttgatgaagctttaaaattagcttctcataaaattaaaaaactaattctttttcaaagatctggccacgaagtaaaattaaat

SEQ ID NO: 308845 - DNA, 741 bp, Unknown
  Bacterial polypeptide expressing nucleotide sequence isolated from the Sargasso Sea
tggccactcttatatcgtttatggtcctcttgccaacggggcgactaccttaatgttcgagggagtacctacatatccagatgcctctagattttggcaggtgatcgacaagcatcaagtcaatattttctacaccgctcctaccgctcttcgacaattaatgtctcaaggagatgagtttgtatacaaaacaaatagaaaatctctgaaactattgggttcagtcggggagcctataaacccggaggcctgggagtggtattatcaaatcgttggcgataagcgttgtccaatagtcgacacttggtggcagacggaaacaggcggaataatgatcactcctcttcctggcgcaacttcgttaaaacctggctcagcgacactaccattttttggaatacagccagctctaatggactcagaaggccatgtaatcgaagaacttgaggcttctggaaatttagttattacaacctcttggccgggtcaaatcagatctgtctacggggatcaccagagagtcattgatacctactacgcagcttatcctgacttttatttcaccggtgacggcgcgcgcagagactctgacggctattattggataacaggtcgggttgatgacgtaatggtggtctcaggacacaacatagggaccgcagaagtagaaagcgcactggtgctccatcctgccgtcgctgaagccgcagtggtaggatttccgcacgacatcaaaggaga

SEQ ID NO: 308846 - DNA, 325 bp, Unknown
  Bacterial polypeptide expressing nucleotide sequence isolated from the Sargasso Sea
agttgctgaagctgctgttgtaggctacccacatgatattaaaggaaatgggctttattgttatgtaacattaaatgctggagaaaaaccaactggagaattagagagagatttaaagctttgggtaagaaaacagattggtccgattgctactcctgatcttatacaatttgctccaggtttaccaaaaacaagatcgggtaagataatgagaagaatattaagaaagattgcagcaaatgagcatgatcaacttggagatactacaacacttgctgacccaactgttgttgaaagtttagtagaaaacagaaaaaataaataa

SEQ ID NO: 308847 - DNA, 835 bp, Unknown
  Bacterial polypeptide expressing nucleotide sequence isolated from the Sargasso Sea
tggagctatacattcaattatttttggtggtttttctcctgatagtattgctggaagaattaatgattgtaaatcggattatgtaattacagctgatgagggtttgagaggtggtaaaactatacacttaaaatcaattactgatgaagcattaatacattgtccaaaagttaaaaaatgtattgttataaaaaggactggcaatagagtaaattgggataatagcagagatatttggtatcatgatatcacaaaaaaagcttcatctgtttgtgaacctgaggaaatgaacgcagaggatccattatttattttgtatacttcaggatctactggaaaaccaaaaggagttcttcatactactggtggatatatggtttatgcatcaatgactcatcaatatatttttaattataagcctaaagacatttattggtgcacagctgatatcggttggataacaggtcatagctatataatttatggaccacttgctaatggagcaaccactattatgttcgagggtattccaacttatcctgacacatctcgatggtggcagatagtcgataaatacaaagttaacatattttacactgctccaacagccattagagcattaatgagggagggtgacggtccagtaaaaaaaacatctcgaaaatctctaaaactacttggaacagttggtgaaccaataaatcctgaagcatggcaatggtattataaaacagttggggagtctaaatgtccaatagttgatacttggtggcaaacagaaactggcggaatacttataagcccacaaaccggagcaatggatttgaaaccaggt

SEQ ID NO: 308848 - DNA, 841 bp, Unknown
  Bacterial polypeptide expressing nucleotide sequence isolated from the Sargasso Sea
ttttggtacaaaaaaccatcaaaaattttaaattctgataatcctccattttatatttggttcgaagacggaataacaaacacatgttacaacgctttagatctacatgtcgatcaaggcaaaggtgaaaagcttgcaattatttacgatagtccaataactggttcaaaagaaactataacttataataagttgaaagaaaaagtatctaaatttgctggagctttaaaaaaacaaggcattaacaaaggagacagggttataatttatatgcctatgattccagaggcagtagtagctatgttagcttgtggaagaattggtgcagtgcactctgttgtctttgggggatttgcagctaatgagttagcaagtagaattgatgattccaaagctaaaatacttgttacggcatcttgtggttatgaacctggaagaactgtacactataaacctttagttaataaggcattggaattagcaagtcataaaatcaaaaaatgtattatttttcaaagagaaaaagataaagcagagttaaatcctgctattgatattagctggaatgatgcgcttaaagatacaaagcctgcagagtgtgaaaaaatgaatgcaaatgattatgcttatattctttatacctcaggaaccactggtctgccaaaaggaatagttcgtgatattggtgggcatatagtggcattaaaatggactatgaaaaatatttacaatataaagccagatgacgtatggtggtctgctagcgatattggttggatagttggacactcttatatagtgtatggtccattattttatggttgtactacagttttatttg

SEQ ID NO: 308849 - DNA, 913 bp, Unknown
  Bacterial polypeptide expressing nucleotide sequence isolated from the Sargasso Sea
agattgtcaatcagaatacgttgttacagctgatgagggtgttagaggtggtaaaactattcccttaaaacttacaacagataaagcattagagtcatgtcctaacgttaagaaatgtttagttattaagagaacaaataaaaatattgatttagataaagatagagatctcttctatgatgatgttgtaaaagaagtagataatttttgtgaaccggagattttaaatgctgaggatccattatttatcttatacacgtcaggatcaacaggcaaaccaaaaggtgtgatgcatacttctggtggttatatagtatatgcttcaatgactcatgaatatatatttaattataatgatgatgacatatattggtgtactgcagatattggatggattactggtcatagttatataatttatggacctcttgctaatggtgccacaaccttaatgtttgaaggtgttcctaactatcctgatttttcaagattttggcaaatagttgataagcataaagtgaatattttttatacagctccaactgcaattagagctttaatgagagaaggtgatgattatgtaaataaaactagcagatcatcattaaaacttttaggtacagttggtgagcctattaatccagaagcatggaaatggtactttgaagtgccaggtaattcaaattgtccaattgttgatacttggtggcaaacagaaactggtggaatattaatatcgcctcaaactggtgctataaaattaaaacctggttctgctacaaaaccattctttggtattgaaccatgcattgtagataaagatggtaaagaactagaaggagaatgtgaaggaatgctatgcatgaaaagatcatggccaggtcaaatgcggacggtttatggtgatcataaa

SEQ ID NO: 308850 - DNA, 523 bp, Unknown
  Bacterial polypeptide expressing nucleotide sequence isolated from the Sargasso Sea
actgtgtataggagaccatcaaaggtttatagatacatacttttcacaatttagtggaaaatattttactggagatggatgtagaagagataaagatggatattattggattactggacgagttgatgatgtaattattgtttcaggacataacctaggaactgcagaaattgaaagtgcattcgtggctcatcctaaagttgctgaagcagcagtggttggctatccacacgatattaaaggcaatggactttattgttatgtgactttaaatgcaggggaaaaaagtactcttgatttagaaagagatttaaaactttgggttagaaagcaaattggtccaattgctacaccagacttaatacagtttgctccaggacttccaaaaactagatctggaaaaataatgcgaagaattttgagaaaaatagctgcgaatgaacatggtcaattaggagatacaacgaccttggcagatccctcggttgttgacaatttggtagacaatagaaaaaatatttag

SEQ ID NO: 308851 - DNA, 754 bp, Unknown
  Bacterial polypeptide expressing nucleotide sequence isolated from the Sargasso Sea
aaaatagttggtgaaaaaaaatgtcctattgtagatacttggtggcaaactgagacgggtgggattttaattgctccacaacctggtgctattaatttaaaacctggttcagcaacaaaacctttttacggaatcaaacctgcgatagttgacgagactggaaaagttttgaagggagcctgtaagggtagactttgtatgactcaatcttggccaggtcaaatgaggacagtttatggagatcatcaaagatttattgacacttatttttcccagtttgatggaaaatattttacaggggatggatgtagaagagataaagatggctattactggattactggaagagttgacgacgtgattattgtttctggacataatttaggaacagcagaaattgaaagtgcgtttgtggctcattcaaaagtagctgaagccgctgttgtaggcttcccccacgaaattaaaggcaatggactttattgttatgttactttgaatgcaggtgaaaatccaagtggggacttggagagagaattgaaactttgggtaagaaaacaaatcggaccaatcgcaacacctgatcacatacaatttgcaccaggtctacctaaaacaagatcaggaaaaataatgagacgtattttgagaaaaatcgctgctgatgagcatcatgatctaggggatactacaacgcttgccgatccaagtgttgttgaggctttagtagaaaatcgaaaaagtaaatcataaa

SEQ ID NO: 308852 - DNA, 904 bp, Unknown
  Bacterial polypeptide expressing nucleotide sequence isolated from the Sargasso Sea
tgggctaaagaagaaaaaaagaataacttggatgaaaaagtttacaaaaattaaagatgttaagtacagcaaagatgaagttaaaataaagtggtattatgatggaacattaaatgcctcagcgaattgtatagatagacatttaaaaaaaaatccaagcaaaacagcaatcatttgggtcggcgatgatcccgctgatacgaagaaaatttcttataaagaattacatcaaaacgtatgtaaagctgcaaatggtttaaaaagtttaggtattcaaaaaggtgatagagttacaatttatctgactatgatcccggaattagcttacattatgttggcttgtgcgagaattggtgctgttcactcaatcatttttggtggtttctcacctgactcaattgctactaggattactgattgcgagtctgaatatttaataactgcagatgaaggagtaagaggtggaaaaataattccgttaaaaaaaattgctgatgaggccttagatcaatgtcctggagtaaaaaaatgtgttgttgttgaaagaactggcaatcaagttgattggaataatgaaagggatgtttcttataaagaactaatttcatcagttccatcaaaatgcgatccagaagaaatgaatgcagaagatccgctattcattttatatacatctggttcaactggaaaacctaaaggtgttcttcatacaacaggtggttatatggtttatgcatcaatgactcaccaatatatttttgattataaggctaatgatatttattggtgcactgcagacattggttgggttacggggcacagttatattatttacgggcctctttctaatggagcaacaactattatgtttgaaggagttccaaactatccagatagttgtaga

SEQ ID NO: 308853 - DNA, 890 bp, Unknown
  Bacterial polypeptide expressing nucleotide sequence isolated from the Sargasso Sea
ggaaagacaattcatttaaaatctattactgatgaggcattaattcattgtcctaatgtaaaaaaatgtatcgttgtaaaaagaacgggaaatagaataaattgggatgagagtagagatgtttggtataatgaaatggttaaaggagttccgtctcaatgtgacccggaagagatgggagcagaagatcctctttttattttatatacttctggttcaactggtaaaccaaagggagttcttcatacaacaggcggatatatggtctatgcatcaatgacccatcagtatatttttaattacaaaccaaaagacatatatttttgtactgctgacattggatggattacaggacatagttatataatttatggacctttatccaatggtgcaactacagtaatgtttgagggtgttcccacatatcctgactcttcaaggtggtggcaaatagttgacaaatataaggttaatattttctacacagcgccaacagcaataagagcactgatggctcaaggagaggggccagttaaaaaaacgtcaagaaaatcattaaaattgctaggaactgttggcgagcctattaatccagaagcatgggaatggtattatagaactgtgggagaaaacaaatgcccaattgttgatacatggtggcaaactgaaactggtggtattttaatatctccacaaactggtgcaatagatcttaagccaggttctgctacaaaaccattctatggtattaaacctgtaatagtagatcagaatggaaaagaaattaaaggagaaggtcaaggaagattgtgtatgtctcaatcatggcctggacaaatgcgaacagtttacggagaccatcaaagatttatcgatacatacttttcaca

SEQ ID NO: 308854 - DNA, 589 bp, Unknown
  Bacterial polypeptide expressing nucleotide sequence isolated from the Sargasso Sea
gcaaagagataaaggcgctggcgaaggaaggctttgtattgctcaatcatggccaggtcaaatgagaactgtttatggagaccatcaaagatttatcgacacttatttttctcagtttaatggtaaatattttactggtgatggctgtagaagagataaagatggatattactggatcacaggacgagttgatgatgtaattattgtatctggtcataatttgggaacagctgagattgaaagtgcatttgttgctcatccaaaagttgctgaagcagctgtagttggttatccacacgatattaaaggaaatggtttgtattgttatgtcactttaaatgcaggagaaactgaaaatggagatcttgaaagagatttaaaactttgggtcagaaaacaaattgggcctctagcaactcctgacttaatacactttactccgggtcttccaaaaactagatcaggtaaaataatgagaaggattttgagaaaaattgctgcaaacgagcatggacaattaggtgacaccactactttagctgatccaagtgttgtcgatagcttagtcgataatagaaaaaatatttaa

SEQ ID NO: 308855 - DNA, 589 bp, Unknown
  Bacterial polypeptide expressing nucleotide sequence isolated from the Sargasso Sea
aatgtccgataatatcaaaataccagtatttgaaaattttaaagatagtgctcatttaactaaagataaatatgaagaagcttataaatttgctttgaataatcctgaagccttttgggaaaaagaagggaaaagaataaactggataaacccttatacaagggtcaaagatgtgacatggtccaacaacgatgtaaatattaaatggttttatgatggaaccttgaatgcgagttataattgtatcgatagacatttatcagataaatctgatcaaattgcgattatttgggaaggtgatgatccaaatgagtcaaaaaaaattacatataaagaattacaccaaaaagtttctaaatttgcaaatatgatgaaacacttcggtgttcaaaaaggtgatagagttacaatatatatgcccatgatacctgaagctgcatatgcaatgttagcttgttcaagaattggagcaattcactctgtcgttttcggaggcttttctcctgatgcacttgctggcagaatacttgactgtgactctaaattcttaataactgctgatgaaggaataaggggtggcaaaattgta

SEQ ID NO: 308856 - DNA, 781 bp, Unknown
  Bacterial polypeptide expressing nucleotide sequence isolated from the Sargasso Sea
gtcaatattttctataccgctcctaccgctattcgtgcgcttatgagagatggagaagaacctgtaaaacgatgttctagatcaacactccgattgctaggaactgtaggtgaacccataaaccctgaagcctgggagtggtattacaaggtggtgggtgaagaacgatgccccattgttgatacctggtggcaaacggaaactggcggcatcatgttgagccctctgcctggtgctacagccctgaaacctggctccgcaacactccctttctttggtattaagccagccatcgtagatcatgaaggtagccttttagatggtgctacagagggcaacctagtcatacttgatagttggccaggtcagatgcgcaccgtctatggggatcatgaacgctttattaaaacctatttcagtcaatttcctggcaagtattttacaggtgatggtgctcgtagagattcggatgggtactactggattactggtcgtgtggacgatgttatcaacgtctcaggacatcgcatgggtaccgctgaagttgaaagtgctttagtagctcacccaaaggttgctgaagcagctgttgtgggatttcctcatgatataaaaggtcagggaatatatgcgtacgtcacgctaaacgcaggagaagtgcctgatgaatcgctacgcaaggaactcattttatgggtaagaaaggaaattggaccgatcgctagcccagactatctacaatgggcgccaggccttccaaaaactaggtcagggaaaatca

SEQ ID NO: 308857 - DNA, 484 bp, Unknown
  Bacterial polypeptide expressing nucleotide sequence isolated from the Sargasso Sea
agtttatttttctacctataatgataagtattttactggagatggttgtaaaagagataaagatggattttatagaattactgggagagtagatgatgttatcaatgtttcgggtcatcgaataggaacagcagaattagaaaatggaattaatgaacaccctttagttattgaaagtgctgtagttggattccctcattcattaaaaggtcaaggaatatatgcttatgttattttagaaaaaactcatttttcagaagaaaaattatctaaagaaattttacaaacagtaaaaaatgaaataggttcaattgccaagccggataaaattctatttacttctggcttgcctaaaactagatctggaaaaataatgaggagaattttaaggaaaattgcagaaaagaagttcaatgaaatgggcgatatatccacactactagacccatctgtagtagatgagataattaaaaaatttaaataa

SEQ ID NO: 308858 - DNA, 950 bp, Unknown
  Bacterial polypeptide expressing nucleotide sequence isolated from the Sargasso Sea
gattctaaatataaaaagaaatataagatgtccatcaaagaaaacgataaatttttgggctaaagaaggaaagaggatttcttggatgaaaaaatatactaaaattaaagacgtaaaatacagcaaagaagaagttaaaattaagtggtactacgatggaactttaaatgcttctacgaattgtattgatagacatcttaagaagaatccaagcaagacggcgatcatttgggttggtgatgatcccgctgatacaaagaaaatttcttacaaagaattacaccagaatgtgtgtaaagctgcaaatggtttaaaaagtttaggtatacaaaaaggagatagagtaacaatttatcttaccatgatccctgaattagcttacgttatgttagcttgtgcaagaattggtgctgttcactcaattatttttggtggtttttcgcctgactctatagctacaagaattaccgattgtgagtctgaatatttaataactgcagatgaaggagttagaggtggaaaaataattccactaaaaaaaattgctgatgaggctttagatcagtgccctggagttaaaaaatgtgttgtagttgaaagaactggtaatcaggtagattggaataatgaaagagacgtttcttataaagaattaatttcatccgtgcctgcaaaatgtgaacctgaggaaatgaatgcagaagatccgctatttattctttatacatctggttctactggaaaaccaaaaggtgttctccatacaacaggtggttacatggtttatgcttcaatgactcaccaatacatttttgattataagtctaatgatatttattggtgcactgcagacattgggtgggttacagggcatagttatattatttatggcccactttcaaacggggccactaccataatgtttgaaggagttcctaaattacctgata

SEQ ID NO: 308859 - DNA, 410 bp, Unknown
  Bacterial polypeptide expressing nucleotide sequence isolated from the Sargasso Sea
tggaagagtcgatgatgtcttaaatgtttccggacatagaattggaactgcagaagttgaaagtgcaatcgtaaatcatgtagacgttgctgaggcagcagttgtagggatagagcatgatattaagggtcaggcaatcttcgcttatgtcattcttagagaaaataataaagacaaaatgacaattaataatgaaattcttgaagaagtttctaaaataataggaaagtttgctaaaccggaagtaattcaatttactagagacttgcctaagactagatcaggtaaaataatgagaagaatcttaagaaagatagcaaataatgaattcgaaaatttaggtgacacaactactcttgcagatccttcaatagttgaagatctcattaagaataaacatgaaagataat

SEQ ID NO: 308860 - DNA, 709 bp, Unknown
  Bacterial polypeptide expressing nucleotide sequence isolated from the Sargasso Sea
tataaacaactacatcaagaagtatctaaagctgcaaatgcattaaaagaattaggagttcagaaaggtgacagagtcacaatttatctaacaatgataccggaactagcatacacgatgctagcatgcgcaagaattggggcaatccactcaataatatttggtggtttttcaccagatagtatttctggaagaataaatgattgtgagtcagattatgttattacagctgacgaaggattaagaggaggaaaaacaatacctcttaaatcaattactgacgaagctttagttaactgcccaaatgtaaaaaaatgtatagttgttaaaagaacaggaaacagaattaattgggatgaagatagagatgtttggtaccatgagataacaaagaaagtctcttcaaattgtgagccagaggaaatgaatgctgaagatcctctatttattttatatacctcaggatcaactggtaaacctaagggtgttttacatactactggtggttatatggtttatgcatcaatgactcatcaatatatatttaattacaaacctaaagatatttattggtgtactgctgatataggatgggtaactggtcatagttacatcatatatggaccactctctaatggagcaactactataatgtttgaaggtattcccacatatcctgatacatcaatggtggtggcaaattgttgat

SEQ ID NO: 308861 - DNA, 769 bp, Unknown
  Bacterial polypeptide expressing nucleotide sequence isolated from the Sargasso Sea
gatggcttctggaaaaaagaaggaaagagaattaattggataaaaccgtatacaaaaattaaagatgttaaatatagtaaatcagatgttaagataaaatggttttacgacggtactcttaatgcatcggtaaattgtattgatagacacttaaagaagaataaggataaaactgcgatcatatgggttggagatgatccaaaagttcaaaagaaaatttcctacaaagaattacacaaagaagtttctaaagccgcaaatggtcttaaagaattaggggttaagaaaggtgatagagtaacaatctatttaactatgataccagaacttgcatatactatgttagcatgtgcgaggataggagcggtgcattcaataatctttggaggattttctccagatagtatttcaggaagaataaacgactgtgaatctgattatcttattactgcagatgaaggtgtaagaggtggaaaaataattccattaaaatcaattgctgatgaggctttggtaaattgcccaaacgtaaaaaaatgtgttgttgtaaaaaaaacgggcaatagaataaattgggatgaacgaagagatgtttggtaccacgaattgacaaaaaaagtttcaaataaatgtgaacccgaagaaatgaatgcagaagatcctttatttattttgtatacttcgggatcaacaggaaaaccaaaaggagtgatgcatacaacaggtgggtatatggtttacgcatcaatgacccatctaatatatattc

SEQ ID NO: 308862 - DNA, 588 bp, Unknown
  Bacterial polypeptide expressing nucleotide sequence isolated from the Sargasso Sea
aggttttaaaaggagaggcacaaggtagactttgtatttcacaatcgtggcctggacaaatgagaagtgtgtatggtgaccatcaaagatttatagatacttatttttcacaatttgacggaaaatatttcacaggtgatggctgcagaagagataaggatggatactattggattacaggaagagtagatgatgtaattattgtttctggccataatttaggtactgcagaaattgaaagtgcgtttgtagctcatccaaaagtggctgaagcggcagtagttggttatccacatgatataaaaggaaacgggctttactgttatgtaactttaaatgctggagagaaaagtactcttgatttagagagagatttaaaactctgggttagaaaacaaattggtccaatagcaactccggacctaattcaatttgcaccaggattaccaaaaacaagatcaggtaaaataatgagaagaattttaagaaaaattgctgctaatgaacatggtcaattaggagatacaactactttggctgatccttcagttgttgaaagtttagtagataatagaaaaaatatttaaa

SEQ ID NO: 308863 - DNA, 752 bp, Unknown
  Bacterial polypeptide expressing nucleotide sequence isolated from the Sargasso Sea
caaaactgtaggggattctagatgtcctatagttgatacctggtggcaaaccgaaacgggaggaatacttataagtccacaaactggtgcaatagatcttaaaccgggctccgctacaaaacctttttatggaataaaaccagaaatcgttgataaagagggtaatgttttaagaggagaagctcaaggaagactatgcatttctcaatcgtggcctggtcaaatgagaactgtatatggagatcataatagattcatagaaacgtatttttcacagtttgaaggtaaatattttacaggtgatgggtgtagaagagataaagatggttactattggataactggaagagttgatgatgttataattgtttcaggtcacaacttaggtacagcagaaattgaaagtgcttttgtagcccatccaaaagttgctgaggcagcagtggttggatatcctcatgatatcaaaggtaatggtctatactgttatgtcactttgaatgcaggagaaaaacatgacggggaattagaaagagagctaaaactttgggttagaaaacaaattggaccaatagcaactccagattatattcaattttctccaggacttccaaaaactagatctggaaaaattatgagaagaatattaagaaaaattgccgccaacgaacatgatcaacttggagacacaactactcttgcagatcctagtgttgttaaaagtttagttgaaaataggaagaatacctaaa

SEQ ID NO: 308864 - DNA, 628 bp, Unknown
  Bacterial polypeptide expressing nucleotide sequence isolated from the Sargasso Sea
attttatggaataaaacctgtaattgttgataaaaaaggaaatgttttaaaaggtgaatgtgaaggaagactttgtatagcacaatcatggccaggacaaatgagaactgtttatggagatcaccaaagatttatagatacttatttttcacagtttgatggaaaatattttactggagatggatgccggagagataaggatggttattattggataacaggaagagttgacgatgtaatcatagtatctggacataatttaggaacagcagaaatagaaagtgcctttgttgctcatccaaaagttgctgaggcagcagtagtaggatttcctcacgatataaaaggcaatggtttatattgttatgtaactttaaatgttggagaaaaagaagatggagaccttgatagagaacttaaactttgggtaagaaaacaaataggcccagttgcaacacctgattttatacaatttgcgccaggacttccaaaaactcgttcgggaaaaattatgagaagaatacttagaaaaattgcagcaaatcaacatgatcaattaggtgacacaactactttggcggacccgagtgttgttgaaagtttagttgataatagaaaaaatatctaa

SEQ ID NO: 308865 - DNA, 847 bp, Unknown
  Bacterial polypeptide expressing nucleotide sequence isolated from the Sargasso Sea
aatgaatcaaagcttttctgaaatatactcaaattcaataaataaacctgaggaattttggggcaatgttgctgaagatattttctggttcaaaaaacctaaaaaaattttaaacaaatctaaccctcctttttatagatggtatgaagatggaactacaaacacttgttataatgcactagatctgcatattgatgaaggaaatggagataagttagctctaatttacgacagtcccataactggaaataaagctaaatatacatataaacaattaagggaaaaagtatcaaaatttgcaggtgccctacaaaaccaaggagtaaataaaggagatagggttataatatatatgccaatgataccagaagcagtaatcggtatgcttgcttgtgcaagaattggagcaattcactcagtagtatttggaggctttgcctcaaatgagcttgcaagtagaattgatgatagtaaagcaaaaattttactaactgcatcatgtgggtttgagcctggaagaacagttcattataaacctttggttgatgaagctttaaaattagcaaaacataaaattgaaaaaataattttatttcaaaggtttggaaatgaagtcaatcttaaaactccattggaaataagttgggaagaagctttatcaaaagcaaacaatgttgactgtgtagaaatgaaatcaaatgaatttgcctacatactgtatacctctggaactacaggggtgcctaaaggtatcgtgagagatataggaggacacattgcagctcttaaatggacaatgaaaaatatatataacgtagatcaaaatgatatttgggtggtctgctag

SEQ ID NO: 308866 - DNA, 814 bp, Unknown
  Bacterial polypeptide expressing nucleotide sequence isolated from the Sargasso Sea
aaagaaaacttcttagggagaaaaaagaaaaaagcatttctaggaaaaaaagattctaaacaaacaaaagactctgacggaaatatagtttttaaagtacctcaagcttgggaaaaacaagcttacataaataaaactcagtatgcaaaaaaatataaactatccattaaagacaatgagaatttttggagaaaagaaggaaaaagaatatcttggattaaaccttatactaaaattaaagatgtaaaatacagcaaagaagaagttagtataaaatggtatcatgatggaactttaaatgcttctgcaaactgtatagataggcatttagaaaaaaagggaaataaaacagcaattatttgggtaggcgatgatcctgctgattctaaaaaaataacttataaagaacttcataaaaatgtttgcaaagcagctaatggcttaaaaaacataggcattcaaaagggagatagagttacgatttacctaacaatgattcccgagcttgcttacacaatgttggcttgcgctagaattggagctgttcattcaattatatttggtggtttttctcctgattccatagctacaagaataaatgattgtgaatcagactatgtaattactgctgacgaaggtgttagaggaggaaaaattatacctttaaaaaagattgctgatgaagcaatgatgcaatgttcaaacataaaaaaatgtgtagtagtaaaaagaacgggaaatactgtagactggaatgatgaaagagatgtttcttacgaagaaataactaagaatgtttctgataaatttgttc

SEQ ID NO: 308867 - DNA, 868 bp, Unknown
  Bacterial polypeptide expressing nucleotide sequence isolated from the Sargasso Sea
aatgaaaaatttgatgtcagtgccgattggtctgccaacgcccagataaatcaagataagtataatgagtggtatgagacatcattcaacaacaatgaagatttttggaacgaacacggcaaacgtatagaatggatgaagccgtatacaaaagtgaaggatgtttcattcaacaaagatagtttttcaatcaaatggtacgaagatggtgctcttaatgcgtccgccaattgtattgatagacatttaaaagataaaggggatcagacagccatcatttgggaaggtgatgacccaaaagattcaaaacacattacttataatgaacttcataaagaagtttcaaaattatcaaatggcatgaaatccctcggtgtaaaaaaaggtgaccgtgtaacgatctatatgccaatgattcctgaggcggcatacgctatgcttgcctgcacacgcattggtgctattcactcagtcgtgttcggcggcttttctcctgactcgcttgcaggacgcatcagtgattgtaaatcagatattgtcataacagctgatgaagggttaagaggtggtaaaccaattccattaaaaaagaatacagacgatgccatcaacatttcgggtggtgtgagacattgtattgttgtcaagcgaacaggtggagcaatcgattggcatgatgaccgcgatgtttggtatcatgaattattaagtgatgcatcgggtgattgtccaccagaagaaatgagtgcagaggatcctttatttattctttatacatcgggctctacaggaaaaccaaaaggagtgatgcacactactgggggttacatggtgtatgcatccatgacacatcaatatgtatttgatt

SEQ ID NO: 308868 - DNA, 847 bp, Unknown
  Bacterial polypeptide expressing nucleotide sequence isolated from the Sargasso Sea
ggtttttcaccagaagcacttgcaagcaggataactgattgtggagcttgtttagtagttacagctgatgaagggcctagaggtggaaaaccagtacctttaaaagagaatgtaaataaagcactacaaatttctggtgatataaaaacattggtcgttaagagaacaggtgctaatgtctatatgaaagaaaatagggatttttcatataatgaaatgactgacatcgtaagtgataagaatgttccagaagagatgtctgccgaagaccctctttttattttgtatacttctggatctaccggaaaacctaagggcgtacagcactctagtggtggttatattgtttatgcttctctaacgcatgagtatatttttgattatcatgataatgatatttactggtgtacagctgatgttggttggatcacagggcacagttatattgtctatggaccattatcgaatggcgcaaccactttaatgtttgaaggggtaccaacatacccagattgttcaagattttggcaagtatgtgaaaaacataatgttaatcaattttatacagctcccacagctataagggcattaatgggacaaggtgatgattttgtaaataattgtaatttatcaagtcttagaattttgggtacagttggtgaacctattaaccctgaagcatgggagtggtataacagggtagtaggcaaaggtaagtgcccaatagtagatacatggtggcaaaccgaaactggtggaatactaattagtcctttgcctggagcgacacctaccaaaccaggatctgcaactaatcctttttttggcattaagcctgtgattatgg

SEQ ID NO: 308869 - DNA, 790 bp, Unknown
  Bacterial polypeptide expressing nucleotide sequence isolated from the Sargasso Sea
aactgtattagataacgaaaatgctccctttttaaaatggtttaaagaagggagactcaatattacatataactgcttagatagacacattaagagagggcttggaggaaagactgcacttatatgggaaggcgaacccggagatagcaaaaaatatacttacgaagaacttctaaaagaggtatgtaaagcagctaatgcattaaaagcaattggtgtaaaaaaaggagatttggtatgtatttatatgccgatgattcctgaagcgatgtttgcgatgttagcttgtgcaagaattggcgcgcctcattcagttgtctttggaggattttcttcagaagctttaaaagataggttaattgatggaaacgccagatttgttgttactgctgatggtggctttagaaaagataaggtgattgaacttaagaaagcagttgatgcggcaattgaaagtggggcagataaagttgttgaaaaggtaattgttgttcaaagatcccaaaaaaatatttcgatggttgatcatagagatttttggtggcacgaattattaaaagatcaaaaagatcattgtgaaccagaagtaatgaatagcgaagatagactttttattctttatacttcaggttcaactggaaagcccaaaggtgtagttcacactataggtggttacaatctctggtcccatttgacatttaaatggatttttgacttaaaagatgatgatatttactggtgtacaaatgatgttggttggattactggtcatagttacatagtttatggg

SEQ ID NO: 308870 - DNA, 940 bp, Unknown
  Bacterial polypeptide expressing nucleotide sequence isolated from the Sargasso Sea
gattggtttgataagtggacaactattaacaatacagattattctaaagcacatatcgagtggttttcaaatggaaaactaaatgcatcctataattgcatagataggcatattgaaaatggcttcggagaaaaaacagcccttatttggcaatcaaatgatcctactatctcaaccaatgtcacgtataatgaattacttaaaaaagtttcattatttgctaatggattaaaacgagctggaattaataagggagatcgagtatgcatttatatgcaaatgattcccgaggctattgtagcgatgcttgcttgcgctagaattggagcggtgcattcggtcgtttttggtgcattttctagcgatgcattaaaaaacagaattaatgattctgaatgtaagttacttattacgcaagataatggagtgcgtggattaaaatttgacattcctatgaaagaaaatgcagataaaattgcagatgaatgtccttcactaaaaacagtagtaatggttgaacgttcaggtaatgatatgtttatgaaagaaggtagagatataacctggaatcaatttgtagatggttgttctagtgaatgtcccgcagaaataatggatgcagaagatccattatttattttatatacttctggatctacgggaaagccaaaaggagtaatgcacaccacaggtggatatcttgtctatgcgtcacatacgcatgaactagtctttgattatcatcaagatgatgtttactggtgcactgcagatattggatggattacaggtcattcatatatcgtatatggaccattatccaatgcagtaactcaggtgatatttgaaggagttcctaattacccagattttggaagattatggcaaattgttgaacagcataaagtaaatgtattctatacagctccaactgcatgcg

SEQ ID NO: 308871 - DNA, 621 bp, Unknown
  Bacterial polypeptide expressing nucleotide sequence isolated from the Sargasso Sea
catgggttataaaaaagaatttcaagaatcaattgaaaatcctgaaaaattctggcgaaaacaagctgaactgatcaaatggtatgagttcccaaatactatcctatcaaaggatgaaaatggtttttaccgctggtttaaggggggaaaactcaatacaagttatctattactagattatcatattgagtctggacgtggagatcaaacagcactgatctatgactccccagtcacaaattctcagcgtaaatttaacttcaaagagttattagaaaaagttgaaaaactcgctggtgtacttagagctaagggtattgaaaagggagatagaaccataatatacatgcctatgattcctgaggcattggtagctatgcttgcctgtgcacgtttaggagcaattcattcagttgtatttggtggatttgcgcccaaagagctggctattcgtatagatgatgcaaaacctaaagtacttttgacagcttcatgtggaatagaatttagtaacgtaattgaatataagccactagtagatgaagcacttatcctatctaagtacccaccgaaaacagttattctccttcaacgtcctcaatctaaagcatcgatgaagtc

SEQ ID NO: 308872 - DNA, 854 bp, Unknown
  Bacterial polypeptide expressing nucleotide sequence isolated from the Sargasso Sea
tttatattatatacttcaggttctacaggaaaacctaaaggagttcttcatacaacaggtgggtacatggtttatgcttcaatgactcatcagtatatttttgattataagagcaacgatatttactggtgtacagcagatataggttgggttactgggcatagttatattatttacggtcctttggctaatggagcaactacaattatgtttgaaggaattccgaattacccagatagttctcgctggtggcaaattgtagataaatataaggtcaatattttttacacagcaccaactgcgattagagctttgatgagagagggggacaatccagttaaaaaaacaagtagaaaaacattaaaactattaggcacggtaggagaaccaataaaccctgaagcctggatgtggtactacagaacagttggcgactctagatgtccaatagttgatacttggtggcaaactgaaacaggaggtatactaatagctcctcaaccaggagctatagatctaaaaccaggttctgcaacaaaacctttttatggaattaaaccagtgctggtagataaagatggcaaggttattaaaggagaaggaaaaggaagattatgcatggctcaatcttggcctggccaaatgcgaactgtatatggtgatcatcaaagatttattgatacttatttttctcaagttgatggaaaatactttacaggtgatgggtgtagaagagataaagatggatactactggattactggaagagtagatgatgtaataattgtgtctggtcataatcttggcacagcagaaatagaaagtgcttttgttgctcatccaaaagtagctga

SEQ ID NO: 308873 - DNA, 592 bp, Unknown
  Bacterial polypeptide expressing nucleotide sequence isolated from the Sargasso Sea
ttttggggtatttgcgagaaacatgctgtcaccattttttatactgcgccgacagcaattagagcattgatgaaacacggagatgaaattccacaaagctatgacttgtccagtctgcgtctacttggaacagtaggtgaaccaataaaccctgaagcttggatgtggtaccacagaattattggtcaagagcgttgtccaattgttgatacttggtggcaaacggagacaggtggagctatgatcagcccccttcctggggtcacagagacaaaacctgggtcatgtacaactccaatgccaggtattgatgttgatatcgtcgatgagctaggagagccagtaggcgaggcaaatcagggagggtatctggttatcaaaaaaccatggccctcaatgttaagaaccatatggggagataaccaaagatatattgatacttattgggaaaaatttgacggaaggtattatgttgctggcgatagtgcatacagagatgaggatggttgccattggatcatgggcagaattgacgatgtgctgaatgtctcaggccaccgcttgggaacgatggaggtagagtcggcgcttg

SEQ ID NO: 308874 - DNA, 828 bp, Unknown
  Bacterial polypeptide expressing nucleotide sequence isolated from the Sargasso Sea
gatgcgggaaggcgacgaaccggtcgaaaggacgtctcgagccagcctgcgattgctcggaacggtcggcgagcccataaatcccgaggcctgggaatggtattaccaagttgtcggcgacgcgcattgcccgatcgttgatacctggtggcaaacggaaacgggcggcatcctgatcagtcccttgcccggcgcgaccccgctgaagccgggttcggtaacgaggcccctgttcggtattcggccggctgtggtcgatgccgacggcaatatccttgatggcaaggcagagggcaacctggtgatgctggacagctggcccgggcagatgcgcacggtgtatggcgatcaccagcgctttgtcgacacctatttctctacctacgacgggatgtactttgccggcgacggagtcatgcgggacgccgacggttattactggattaccggccgggtcgacgacgtgttaaacgtgtcaggacaccgtatggggacggcagaagtcgagagcgcactggtcgctcacaaggacgtggcagaagcggccgtcgttggctgtccacatgaaatcaaagggcagggaatctatgcctatgtcacgttgatggagggcatcgagaccagtgacgaactgcttgcagaattgcggcagtgggtcaggaaggagatcggtccgatcgccacgccggacttcatccagtgggcacccggattaccgaagacccgttcaggaaagatcatgcggcgtatcctgcgcaaagtggccgagaacgatttcgagaacctcggggatacgtcgaccctggccgatccggctgtcgtggacga

SEQ ID NO: 308875 - DNA, 436 bp, Unknown
  Bacterial polypeptide expressing nucleotide sequence isolated from the Sargasso Sea
tatgtcttttaagtttaataaaatttacgaaagttctattaaaaatcctgaaaaattttggcaagaagcctctgaagatatcttttggtttaaaaaaccaacaaaaattttaaataaatctaacccccctttctacaaatggttcgaggatggtgtcacaaacacttgttataatgcattagacattcatattgaccaaggaagaggtcaaaaaacagctttgatatacgatagtcctattacaggtaacaaaagtcagttcacttatgaggaattaaagtcaaaggtctctaaattcgcaggagcattgaaagctcaaggggctaataaaggcgatcgggtgatcatttatatgcccatgatccctgaagcggtagttgcaatgctggcttgtgctagaattggagcaattcactcagtagtttttgggggattt

SEQ ID NO: 308876 - DNA, 643 bp, Unknown
  Bacterial polypeptide expressing nucleotide sequence isolated from the Sargasso Sea
aggatcagcaacttctgccattttttttggagtcaaaccttcacttgtagacaacgatggcaatgaaattattggagaaggtaaaggaaatttatgcattgatcaaagctggccaagccagattagaacagtatatggagatcatgaaagaatggttcaaacttatttttctcaatacaaaggaaaatattttacgggagatggagcaaaacgagatgctcatgcatattactgggttacgggaagggtagatgatgtattaaatgtttcaggccacagaattgggacagcagaagttgaaagtgcaattgtaacgcatccatacgtagctgaagcggcagtagttggaatagagcatgatattaagggccaagctatttacgcatttgtaatattaaaagatactgaaaaaagtaatgacttggtagaaaatgaaattattgatactgtctcaaaatccattggaaaaattgctaaacctgaagccattcatataacaagagacctgcctaaaactcgctctggaaaaattatgagaaggattcttagaaaaatagcaaacaaagatacagcaaatttaggtgatgtgacaactttagctgatccaagtattgttgaagaattaattaattcgcgacaataa

SEQ ID NO: 308877 - DNA, 627 bp, Unknown
  Bacterial polypeptide expressing nucleotide sequence isolated from the Sargasso Sea
atggtattaaaccagtgttagttgataaagatggaaaggttattaaaggcgagggtcaaggaagattatgcatggctagttcttggccagggcaaatgagaactgtttatggagaccatcaaagatttatcgatacgtatttctcacaatttgacggaaaatacttttcaggtgatggctgcagaagagataaagatggttactactggataactggtagagtagatgatgtgataattgtttcgggacacaatcttggaactgctgaaattgaaagtgcatttgttgcccatcccaaagttgctgaggctgcagtagttggttttcctcatagtataaaaggaaatggattatactgctatgtaaccttaaactctggtgaaaatcctacaggtgacttagaaagagatcttaagcaatgggttagaaaacaaataggtccaatttgctaccctgacgttatacaatttgctccgggtctaccgaagactagatcggggaagataatgagaaggattttaagaaagatagcagctaacgaaccggataacttaggtgacaccacaacattggcagatccaagcgtcgtagcatcacttgttgaaaacagacaaaatagagattaat

SEQ ID NO: 308878 - DNA, 501 bp, Unknown
  Bacterial polypeptide expressing nucleotide sequence isolated from the Sargasso Sea
tatgagtgaaaatgaaaagtttgaagttagcagtgaatggtctgcagaagcacagattaatactgacaaatacaatgaatggtatgaaaattcgctcaataacaatgaagagttttggagtgagcacggtaaaagaattgattggattaaaccgtatacaaaagtaaaagacgtctcttataataaagataatttctcaatcaagtggtattacgatggtaccctgaacgcatcaagcaattgtattgatagacatttaaaagataaagcagatcagaccgcaatcatttgggagggcgatgatccagcagactcaaaacacatatcttataaagaattacacagtgaggtatcaaaacttgctaatggtatgaaatctcttggagttaaaaaaggtgatcgtgtaactatttacatgccaatgattcctgaagcggcttacgcaatgctagcgtgcacaagaattggtggcattcactcagttgtatttggaggtttctc

SEQ ID NO: 308879 - DNA, 896 bp, Unknown
  Bacterial polypeptide expressing nucleotide sequence isolated from the Sargasso Sea
gaaaaaagagggaaaaagaataaactggataaagccgtatacaaaaattaaagatgttaaatacagtaagggagatgtaaaaataaaatggttctatgacggaactttaaacgcatctgtaaattgcatagatagacatctaaaaaaaaataaagataaaactgctataatttgggtcggtgatgatcctaaagtacaaaaaaagatttcatataaagagttgcatagagaagtttcaaaagcagcaaacggtcttaaagaattaggtgtaaaaaaaggtgatcgagttacgatttatttaacaatgattccagagttagcatacactatgttggcttgtgcaagaataggtgctgttcattcaataatttttggaggattttcgcctgatagtatttcaggaagaataaatgactgtgagtctgattacttaataactgcagatgaaggtgttagaggaggaaaaattattccactaaaatcaatcgctgacgaagctttagtaaattgccctaatgtaaaaaaatgtgttgtaataaaaagaacagggaaccgtattaattgggatgaaagaagagatatttggtatcatgaactaactaaaaaagtttctaataaatgtgatcctgaagagatgaatgcagaagatcctcttttcattttatatacatctggctcaacaggtaaaccaaagggtgttatgcatacaactggtggatacatggtttatgcttcaatgactcatcaatatatatttaattataagcctaaagatatttattggtgtaccgccgatattggatgggtgactggccacagctatatcatttatggtcctttatctaatggagcaactactataatgtttgagggtattccaacttatccagacagtt

SEQ ID NO: 308880 - DNA, 796 bp, Unknown
  Bacterial polypeptide expressing nucleotide sequence isolated from the Sargasso Sea
tacatcaagatggtggcaaatagttgataaatataaggtaaatacattttatactgcaccgactgcaattagagcattaatgcgtgaaggagataaaccagttaaaaaaacctccaggaaatcacttaaacttttaggaacggttggagaaccaataaatccagaggcttggatgtggtactataaaacagtaggtaattctaagtgcccaattgtagatacatggtggcaaacagaaactggaggaataatgattgctcctcaaacaggtgctattcctcttaaacctggatctgctacaaaacctttctatggaattaagccggtgcttgtagataaaaacggtaaagaaataaaaggagctggtgaaggaagattatgtatagctcaatcatggccaggacagatgagaacagtttatggtgatcatcaaaggtttattgatacatatttttctcaatttaacggaaaatatttcacaggtgatggatgccgaagagataaagatggatattactggataactggtcgagtagatgatgtaattattgtttcaggacacaacctaggaactgctgaaatcgaaagtgcatttgtagctcatccaaaagtagctgaggccgcagtagttggttatcctcatgacattaaaggtaatggtttatattgttatgtaaccttaaatgcaggagaaacagaaacaggcgaacttgaaagagatctaaaactttgggttagaaaacaaatcggacccttagcaactccagacaatattcattttactcccaggtctccc

SEQ ID NO: 308881 - DNA, 835 bp, Unknown
  Bacterial polypeptide expressing nucleotide sequence isolated from the Sargasso Sea
atgcagaaatacaaaccaaatgatgacacgaaaaagctagcgcacattggtagttttgaagaatataaggaaatgtatgattattctataagagaaccagagactttctgggctgaacaagctgaaagaatatcctggttcaaaaaatggaataatgtgtgggaatgggattttaacaaagctaacgtgaaatggtttgagggtgctaaactaaatgcatgctataactgtgtagataggcatgtcatagatggctatggtgaaaaaacagcattaatctgggaagggaataatcctgctgagtctaaagagtacaaatataatgaattactagaaaaagtacaacttgctgctaatgctttgaagaaccttggagtgaagaaaggtgacagagtatgcatatacatgcaaatgattcctgaactagctatttcagtattagcttgtgctagaattggtgcaattcattcggttgtttttggcgcctttgctccagatagcttggaggctagaatcaacgactctgagtgtaaagttttgattacacaagatacaggagtcagaggaacaaagaatgatattcctatgaaaagcaatgctaacattgctgttcaaaaaacgccatcaatcgaaaaggttctagttgtaaacagaactggaagctcaattgaaatggatgctgagagagatgtatggtggcatgatgcactagattctgccgaacctgaatgtactcctgaagaaatggatgctgaagaccctttattcatactttacactagtggatccactggaaaacaaaaaggagtaatgcacactactggaggttacatgg

SEQ ID NO: 308882 - DNA, 856 bp, Unknown
  Bacterial polypeptide expressing nucleotide sequence isolated from the Sargasso Sea
ataatttacatgccaatgattcctgaagcagttatcgcgatgttggcttgtggaagaattggtgcagtacactcagtggtattcggtggttttgcggctaatgaattagcgagtagaattgatgattcaaaagcaaaattaattgtttcagcgtcttgtggttacgaacctggcagaacagtgcactacaaacctttagtcaataaagcaatcgagctagctaatcataagccagaaaaatgtatcatttatcaaagagaaaaagataaggcagaattaaatccctctacagatattacttgggaggatgcacataaaaatgtactgccagccgaatgtgaaaagatgaatgctaatgactatgcctacatactttatacttcaggtactactggattaccaaaaggaattgttagagatatcggaggtcacatagttgcattaaaatggacaatgaaaaatatttataacattaatcaagatgatgtttggtggtcagctagtgacattggctggattgtgggtcactcttatatcgtttacgcacctttattttatggatgtacaactgttttatttgaagggaaaccagtaggcactcctgactcaggagttttttggagagttatttcagaacataaagttaaatctcttttcacagctcctactgccataagagcaattaaaaaagaagatcctaatggtgatttttttaaaaaatatgacttaagtaaatttgaaaaactttttcttgccggtgaaagagctgatcctgatacaattaaatggtttgaaaaactttcgggttctccggttatagatcactggtggcaaacagaaactagttgggcaataa

SEQ ID NO: 308883 - DNA, 889 bp, Unknown
  Bacterial polypeptide expressing nucleotide sequence isolated from the Sargasso Sea
agaaaaaagaataaaaaaaaattaagaaaaaaatcaaaaacgataaaaagacaaaaaaaaacagattcctctgaattaatttttaaagttacaaaaaaatggtctaataatgcttatgttgataggtcaaaatatgaatcaaaatataaattatcaattaaagataatgaaaatttttggagaaaagaaggaaagcgaatagattggattaaaccttatacaaaaataaaagacgttaaatacagtaaaactgatgtaaaaataaaatggtattatgatggtactcttaatgcttcagcaaattgtatagacagacatttagaagataaaaaaaataagactgcaattatatgggttggggatgatcctaaagtatcaaaacaaattagttataaagagctccacaaaaacgtaagtaaaacagctaacgcgttaaaagaattaggaataaaaaaaggagacagagtaaccatttatttaactatgattcctgaattagcatatgtgatgctagcctgtgctagaattggtgctatccattctattatatttggtggtttttctgcagactcgatagccgggagaattaatgattgccaatctaactacattattactgctgatgaaggcgtcagaggtggaaaaataatacctctcaaaaaaataactgatgaagccttaacaaaatgtcctgatgtaaaaaagtgtgtagtagtaaaaagaaccggaaatgaaattaattgggttgaaggtagagacgtttattatgacgaaatcataaaaatggcttctgataagtgtgagccagaagaaatgaacgcagaggatccactttttatcgtttatacatcaggatctactggtaaaccaaaaggcgtttacacactac

SEQ ID NO: 308884 - DNA, 994 bp, Unknown
  Bacterial polypeptide expressing nucleotide sequence isolated from the Sargasso Sea
atattttatatgccaatgattcctgaagcagttattggtatgctcgcttgtggaagaataggtgcaattcattcagtagtatttggtggttttgcttcaaatgaattggcaagtagaattgatgacagtaaagcaaaagttttgcttacagcttcatgtggttttgagccaggaagaacagttaagtataaacctcttgttgatgaagcactaaagttagcatctcacaaaattgaaaagctaatattatttcaaagaccagataatgaagtaaaattaaattctccaaatgaaattagttgggaagaagcattatcgaacgcaaaaaatgttgattgtgttgaaatgaatgcaaatgagtttgcatatattttatatacctcaggaacaacaggtattccaaaaggaattgtaagagatattggtggccacattactgctcttaagtggacaatgaaaaatatttataatattgatcaagatgatgtttggtggtctgcaagtgatattgggtggattgttggtcattcatatattgtttatgctccattatttaaaggttgtacaactattttatttgaaggtaagccggtaggaactccagatgctggagctttttggaaaataatttctgaatataaagtaaaatctctcttcacagcaccaacagcttttagagctattaaaaaagaagatccagaaggtaaatttttttcaaagtatgatctaagttcatttgaaagtttatttcttgcaggagaaagggcagacccagatactatcaaatgggcagaatctcttttaaatgttcctgttattgatcattggtggcaaaccgaaacgagttgggcaataagttctaattgtactggtatagaaatgatgaaaacaaagtatggttcagcttgtaaagcagttccaggatatgatgttaaagttattaaacctgacaacagtatagctaagtcaaacgaaatgggtgatatagttataa

SEQ ID NO: 308885 - DNA, 628 bp, Unknown
  Bacterial polypeptide expressing nucleotide sequence isolated from the Sargasso Sea
tatgaatgaaatatataagattaatgatgcttggttaaaaaatgccaaagtaaataaagaacaatatgaaaaaatgtatgaacaatcagtttcagacaatgagaacttctggtctgagcacggcaaaagaatagattggttcaaaccttatacaaaaataaaggaagtagtttacaacaaaaatgatgtaagtatcaaatggtacttcgatggaactacaaatatctcatataactgtatagaccgacatgccaaaaattctcctaacaaaacggcaataatttgggaaggtgatgatccgtcaaaagtaaaaaaaattagttatcaagaattacaaactgaagtttgtaaaatggctaatgttctaaaaaaaataggtgtgaaaaaaggtgatagagtaacaatatacttaacaatgattcctgagcttgcttacgtaatgcttgcttgtgctagaataggagcaatacactcaataatttttggtggtttttcatctgactcaattgcgggaaggataaaagattgtaattctgaatatattataactgcagacgaaggaactagaggtggaaaaacgattccacttaaagatataactgacaaagctcttgatagttgtccaaat

SEQ ID NO: 308886 - DNA, 926 bp, Unknown
  Bacterial polypeptide expressing nucleotide sequence isolated from the Sargasso Sea
gaaacggatcgactggcttaaaccgtacacaaaaatcaaggacgtctcatatgaccacgatgacgtccatattaaatggtattatgacggcacgctaaatgcctgcgctaactgcattgatcgccacctgccgtcacggggtaatcaaatagcaattatttgggaaggggacgaccccacgaacgataaacaaattacttataacgagctgcataaagaagtaagcaaatttgcaaacgctatgaaaaccctcggggttaagaagggggatagagttactatctatttaccaatgattcctgagatcgcggtcgcggttttagcctgcgcccgaattggtgccgttcattccgttatttttggggggttttcccccgaatccattgctggtcgtattctagattgtgaatctgatttggtcatcacgtcagatgagggtgtgcgcggtgggcgacctatacccctcaaagctaacaccgatgaagccctgaaaaaatgcccaaacgtaaaaacctgtatcgtcgtcaagcgcacggggggcgaaaccgattggataaaagggcgcgatcactggtatcacgagataatggcggacgcgtcaacaaattgtccacctgaagaaatgtccgcagaagaccctctctttatcctttatacctcgggttcaaccggtaaaccaaaaggtgttttacacacaaccggtggctatatggtctacgcctcaatgacccatcaatttgtcttcgattatcaggaaggcgatatttactggtgtaccgcagatgtgggttggattaccgggcattcctatattctttacggccctcttgccaacggcgctactacggtaatgtttgagggtattccaacctatcccaacacctcacgttgctgggaagtatgcgataagcataacatcaatattt

SEQ ID NO: 308887 - DNA, 878 bp, Unknown
  Bacterial polypeptide expressing nucleotide sequence isolated from the Sargasso Sea
gaaggtatcccaacttatccggattcatcaagatggtggcaaattgtagacaagtacaaagtaaatattttttatacagctccaacagcaataagagctttgatggctcaaggagaggcgcctattaaaaaaacctcaagaaaatccctaaaattattaggtactgttggtgagcctataaatccagaggcctgggaatggtattacaaaacagttggagaaagtaaatgtccaatagtagatacttggtggcaaactgaaactgggggtattttgatttcacctcagactggagcaatagatcttaaaccaggctctgccacaaaacctttttatggaattaaaccttgtataatagatcaaaatggaaatgaaattaaaggtgaaggccaagggagactatgtatttcccaatcatggcctggacaaatgagaactgtttatggagatcatcaaaggtttattgatacatacttttctcaatttgatggaaaatattttactggtgatggatgtagaagagataaggatggttattactggattacaggtagagttgacgacgtaattattgtatctggtcacaatcttggaactgctgaaattgagagtgcgtttgtagctcattcaaaagttgctgaggctgctgttgttggttatccccatgaaattaaaggtaatggtctttattgttatgtaactttaaatgcaggggaggaatcaaacggagagcttgaaagagaattaaaactttgggttagaaaacaaatcggaccccttgcaacgccagatctaattcaattttctccaggattaccaaaaacaagatctggaaaaattatgagaagaattttaaggaaaattgcagctaacgaaca

SEQ ID NO: 308888 - DNA, 901 bp, Unknown
  Bacterial polypeptide expressing nucleotide sequence isolated from the Sargasso Sea
atgtcagagaaatttaataaaatctatactcaatcaataaataatcctgaaaaattttggcaagacgcttccgatgatattttttggtttaaaaaaccaacaaaaattttaaataaatctaatcctcctttctataagtggtttgaagatggcgtgacaaatacttgttacaatgctttagatttccatattgaccaaggtaatggaaaaagaatagccttaatatatgacagtccaattacaggtaataaaaataaattaacttatgaagaattaagatcaaaagtttctaaatttgccggagcccttaagaatcagggggttatgaagggtgatagagtgattatatacatgcctatgataccagaagcagtgattgctatgcttgcttgtgtaagaataggagcaattcactcagtagtctttggaggattcgcttccaatgaactcgcaagtagaattgatgatagtaaagcaaaaatattagttacagcatcatgtggttttgagcctggcaggaccgttgagtacaagcctttggtagacgaagccattaagcaagccaagcataaaattgataagatgattttatttcaaagggctggttacgaggtcaaattaaatgcccctaaagaagttagctgggaagaagttacttcaaattctcaagaaacagactgtattgaaatgaattcaaatgaatttgcttacatactttatacttccgggactactggcacacctaaggggatagtaagagacactggaggtcatatcgttgcattaaaatggacaatgaaaaatatttataacatagatgaagatgatatttggtggtctgcaagtgacattggttggatagtaggacactcatatattgtttatgctcccattatttaaa

SEQ ID NO: 308889 - DNA, 912 bp, Unknown
  Bacterial polypeptide expressing nucleotide sequence isolated from the Sargasso Sea
aatgcactcaaaagtatttggcgttcaaaaaggagatagagtcactatttacttaacaatgattccagagctggcttatgtaatgttagcttgtacaaggattggtgcggttcactcaattatttttggaggtttctcaccagactcgattgcaacacgtataaatgattgcaaatcggattatcttattacagcagatgaaggtgtaagaggaggaaaaatcattcctttaaagaaaattgctgatgaagctttattgcaatgcccaaatgttaaaaagtgtgtagtagttaaaaggactgggaaccaagtaaattgggaaaatgaaagggatttgtcctatgaagatttgatttcaaaagcttcatctaagtgcgagccagaagaaatgaatgccgaagacccattgtttattttgtatacttcaggatctacaggaaaaccaaaaggagttttgcatactacagggggatacatagtttacgcttcgatgactcatcagtacatttttgattataaacctaaagacatttactggtgtactgccgatattggttgggttacaggacacagttatataatttacggtccactctctaattgtgctacaactattatgtttgaaggtgtaccaaattatcctgatagttccagatggtggcagatagtcgacaaatataaagtaaatattttttacactgcgccaacagcaattagagcattgatgagggaaggggatggcccagtgaagaaaacaagtagaaaaaccttaaaactattaggaactgttggtgaacctataaatcctgaagcttggttatggtattataaaactgtaggtgactctaaatgtccaatagttgacacttggtggcaaaccaaaactggaggtattctgattgctcctcagcc

SEQ ID NO: 308890 - DNA, 932 bp, Unknown
  Bacterial polypeptide expressing nucleotide sequence isolated from the Sargasso Sea
tgagtgtttcaatgacggaatactcaatgcatcttttaattgtatcgataggcatttgagcaatcctgatgctgtagcaataatttgggagagcgatgatccttctgaagataaaaaaatttcctacgggcatcttcatgatgaagtttgtaaatttgctaatttattaaaaagcagaggaataaaaaaaggtgacagagtctgcatctatatgccgatgatacctgaggcaacttatgcaatgttggcatgcgcaagaattggagcagttcactctgtagtgtttggaggattttctgttgagtcattaaaggatcgaattctagattcaaactgcgaaactgttattaccgctaatgagggaattagagggggtaaaagaattcctctgaaagaaaatgttgataaagcaattaagtcttgccctaatgtgcattcagtaattgttgtgaaaagaactggagaagaattaaatttaattaataaagttgatgtagattacttgattgaaaaagaaaaatttgaagctcattgtagttgtgaaccgatgaagtcagaagatcctttgtttattttgtatacctcaggttctactggaaagccaaaaggggttttacatacgaccggaggctatttacttggagcagctattacacataaacatatttttaattattccgatggcgatatttattggtgtactgcggatgtaggatgggttacaggccattcttatatagtttatggaccactttgtaatggggccacaaccctaatgtttgaaggagtgcctacttatcctgacgcatcgagattttgggaaataattgataaacatcaagttaatatcttctacaccgctccgactgcaattagggctcttatggcttttggtaatgaacctttaagggcctcttctagaaagtcctaaa

SEQ ID NO: 308891 - DNA, 456 bp, Unknown
  Bacterial polypeptide expressing nucleotide sequence isolated from the Sargasso Sea
cctcggacgggtgccggcgggacaaggacgggtactactggatcacagggcgcgttgacgacgtgctgaacgtatctggacaccgcatgggcacggctgaagtagagagcgcgttggtggcacacccggacgtagcggaggcagcggtggtcggttatccgcacaatatcaagggccaagggatctactgctacgtgacccttaacgacgggattaagggcacagacgagaagaaaggggaaatggtcaagaaagtccgggccaatattggcccagtggcgaccccagacctgattcagtgggcgccaggattaccgaagacgcggtcggggaagatcatgcgccgtatcctacgcaagattgccgagaacgactattccaatctcggtgacacttcaaccctcgccgaacccgcagtcatcgatgatctcatcaaaaaccggcagaacaagtaga

SEQ ID NO: 308892 - DNA, 895 bp, Unknown
  Bacterial polypeptide expressing nucleotide sequence isolated from the Sargasso Sea
tgatattaaaaaatgtatcgtagttaaaagaacgggtaatcaagtaaattgggatcatgaaagagacgtgtcttatgaggaaatagtcgctaatgcttcaacaaaatgtgaaccggaagaaatgaatgctgaggatccgttatttattctctatacttcaggttcaaccggaaaaccaaaaggtgttctacatacaacaggtggctatatggtttatgcatcaatgactcatcagtatatttttgattacaaacctaaagatgtttatttttgtagcgcagatattggttgggtaacaggacatagctatataatttatggtccattatcaaatgctgcaacaacagtaatgtttgaaggaataccaacttatcctgatttctcaagatggtggcaaatagtggacaagtataaagtaaatattttttatacagctcctactgcaataagagcattaatgaaagagggagacggtccggttaaaaaaacttcaagaaaatcattgaaattattaggaactgttggagaaccaataaatccagaagcatggatgtggtattataatgtagttggtgactctaaatgtcctatcgtagacacatggtggcaaactgaaactggtggaatattgatcgcacctcaaccaggagcaatagacttgaagcctggatcagcaacaaagccattttatggaataaaaccggttattgtagatgaatctggaaaagttcttaaaggtgcgtgtaaaggaaggctttgtatgtctcaatcatggcctggacaaatgagaacagtttatggaaatcataaaagatttatagaaacttacttttcccaatttgatggaaaatattttactggggatgggtgtagaagagataaagatggatattat

SEQ ID NO: 308893 - DNA, 853 bp, Unknown
  Bacterial polypeptide expressing nucleotide sequence isolated from the Sargasso Sea
acttgataatatatctaataaaactgctataatttgggagcctaataacccagaagaagatgtaattaaaatatcatataaggaattatatgaaaaaacatgtcaattttcaaatgctatggaagctaatggagtgaaaaagggtgacagggtaattatatatatgccaatggttcctgaagcagctattgcaatgctttcatgtgcaagaattggagctattcattcaattgtttttgcaggattctcatctaacgctctagcggatagaattaatgattgtaatgctaaaatggttttaacttctgatgggaattttagaggggctaaaaacattcctgttaaatctgttgttgatgatgctttagataattgtaaatctgtttctaaagtaattgttttaaaaagaactggagaaaaaataaatatgattaatggtagagatttatggtggcatgaagtaattgaaaatcagtcaagtgaacatgaggcagcgattttagattctgaggatatgttatttattttatatacttctggatctactggaaaacctaaaggtgttgttcatactaatgcaggctatatgatttatacttattattcatttttaaatgtatttcagtacaaaaaggaagatatatattggtgcactgccgatattggatggattactggacattcttacatagtatatggacctcttttggctggagccactactttaatgtttgagggagttcctacatttcctgatgctggaagattttgggaaatagttgataaacataaggtaaatcaattttatactgccccaacagctataagggctttacaagcttatggtcttgaa

SEQ ID NO: 308894 - DNA, 830 bp, Unknown
  Bacterial polypeptide expressing nucleotide sequence isolated from the Sargasso Sea
tggacgtatccaagattgcgatagtagtttaattataacagcggatgagggcattcgcggcggcaaaccaattccattaaaagctaacacagatgcagcgttgaactcatgcccgatgtgtaaaactgttgtagtagtgaaaagaactggcggaaagatagattgggtcgaaggtagggactattggtatcatgacattacttcagcgcagtcagaggaatgtcagccagaagaaatgaacgctgaggaccctctcttcatcttatacacgtcgggttcaacaggaaaacccaagggtgtaatgcatacctcggggggttacatagtttacgcgtcaatgacccatcggtatgttttcgattataaagatggtgaagtttattggtgtacagctgatgtaggatgggtgaccggtcattcatacattctgtatggaccactagcaaatggtgcgacaactttgatgtttgagggtgttccaaattatccaaactcaagccgtttttgggatgtatgcgataagcataatgtatctattttttatactgcacccactgctttaagagcattgatgagagagggtgagggtcctgtaaaagccacaagtcgcaaatcccttaggcttctggggtctgttggggagccaataaaccctgaggcttggctttggtattacaacgtggtgggggacggcagatgcccaattgtcgacacttggtggcaaaccgaaacaggcggtatcctcataactccccttcctggggcaacggatctaaagccagggtcagccacgaagccattttttggaataaaacgcaataatcgttgat

SEQ ID NO: 308895 - DNA, 955 bp, Unknown
  Bacterial polypeptide expressing nucleotide sequence isolated from the Sargasso Sea
gcttggatcgacacttaaaacccgaggcgatcaaaccgccattatatgggatggagacgacccatcaatctcaaaaacctttacctattctgagctgcataaagaggtgtgccaactctcaaatgccctaaagagcgaaggtataaaaaaaggcgacatagtaactatctacatgccaatgataccagaagccgccgtcgcgatgctcgcatgttcacgaattggcgctattcactccgtagtcttcggcggtttttccccagaagcgcttgctggacgcattcaagattgtgggtcaaattgcataatcacagctgatgaaggtgttagaggtggaaaatttattccattaaaaactaatacggatgctgcagttacaaaatgcccaacaatcaagaaggtttttgtggtgagacataccggaggggatattgattggaatgagaaacttgatagatggtatcatcagtcaatatcagccgccagtgtggattgcccgccagaggaaatgaatgcagaagatccactgtttattctttatacctctggctcaacaggtaagcccaaaggcgtcttgcatacaaccggcggttacatggtttatgcttccatgacacacgaatatgtttttgattatcaggaggatgatatttattggtgtgctgctgatgttggttgggtaaccggtcacagttatataatttacggccctcttgctaatggcgcaatcacaaccatgtatgaaggtctaccaaactggccaagtgcatctcgcatatgggaaatagtggataaacattcaatcaatattctttatactgccccaacggctattcgagccttaatgcgagaaggcaacggtccagttaaaagaaccaccgcaaatcgctccgtcttctggggtccgttggtgagccgattaatccagaagcttggctgtggtattacaaagtag

SEQ ID NO: 308896 - DNA, 415 bp, Unknown
  Bacterial polypeptide expressing nucleotide sequence isolated from the Sargasso Sea
gatcacaggtagagttgatgatgttataatagtctcaggtcataatttaggtactgcacaaattgaaagtgcatttgtatcacacaaagatgtttctgaagcagctgtagtcgggtacccccatgatataaaaggtaatggtttatattgttatgtatctctcaaagttggtgtggattcttcacaagaattagttctagatttgaaaaaaactattaaagaaagaattggcccaattgctactcctgattttatacatattaccaatggcttgcctaagacaagatcaggtaaaataatgagaagaattctaagaaaaatagcttccaatgattttgaaaatctgggagatatttcaacattagcagatccatcagttgtagataacttaattgaagatagaaaaaataaatag

SEQ ID NO: 308897 - DNA, 750 bp, Unknown
  Bacterial polypeptide expressing nucleotide sequence isolated from the Sargasso Sea
ggcgttcctacctatcctgacgcatcacgattttggcaaatatgtgaaaaatataaagtaaatcaattttatacggctccaacagctataagagccttgatggggctaggtgacgaatttgttaataaaaatgatttgtctagcattcgaattctaggcactgtaggagagcctattaatcctgaagcatgggagtggtataatcgggtagtaggtaaaaacaagtgcccaatagtcgacacgtggtggcaaaccgaaacaggtggaattcttattacaccgctaccaggagctacaacaaccaagcctggttctgcaactttacccttttttggtattgagcctgcaattcttgacccaaactctggagaagagatatctgatgaggagtgtgaaggcgtattggttattaaggatagttggccaggacaaatgcgtactgtttttggagatcacgacaggtttgtttcgacgtattttaatgattataaaggttattacttttcaggtgatgggtgtagaagggataaagatgggtattactggatcactggaagagtcgatgacgttttaaatgtttcaggtcatagaatgggaacagcagaaattgaaagtgctttagtcgctcatccaaaagttaatgagagtgcagtagtcggtttcccccacccaattaaaggccaagggatatacgcatatgtatctctaatgtccggagagaaaaactctgatgaacttttgaaggagctt

SEQ ID NO: 308898 - DNA, 872 bp, Unknown
  Bacterial polypeptide expressing nucleotide sequence isolated from the Sargasso Sea
agtaaaaattaaatggtattacgatggcactttaaatgcttcagcaaattgcatcgaccgtcatttaaaaaaaaatgcaaacaaaacagccatcatctgggttggagatgatccatctgactcaaaaaagatttcatatagagagcttcatcaaaatgtttgtagggttgcgaatggtttaaaaagtattggtattcaaaaaggagacagagttacaatttatttaacaatgatccctgagttagcttacgtaatgctagcatgcgcaagaatcggtgctgtacattcaattatatttgggggtttctctccagactcaattgctacaagaataaatgattgtgagtcagattatttaattactgcagatgaaggtataagaggtggaaaaattattccacttaaaaaaattgctgatgatgctttaactcaatgtcctgatgtaaaaaaatgtgttgttattcaaagaactggtaatcaagtaaattggaataatgatagagatatctcttataaagaaatgattgcttcagtatcaaacaaatgtgaaccagaagaaatgaatgctgaagatccgttatttatactttatacatctggctctacaggaaagccaaaaggtgttctacatacaacaggcggatatatggtttatgcttcaatgactcatcaatatatttttgattacaaaagtaatgacatatattggtgcactgctgacataggttgggtaacaggtcatagttatattatttatgggcctttagctaatggtgccacaactatcatgtttgagggagttccaaattatcctgacagctctcgttggtggcaaatagtagataaatataaagtaaatattttttatactg

SEQ ID NO: 308899 - DNA, 824 bp, Unknown
  Bacterial polypeptide expressing nucleotide sequence isolated from the Sargasso Sea
cctggaggagtatcaaaagatttacgatgaggcgaaggaagaccttgaaggtttttgggattcccgagcaaaagtactcccatggaccgcaccgtactcgaaggtgcttgactggcatcctcctcatgcaaagtggtttgttgatgggcaaatcaatgtttctgaatgctgtctggatcatcatattgcttcaggcaaaggagataaaaaagcacttgtgtgggtcggtgagcctgaaggtgaacgacgtgaatttacgtattcccagcttcatgctgaagtgtgtcgggtcgctgcagggctgcaaaaaatcggcatcaagcccggtcaggttgtttccatatacatgccgatgacaccagaactggttattgccatgctcgcatgcgcacgtatcggtgctgtgcactctgtcatctttggtggattttcaagcgaagcgattgctgatcgaaatcaggacgctcaggcggtcgctgtcataacggctgacggcggatggcgtcgtggaacgcaattaccgctcaaggagaatgtggacaatgcgctgtcgtcgtcggcgcatgaatcatcaactgtcaagcatgtgatcgtcctccggcgaacaggacaaccggtcgacatggtggatgggcgcgacatctggtggcatgatttgatagaaggaatgcctgctgacacacctgcagtcccaatggattctgagtcgcccctgttcattctctacacgagtggttcgacaggaaagccaaaaggcatcaagcacacaactggtggatatattctctgggcaaagacgacaacggagtgggtctttgatattc

SEQ ID NO: 308900 - DNA, 867 bp, Unknown
  Bacterial polypeptide expressing nucleotide sequence isolated from the Sargasso Sea
ttctgaagatgtgttttggttcaggaaacccagtaaaattttaaataaatctaaccctcccttctacaaatggtttggggatggcattacaaatacttgctacaatgcattagactttcacatagaaaaaggtcgaggagataaaactgcattaatttacgatagccctatcactggcaacaataccaaatttacttttaatgaattaaaaaaaaaagtttcaagatttgcaggcgccttggacaagcaaggaataaaaaagggagatagggttataatttatatgcctatgataccagaagctgttgtagcaatgcttgcttgtggaagaattggagcaattcattcagtagtttttggtggatttgcatcaaatgagttggctagtagaatagatgatagtaaagccaaaatactaattactgcttcatgcggatttgaacctggaaggacagttgaatatcgtcctttagtagatagtgcattaaaacttgcaaaacataaaattgaaaaagtaattttgtatcaaagaaaagaccatgaaataaaacttaatgaacctctagagattagttgggaacaatctttagtaaatgctgtcgacaaagattgtattgaaatggactcaaatgatttagcttatattttatatacatcaggaaccacaggtgtgcctaaaggaattgtccgagatgtaggaggacatatagttgcgcttaaatggaccatgaaaaatatttataacattgatactgatgatgtttggtggtcagctagtgatataggttggattgttggacattcatatattgtttatgcgcctttgtttaaaggatgtactactattttatttgaaggaaagccagt

SEQ ID NO: 308901 - DNA, 733 bp, Unknown
  Bacterial polypeptide expressing nucleotide sequence isolated from the Sargasso Sea
atgtcctatttgtcgatactttggtggcaaactgaaacaggaggtattttaatttccccacaaacaggtgccatagaacttaaacctggttctgcaacaaaaccattttatggtattgagcctgttattgttaataaagatggtaaaatcttagagggtgaatgtgagggaatgttgtgtatgaatcggtcttggccaggtcaaatgagaaccgtttatggagatcatgaaagatttatagatacatatttttcacaatttgatggaaaatacttcactggtgatggctgtagaagagattcagatggttattattggataactggaagggttgatgatgtaataattgtttctggtcataatttaggaaccgcagaaatagaaagtgcttttgtaagccatccaaaagtttctgaagcagctgttgttgggtaccctcatgatattaaaggaaatggactttattgttatgtttcactaaaagttggtgaaaatttttctgataatctcaaagaagaattaaaacaacttgtaagaaaaaaaataggcccaattgcaactccagatttaattcattttacaaatggattacctaaaacaagatctggaaaaataatgagaagaattttaagaaaaattgcagctaacgaacatgatcaacttggagacactactacattggcagatcctggggttgtaaaagatctaattgataaaagacttaataaataat

SEQ ID NO: 308902 - DNA, 925 bp, Unknown
  Bacterial polypeptide expressing nucleotide sequence isolated from the Sargasso Sea
taaaggtgttcttcatacttcaggaggttatcttgtttatgcatctatgacacatgagtatatatttaattataaagaaaatgatatttattggtgtactgcagatataggttggataactggacatagttatattatttacggtccattatctaatggggcaactactttaatgtttgagggagttcccaactatcctacattctcaagattttgggaaatcgtagataagcataatgtaaatattttttatacagctcccacagcaataagagctttaatgagagagggtgatgagtttgtaaaaaaaactaaaagaaactctcttaaattgttaggaactgttggggagcctataaatcctgaagcttggaaatggtattatgaaattccaggcaattcaaattgtccaatagtagatacttggtggcaaactgaaacaggcggcatattgatttcccctcaaactggagccattgatctaaagccggggtcagcttctaaacctttttatggaattgagccatgtattgttgataaaaatggaaatgaattaacaggtgaggctgagggtatgttatgtctaaaagattcttggccaggtcaaatgagaaccgtgtatggagatcatgagagatttatttctacatatttttctcagtttaatggaaagtactttactggagatggttgcaaacgagacaaagatggttatttttggatcactggtagagttgatgatgttataatagtttctggtcataatttaggaacagcagaaatagaaagtgcttttgtttctcatgaaaaagtgtcagaagcagcagttgttggatatcctcatgatattaaaggaaacggactttattgttatgtgtcattaaaagtgggtgagcagcctagtgaagaattaagaaaaaactag

SEQ ID NO: 308903 - DNA, 775 bp, Unknown
  Bacterial polypeptide expressing nucleotide sequence isolated from the Sargasso Sea
taaaagaactggaaatagaattaactgggattcttcaagagatatttggtaccatgaaatgatcaaaaatgtttctaataaatgtgatcctgaagaaatgaatgcagaggatcctctgtttattctttatacgtctggatcaacaggaaaaccaaaaggagttttgcatactactggtggttatatggtttatgcttcaatgactcatcaatatatatttaattataaaccaaaagatgtttattggtgtacagctgatattggttgggtaacgggtcatagttatataatttatggaccattgtctaacggtgcgaccactattatgtttgaaggaattccaacttatcctgacaattcaagatggtggcaaatagttgataagtataaagtaaatattttttatactgctccaacagcaattcgtgcacttatgagagatggtgataagccagtaaaaaagacttcaagaaaaactctaaaattattaggaactgtaggtgagcctataaatccagaagcttggcaatggtattataaaacggttggggactcgagatgtcctatagttgacacttggtggcaaactgaaactgggggtattttaataagtccacaaacgggtgcaataaatttaaaacctggttcagcaacaaaacctttttatgggattaaaccagtaattgtagataagtcaggtaaagttttaaaaggagaagcacaaggtagactgtgtatagctcaaacatggcctggccagatgagaactgtatat

SEQ ID NO: 308904 - DNA, 775 bp, Unknown
  Bacterial polypeptide expressing nucleotide sequence isolated from the Sargasso Sea
gctgataggcgcatggagaagaggagaaattgttcctctaaaggagaacgtcgacaactcattagaactaactgaatttattgaaagtgtggttgtagtaaaaagaactggacaagaagtaaatatgaaagatggaagagattactggtatgaggagattgttgaagagcagtctgcagagtgtgagcctgaagtaatgaatgcagaagacttgctctacatactttatacttctggaactacagcaaagccaaaaggcattgttcacacacaggctggttatttaactggcgtaactactactcatagtgcagtatttgatgttaaagatgatgatatttattggtgcgcagcagattgtggatgggttactggacatagctatattgtctatggaccattagctaacaagacaacaagtgttatgtatgaaggagcacctaatgctccagatgaaaaaagattatggagccttgttgaaaaatataaagtaaatattttttatacagcaccaactgcgattagagcattcatgaagtggggagttgaacatccaaaagctcacgatttaagctcgttaagactacttggatctgttggagaaccaataaaccctgaagcttggatgtggtatcacgaaaatattggtaatgagcaatgcgctattgttgatacatggtggcagacagagacaggttccattatgatttctccactacctggtattacaagtacaaaaaccaggatcagcatgtggaccattaccaggggttga

SEQ ID NO: 308905 - DNA, 631 bp, Unknown
  Bacterial polypeptide expressing nucleotide sequence isolated from the Sargasso Sea
atgtggtattacaaaacggttggtgactctagatgtcctatttgccactatcctgataattcaagatggtggcaaatcgtagataaatataaagtcaatacattttatactgctccaactgcaattcgagctttgatgagagagggagatggaccagttaaaaaaacaagcagaaagtctttaaaattgttaggtacggttggcgaaccaatcaaccctgaagcttggatgtggtattacaaaacggttggtgactctagatgtcctatagttgatacctggtggcaaacagaaacagggggaatattgatagctcctcagcctggtgctatcgatttaaaaccgggttcagcaactaaacctttttatggaattaaacccgtgctagtagacaaagacgggaaaataattaaaggggaagggcaaggaagattgtgtatggctagttcttggccgggacaaatgagaactgtatatggggatcatcaaagatttattgatacttacttttctcaatttgatggaaaatactttactggtgatggatgtaaaagggataaagatggttattattggataactggaagagtagatgatgtaattattgtttctgggcacaatctggaacagc

SEQ ID NO: 308906 - DNA, 847 bp, Unknown
  Bacterial polypeptide expressing nucleotide sequence isolated from the Sargasso Sea
ggtgctacgacaataatgtttgaaggagttccaaactatcctgataattcaagatggtggcaaatcgtagataaatataaagtcaatacattttatactgctccaactgcaattcgagctttgatgagagagggagatggaccagttaaaaaaacaagcagaaagtctttaaaattgttaggtacggttggcgaaccaatcaaccctgaagcttggatgtggtattacaaaacggttggtgactctagatgtcctatttgccactatcctgataattcaagatggtggcaaatcgtagataaatataaagtcaatacattttatactgctccaactgcaattcgagctttgatgagagagggagatggaccagttaaaaaaacaagcagaaagtctttaaaattgttaggtacggttggcgaaccaatcaaccctgaagcttggatgtggtattacaaaacggttggtgactctagatgtcctatagttgatacctggtggcaaacagaaacagggggaatattgatagctcctcagcctggtgctatcgatttaaaaccgggttcagcaactaaacctttttatggaattaaacccgtgctagtagacaaagacgggaaaataattaaaggggaagggcaaggaagattgtgtatggctagttcttggccgggacaaatgagaactgtatatggggatcatcaaagatttattgatacttacttttctcaatttgatggaaaatactttactggtgatggatgtaaaagggataaagatggttattattggataactggaagagtagatgatgtaattattgtttctgggcacaatctggaacagc

SEQ ID NO: 308907 - DNA, 855 bp, Unknown
  Bacterial polypeptide expressing nucleotide sequence isolated from the Sargasso Sea
agcttacgtaaataaatctcaatatgaaaaaaaatacaaattatctataaaagataatgagagtttttggagaaaagagggaaaaagaataacttggataaaaccttacacaaaaattaaagatgtaaagtacagcaaaaaagaagtgggtattaaatggtattatgatggaactttaaacgcttcggcaaactgtatagacagacatttggaaaaaaagggaaataagactgcaattatttgggtaggggacgatccgtctgacactaaaaaaataacttataaagaacttcacaaaaaagtttgtaaagcagcaaatggtttaaggagtattggtatacaaaaaggagatagggtaactatttatttaacaatgatcccagaactggcttatgtcatgttggcttgtgctagaattggtgcaatacactcgataatatttggaggattttcgcctgactccattgcaacaagaataaatgattgtgaatcagattacgtaattacagcagacgaaggagtaaggggaggaaagatcattccgcttaaaaaaattgccgatgaagctatgatgcaatgccctaacgtaaaaaaatgcgtagtggttaaaagaacaggaaatcaaataaattgggataacgaaagggatgtatcttatgaagaaattacctcaaatgcttctgataaatgcccccctgaggagatgaacgccgaggatcctctttttattctttatacttctggatcaacaggaaaacctaaaggagttttacatactactggtggatatatggtttatgcctctatgacacatcaatatatttttgattataaaaatagagatgtttattggtg

SEQ ID NO: 308908 - DNA, 633 bp, Unknown
  Bacterial polypeptide expressing nucleotide sequence isolated from the Sargasso Sea
cgatgatgcgcaccatctatggggaccacgaccgcttcgagagcgcctacttcggggactaccccgggcgctacttcacgggcgaccgggcgcgccgcgacgaggacggctactactggatcaccggccgcaccgacgacgtgatcaacgtttcgggccaccgcctcggcaccgccgaagtggaggccgccatcatgacccacccgggcatcgccaaggcggcggtcgtcggcttcccccacgacgtgaagggcaccggcatctacgccttcgtcgtgccgaaggacagcgcggaaggggcggcggcggcggcggcggcgtcggaaaaggagctgcagggcgcggtgcgggcggcggtgaggaaggtcatcggccccgtcgcatcaccggacgtcgtgcaagtgacgcgggccgtgcccgaaacgcgctccggaaaaatcatgcgccgaatcctccgcaaagtggccgagggagagacggactttggggacacgtcgacgctgctcgaccccaccatcgtgccggagctcatctcagggcactacgacatttttccaaaggcggaaatcgtcgagattgtagaaataaacggcgccgagagcgaccaaggcgtcgccagcagcagaggctgag

SEQ ID NO: 308909 - DNA, 762 bp, Unknown
  Bacterial polypeptide expressing nucleotide sequence isolated from the Sargasso Sea
aatgaacatttttggaaaaaagagggtaaaagaataaattggataaaaccttacacaaaagtaaaagatgttaaatatagcaaaaaagaagttaatataaaatggtattatgatggaacattaaatgcatcggttaattgtattgatcgacatttggggaaaaaagaaaataaaacagcaattatttgggtaggggatgatcctgctgactctaaaaaaattacttataaagaacttcataagaatgtttgtaaagctgcaaacggtcttaaaagcataggcgtacaaaaaggagatagagtaacaatttatttaacaatgattccagagcttgcatatacgatgttggcatgcgccaggattggtgctgtacattcaattatatttggtggattttctcctgactccattgcaacaagaattaatgattgcgagtcagattatgtcattacagcagacgagggagtaagaggcggaaaattaataccactaaaaaaaattgctgatgaagcaatgatgcaatgtcctaatgttaagaagtgcgttatggttaaaagaaccggaaatcaagttaattgggacaatgaaagagatgtgtcttatgaagaaattatttcaaatgtttcagacaaatgctctccggaggaaatgaacgctgaagatcctttgtttattctttatacatctggttcaacaggcaaaccaaaaagagttttacacactactggtggctacatggtttatgcttcgatgacccatcaa

SEQ ID NO: 308910 - DNA, 336 bp, Unknown
  Bacterial polypeptide expressing nucleotide sequence isolated from the Sargasso Sea
ctcatccaaaagtagctgaagcagcagttgtaggatatccgcatgatattaagggaaacggattatattgttatgtgactttaaatgcgggtgaaaaaccttctggggatttggaaagagaattgaaactgtgggttagaaaacaaattggacctattgctacacctgaccttatacaatttgctcctggattaccaaaaactagatctggtaaaataatgagaagaattttaagaaagattgccgcaaatgaacatgaccaattgggtgatactacgacgcttgctgatccttctgtggttgaaagtttagtagaaaatagacaaaataaataat

SEQ ID NO: 308911 - DNA, 966 bp, Unknown
  Bacterial polypeptide expressing nucleotide sequence isolated from the Sargasso Sea
gcagataggcgctgttcctctattatatttggtggtttttcacctgactctatcgctacaagaatatctgactgtgagtcagaatatttaattacagcagatgaaggtgttagaggcggaaaaataattccactaaaaaagatcgctgatgaggctctagaccagtgtccgggtgttaaaaagtgtgtggttgttgaaagaactggaaaccaagtagattggaacaacgagagagatgtttcatataaagaattaatttcatctgtgcctgctaagtgtgatccagaagaaatgaatgccgaagacccattattcatcctctacacttcaggatctacaggaaaacctaaaggtgttcttcatacaactggcggatacatggtttatgcatctatgactcatcaatatatttttgattacaaagcaaatgatatttattggtgcactgcagacattggttgggttacaggccatagctatataatttatggaccgctttctaatggtgcaacaacaataatgtttgagggagttccaaattatcctgacagttcaagatggtggcaaattgtagacaagtacaaggtaaatattttttatactgcgccaacagctataagagcattaatgagagagggtgataaaccagttaaaaaaactagtagaaaaactttaaaattacttggaactgttggcgaaccaattaaccctgaggcatggatgtggtatttcaaaactgtaggggactctaaatgtcctatagttgatacatggtggcaaaccgaaacaggaggaattttaatagcccctcaacctggagctatagatttaaaaccaggatctgctactaaacctttttatggtattaaacctgtcttggttgataaagatgggaaggtagttaaaggagagggtaaaggacgactttgcatggcatcttcatggcctggccagatgagaacagtt

SEQ ID NO: 308912 - DNA, 802 bp, Unknown
  Bacterial polypeptide expressing nucleotide sequence isolated from the Sargasso Sea
attggatgggttacaggtcacagctacataatctatggtcctttatcaaatggtgccacaacgattatgtttgaaggtgtacctaattaccctgacagttctagatggtggcagatagttgacaaatacaaagtcaatattttttacacagcgcccacggcaatacgagcattgatgcgagaaggtgatggtcctgttaaaaaaaccagtcgtaaatcactaaagctcttagggacggtaggagaaccaataaatcctgaggcatggatgtggtactacaaaactgtaggagagaaaaaatgtcctatagtagatacatggtggcaaactgaaacaggtggtattttgatttcaccacagcctggagctataaatttaaaaccaggttctgctacaaaaccattttatggaattaagcctgtaattgtcgatgaatctggaaaagtattgaagggagcctgtaaaggaagattgtgtatggctcaatcatggcctggtcaaatgagaaccgtttatggtgatcataaaagatttatagatacttatttctcccaatttgatggaaaatattttactggagacggatgtagaagagacaaagatggctattattggattactggaagagttgatgatgtaattattgtttctggacataacctgggaacagcagaaatagaaagtgcttttgtggcccattcaaaagttgctgaagctgctgtagtgggatttcctcacgaaattaaaggtaatggactttactgttatgtaactttaaatgctggagaaaatcctagtggag

SEQ ID NO: 308913 - DNA, 441 bp, Unknown
  Bacterial polypeptide expressing nucleotide sequence isolated from the Sargasso Sea
gaagagataaagatggatactattggattaccggtagagtggatgacgttattatagtttctggtcacaatttaggtactgctgaaatagaaagtgctttcgttgcacacccaaaagtagctgaagcagcagtagttggatatccgcatgatattaaaggaaacggtttatattgttatgtaactttaaatgttggagaagaaccgaatggagaacttgagagggatttgaagttatgggtaagaaaacaaataggtccaatagcaacaccagacttaattcatttttcccccggtcttcctaaaacaagatcaggaaaaataatgagaagaattttaagaaaaattgctgcaaatgaacacgatcagcttggtgatacgacaacacttgctgacccttcggtagtgaaaagtttagttaaagagagaaaaaatatttaaa

SEQ ID NO: 308914 - DNA, 801 bp, Unknown
  Bacterial polypeptide expressing nucleotide sequence isolated from the Sargasso Sea
ctggtcgaggggaaatacggctcttatttatgatagcccggtaacctctaatataaagaagttttcatttacagagttacgagatgaagtggcattatgtgctggcgcgctaaatcagctgggtgttgttaaaggcgatagggtcattatttacatgccaatgatccctgaaacaattattgcgatgcttgcttgtgcccgtattggagcgattcatggtgttgtattcggaggatttgcttctgccgagcttgctgtccgtatagatgatgccaggccaaaagtaataatatcggcgtcatgtggtatagaaattaatcgaattatcccctatatgcctttgctaaacgaggctatcgatatcgcaacacacaaacccgggaatgtgattgtagttcaaagacccgaacttcaatcagaactcgaaaaagccagagatttgaactgggaagatgctctggcgtcagcaacgccttcggaatgtttatcgctaaaatcaacagaccctttgtacatcctctatacatctggcacgactggacttccaaagggagtggtgcgagacaatggtgggcatgctgttgctctgaattttacaatgaaagcaatttataatgttgatgtaggtgatgtttattgggctgcttcggatgttggctgggtcgttggacattcatacattgtctatgggccgttattgagaggatgcacaaccgttttgtatgagggtaaacccgttggtaccccagatgcgggagccttttggagagtaatttcagatcataaggtgaaggctttttt

SEQ ID NO: 308915 - DNA, 976 bp, Unknown
  Bacterial polypeptide expressing nucleotide sequence isolated from the Sargasso Sea
gatgtttggtatcacgacatgataaaagatgtaccaagtaattgtgaacctgaagaaatgaacgcagaagatccgttatttattctttatacatcaggatcaactggaaagccaaaaggggtattacataccactggaggatatatggtttatgcttccatgacacatcaatatatctttaattataagccaaatgatatttattggtgtacagcagatattggatgggtaactggccacagctatataatttatggaccgttagctaatggtgcaacaactataatgtttgaaggtgtcccaaattatccggatagctcaaggtggtggcagatagttgataagtataaagtaaacactttttatacagcgccaactgctattagggctttgatgagagagggtgatggcccagttaataaaacttcgagaaaatctttaaaattattaggaactgttggagaaccaataaatccagaggcatggatgtggtattacaaaactgttggaaattcaaattgtccaatagttgatacctggtggcagacagagacgggaggaattcttatagcgccacaaaccggtgcaattccacttaaacctggatcagcaacaaaacctttttacggaatcaaaccagtattggttaataaagacggtagagaaataaaaggtgaaggtgaaggtagactttgtatagctcaatcttggcctggtcaaatgagaactgtatatggcgatcatcaaagatttattgatacatatttttctcagtttgatggcaaatattttactggagatggatgtaaaagagataaagatggttactattggataactggtagagttgatgatgtaataattgtgtctggtcataatttaggtactgccgaaattgaaagtgcctttgttgcgcacccaaaagtagctgaagctgctgtggttggatatcctcatgatattaaaagtaatggtt

SEQ ID NO: 308916 - DNA, 894 bp, Unknown
  Bacterial polypeptide expressing nucleotide sequence isolated from the Sargasso Sea
attacttggatgaaaaagtatacaaaaattaaagatgttaaatacagtaaagatgaagttaaaatcaaatggtattacgatggaactctaaatgcctcagcgaattgtatagatagacatttaaagaaaaatcccagcaaaactgcaatcatttgggttggcgatgatcccgctgatactaaaaaaatttcttacaaagaattacaccagaatgtatgcaaagctgcaaacggtttaaagagtttgggtatacaaaagggagatcgagttacaatttatctgacaatgatccctgagttagcttacattatgttagcttgcgcaaggattggtgctgttcactcaattatttttggtggtttttcacccgattcaatagctactagaattacagattgtgagtctgaatatttaataactgcagatgaaggagttagaggtggaaaaataattccgctaaaaaaaattgctgacgaggcattagatcaatgtcctggtgtaaaaaaatgtgttgtagttgagagaacaggaaatcaagtaaattggaataatgaaagagatgtatcatataaagatttaatttcttcagtgccatcaaaatgtgaacctgaagagatgaatgcagaagatccgctatttattctgtatacttctggttctaccggtaaaccaaaaggtgttctccatacgacaggcggttatatggtttatgcttcgatgacacatcaatatatatttgattacaaagcaaatgatatttattggtgtactgcagacattgggtgggttacagggcacagttatattatttatggtccactttcaaacggggcaactactataatgtttgaaggagttccaaattatcccgacagttcaagatggtggcaaatt

SEQ ID NO: 308917 - DNA, 659 bp, Unknown
  Bacterial polypeptide expressing nucleotide sequence isolated from the Sargasso Sea
aggagtaagaaaaggagacagagttacaatttatttaacaatgatacctgagttggcatatacgatgctggcatgtgcaagaataggagctgtacattcaataatttttggcggtttttcggcagacagtattactggtagaattaatgattgtaagtctgactatattattactgctgatcaaggtgttagaggtggaaaaattatacatttaaaagaaacagttgatgaagctcttttaaattgtccaaatgttaaaaagtgtgttgtagtaaaaagaactggaaacagaattaattgggatgaaagtagagatgtttggtatcacgatataactaaaaaagcttctaagaattgtgaacctgaagaaatgaacgcagaagatccattgtttattttatatacatctggatccacaggaaagccaaaaggagttttacacactactggtggttatatggtttatgcctcaatgactcatcagtatattttcaattataaaccaaaagatatatattggtgtactgcagatattggttgggtcacaggtcacagttatattatttatggacctctttcaaatggagcaacaacaattatgtctgaaggtattccaaattatccggattggtctaggtggtggcaagatagtagataaa

SEQ ID NO: 308918 - DNA, 763 bp, Unknown
  Bacterial polypeptide expressing nucleotide sequence isolated from the Sargasso Sea
aaacttaatgaaatttatgaaaattctataaaaaatcctgaaaaattttggctggaagcttcaaaagatatcttttggtttaaaaaaccaaccaaaattctaaacaaatcgaaccctccattctataaatggtttgaagatggagtcacaaatacttgttataatgcattggacattcacattgatcaaggaagaggtaaaaaaacagctttaatctacgatagtcctattacaggtaacaaaagtcagttcacttatgaagaattaaagtcaaaggtctctaagtttgctggagcattaaaagcacaaggcgcaaataaaggtgacagagtgatcatttacatgccaatgatccctgaagcagtggttgctatgcttgcttgtgcaagaattggtgcaattcactctgttgtctttggtggatttgcctcaaatgagcttgcaagcagaattgatgacagtaaagcaaaaatattagtgactgcatcgtgtggttttgagcctggaagaactgttgagtacaagccacttgttgatgaagctattaaaatagccagtcacaaaattgaaaagatgattttattccaaagacctggtcacgaagttaaattaaatgctccaacagaggtcaactgggaggaagtagtttcaaatgctaaagatactgactgtgttgagatgaactcaaatgagtttgcttatattttatatacgtcaggtacaactggtactccgaaggggatagttagagatatcgggggtc

SEQ ID NO: 308919 - DNA, 450 bp, Unknown
  Bacterial polypeptide expressing nucleotide sequence isolated from the Sargasso Sea
atggatgtagaagagataaagacggttactattggattacaggaagggttgatgatgtaattattgtttcaggtcataacttaggaactgctgaaatagaaagtgcttttgtttctcataaagatgtatctgaagcagcggtagtaggctaccctcatgatattaaaggaagtggtttatattgttatgtttctttaaaggtgggtatagaatcatcagatgatttactactagatttaaaaaaaaccataagagaaaaaattggtcctattgcaacaccagattttatacatataacttctggtttaccaaagactaggtcaggtaagatcatgagaagaatacttagaaaaattgcttctaatgatttcagtaatttaggagatacttcaacgctagcagacccaagtgtggtcaatgatttaatagagaatagaaaaaataaataag

SEQ ID NO: 308920 - DNA, 787 bp, Unknown
  Bacterial polypeptide expressing nucleotide sequence isolated from the Sargasso Sea
attacagcagatgcaggttatagacgtggggttccatctgctctaaaaacaaatgttgatgcggcattagaaaatggtgctcaaaccgtcgagcacgtagtagttgttaaccggtgtgatacagaaatacaaatgattgaagggcgtgaccactggtggcatgaactagttgaaaaagtagcccctgattgccctgccgaatcattagacagtgaagatcttctttatttgctttacacatcgggtacaactgcaaaacccaaaggcattatgcatacaactgcaggatatttaactcaagtcatgtacacgcatcgatataccttcgatttaaatcgcgaggaggatatttattggtgtgcagcagacatcggatgggttaccggacatagttatatcgtttacggccctttagccaatggttgcacatcagtgatatacgaaggcacaccggatactcctcgttccgattttcgttcagacgattcatcagaatggtctaaagatcgattatgggacattattgaacgctatggagttacccagttatataccgctccgacagctataaggacttttatgaagtggggtgcacaagaacctgcttcgcatgatttgtcctctttgcgtgttttaggaacagtaggggagccgataaacccagaagcatggatgtggtatcacgaaaatattggaggagaaaaatgtccgattgttgatacgtggtggcaaacggaaaccggaggtcacatgattacaccacttccaggtttgactacaactaagc

SEQ ID NO: 308921 - DNA, 676 bp, Unknown
  Bacterial polypeptide expressing nucleotide sequence isolated from the Sargasso Sea
atgtctgataaattcaataaaatttatgatcattcaataaaaaatcctgaaaaattttggcaagaagcagctgaggacatcttttggtttaaaaaaccgacaaaaattttgaataaatctaatcctcccttctataaatggttcgaagatggagtaaccaacacgtgttacaacgctttagacattcatattgatcaaggtagaggaaaaaacattgctcttatctatgatagccccattacaggtaacaaaagcaaatttacctacgaggaacttagatccaaagttggaaaatttgctggagcgttaaaaaatcagggagtaaataaaggtgaccgagtaattatttacatgccaatgatcccagaggctgtgattgcaatgcttgggtgtgcaagaattggtgcaatacactctgtagtctttggtggatttgcatctactgaacttgcaagcagaattgatgatagtaaagcaaaactgttagtgactgcttcatgtggttttgaacctggaagaacagttgagtataaacctttagttgatgaagcgatcaaaatagcaaatcataaaataaagaagatgattttatttcaaagaccaggtcatgaggtaaaattaaatgctcctcttgaaattagctgggatgaagcagtgtccattgcagaaccagctg

SEQ ID NO: 308922 - DNA, 922 bp, Unknown
  Bacterial polypeptide expressing nucleotide sequence isolated from the Sargasso Sea
aaagccatacacaaaaattaaagatgttaaatatagtaaatcggatgttaagataaaatggttttatgatggtactcttaacgcatcagcaaattgtattgatagacacttaaagaaaaataaagataaaactgcgattatatgggttggagatgatccaaaggttcaaaagaaaatttcttataaagaattacacaaagaagtttctaaagctgcaaatggtcttagagaattaggagttaaaaaaggtgatagagtaacaatttatttaaccatgataccagaacttgcatatacaatgttggcatgtgcaagaataggagcagtgcattcgataatctttggaggattttctccagatagtatttctggaagaataaacgattgtgaatctgattatctaattacagccgatgaaggtgtaagaggcggaaaaataattccattaaaatcaattgctgatgaagctttggtaaattgtccaaatgtaaaaaaatgtgttgttgttaaaagaacgggcaatagaataaattgggatgaacgaagagatgtttggtaccacgaaatgacaaaaaaagtttcaaataaatgtgaacccgaagaaatgaatgcagaagatccattatttattttatatacttcagggtcaacagggaaaccaaaaggggtgatgcatacaacaggtgggtatatggtttacgcatcaatgacacatcaatatatttttaattacaaacctaaagatatttattggtgtacagctgacattggttgggtgactggtcatagctatattatttatggaccattatcaaatggggcaacaacaataatgtttgagggaattcccacttatcccgacagttcaagatggtggcaaatagttgataaatataaagtaaatattttttatactgctccg

SEQ ID NO: 308923 - DNA, 853 bp, Unknown
  Bacterial polypeptide expressing nucleotide sequence isolated from the Sargasso Sea
aaaattacaaaatctaaaataaaaaatttaaataaaactgaattaatatataaaactaaaagtgaatggataaaaaaagcacttgtaaataaatcagcgtatgaaaaaaaatataattcttcaataaaagataatgatggcttttggaaaaaagaaggaaaaagaattacttggattaaaccctacacaaaaattaaagacgtaaagtatagtaaatcaaatgttcacattaaatggtattatgatggaacgttaaatgcttcagtaaattgtatagatagacacttaaaaaaaaataaagataaaactgcaattatttgggtaggagatgacccaaaagtaagtaaaaaaattacatataaacaacttcatcatgaagtatctaaaatcgcaaatggattaaaggaaataggagtaaaaaaaggtgacagggtaacaatatatttaacaatgattcctgaacttatattcacaatgcttgcttgcgcaagaattggggcgattcattcaataatttttggtggtttttcatctgatagtattgctggaagaataaatgattgtaaatcagattttgtagtaactgctgatgaaggagtaagaggtggaaaaacaatacctttaaaatctataactgatgaagctttaattcattgtccaaatgtaaaaaaatgcgttgtcgttaaaagaacgggaaattatataaattgggatcaacaaagagatgtatggtatcatgaaataattaaaaatgtttcttcaaattgtgagccggaagaaatgaatgctgaagatccattatttatactttacacatcaggatcaactggaaaacctaagggtgtttgcacac

SEQ ID NO: 308924 - DNA, 823 bp, Unknown
  Bacterial polypeptide expressing nucleotide sequence isolated from the Sargasso Sea
tgggtaacgggacatagttatataatttatggaccattgtctaacggtgcgaccactattatgtttgagggaattccaacttatcctgacaattcaagatggtggcaaatagttgataaatataaagtaaatattttttatactgctcctacagcaatacgcgcgctaatgagagatggtgataaaccagtaaaaagaacttcaagaaaaactctgaaattattaggaactgtaggtgaacctataaatccagaagcttggcagtggtattataaaacagttggggattcgaggtgccctatagttgatacttggtggcaaacagaaactggaggtattttaataagtcctcaaacgggtgcaataaacttaaaacctggttctgcaacaaaacctttttatgggattaaaccagtgattgtagataagtcaggtaaagttctaaaaggagaagcacaaggcagactgtgtatagctcaatcatggcctggccagatgagaactgtttatggtgatcataaaagatttatagaaacatatttttctcaatttgatggaaaatattttacaggtgatggctgtcgaagagataaagatggatattattggataacaggaagagtggatgatgtaattattgtttcaggccataacttaggaactgcagaaatagagagtgcatttgtagctcatccaagagtagctgaagctgcagtggttggttttccacatgatataaaaggaaatggattatactgctacgtaactttaaatgcaggtgaaactcattctttagatttagagagagaattaaaacttttgg

SEQ ID NO: 308925 - DNA, 493 bp, Unknown
  Bacterial polypeptide expressing nucleotide sequence isolated from the Sargasso Sea
tgatacttattttagccagttcaaaggaaaatattttacaggtgatggatgtcgaagagataaagatggattttattggattactgggagagtagatgattgtattaacgtctctggacatttgcttggtacagctgaaattgaaagtgcttttgttgagcatgaattagtttctgaagcagcggtagtgggctatccacacgagattaagggccagggcatctatgcttatgtaacaacaaatactggggttgaagtaactgaagatttaaaaaaagaacttgtaatgtggattagagagaaaataggtccaatcgcaacaccagataaattacaattctcaccagggcttccaaaaacaagatcaggtaaaattatgagaagaattttaagaaagatagcatcaaatgagcaagatcagttaggtgatacatcaacattagctgacccaaatgttgttcaatctttaatagacgggtctaaagatatctaa

SEQ ID NO: 308926 - DNA, 406 bp, Unknown
  Bacterial polypeptide expressing nucleotide sequence isolated from the Sargasso Sea
ggttatatttggattttggggagagttgatgatgttataagcgtttcaggtcataggctaggaacgatggaaatagaatctgctttagtaagtcatagatcagttgcagaagctgctgttgtggggagaagagatgatttgaaaggtgaagttgtagttgcatttgtatctttagagaaagatgtgaacagttcttcagaattagtggaggacttaaaaaaacatgttgttaatgaaattggaattatcgcaaagccagaaaaaataataatttctgactctctccctaaaacacgaagtggaaaaataatgcggagaattttgagatctcttgctgctggagaaaaaattagtggtgatataagtactctcgaagatagttctgttttggaaaagttgaaataaa

SEQ ID NO: 308927 - DNA, 666 bp, Unknown
  Bacterial polypeptide expressing nucleotide sequence isolated from the Sargasso Sea
taaatataatgtaaatgttttttacacagctccaacagccataagagccttaatgtctcaaggtgatgaacccgttcttaaaactaaaagagacactcttagagttcttggaacagtaggagaaccaattaatcccgaagcttgggattggtactataaagttgtagggaatggctcgtgcgatgttattgatacttggtggcaaacagaaacaggttcagttttaatatcgccaatatcaggtgttactccggtaaaacctggatcagcaacattgccattttttggagtaaagccagcaatttatgatgaagaaggccaagcattagaaggtgcagcctcaggtaatttagttattgaatcctcctggcctagtcaaattagaagcgtctatggtgatcatgaaagaatgatatcaacttactttaaaacatatgaagatatttattttactggtgacggagcaagacgagatgaagatgggtatttttggataacaggtagagttgatgatgttctaaatgtatctggccacaggcttggaacagcagagattgaaagtgctttagtactccatgattctgttgcggaggcagcggtggtaggatttcaacatccgattaaaggacaaggtatttatgcatttgttaccttaatgaaaggtga

SEQ ID NO: 308928 - DNA, 718 bp, Unknown
  Bacterial polypeptide expressing nucleotide sequence isolated from the Sargasso Sea
atctacgatagtcctataactggaaataaagataaattatcttttacacaattaaaagataaagtttctaagtttgctggtgctttatcaaatcaaggggtaaaaaaaggtgatcgagtaattatttacatgccaatgataccagaagcagtggttgcgatgcttgcatgtggaagaattggagctattcactctgtcgtatttggaggttttgcttcaaatgaacttgcaagcagaattgatgatagcaaagcaaaaattctagtaacagcttcgtgtggatttgaaccaggtcgaactgttgagtatcgtccactaatagatggtgccttaaaacttgctaaacataaagtagaaaaagttattttttttcaaagaaatggtcatgaaataaaactcaatactccaatagaaattagttgggatgaatctctttctaacgctaaagataccgattgtgtagaaatgggttcaaacgaatttgcatatatactttatacatctggaactactggtgtgcctaaggggatagttagagatattggaggacacatagtggctctaaaatggactatgaaaaatatttataatattgatacagacgatgtttggtggtcagcaagtgatatagggtggattgtaggtcactcctatatagtttacgctcctttatttaaaggttgcacaacagttttgttcgagggtaaaccagtaggaa

SEQ ID NO: 308929 - DNA, 871 bp, Unknown
  Bacterial polypeptide expressing nucleotide sequence isolated from the Sargasso Sea
accaacaaaaatattaaataaatccaaccctcctttctataaatggtatgaagatggagtaacaaacacatgttacaacgctttagatatacatattgatcaaggaagaggtcaaaaaacggcgttgatttatgacagtcctatcacagggagcaaaagtaaattaacttatgaggaattaaaattaaaagtttcaaaatttgcaggggctcttaaagctcaaggaataaataaaggtgatagaataatcatttacatgccaatgatccctgaagcagtagttgcaatgcttgcttgcgcaagaattggtgcaattcactctgttgtctttgggggatttgcctcaaacgagcttgcaagtagaatagatgacagtaaagcaaagttgttaattaccgcttcatgtggttttgaacctggacggacagttgagtacaaacctttagtcgatgaagcaataaaaatagcaaatcacaatatagaaaaaatgattctatttcaaagacctggtcatgaagttaaattaaatgctccaagtgaaattagttgggaagaagtaatgaataatgcaagtgatacggattgtgtagaaatgaattctaatgaatttgcatatatactatacacatctggtactactggaactccaaaaggtattgtaagagatattggtggccacatagttgctttaaaatggactatgaaaaatatttacaacattgacactgatgatgtttggtggtcagcaagtgatataggctggattgttggacattcttatattgtctatgccccattatttaaaggatgtactactgttttatttgaaggtaaacctgtaggaacaccagacgctggtgccttctggaaa

SEQ ID NO: 308930 - DNA, 835 bp, Unknown
  Bacterial polypeptide expressing nucleotide sequence isolated from the Sargasso Sea
attagagctttgatgagagaaggtgacgaacacgttataaaaacaaatagaaaatctcttaaattacttggtactgtaggggagcctataaatccagaagcgtggaaatggtattatgaggttgtgggagatagtagatctcctatagtagatacttggtggcaaacagaaactggaggaatattaattgctccacaaacaggtgctatagaattaaaacctggatctgcaactaaacctttttttggaataaaacctgtaattgtagataaaaatggtaaagagttaaaaggagaatgtgagggaatgttatgcatgatgcaatcatggcctggacaaatgcgtacagtatatggaaatcataaaagatttattgaaacgtatttttctcaatttgatggtaaatattttacaggagatgggtgcaaaagagacaaagatggttactattggataactggtcgagtcgatgatgttattattgtttcgggacataatttaggaacagcagaaattgaaagtgcttttgtttcacatcaaaaagtttctgaagcagctgttgttggatatcctcatgatataaaaggaaatgggctatactgttatatatctcttaaagtaggggaaaagccttcagaagatttaaaaaaagaattgattaatgtagttagaaaaaaaataggtccaattgcatcaccagatattattcattttacatctggattgccaaaaactcgatcaggaaaaattatgagaagaatattgagaaaaatagctgccaatgaacaagatagtttaggtgatatctctacactggctgatccaagtgttgtta

SEQ ID NO: 308931 - DNA, 769 bp, Unknown
  Bacterial polypeptide expressing nucleotide sequence isolated from the Sargasso Sea
ttggctaccaaaccagagtatgaaaaaaaatataaaaaatctttaaaaaataatgatgaattttggaaaaaagaagggaaaagaataacttggattaaaccctacaaaaaaataaaaaacgtaaaatatagtaaagatgaagttcgtattaaatggtacgaagatggaactttaaatgcttctgcaaactgtattgatagacatctcaaagataaaaaagataaaacggcaattatctgggttggagacgatccaaaagatacaaagaaaatttcttataaacaattacataaagaagtttcaaaaactgctaatgctttaaaagaacttggagtaaaaaaaggagatcgtgttacaatttatttaacaatgataccagaattagcattttcaatgttagcttgtgctaggattggtgcaattcattcaattatttttggtggtttttctgctgactctattgctggaagaattgatgattgtaaatcagattatgtaataactgctgatgaaggtattagaggaggaaaaataattcctttaaaatacactgttgacgaagcacttgcaaaatgtcgaagcattaagaaatgtattgtagtaaaaaaaactggcaattacataaattggaataatgaaagagatgtttggtatcataaaataactaaaaatgtatctagccagtgtaatcctgaagaaatgagtgcagaagatccattatttatactttatacttctggatcaactggaaaacctaagggggttcttc

SEQ ID NO: 308932 - DNA, 899 bp, Unknown
  Bacterial polypeptide expressing nucleotide sequence isolated from the Sargasso Sea
ctataagtctctaaaagattatagtgaagaacataaaagatctttaaaagaaaatgacgttttttggagcgaaaaagcggagagaatagaatggtttaaaaaatggaaaaaagtaagcgatattgattttactttaccaaagatagaatggtttataggtggaaaacttaatgttagttataattgtattgataggcatattaaaaacggaaaaggtgatgaaatagctttttattgggagggtaatgatccatccgaaagcaagaaattaacatataatcagctttatgataaagtttgcagattttccaatgttttaaaaaatttaaatatatcaaaaggagacagagtttgtttgtatatgcaaatgattcctgagctaccaatagctatgctctcatgtgcacgaattggtgctgtgcattctgttgtttttggagcttttagctcagattcattgcgagacagaatcaatgactcaaaatgtaaattacttatcacgcaggacacgggagtgcgcggaaccaaaaacaacattccaatgaagtcaaatgctgatgtagccattgaacaatccccttcaatagaaaatacgattgtcgttatgcggacaggtgaaaaagttcatatgaaaaataagcgagaccattggtggcatgaacaaattgacagtgttaagccacattgtgaacctgaatatatggacgcagaggaccctttgttcattttatatacttctggatcaacaggaacacccaaaggagttatgcatactacaggcggatatcttttatacgctgactataccttctcaagcatatttgaccataaaagcagtgatatttattggtgcacagcggatattggatgggatactggacattcctatataacatacg

SEQ ID NO: 308933 - DNA, 493 bp, Unknown
  Bacterial polypeptide expressing nucleotide sequence isolated from the Sargasso Sea
atgaaagacatttttaacaaaatttatcaagaatctatccaaaatcctgagaagttttggcaaaatgtgtctgaagatatcttttggtttaggaaaccatcaaaaattttaaacaaatcaaacccaccattttataaatggttcgaagatggagtgacaaacacctgttacaatgcaattgatgctcatattgataaaggtaatggtgataaaattgcattaatatatgacagtcctatcacaaataataaagcaaaattcacttacaatgaattaagggaaaaaatttcaaaatttgctggtgcacttcataatcgtggtatcaaaaaaggtgacagggtaattatttacatgccaatgataccggaggccgttatagcaatgcttgcatgtggaagaattggagcaatacattcggttgtctttggtggatttgcatcaaatgaacttgcaagtaggatagatgatagtaaagcaaaagattttaattact

SEQ ID NO: 308934 - DNA, 745 bp, Unknown
  Bacterial polypeptide expressing nucleotide sequence isolated from the Sargasso Sea
gatccaaaagtacaaaagaaaatatcatacaaagaattacacaaagaagtttcaaaggcagcaaatggtttgaaagaactcggcgtaaagaaaggtgatagagttacgatttatttaacaatgataccagaacttgcttatacaatgttggcttgtgcaagaattggggcagttcattcaataatttttggtggattttcgccagatagtatttcaggaaggataaatgattgtgagtctgattatcttataactgcagatgaaggtgttagaggggggaaaattataccattaaaatcaatcgccgatgaagcattagtaaactgtccaaatgtaaaaaaatgtgttgtggtaaaaagaacgggtaatcgaattaattgggatgagagaagagatgtttggtaccacgagctaacaaaaaaagtgtcaaataaatgtgaaccagaagaaatgaatgctgaagaccctttattcattttgtacacatcaggttcaacaggtaaaccaaaaggggtaatgcatacaactggtggctatatggtttatgcatcaatgactcatcaatatatattcaattataaacctaaagatatttattggtgtacagcagatattggatgggttacaggccacagttatattatttatggaccattatcaaacggggcaacaacaattatgtttgaaggaattccaacttatcctgatagctcaaggtggtggcaaattgttgataaatttaagg

SEQ ID NO: 308935 - DNA, 546 bp, Unknown
  Bacterial polypeptide expressing nucleotide sequence isolated from the Sargasso Sea
gttcttggccaagtcaaatcagaagtgtttatggtgatcatcaaagaatgatagatacctattttagtatctatgaagatatctatttcactggagacggagctagaagagatgaggatggttactattggataacagggagagttgacgatgtgctcaatgtttctggacacaggttaggcactgcagaaattgaaagtgctcttgtactgcatccaaaagttgctgaggcagcagttgtaggctttgatcaccctatcaagggtcaaggtatatatgcttttgttacgcttatgatggaagaatcattttctgataatcttaataatgaattaaaacattttgttgcaaaggaaataggtgcaattgcaaaaccagatttaattcaaaatgcaccaggactaccaaaaaccagatcaggaaaaatcatgagaagaattttaagaaaaattgctgaaggagatctaactaatcttggtgacacttccaccttagcagatccctctgttgttaagtcattaattgctaataaaatgaatatatgaa

SEQ ID NO: 308936 - DNA, 880 bp, Unknown
  Bacterial polypeptide expressing nucleotide sequence isolated from the Sargasso Sea
aaaagttcaaaataaatgtgaacccgaagaaatgaatgcagaagatcctttatttattttgtatacatcaggatcaacggggaaaccaaaaggggttatgcatacgactggtgggtatatggtttacgcatcaatgacccatcaatatatattcaattataaacctaaagacatttattggtgtacagctgacattggttgggtaactggtcatagctatattatttatggaccattatcgaatggtgcaacaacaataatgtttgaaggaattccaacttatcctgatagttcaagatggtggcaaatcgttgataaatataaagtaaatattttttatactgccccaactgcaattagagctttaatgagagaaggtgataaacctgttaaaaaaacgtcaagaaaatctttgaaattattagggactgtaggtgaaccaatcaatccagaagcctgggagtggtattataaaactgttggagattctaattgtccgattgttgatacttggtggcaaacagaaacgggtggaatattaattagtccacaaacaggagctataaatttaaaaccaggttcagcaacaaaaccattttatgggatcaaaccagtaatagtaaataaagaagggaaagttttgaaaggggaagctgaaggtcgattatgtattgcacaatcttggcccggtcagatgaggacagtttatggtgatcatcaaagatttattgatacttatttttctcaatttgatggaaaatattttacaggagatggatgcagaagagataaagatggatattactggattacaggaagagttgatgatgtaattattgtttcaggacataatcttggaactgccgaaatagaaagtgct

SEQ ID NO: 308937 - DNA, 959 bp, Unknown
  Bacterial polypeptide expressing nucleotide sequence isolated from the Sargasso Sea
ttttgggccaagagggaaaaagaatatcatgggataaaaaaatacacaaaaattaaagatgtcaaatacagtaaagatgaagtaaaaataaaatggttttatgacggaactctaaatgcctcagcaaactgtattgacagacacctaaaaaaaaatccaagcaaaactgcaattatttgggttggagatgatccctcggatactaaaaaaatatcttacaaagaacttcatcaaaacgtttgcaaagcagctaatggattaaaaagtttaggggttcagaaaggtgatagagttacaatttatcttactatgatcccagagttggcttacatcatgcttgcatgtgctagaataggagcagttcactcaattatttttggtggattttctccagattcaatagcaacaagaataactgattgtgagtctgaatatttaattactgcggatgaaggtgttagaggtggaaaaataattccattaaaaaagatcgctgatgaagctttagatcagtgtcctgctgtaaaaaaatgcgtagttgtggagagaacaggaaaccaagttgattggaacaacgaaagagatgtatcttataaagaacttatttcatctgttccctcaaaatgtgatcctgaagaaatgaacgccgaggatccattgtttattctttatacctctggatcaactggaaaaccaaaaggagtacttcataccacggggggttatatggtttacgcctcgatgactcatcaatacatttttgattataaatctaatgatatttattggtgcacggctgacattggctgggtaactggccatagctatattatctatggacctctatccaatggggccactacaattatgtttgaaggtgtgcctaattatcccgatagttctagatggtggcaaatagtagataaatttaaggttaatattttttatactgctcctac

SEQ ID NO: 308938 - DNA, 659 bp, Unknown
  Bacterial polypeptide expressing nucleotide sequence isolated from the Sargasso Sea
aaaattaaaaccaggttctgcctcaaaacctttttatggaatagaaccatgtattgttgataaagatggcaatgaattagaaggtgaatgtgaaggaatgttatgtatgaaacgttcatggcctggtcaaatgcgaaccgtttatggagatcataaaagatttattgatacttatttttcacaatttgatggaaaatattttactggagatggatgtaagagagataaagatggatattattggattacaggaagagtagatgatgtgataattgtatctgggcataatttaggaactgctgaaatagaaagtgcatttgtatcacataaagatgtttctgaagctgctgttgtgggttatcctcatgatataaaaggtaatggtttatattgttatgtttcactgaaagttggtgtggaaaaatcagaagaattagttttgaatttgaaaaaaactataagggaaaaaattggacctattgccactcctgattttatacatgttactgcaggattaccaaaaactagatcaggaaaaattatgagaagaatattaagaaaaatagcctcaaatgattttgaaaacttaggagatacctcaacattagcagacccttctgttgtaaataatttgattgaaaatagagaaaataaataaa

SEQ ID NO: 308939 - DNA, 667 bp, Unknown
  Bacterial polypeptide expressing nucleotide sequence isolated from the Sargasso Sea
tgattgtaagtctgactatataattactgctgatgaaggtgttagaggtggaaaaattatacatttaaaagatacagtagatgaagctcttttaaattgtccaaatgttaaaaagtgtgttgtggtaaaaagaactggaaacagaattaattgggatgaaagtagagatgtttggtatcatgatataactaaaaaagtttctaagaattgtgaacctgaagaaatgaacgcagaagatccattatttattttatatacatctggatctacaggaaaacctaaaggagttttgcacactaccggtggttatatggtttatgcctcaatgacccatcagtatattttcaattataaacctaaagatatatattggtgtactgcagatattggttgggtcacaggtcatagttatattatttatggacctctttcaaatggagcaacaacaattatgtcagaaggtattccaaattatccagattggtctaggtggtggcaaatagtagataaatataaagttaacattttttataccgcaccaactgcaataagagctatgatgagagaaggagacgggcctgtaaaaaaaacatcaagaaaaagtctaaaactacttggaactgttggagaaccaataaatcctgaagcctggcaatggtattttaaa

SEQ ID NO: 308940 - DNA, 688 bp, Unknown
  Bacterial polypeptide expressing nucleotide sequence isolated from the Sargasso Sea
gatattaattagtcctcaaagtggtgcaatagacttaaaaccaggttctgcaacaaaaccattttatggaattaagccagagattgttgataaagatggaaaagttttaaaaggagaggcacaaggaagattgtgtatttctcattcttggcctggacaaatgagaactgtatatggtgatcacaatagatttatagagacatacttttctcaatttgacggaaaatattttactggggatgggtgtagaagagataaagatggatattattggataacaggtagagtggatgatgtaattattgtttctggacataacttgggtaccgcagaaatagaaagtgcatttgtagcacattctaaagttgccgaagctgcagtagttggatacccacatgatataaaaggaaatggattatattgttatgtaactttaaatgtaggagaagaacctaatggagaccttgaaagagaattaaaactatgggtaagaaaacaaattggtgccattgccactccagattttattcagttttcacccggattaccaaaaacaaggtctggtaaaatcatgagaagaattttaagaaaaattgctgcaaatgaacatgaacaacttggagatacaacaactttagcagatccaggtgttgtgaaaagtctagttgataatagaaaaaatatttaa

SEQ ID NO: 308941 - DNA, 743 bp, Unknown
  Bacterial polypeptide expressing nucleotide sequence isolated from the Sargasso Sea
tggcgaaaattgtgcaattgttgatacatggtggcaaacggaaactggctcaataatgatttccccacttccaggtgtgacaagcactaaacctggatcagcttgtggaccattaccaggtatcgaatcaattgtaattgacaatgatgggaaagaagtaggcaaaggtgaaggtggctttttagcagtaaaatcaccatggccatcaatgcttagaaccgtttatggagatgatcaaaggtatttagatacttattggtctcaacacgatggtttatattttgcaggtgacggcgctaaatatgatgatgaaggttacatttggcttttagggcgcgtagatgatgtaatgaatatatctggacacagaatatcaacagctgaagttgaaagtgctttagtttcacaccaagcagtagcagaagccgcagtgattggtagaagtgacgagattaccggagaggccattgctgcatttgtctcattaataggaactgatgatggcaatgaagatttaattgctgatcttagacagcatgtaagtgataaaattggtccaattgctaaaccaaaaagtattgttataactgctgatttaccaaaaactagaagtggaaaaatcatgcgcagacttttaaaagatatttcagaggaaagaaaactaggagatgttacaacactagcaaacgaggatattgtctcagaattacaaactagatcgtcagagtcagatgatgaatgaa

SEQ ID NO: 308942 - DNA, 643 bp, Unknown
  Bacterial polypeptide expressing nucleotide sequence isolated from the Sargasso Sea
ctgcaactaagccatttttatggtattaagccagttatagttgataaggatggaaaagcattaaaaggagaagctgaaggaaggctttgtattgctcaatcctggccaggacaaatgagaactgtttatggcgaccatcaaaggtttcttgatacttacttttctcagtttgatggtaaatattttacaggagatggatgtaggagagataaggatggatattattggataacaggtagagtagatgatgtaataattgtatcaggacataatttaggtacggcagaaattgaaagtgcgtttgttgctcatgaaaaagtggctgaagcggcagtagtaggttatccacatgatattaaaggtaatggattgtattgctatgtaacattaaactcaggagaaaaaagttcattggatttagaaagagatttaaaactttgggtaagaaaacaaattggagctatcgcaactcctgacttgattcaatttgcgccgggtcttcctaaaacaagatctggaaaaataatgagaagaattttgagaaaaattgctgccaatgaacatggtcagttaggtgatactactactttggcagatccctcggttgtagataagttagttgataacagaaaaaatatttaaa

SEQ ID NO: 308943 - DNA, 454 bp, Unknown
  Bacterial polypeptide expressing nucleotide sequence isolated from the Sargasso Sea
tgatggttgtcgtagagataaagatggttactattggataaccggaagagttgacgatgttataatagtatcaggccataatcttggaacagctgaaatcgaaagcgcatttgtagctcatcctaaagttgctgaagcagctgttgttggatttccgcatagtataaaagggaatggattatattgttatgtaactttaaatgctggagaaaacccaactggtgaccttgaaagagatttaaaactatgggtgagaaagcaaataggaccaattgctactcccgacgttatccaatttgctcctggtttgccgaaaacaagatctggaaaaataatgagaagaattttaagaaaaatagcagcgaacgaacctgataacttaggcgatacgacaacattagctgatccaagtgttgttgcttcgcttgtagaaaatagacaaaataaaggttaa

SEQ ID NO: 308944 - DNA, 878 bp, Unknown
  Bacterial polypeptide expressing nucleotide sequence isolated from the Sargasso Sea
ttacattgtatatggccctcttgcaaatggtgcgaccacacttatgtttgtaggtgtaccaaattatccagatgcttcacgtttttggcaggttgttgataaacacaaagtcaatatattctataccgcaccaactgctctgcgtgccttaatgagagaaggcgaaggtccagttaaaaaaactgatcgatcaagtttaaaattattaggatcagttggtgagccaatcaatcccgaagcatggatctggtatcataaagttgtaggagacgaacgatgtcccattgttgatacatggtggcaaacagaaacgggtgggattttaatttcaccccttccaggggcaattgatcaaaaaccaggatcagcaacaaaaccgttctttggaattaaacctgaaatacttgatgctgagggtaatattcttgaaggagcatgtgaaggctcattgtgccttgcagattcatggcctggccagatgagaacagtttatggagaccatgatcgatttattgaaacatacttttcacaatttgaaggaaagtattttactggcgatgggtgcaaaagagatgaagatggctactactggattacaggacgagttgatgacgtgatcaatgtgtcaggacaccgtatgggaactgcagaagtagagtctgctcttgttgcacatccaaaagttagtgaggctgcagtagttggttatcctcatgatattaagggacaaggcatttacgcctatgtgactcttaatgctggagaagaacctaatgacgaactttataaagaacttattgcatgggttcgaaaagaaataggtcctatcgcatcaccagatctcattcaatgggctcccgggctccctaagacacgat

SEQ ID NO: 308945 - DNA, 675 bp, Unknown
  Bacterial polypeptide expressing nucleotide sequence isolated from the Sargasso Sea
aaagaatattccttaatgtatgataattctcttcaaaacaatgatgaattttgggcagatcaagcacaaagggtcgattggattaaaaaatttacaaaaatcaaagatataaaatattctaaagatgatgttagtattaaatggtttgaagacggcaatcttaatgtatcttataattgtatagataggcatgctgagaataatcctgataaagttgctataatttgggaaggtgatgatccaaatgaaacaaaaaaaataacctacagagacctgctaataaatgtatcaaaagcagcaaatgtactaaaaaaaattggggtaaaaaaaggtgatcgcgtaacaatatatttaacaatgatacctgagctagcttatatcatgttggcttgtgctagaattggagctatacattcaattatttttggaggcttctccgcggaatcaattgctggtagaattatagattgtaagtccgaatatgttgttacagctgatgagggtgttagaggtggtaagactattcctttgaaattaactacagataaagcactggaaacatgtcctgatgttaaaaagtgtttaattattaaaagaacaaataaagaaatagaattaaaagaagatagagatttgttttatgatgatgtcataaaagaagtcgatagcatttgt

SEQ ID NO: 308946 - DNA, 520 bp, Unknown
  Bacterial polypeptide expressing nucleotide sequence isolated from the Sargasso Sea
atgacacaagaaatttataatcctattcccggattttcaaatccgcatataaaagattttgatgaatacttaagtctatataaagagtcaattgagaatcctgaaaaattctttggcgatctggcaaaagaaaatatttcatggattgaagattttaaagaggtacataactctgaattccaggaaactaaatggtttgttggaggaaaaacaaacataacgctcaactgtattgatagacatcttgaaaaaaatggcgataaggttgccttaatttgggaaggtgatgagccaggaaactctaaagagataactttcaaagaattacactctgaggtttgcaggtttgcaaatatccttaaaacacttcaaattaaaaaaggctccagagtttgtatttatatgccgatgattcctgaagctgcatttgcaatgtttgcatgtgcaagaattggtgcgatccactcagttgttttcggtggattttctccagaatctttaaaggatagaattttggatg

SEQ ID NO: 308947 - DNA, 784 bp, Unknown
  Bacterial polypeptide expressing nucleotide sequence isolated from the Sargasso Sea
atgagtgaaaatgaaaagtttgaagttagcagtgaatggtctgcagaagctcaaattaataacgacaaatataatgaatggtataaaaattctctcagcaataatgaagaattttggagtgagcacggtaaaagaattgattggataaaaccatatacaaaagtaaaagacgtttcttacaataaagataatttttcaatcaagtggtactacgacggtacactcaacgcatcaagcaactgcattgatagacatttaaaaaataaagcagatcaaaccgcaatcatttgggaaggcgatgatccagcagattcaaaacagatatcttataaagaattacacagtgaggtatcaaaacttgctaacggcatgaaatcacttggtgttaaaaaaggtgaccgggtaactatttatatgccaatgattccagaagcagcctatgcaatgcttgcttgtacaagaattggggcaattcattctgttgtatttggtggcttttctccagactctttagctggaagaataagtgattgtaaatcagatattgtgatcaccgccgatgaaggagtgagaggtggtaaagcaattccattaaagaaaaatacagatgaagcaatttcgatttcaggtggagttcgtcattgtattgttgttaaaagaacaggtggagatattggttgggtcaacgaaagagatgtttggtatcacgaattaactgaaaaagaatctgatgattgtccacctgaagaaatgtcagcagaagatcctctctttatattgtata

SEQ ID NO: 308948 - DNA, 712 bp, Unknown
  Bacterial polypeptide expressing nucleotide sequence isolated from the Sargasso Sea
tatgagcaataatgaaaaatttgacgtcagtgccgattggtctgccagcgcgcagattgatcaagacaaatataatgagtggtatgaaacatcattcaacaacaatgaagatttttggaacgaacacggcaaacgcatagaatggatgaagccgtatacaaaagtgaaagatgtatcatttaataaagataatttttcaatcaaatggtacgaagatggcgtactcaatgcgtccgccaattgtattgatcggcatttaaaagataaaggggatcaaacagccatcatttgggaaggcgatgatccaaaagattcaaaacacattacgtataatgaacttcataaagaagtttcaaaattatcgaatggcatgaaatcccttggtgtaaaaaaaggtgaccgtgtaacgatctatatgccaatgattcctgaagctgcttacgccatgcttgcctgtacacgcattggtgctattcactcagtcgtgtttgggggtttttctcctgactcacttgcaggacgcatcagcgattgtaaatcagatattgtgataacagctgatgaaggattaagaggcggcaaaccaattccattaaaaaagaatacagacgatgcgattaatatttctggcggtgtgaggcattgtattgttgtcaaacgaacaggtggagcaatcgattggcatgaagaccgtgatgtttggtatcatgaa

SEQ ID NO: 308949 - DNA, 712 bp, Unknown
  Bacterial polypeptide expressing nucleotide sequence isolated from the Sargasso Sea
ttggtggcaaacagagacaggaggcattatgataacgccacttgtcggagctattgatatgaaaccgggttcagcaacactaccattttttggaatcgaaccagttttagttgatgataataacaacgaaattaaaggccctggagagggcagtttatgtataaatatgtcatggcctggtcaaatgcgaacagtttacggtgatcacaaaagatttatagatacatattttactcaatatcctggtcgttatttttcaggagatggatgcagaagagatgaagatggttattattggataaccggaagagtggatgatgtcataaatgtctcaggacatcgcttaggtactgcagaggtagagtccgcgcttgtgcttcataaagacgtatcagaggcagcagtagttggatatccccataagattaaaggtcaaggactgtatgcttttgttgcattgaataaaaatgtcaaaccaagtactgttcttgaaaatgagttactacaatgggttaaacaagaaattggatcaatagctaagcctgatttcttacaattcactgaggggctgccaaaaactcgatcaggtaaaattatgagaagaattttgagaaagatttctgtaaatgattataataatcttggagatacctctactcttgctgactccaccgtagtagaaggtctcataaaaaataggaagaacatttag

SEQ ID NO: 308950 - DNA, 942 bp, Unknown
  Bacterial polypeptide expressing nucleotide sequence isolated from the Sargasso Sea
cacaatcacattgaatatttgggctaaattagccagggctcatttgcattggtttctcccatttaacaacatactggatgaatcaaatgcgcctaattatgaatggttcaatgatggagagatcaacgcttcatttaattcactggatataaatgccaataaaaacccagaaaaaactgcaattatatttgaaacagaggatggaaactctgagcgcatcacatacaaagatcttcttttaagaacctctcaatttgccaatggccttaagaagcttggcgtagtgccgatggatagggttgtgatatatatgcccatgtgccccgaggctgtgattgcgatgcaggcatgcgcaagaattggcgcaatacactctgttgtttttggagggttttcatcaaatgcactcaaggacaggatagaggatgcccaatcaaagattgtgattactgctgacggagcatatagaggcggaagcgttattccgcttaagcaagcaacggatgaggcggtgacaaactctttgcacaaagtaaaaaatgttgtggtttttgaaagaacaggagaaaaaatagaatttgatcaagaaagagacgtttggtggacagacctgatctcagattgtccttctgactgtgatccagagccccttaatgctgaacacccattgtttatactctacacctcaggttccacaggcaaacccaaaggaattcaacactccaccgcggggtatattttgcatgcaaaaacgactttttcttgggtatttgatatcaacgaagatgatgttttctggtgtactgcagatgtgggctggattacaggacacacttatgttgcatatggtcccctgctcgcaggcgctacgattcttatctatgagggcgctcctacttttccagatgtgggaagatttttggaagatttgcgaaaagcatg

SEQ ID NO: 308951 - DNA, 670 bp, Unknown
  Bacterial polypeptide expressing nucleotide sequence isolated from the Sargasso Sea
aatggaacaaaagataattaataatattgactcgttatctcaggaacaccgacgctttagtgcctctaatgattttagaattcaagccaatatacaaaataatcatctatatgataccgcagcaacggatcgtctccaattttggcatgagcgtgcccaagagcttcactggtttaccccctggcaaacggtgcttgactggaatcgtccccatgcaaaatggtttcaagaaggaacattaaatgccagttataactgtcttgatgttcatcttacgacacatcgtcgtgataaagtcgccatcatttggtccggtgaagatggtaaacaacagcaagtaacctattacgagctctgggaatcagtaacaattgcagcccaatgtcttaagacccatttcaatgtacagtcaggtgatcgtgtgaccttgtatatgcccatgacgattgatgccgtggtcatggtactggcctgtgcacgtatcggtgcaattcatagtgtggtatttggtggctttagtgctcaagcactgtatgatcgtattgttgattcaggttcgactttagttatcaccgcctatggggggtatcgacgtggcgaagtattgcatttaaaagcgactgttgatgaggccttatcgttaggagattctcctgtaaaatcagttctt

SEQ ID NO: 308952 - DNA, 889 bp, Unknown
  Bacterial polypeptide expressing nucleotide sequence isolated from the Sargasso Sea
aaaaatttaggtgttaaaaaaggtgatagagtaacaatatatttaacaatgattcctgaacttgcttatacaatgttagcatgtgcaagaattggcgctgttcattcaattatatttggtggcttctcttcagagtccattgcaggcagaatcacagattgtaaatcagaatttgtaattactgcagatgagggaattagaggtggaaaaacaattccattaaagaaaattatggatgaagcacttaaaaattcttcaaatattaaaaagtgtatagttgtaaaaagaactggaaactttgttaacatgataaaagaaagagatgtttatttagatgatatattaaaagatgttagtgatcattgcgaagtagtaacaatgaatgctgaagatcctctatttattctttatacttctggatcaactggaaaacccaaaggggttcttcatacttcagggggttatttggtttatgcttcaatgacacatgaatatatatttaattataaagaaaaagatatttattggtgcacagctgatattggctggataacagggcatagttatattatttatggacctttagcaaacggcgctacaactttaatgtttgaaggagtgccaaattaccctagcttttctcgtttttgggaaatagttgataaacacaaagttaatattttttatactgcaccgacagcaataagagcgctgatgagagaaggagatgggcctgtaaaaaaaacaaaaagagatagtttaaaacttttaggaactgttggggagccaattaatcctgaggcatggaagtggtactttgaagtaccagggaatagtaattgtccaatagttgacacatggtggcaaacagagactgggggtatttaat

SEQ ID NO: 308953 - DNA, 559 bp, Unknown
  Bacterial polypeptide expressing nucleotide sequence isolated from the Sargasso Sea
tatgaaaaataattttaaagaaatttacaacgattctcttaacaagcctgaagaattttggaaaaatatttcagaagatgtgttttggtttaaaaaaccaaataaaattttaaacaaatctaatcctccattctacaaatggtttgaggatggaattactaactcatgctataatgcattagatcttcatatagaccaaggtcgaggggataaaactgcattaatatatgacagcccgataacggggaacaaagccaaattcacatttaatcaattaaaacaaaaagtttcaaaatttgcaggcgctttggtcaaacaaggaattacaaagggagatagaattattatttatatgcccatgatacccgaggctgttgtcgcaatgcttgcttgtggaagaattggagcaattcactcagtagtgtttggtggatttgcatcaaatgagttagctagcagaatagacgatagtaaagctaaaattctaattactgcttcatgtggggttgaacctggaagaacagttgaatatcgtcctctagtagacggtgctttaaaa

SEQ ID NO: 308954 - DNA, 757 bp, Unknown
  Bacterial polypeptide expressing nucleotide sequence isolated from the Sargasso Sea
atgagcgaatcaacaattgaagagttttacgttgaggatcgaacatttccgccagatccagattttgtaaaaaaagcattgattaatgattcctctcaccatgatgaagctatctctgactatgagtcattttgggctagacaagcgagagatttgattacgtgggatgaagatttccatacaacacttgagtgggagcttccttttgcaaaatggtttgtcggagggcgactaaatatttcctacaactgtttagaccggcatgtagaagcaggttacggagaccgaattgcatatttttgggaaggagagcccggtgacaccagaaaaattacatatcaggatcttcttgtggaagtttccaaattcgcgaatgttctaaaagaaataggtttgaataagggtgatcgagtcgctatttacatgccgatgattcccgaacttcccatagcgatgcttgcttgcgccaggattgggttggttcatagcgttatattcggaggattttcacctgacgcgataattgaccgttgtgaagatgctcaagcgcgtctaattattacagccgatgctggttaccgaagaggtattccatctcctttaaaaccaaatgttgacaaggcgttggagagtggtgcttcgtctgtggaaaatgtaattgttgtcaatcgatgtgatctcgaaacgcaaatggagaagggacgtgatttttggtggcatgatctggttgacaaggcagactcgaattgcccacctg

SEQ ID NO: 308955 - DNA, 327 bp, Unknown
  Bacterial polypeptide expressing nucleotide sequence isolated from the Sargasso Sea
aagtggcagaagccgcagtagttggatatcctcatgatattaaaggtaacggtttatattgctacgtaactcttaatgtaggtgaagaaccaaatggagaacttgaaagagatttaaaattatgggtaagaaagcaaattggacctatagctacaccagatctaatccatttttcacccggacttcctaaaacaagatctggaaaaataatgagaaggatattgagaaaaattgcagcaaatgagcatgatcaactcggtgatacaactacacttgcagatccttcagtagtaaagagcctagtaagcgaaagaaaaaatatttaaa

SEQ ID NO: 308956 - DNA, 863 bp, Unknown
  Bacterial polypeptide expressing nucleotide sequence isolated from the Sargasso Sea
tatgttcgaaggtgtttcaaattacccggatagttcaaggtggtggcagatagtagacaaatataaagtcaatactttttatacagcgccaacagctataagggccttgatgagagaaggtgatggcccagttaataaaactactagaaaatctctaaaactattaggaactgttggagaacctataaatccagaagcgtggatgtggtattacaaaactgttggtaattcaaaatgtccaatagtcgatacatggtggcaaacagaaacgggaggaattcttatagcaccacaaactggagctattccacttaaacccggatcagcaacaaaacctttttacggaattaaaccagtgctagtcaataaagacggtaaagaaataaaaggtgaaggtgaaggaagactttgtatagctcaatcttggcctggtcaaatgagaactgtatatggtgatcatcaaagatttattgatacatatttttcacagtttgatggaaaatatttcactggagatggatgtaaaagagataaagatggctactattggataactggtagagtagatgatgtaattattgtctctggtcataaccttggtactgctgaaattgaaagtgcctttgttgcacatcccaaagtagctgaggctgctgtagttggatatcctcatgatattaaaggaaatggtttatattgttatgtcaccctcaatgcaggtgagagtgagacaggcgatttagatagagaattaaaactttgggtgagaaaacaaatagggcccttggcaacaccagatctaattcattttaccccaggacttccaaagactagatctggtaaaattatgagaagaatttaag

SEQ ID NO: 308957 - DNA, 796 bp, Unknown
  Bacterial polypeptide expressing nucleotide sequence isolated from the Sargasso Sea
aacagttggtgagccaataaatccaaaagcatgggtatggtatcaagaaaaaattggtaatggaaaatgtccaatagtagatacttggtggcaaacagaaacaggggcaaacatgatcgctcccttgcctggtgttacgccaacaataccaggaacatgcacgaaaccattaccaggcatagtagcaggaattatcgatagtgacggaaatgaaatactctctaagaatcaaggaggcaatctagttatcaaaaaaccatggccgtccatgctgaggggtatttggggtgataagaatagatacatcagcacatattggaaaaaatatgataataaatattatgtcactggagatacagccagatatgatgagtatgggaatatctggattatgggtagatctgatgatgtagtgaatatatcaggacatcgtttaggtacaatggaaattgaatcggctattgtctctcatccctttgttacagaatctgctgtagtaagttataaacatgaaataaaaggtgaagccattcatgcatttataaccttaggagatgaatattctaaaaatactggatcagaaactgctgaagaaataagaatatgggttaaagataaaataggatctattgcaaaaccagataaaatatctttttcgacatcattaccaaaaacaagatctggtaaaataatgagaagacttcttagaaatatagcaaggggagaagatatatcaggagatacatcaacattagaaaatgaagatatattggatcagttaaagaaaattctataa

SEQ ID NO: 308958 - DNA, 904 bp, Unknown
  Bacterial polypeptide expressing nucleotide sequence isolated from the Sargasso Sea
aaagaggtatgtaaagcagctaatgcattaaaaacaattggtgtaaaaaaaggagatttggtatgtatttatatgccgatgattcctgaagcaatgtttgcgatgttagcttgtgcaagaattggcgcacctcattcagttgtctttggaggattttcttcagaagctttaaaagataggataattgatggaaacgccagatttgttattactgctgatggtggctttagaaaagataaggtgattgaacttaagaaagcagttgatgcggccattgaaagtggggcagataaagttgtagaaaaagtaattgttgttcaacgatcccaaaaaaatattgcgatggtcgataatagagatttctggtggcacgaattagtaaaagatcaaaaagatcattgtgaaccagaaataatgaatagcgaagatagactttttatcctttatacttcaggctctactggaaaacccaaaggtgtagttcacactacaggtggttacaacctttggtcccatttgacatttaaatggatttttgacttaaaagatgacgatatttattggtgtactgctgatgttggttggattacaggtcatagttacatagtttatgggcctttatctaatggtgctacaaccttaatgtatgagggagtgccaagaccctcaaatttaggagctttttgggaaattgttcaaaaatataaggtttctattttttatactgcaccaactgcaataagagcatttatgaagtctggccgtgaaatacctgataaatataatttggagagtcttagacttttgggcacagttggagaaccaattaatcctgaagcatggatgtggtacaaggatgttattggtaaagataaatgccctattgttgatacttggtggcaaa

SEQ ID NO: 308959 - DNA, 705 bp, Unknown
  Bacterial polypeptide expressing nucleotide sequence isolated from the Sargasso Sea
aaacggaaactgggggcatcttgatttcacctcttcctggtgctattgctcaaaaaccgggttcagcaacaaagcctttctttggtatccagccagagatcatggatgctgaaggaaatatattagaaggcgcttgtgaaggatcattgtgtcttgcagattcgtggccaggacaaatgagaactgtgtacggcgatcacaaaagatttattgaaacttatttttctcaatttgatggaaagtatttcaccggtgatggatgcaagcgtgatgaagatggttactattggatcacaggacgtgttgacgacgtcattaatgtatctggtcaccgcatgggaacagccgaagttgaatcggctttagttgcacatccaaaagtcagtgaagccgctgttgttggctatccccatgacattaaaggccagggaatttatgcttacgtaaccttaaacgcgggtgaagaaacttctgatgaattatataaagagctggttgcttgggttcgaaaagaaattggtccaatcgcatcacctgatcttattcaatgggcaccaggtcttccaaaaactcgttctggtaaaatcatgagaagaattttaagaaagattgcagaaaatgaatacagcaatcttggcgatacatctactttagccgaaccggcagtagttgatgatttaatcgacaatcgaatgaacaagtaat

SEQ ID NO: 308960 - DNA, 887 bp, Unknown
  Bacterial polypeptide expressing nucleotide sequence isolated from the Sargasso Sea
aatggctttagaaaatcttgattggtttgaaaagttttcatctgtgcataatgaaagcttttcggatgctaaatggtttgaaggtgggaaaataaatgttgcacataattgtattgaccgccatttaaaaacaaattctgaaaagacagctttaatttgggaaggtgatgatccaaataagagccaagaaatctcctataagaaattgcatgaagaagtttgtaggctagcaaatattctaaagaaattaggcgcaaaaaaaggatcgagagtttgtatttatatgcctatgattcctgaagcgatttactcaatgcttgcatgtgcaagaattggtgctattcactcagtggtgtttggtggtttttctgctgaatctctaaaagataggattctggacgcagactgcagaattttgattacagctgatgaaggagtcagaggaggaaaatcaatccctttaaaaagtaatgttgataaagcattagaatcttgtcctcaagtctctgcttgtcttgttgtaagaagaacaggtgcaaaaataaatttggtccatgaaagagatcattattacgatgagatatacaaaaccgtaagtgctgattgtgagtgtgaagagatggatgcagaagatcctctatttatattgtatacctctggttcaactggtaaaccaaaaggtgtgatgcatacaactggtggatatcttctgggtgctcatatgagctttaaatatttattcggttataaagaggctgataattattggtgtactgctgatgttggatggataactggtcatacctatattgtctatggacctcttagtaatgctgctaccacacttgcatttgagggtattcccacatatccatcagcatcaagat

SEQ ID NO: 308961 - DNA, 622 bp, Unknown
  Bacterial polypeptide expressing nucleotide sequence isolated from the Sargasso Sea
catttccggcatgccggcctatcgtgcgctcgccgccgaagccgaaaacgattacgaaggattctgggcgcggctcgcgcgcgagggtctggcgtggcacaagccgttcacgaaagtgctcgacgagtccaacgcgccgttctacaagtggttcgacgacggcgagctgaacgcgtcgtacaactgcctcgaccgtcacgtcgaagccggcaacggcgagcgcgtcgcggtgatcttcgaagccgacgacggcaccgtcacgcgcgtcacctatgcggatctcctcgcccgcgtgtcccgtttcgcgaatgccctgaagaagcgcgggatcggcaagggcgaccgcgtcgtcatctatatcccgatgtcgatcgaaggcatcgtcgcgatgcaggcctgcgcgcgcatcggcgcgacgcactcggtcgtgttcggcggcttctccgcgaagtcgctgaacgagcggctcgtcgacgtcggcgcaaccgcgctcgtcacggccgacgagcaggcgcgcggcggcaagacgctgccgctgaagagcatcgcggacgaagcgatcgcgctgggcggctgcgaggccgtgaagagcgtgatcgtctatcgccgcaccggcggcaag

SEQ ID NO: 308962 - DNA, 676 bp, Unknown
  Bacterial polypeptide expressing nucleotide sequence isolated from the Sargasso Sea
ctcctcaagtggggctattgatttaaaaccaggctcagcatctaaacctttttatggaattgaaccatgtatagtaaataaagatggagaagaacaaagtggtgaagcagagggaatgttatgtcttcaaaattcttggccaggtcaaatgcgaagcgtgtatggtgatcacaaaagatttatatcaacttatttttcacaatttgatggaaagtattttactggagatggatgtagaagagacaatgatggatattattggataactggaagagttgatgatgtaataattgtatcaggtcataacctaggaacagcagagattgaaagtgcttttgtttctcatccaaaagtatctgaggctgctgttgttgggtatcctcatgatataaaaggcaatggattatattgctatgtttctcttattgttggaactgaaagcaatgaagatttaaagaaggaattggttcaaaccattaggtcaaaaattggtccgattgctacccctgattttatacattttactgacgggttacctaaaactcgctcaggaaaaataatgagaagaatattgagaaaaattgcagcaaatgaagaggatcaattaggggatataacaactttagcagatccaagtgtagtagataaattaataaacaataaattaaataattag

SEQ ID NO: 308963 - DNA, 556 bp, Unknown
  Bacterial polypeptide expressing nucleotide sequence isolated from the Sargasso Sea
aatgagttatcaaaaggtttatgacgactggaagcaggaccctttagaattttggagaaaccaagcaaaagaaatttcttggtacaaaggtcctgacaaaattttggatgatagtaaaaagcctttttataattggttcacgggtggggcaataaacgcttgctataattgcgttgacagacacatcgagaatggaaaaggggaagatatcgcaataatttacgatagcgctatgtgtgaaaaagtaagaaagatttcctatttagagcttaagcaaaatgtggcaaagttagcaggagctcttaaaggaaagggcattaaaaaaggtgacagagtaattatatatatgccgatgatcccagaggcggtagttgctatgcttgcgtgcgctaggcttggagctattcattctgtagtttttggaggatttgcttcaagtgagttagctgtaaggattgacgattgtaacgcaaaagcggtcattgcgggctcctgtggtttagagcctggcagaattgttccctataagcccttgctcgatgaagcaattttatta

SEQ ID NO: 308964 - DNA, 746 bp, Unknown
  Bacterial polypeptide expressing nucleotide sequence isolated from the Sargasso Sea
tcctgaatctgctgttgcgatgcttgcctgcgctcgcattggagcgccacataccgtggtatttggaggattcagtgctgaatcactcaaagagcgaatcaacgattgcggggcaaaggtcgttgtgactgctgatggaggctatcgtcgcgggaaaaagattccgctcaaagatgctgtggatggtgcactctctggaggttgtaagtcggtaaagagtgttatcgtggctaaacggactggtcaggatgtcaaaatgagctcaaaggaccactggtatcatgaagaaatggcaaaggcttcagaccaatttgaagccgtcgaactcgacagcgagcacccattattcattttatataccagcggtagtaccggtaaacccaaaggtattttacacacgactgctggatatttacttggagcacatctgtctaccaaatatgtcttcgatctcaaagagcaggatatcttctggtgttctgctgatattggttggattaccggccacagctatgtggtttatggagtgctctccaatgggggaaccacgcttctttatgaaggggcccctaattatccagagcctgaccgtttctggcagattattgaagaccataaagttgatattttctacacagcaccaactgcaatccgtgccttcatgaaatggggggatgggcacgtgctcaaacatgatctcagctcattacgattattaagaacggtcggggagccgattaaccctg

SEQ ID NO: 308965 - DNA, 919 bp, Unknown
  Bacterial polypeptide expressing nucleotide sequence isolated from the Sargasso Sea
aaaacgagaaaatcgaaaacaagaagaaaaagaaaatccaaatcgaaaaaatctaaatccagaaaattcaattttaaggcgcctaaacttcttgaagatggtgacggtaaatccttaattaaagtttcagatagctgggctaatcatgcctatgtaaacgaatctaaatataaaaagaaatataaactctcaatcaaagaaaatgataaattttgggctaaggagggaaaaagaattaattggataaaaaaatatacaaaaattaaagacgttaagtatagtaaagatgaagtcaaaattaaatggttttatgatggaacgttaaatgcttccgctaattgcattgatagacatctaaaaaaaaatccaagcaaaactgcaataatctgggtaggcgatgatccagctgactctaaaaaaatttcttacaaagaattacatcaaaatgtaagtaaagctgcaaatggacttaaaagtttgggtgttcaaaaaggagatcgggttacaatttacttaactatgattccagagctagcctatgttatgcttgcttgtgcaagaataggtgccgttcattcaattatatttggtggcttttcaccagattcgattgcgacaagaataactgattgtgagtcagaatatttaataactgcagatgaaggagtaagaggtggaaaaataattcctcttaaaaaaattgcagatgaagctcttcaacagtgtcctaacgtgaaaaaatgtgttgttattgagagaacaggtaatcaggtaaactggaatgatgaaagagatgtttcttacaaaaaactaatttcttctgtaccgactaaatgtgatcctgaagaaatgagcgccgaagatcctttatttatactttatacatcggggtctactggaaaaccaaaaaggagtttac

SEQ ID NO: 308966 - DNA, 839 bp, Unknown
  Bacterial polypeptide expressing nucleotide sequence isolated from the Sargasso Sea
gctgtttattctttatacttctggatctactggtaaaccaaaaggtgttttacatactacaggcgggtatatggtttatgcttcaatgacacatcagtatatttttgattacaagaacaaggatatatattggtgtactgcagacattggttgggtgactggacacagctatattatttacggacctctggctaacggtgctaccactattatgtttgagggtgttcctaattatcctgatagttcaagatggtggcaaatagttgataaatacaaagtcaacattttttatacagctccaacagcaattcgtgcactgatgcgtgagggagatggtcctgtaaaaaaaacaagtcgaaaatcacttaaacttcttggaacagtaggagaaccaataaatcctgaagcatggatgtggtattacaaaacagttggtgaaagaaaatgtccaattgtagatacttggtggcaaaccgaaactggtgggattttaattgctcctcagcctggtgctataagtttaaaacctggttcggcgactaaacctttttacggtatcaaacctgcaatagtagatgagtcaggaaaagttttaaaaggagcttgtaaaggtagactttgcatgactcaatcttggcctggacaaatgagaacagtttatggtgatcacaaaagatttattgacacatatttctctcaattcgatggtaagtattttaccggcgatggatgtagaagagacaaagatggatattattggattactggaagggtggacgatgttataattgtttcaggccacaatctaggtactgccgagatagaaagcgctttcgtag

SEQ ID NO: 308967 - DNA, 888 bp, Unknown
  Bacterial polypeptide expressing nucleotide sequence isolated from the Sargasso Sea
tatggaaattaaaaaagagtggcttgtacatgcaaaggttaatgaagataaatattcttcaatgtatgataattctcttcaaaacaatgataaattttgggcagatcaagcacaaagggtcgattggatcaaaaaatttacaaaaataaaagatataaaatattctaaagatgatgttagcattaaatggtttgaagacggcattcttaatgtgtcttataattgcatagataggcatgctgaaaataatcctgataaagttgctataatttgggaaggtgatgatccaaatgaaacaaataaaataacctacagagaccttctaataagtgtatcaaaagcagcaaatgtactaaaaaaaattggagtaaaaaaaggtgatcgagtaacaatatacttaacaatgatacctgagttggcctacattatgttagcatgcgcaagaattggagcagttcactcaataatatttggaggcttttctgcagagtcaatagcaggtagaataaaagattgtaaatcagattatgtagtaacagcagatgaaggagttagaggtggaaaaactattcctctgaaattaactacggataaggcactagaaacatgtccggatgttaaaaaatgtttagttgttaaaagaacaaataaggagatagagctaaaaaaagatagagatatattttatgatgatattttaaaagatgttgatagtttttgtgaaccagaagtcttaaacgctgaggatcctttatttattttatatacgtctgggtcaactggtaagcctaaaggcgtaatgcacacaactggtggttatatagtttatgcttcaatgacacatgaatatatttttaattacaatgatggagatatatattggtgcac

SEQ ID NO: 308968 - DNA, 463 bp, Unknown
  Bacterial polypeptide expressing nucleotide sequence isolated from the Sargasso Sea
tatttcactggtgatggttgtcgtagagataaggatggatactattggataaccggaagagttgatgacgtaataattgtatctggtcataatttaggaacagcagaaattgaaagtgcatttgttgctcatcctaaagttgctgaagccgctgtagttggatatccacatgatataaagggaaatggattatattgttatgttactttaaatgtcggcgaacaacactcactagatttagaaagggaattaaagctttgggtaagaaaacaaattggagcgatcgctacacctgatttaattcagttctctcctggattgccaaaaactagatctggaaaaataatgagaagaattttgagaaaaattgcagcaaatgaacatgatcaacttggtgacacaactactttagcagacccgggggttgttaaaagtttagtagagaacagaaaaaataattaaa

SEQ ID NO: 308969 - DNA, 511 bp, Unknown
  Bacterial polypeptide expressing nucleotide sequence isolated from the Sargasso Sea
atgacacaagaaatttataatcctaatcccggattttcaaatccgcatataaaagattttgatgaatatttaagtctatataaagagtcaattgagaatcctgaaaaattctttggcgatctggcaaaagaaaatatttcatggattgaggattttaaagaggtacataactctgagttccaagaaactaaatggtttgttggaggaaaaacaaacataacgctcaactgtattgatagacaccttgaaaaaaatggcgataagattgccttaatttgggaaggtgatgagccaggaaactctaaagagataactttcaaagaattgcactctgaggtttgcaggtttgcaaatatccttaaaacacttcaaattaaaaaaggctccagaatttgtatttatatgccgatgattcctgaagctgcatttgcaatgtttgcatgtgcaagaattggtgcgatccactcagttgttttcggtggattttctccagaattctttaaaggatagg

SEQ ID NO: 308970 - DNA, 459 bp, Unknown
  Bacterial polypeptide expressing nucleotide sequence isolated from the Sargasso Sea
caactggtgatggtgctagaagagacaaagatggatattactggattacaggaagagtagatgatgttttaaatgtatctggtcatagattaggaacagccgaggttgagagcgctttagtcctacatcctaaagtggcagaggcagcggtagtgggttatgagcatgagattaaagggcaaggcatctattgttatgtaacactgatgactggagagccttcaagtgataaattaaaagtgtctcttgttgatctagtttctaaggaaataggacccattgccaaaccagacataattcagtgggccccttctttgcctaaaactagatctggaaaaattatgagaagaattttaagaaaaattgcttctaatgaagttgaaaaccttggtgatactacaactctagctgagccttctgtagttgaagatttaataaaaaatagggaaaattactaaa

SEQ ID NO: 308971 - DNA, 844 bp, Unknown
  Bacterial polypeptide expressing nucleotide sequence isolated from the Sargasso Sea
ataatctacgatagcccaataacaggagtaaaaaaaaatatctcttataaagaattaaaagaaaaagtttctttatttgctggagctcttaaaaatcaaggtattagtaaaggagatagagtaattatctatatgcctatgatacctgaagcagttatcgcaatgttagcatgtgggagaattggtgcagttcactctgtagtatttggtggatttgcagctaacgaattagcaagtagaatagatgactctaaggcaaaaattattgttacagcatcatgtggttatgaacctggaagaacagttcattataaacctttagttaacaaagctttagaacttgccactcataaacctgaaaaatgtataatttttcaaagagaaaaagataaagctgaattaaatccgaagattgatatcacatgggaagaagcgcataaaaacgctaaagctacagaatgtgaaaaaatgaattctaatgactatgcatacatactttatacatcaggtactacaggtcttccgaagggaattgttagagatattggtggtcacatcgttgcattaaaatggacaatgaaaaatatttataatattgaacctaatgacgtttggtggtccgcgagtgacataggttggattgtcggacattcttatattgtatatgcgcccttattttatggatgtacaacagttttgtttgaaggaaaaccagtaggaactccagatgctggtgttttttggagaataatttcagaacataaagtaaaatcactttttacagcgccaactgctataagagctataaaaaaagaagatccagatggtaaatttttaagaaata

SEQ ID NO: 308972 - DNA, 784 bp, Unknown
  Bacterial polypeptide expressing nucleotide sequence isolated from the Sargasso Sea
cactatttatcttacaatgatacctgagcttgcatatgtaatgttagcttgcgcaagaattggagcagttcactcaataatttttggcggtttctcgcctgactctattgctacaagaattaatgattgtaaatcagactatttaatcactgcagatgagggtgttagaggtggtaaaattattccattaaaaaaaatagcagatgaagcactcgaccagtgccccaatgtgaaaaagtgtgtggttgttcagagaacaggtaatcaagtaaattggaataatgaaagagatgtctcttatagtcagatgatttcctctatgagcaacaaatgtgatcctgaagaaatgaatgcagaagatccattatttattctttatacttccggatcaactggtaagccaaaaggagtacttcataccacaggcggatatatggtttacgcttcaatgactcaccaatatattttcgattataaaagtaatgacatttattggtgtacggctgatatcggatgggtaactggacatagctatatcatttatggtcctttagccaatggagctacaactataatgtttgaaggagttcctaattacccagacagctctcgttggtggcaaatagtagataaatataaggtcaatatattttatactgcgccaactgctattagagctttaatgcgagaaggagatgctcctgtaaaaaaaacaagcagaaaaactttaaaattattgggaacagttggagaaaccaataatccagaggcatggatgtggtat

SEQ ID NO: 308973 - DNA, 908 bp, Unknown
  Bacterial polypeptide expressing nucleotide sequence isolated from the Sargasso Sea
attgaaccctcatattaaggactttgatgaatataagcagttatatgatgaatcaataaataatcctcaaggtttttttaaaacaatagctaaagaaaatctttcttggattaaagattttaatgaagtccataataataaatttgctgaaagcaaatggttttatgatggaaaaattaatgttagtgaaaactgcatagatcgtcatctaaaagattcatcagaaaagacagcattaatatgggaaggtgatgatccaggtgattctaaaaaatatacatttaaagaattacatgaggaagtctgcaagtttgcaaatgtcttaaaagatttaaaggttaccaagggctcaagagtttgtatttatatgccaatgattcctgaagctgcatttgcaatgctcgcttgtacgagaattggagcaattcattccgtagtttttggtggtttttcacctgaatcattaaaagatagaatccttgatgctgactgtgaagtagttataactgctgatgaaggtatacgtggagggaaaaaagtaccactaaaattaaatgttgatgaagcattgagaaaatgtccaaatgtaaaacatactattgttattaaaagatctgggggtgatgttccttggaatgaagatagagatctatactatgaagatcttattaaaaatgtatcttcatcgtgtgatccagaaccaatggatgcagaagatcctttgtttattctttatacatcaggttctactggaaaaccaaaaggagtcctgcatacaactgcaggttatctgcttggtgctcacatgagctttaaatatttgtttggtataaatgaatcagatatatattggtgtacagctgatgttggctggattactggtcatacatatattttgtatggacctt

SEQ ID NO: 308974 - DNA, 772 bp, Unknown
  Bacterial polypeptide expressing nucleotide sequence isolated from the Sargasso Sea
gaagcctggatgtggtattataatgtcgttggtgaaaaaaagtgtcccatcgtcgatacatggtggcaaacagaaacggggggcatcttaatttcacctcttcctggagctattgctcaaaaaccaggctcagcaacaaaacctttctttggtattcaacctgaaatcatggatgctgaaggaaatatattagaaggcgcttgtgagggatcattgtgtcttgcagattcttggccaggtcaaatgagaacggtatacggtgatcacaaaagatttattgaaacttatttctctcaatttgatggaaagtatttcacaggtgatggatgcaagcgtgatgaagatggttactattggatcaccggacgtgttgatgatgtgattaatgtatctggtcaccgtatgggaacagccgaagttgaatcagctttagttgctcatccaaaagtcagtgaagctgctgttgtcggttatcctcatgacatcaaaggtcagggaatttacgcttacgtaactttgaacgcaggtgaatcaacatctgacgaattatataaagaattagttgcttgggttcgtaaagagattggacccattgcatcacctgatcttattcaatgggcgcccgggcttccaaagacgcgttctggcaaaattatgcgaagaattttaagaaagattgcagaaaatgaatacagcaatcttggcgatacatctacattagccgaaccagcagtagtcgatgatctaatcaacaatcgaatgaacaagtaat

SEQ ID NO: 308975 - DNA, 791 bp, Unknown
  Bacterial polypeptide expressing nucleotide sequence isolated from the Sargasso Sea
ggtaggcgatgaccctaaagtacataaaaaaataacttacaaacaattacatcaagaggtatcaaaagctgctaatggtttgagagagttaggagtaaagaaaggagacagggtaacaatttatttaaccatgatacctgagctagcttatactatgttagcttgtgcgagaataggtgcaatacattcaataatatttggtggattttctccagacagcatttcaggaagaataaatgattgtaaatccgattatgtaattactgcagatgaaggtatcagaggaggaaaaacaattcatctaaaatcaataactgatgaagcattagttgattgtccaaaagtaaaaaaatgtatcgttataaaaagaactggcaataggattaattgggatgctagtagagatgtatggtatcatgagatggttaaaaaagtttcctctaattgtgagcctgaagaaatgaatgcagaggatccactatttatattatatacgtctggatcaacaggtaaaccaaagggagttctacacacaacgggcggttatatggtttatgcttcaatgacccatcaatacatttttaattacaaaccaaaagatatatattggtgtagtgccgatattggttgggttactggacatagctatattatttatggaccgctttcaaatggagcaacaaccatcatgtttgagggtattccaacttatcccgactcctcaagatggtggcaaataattgataaatacaaagtcaacattttttacacagccccaactgcaattagag

SEQ ID NO: 308976 - DNA, 853 bp, Unknown
  Bacterial polypeptide expressing nucleotide sequence isolated from the Sargasso Sea
tgtgaaggagagccaggagataataagaaatatacgtaccaagaacttctcaaagaagtatgcaaagctgcaaatgctttgaaatctttgggaataaaaaaaggtgatttggtatgcatttatatgccaatgattcctgaggcgatggttgctatgcttgcttgtgcaagaattggagctcctcattcagtagtttttggaggtttctcctctgagtcgttaaaagataggttgattgatggtaatgccagatttgttataacggcagatggtggttttagaaaagataaggtaattgagcttaagaaagctgttgatgcgtcaattgaaagtggggcaaataagattgttgaaaaagttattgttgttcaaagaactaaaaaagatatttcgatggtaaacaatagggatttttggtggcacgaattattaaaagatcaaaaagattggtgtgaacctgaaataatgaatagcgaagatagattatttgtcttgtatacttcaggatccactggtaaaccaaagggtgttgttcatactactgcaggttataatctctggtctcacctaacatttaagtggatttttgacataaaagatgatgatgtctattggtgtacagcagatgttgggtggattactggtcatagttatatagtatatggacctttatctaatggagcaacaactcttatgtttgaaggtgttccaagggcatctaacttaggggctttttgggaaattattcaaaaatacaaagttactattttctatacagccccaacagcgataagatcgtttatgaaatctggacgtgaaatccctgaccaatacgatttaagatctttgagac

SEQ ID NO: 308977 - DNA, 730 bp, Unknown
  Bacterial polypeptide expressing nucleotide sequence isolated from the Sargasso Sea
agttaaaaaaggagatcgagttacaatttatttaacaatgatacctgaattagcttatacaatgctagcttgtgcaagaataggcgctattcattctataatttttggaggattttcatctgacagtattgcgggaagaataaatgactgtaaatctgattatgttattacagctgacgaaggtattagaggaggaaaaataattccactaaaatctacaacagatgaagccttagtgcattgtccaaatgtaaagaaatgcgtagtcgttaaaaaaacgaataattatattaattggaatgaagatagagatgtatggtttcatgaaatgacaaaaaatgtttcatcaaaatgtgagccagaagaaatgaatgctgaagatcctttatttattttatatacatctggatctactggaaaaccaaaaggagttttgcatacaactggtggatatatggtttacgcctcaatgacacatcaatatatttttaattataaacctaaagatatttatttttgttctgcggatataggttggattacaggacatagttatataatctatggacctcttgctaatggtgcaacaacattaatgtttgaaggagtaccaacatatccagattcatcaagatggtggcaaataatagataaacataaagtaaatattttttataccgctcctactgctattagagctttaatgagagaaggggaagcgcctggttaa

SEQ ID NO: 308978 - DNA, 895 bp, Unknown
  Bacterial polypeptide expressing nucleotide sequence isolated from the Sargasso Sea
atcccggattttcaatccgcatataaaagatttcgatgaatatttaagtctatataaagagtcaattgagaatcctgaaaaattctttggtgatctggcaaaagaaaatatttcatggattgaggattttaaagaggtacataactctgagttccaggaaactaaatggtttgttggaggaaaaacaaacataacgctcaactgtattgataggcaccttgaaaaaaatggtgataaggttgccttaatttgggaaggtgatgagccaggaaactctaaagagataactttcaaagaattgcactctgaggtttgcaggtttgcaaatatccttaaaacacttcaaattaaaaaaggctccagagtttgtatttatatgccgatgattcctgaagctgcatttgcaatgtttgcatgtgcaaggattggtgcgatccactcagttgttttcggtggattttctccagaatctttaaaggataggattttggatgctgattgcagaattgtaattactgctgatgagggtgttcgaggcggtaaaaaagttcctttaaaagataatgttgatgaggccctaatgaattgtcctgatgttaagaatgtaatcgttgttaacagaaccggcggaaaaattaattggcttgaggatagagatctttggtttcacgaactaaaagataaagttgatgatgtttgcgagcctgagcctatggattctgaagatccgctctttattctttacacatctggatcaacgggaaaaccgaaaggtgttttacacacaacagctgggtatcttttgggagctcatatctcttttaaatatttatttggattcaatgataatgataaatattggtgtacagcagatgttggctggataactggacat

SEQ ID NO: 308979 - DNA, 927 bp, Unknown
  Bacterial polypeptide expressing nucleotide sequence isolated from the Sargasso Sea
caaagtaaaaaaatgtataattttccaaagagacttacataaagctcaactcaaaccaagccaagatttagattggagtgattttattaaagatgcttttttggctaaaccgattgaagtggatgcaaatgatcctttgtatattttatatacttcaggaactacaggaaagcctaaaggagtagttagagacaatggaggacatgcagtatccctaaaatggtctatgaataatatatacaatgtaaaaccaggagacgtatattgggcggcttctgacattggctgggtcgtagggcattcttacatagtatatgcaccattatttcatggttgtactactattttatttgaaggtaaaccgattggaactcctaatgctggaactttttggagaattatttctgagtataaagttaatgttttatttacggcaccaactgctctaagggctgttaagagagatgatccaaagggtgattttataaaaaatttcgatataacaagcttgcaatctttatttcttgctggagaaagagctgatcctgatacagttttatggttagaagataaactaaaagttcccgttattgaccattggtggcagacagaaacaggttggcctgtagcagctaatccacttggtatagaggctcttcctataaaaacaggctcaccaactttagctatgccaggatatgatgtacgagttttatctgaagaaggtattgaggtgccaagaggtgcgttgggtgcaatctctataaagcttcctctaccacctggttcactacctacattatggagtgcagatgatagatatatagaatcgtacttatctaaattcaaaaattactatgagacaggtgacgcaggttatcaagatgaagatgattatttgtatattatgtcaagaactgatgatgt

SEQ ID NO: 308980 - DNA, 821 bp, Unknown
  Bacterial polypeptide expressing nucleotide sequence isolated from the Sargasso Sea
aatgagtgcagaagatcctttatttattttatatacatcaggatcaaccggaaaaccaaaaggtgtccttcatactacaggtggatatatggtttatgcttcaatgacacatcaatatatttttaattacaaaccaaaagatatttactggtgtactgcagatataggttggataactggacatagctatataatttatggtccacttgcaaacggcgccacaacaattatgtttgaaggaataccaacttatcctgacacatcaagatggtggcaaatagttgataaatataaagtaaacatattttatactgctccaactgcaatcagagctttaatgagagagggtgatggaccagtaaaaaaaacgtccagaaaatcacttaaattgctaggaactgttggtgagcctatcaatccagaggcttggcaatggtattataaaactgttggtgaatcaaaatgtcctatagtagatacttggtggcaaacggaaactggaggtattttaattagtccacaaacaggagctatagatcttaaaccaggatcagcaacaaaacctttttacggaattagaccggtaatcgttgatcaagagggtaaggtactgaaaggcgaagcaaaaggtagattgtgcattgctcaatcatggccaggtcaaatgcgaacagtatatggggatcaccaaagatttatagatacgtatttttctcaatttgatggaaaatattttactggagatggatgtagaagagacaaagatggttattactggattactggtcgagtagatgatgtaattattgtttcaggtcata

SEQ ID NO: 308981 - DNA, 703 bp, Unknown
  Bacterial polypeptide expressing nucleotide sequence isolated from the Sargasso Sea
tactggtgggtatatggtttatgcatcaatgactcatcaatatattttcaactacaaaccaaaagatatttattggtgtactgctgatattggctgggtaactggacatagttacattatttatggaccactttctaatggtgcaacaactataatgtttgaaggaattccaaattatcctgacagctctagatggtggcaaatagttgataaatacaaggtgaatactttttatacagccccaactgcaattagagctttaatgcgtgaaggtgataagcctgttaaaaaaacatctagaaaatcacttaaacttttaggaactgtaggagaaccaataaatccggaggcctggatgtggtattataaaacagtaggcaattccaaatgcccaattgtagatacttggtggcaaacagaaactggaggaataatgatcgctccacaaactggtgctattcctttaaaaccaggttctgcaacaaaacctttctatggaattaagccagtgcttgttgataaaaacggtaaagaaattaaaggagctggtgaaggaagattatgtatagctcaatcatggcctggccaaatgagaacagtatatggagatcatcaaagatttatcgatacatatttttctcaatttaacggaaaatattttactggtgatggatgcagaagagataaagatggttattactgg

SEQ ID NO: 308982 - DNA, 917 bp, Unknown
  Bacterial polypeptide expressing nucleotide sequence isolated from the Sargasso Sea
aggaaggaagggaaaagaataaattggataaagccttactcaaaagtaaaagatgttaaatatagtaaagaagaagtaaatattaaatggtactatgatggaacattaaatgcttcggccaattgcatagatagacacttagataaaaaaggaaataagaatgcaattatttgggttggggatgatccttctgattttaagaaaataacctataaagagcttcataaaaacgtttgtaaagcagctaacggcttgaggagcatcggtattcaaaagggagatagagtaactatttatctgacgatgatacctgagttagcttacataatgcttgcttgtgccagaatcggggcagttcactcaattatatttggtggcttttcaccagattctatagctacaagaataaatgattgtgagtctgattatgttgtcactgcagatgagggtgtaagaggtggaaaaataattcctcttaaaaaaattgcagatgaagcaatgatgcaatgtcctaatgtaaaaaaatgcgttgtagttaagagaactggtaatcaagtaaattgggataatgaaagagatgtctcttatgatgaaataatttcaaacgtttcggacaaatgcgttccagaagaaatgggtgcggaagatcctttgtttatactttatacttctggctcaacaggaaaacctaaaggtgtcttacatactactggtggttatatggtttatgcatcaatgacacaccaatatatttttgattataaaaataaagatgtttattggtgcactgcagatattgggtgggttacaggccatagctatattatatatggccctttatcaaatggtgccacaacaattatgtttgaaggggtaccaaattatcctgatagtttcaggtggtggcaaatagttga

SEQ ID NO: 308983 - DNA, 873 bp, Unknown
  Bacterial polypeptide expressing nucleotide sequence isolated from the Sargasso Sea
cccagatatatctagaatgtggaatataattcaaaaatataacgttacaatattttacacaacaccaactgcattacgtatgtttatgaaatttggcgatgacataccaaactcatttaatttatcaacattgagattacttggaactgtaggggaaccaataaatcctgaagtttggaaatggtatttcaatataattggaaaaaaacattgtcctataattgatacatggtggcaaacagaaactggcggaatgatgatttcgtcgttacctggaatagaatcaaatattttaaaaccaggctcagcaacaaaaccaattccaggtgtaagcataagtgttatagatgatgatggaaatgacgtagattcaggcaccaagggttcactaataataaaaaatccatggcctggcatgttaatgacattatggggtgatgatgaaaaatacaaaaatgtctattggtcaaaatttgaaaacatgtactatccaggagattatgcaatacgtgattctgatggatacttttggctattaggaagatcagatgatgtattaaaagtcgcagggcatagaattggaaccgcagagcttgaaagtagtctagtttctaatgataacgttgctgaatcagcagtatgtggaattcctgatgaaattaagggcgaatcaattattgcatttgttgttttaaaagatggtgtagaatattctaatgaaaaactaaatgatagcttaaaagataccgtgagaaatagtgtcggtgcaattgctattccaaaggaattttattttgtgtcaaaacttccgaaaactcgtagtggaaagattatgcgtagactacttaaggcaattgcaaacaaggagaaaat

SEQ ID NO: 308984 - DNA, 940 bp, Unknown
  Bacterial polypeptide expressing nucleotide sequence isolated from the Sargasso Sea
aaaagtttcaaaagcagccaatgttttaaaaaaattgggaattaaaaaaggtgatcgtgtaacaatttatttaacgatgattccagagttagcaattttaatgctagcttgtgtaagaattggtgcagttcattcaattatttttggaggcttttcagcagattcgatttcaggaagagtaaatgattgcgagtctgaatacataataactgcagatgaaggtgtccgaggtggaaaaactattccacttaaatatacagttgatgaagctttaatgagttgtccaaatgttaggaaatgtattgttgttaaacgaacaggtaattatattaactgggatcaaaatagagatgtttggtatcatgatttaattaaagatgttcctaatcattgtgaacctgaggaaatgaatgccgaggatcctttatttattttatatacttctggttcaacaggtaaacctaaaggggttcttcatactactggtggttatatggtttatgcatcaatgactcatcaatatattttcaactacaaaccaaaagatatttattggtgtactgctgatattggctgggtaactggacatagttatattatttacggaccactttcgaatggtgcaacaactataatgtttgaaggtattccaaattatcctgatagttcaaggtggtggcaaatagttgataaatataaagtgaatactttttatacagccccaactgcaataagagcattaatgcgtgagggagataagcccgttaaaaaaacatctagaaaatcacttaaacttttaggaactgtgggagaaccaataaatccagaggcttggatgtggtattataaaactgtgggtaattctaagtgcccaattgtagatacatggtggcaaacggaaactggaggtataatgattgctcctcaaacaggtgctatt

SEQ ID NO: 308985 - DNA, 651 bp, Unknown
  Bacterial polypeptide expressing nucleotide sequence isolated from the Sargasso Sea
aatgtcattagataaaaaaaattcaatcaataacatacttgaagaaaatagaattttccctccatcaaaaaaatttgcagaaaactcaaatattagtactcaagaagaattactaagtttaaaaaaacaagcatcagataatcctattcaattttggaaatcttttgcaaaatctgaattagattggtttgagccatttcaaactgtattagacaacgaaaatgcgccctttttaaaatggtttaaagaagggaaactcaatattacttataactgcttagatagacatattaagagagggcttggaagaaagactgcacttatatgggaaggcgaacccggagatagcaaaaaatatacttacgaagaacttctaaaagaggtatgtaaagcagctaatgcattaaaggcaattggggtaaaaaaaggagatttggtatgtatttatatgcctatgattcctgaagcgatgtttgcgatgttagcttgtgcaagaattggcgcgcctcattcagttgtctttggaggattttcttcagaagctttaaaagataggttaattgatggaaacgcaagatttgttgttactgctgatggtggctttagaaaagataaggtgattgaactaaagaaagcagttgatgcggccat

SEQ ID NO: 308986 - DNA, 760 bp, Unknown
  Bacterial polypeptide expressing nucleotide sequence isolated from the Sargasso Sea
gccaaaaggaatcgtccacacacaggctggatatcttactggtgttactacaacacattctgcagtatttgacgtaaaggaagatgacatctattggtgtgctgcagactgtggttgggtaacaggtcatagttatattgtgtatggacctttagcaaacaaaacaacaagcgttatgtatgagggtgcaccaaacgcaccagacgagaaaagactttggagcatagttgaaaaatataaagtaaatattttttacactgccccgactgcaattagagctttcatgaagtggggagttgagcatccgcaagcacatgacttaacatcactcagattgttaggtactgttggggagccaattaatccagaagcctggatgtggtaccacgaaaacataggaaatgaatcatgtgcaattgtagatacatggtggcagacggagactggttcaataatgattacacctctgccaggcattacgagtacaaaaccggggtcagcgtgtggtccaatgccaggcatagatgcagttgtcgttgatgaaaatggaaatgaagtctcaaaaggtgaagggggatatttagcaatcaaaacaccttggccatcaatgcttagaacagtatttggtgatgagaaaagatatatcgatacttattggtcaaagtatgacgggatgtattttgcaggagatggcgcaaaatatgatgatgatggatacttctggcttctaggaagagttgatgatgttatgaatatctct

SEQ ID NO: 308987 - DNA, 783 bp, Unknown
  Bacterial polypeptide expressing nucleotide sequence isolated from the Sargasso Sea
ctattaatccagaagcatggcaatggtattataaaaccgtaggggagtctaaatgcccaatagtagacacttggtggcaaactgagactggtggtattttaattagtccacaaacaggagccatagatcttaaaccaggatcagcaactaaacctttttatgggattaagccagtaatcgttgatcaagaaggtaaagctctcaaaggtgaggcaaagggtagattgtgtattgctcaatcatggcctggtcaaatgcgaacagtatatggggatcaccaaagattcattgatacatatttttctcaatttgaaggaaaatattttactggtgatggatgcagaagagacaaagatggttattactggattactggtcgtgtagatgatgttattattgtttcaggtcataaccttggtactgcagaaatagaaagtgcatttgttgctcatccaaaagttgctgaggctgcagtggttggttatcctcacgacataaagggcaatggtttatactgttatgtaactcttaacgcaggggaaaacccagatggagacttagaaagagatctaaaactttgggtaagaaaacaaataggaccaattgcgacaccagattttattcagtttgctccaggattaccgaaaactagatctggaaaaataatgagaagaattttacgaaaaattgcagcaaatgaacatgaacagcttggagatacaactacactggcagacccatctgttgtgtcctcattagtagataatagaaaaaatatttaaa

SEQ ID NO: 308988 - DNA, 268 bp, Unknown
  Bacterial polypeptide expressing nucleotide sequence isolated from the Sargasso Sea
aatgagaacggtttatggtgatcatgatagatttattaaaatatatttttctcaatttgatggcaaatattttataggcgatggttgcaaaagagataaagatggatattattggattactggaagagtagatgatgtaataatagtatcgggatataatttagggactgcagaaatagaaagtggttttgtagctcatgctaaagtttctgaagcagcagtagtcggttatcctcatgatattaaaggaaatggattatattgttat

SEQ ID NO: 308989 - DNA, 424 bp, Unknown
  Bacterial polypeptide expressing nucleotide sequence isolated from the Sargasso Sea
atgactgaaatcattgaagcggggaatatagcctctcgaagaacctttttcagcgaagaaaaatttcaacaatcttatgaggactccattgccgatcctaatgacttctgggcaacacaagcaatggagtttctgacttggcaacaaacttggtcgcaggtctcaagatgtaacatggcaagaggtgagattgaatggtttctcgatggaaaactcaatgctagcgaaaactgcatcgatagacacttggctgataaagcgaatcgaacagcaataatttgggagggcgatgaccccggtgatagcaaaaaaatcagctatagggacttatttgaggaggtttgcaaactagccaatggactcaaatcactaggcgtcaaaaagggagatcgagtgtgcatttatatgcccatgataccggagg

SEQ ID NO: 308990 - DNA, 795 bp, Unknown
  Bacterial polypeptide expressing nucleotide sequence isolated from the Sargasso Sea
ttaacatttaaatggatttttgatttaaaagatgacgatatatattggtgcactgctgatgttggttggattacaggccatagttatatagtctatgggcccttatctaatggcgctacaaccttaatgtttgagggagtaccaaggccctctaatttaggggccttttgggaaattgttcagaaatataaggtttccattttttatactgcaccaacagcgataagagcatttatgaagtctgggagagaaatccctgataaatataatctcgaaagcctcagacttttgggtactgttggagaaccaattaaccctgaagcatggatgtggtacaaagatgttattggtaaaaataaatgtcccatagtcgatacttggtggcaaactgaaactggtggtgtgatgataagccctttgcctggagttgttccgacaaagccaggatcagctactttcccactgccaggaatcgaagttgaaatcgttgacaagaatggagataaggtaatggagaacgagggtggatatttaattattaaaaaaccatggccaggaatgatgagaacaattcacgggaattcagatagatatttggacagttattgggaatatatttcctttaaaggagaaaaaaatgtttattttgctggagatggagcacgcattgatgaagatggatatatatggattatggggagagttgacgatgttataagtgtctcagggcatcggttaggaacaatggaaatagaatgtgctttggtaagtcataaatcagttgcggaagctgcc

SEQ ID NO: 308991 - DNA, 882 bp, Unknown
  Bacterial polypeptide expressing nucleotide sequence isolated from the Sargasso Sea
aaatctgaaatagattggtttgagccattccaaactgtattagatagtgataatgcccccttttttaagtggtttaaagaagggaaaatcaatattacatataattgcttagataggcatattaaaaaaggacttggagcaaaaactgcacttatatgggaaggcgaacccggagatagtaaaaaatatacttacgaagaacttctaaaagaggtatgtaaagcagctaatgcattaaaagcaattggtgtaaaaaaaggagatttggtatgtatttatatgccgatgattcctgaagcgatgtttgcgatgttagcttgtgcaagaattggcgcgcctcattcagttgtcttcggaggattttcttcagaagctttaaaagataggttaattgatggaaacgcaagatttgttattactgctgatggtggctttagaaaagataaagtgattgaactcaagcaagcagttgatgcggctattgaaagtggggcagataaagttgttgaaaaagtagttgttgttcaacgaacaaaaaaaaatatttcgatggttgatgatagagatttatggtggcatgaattactaaaagatcaaaaagatcagtgtgaaccagaaataatgaatagcgaagatagactttttattctttatacgtcaggctctactggaaagcccaaaggtgtagttcacactacaggtggttacaatctttggtcccatttgacatttaaatggatttttgatttgaaagatgacgacatttactggtgtactgctgatgttggttggattacaggccatagttacatagtttatgggcctttatctaatggtgctacaaccttaatgtatgagggagtgccaagaccctcaaattta

SEQ ID NO: 308992 - DNA, 874 bp, Unknown
  Bacterial polypeptide expressing nucleotide sequence isolated from the Sargasso Sea
atgatccaaaagacagccaaaggatttcttacaaacaacttcatcaaaaagtttctaaagctgcaaaatggtttaaaaaaattaggaattaaaaaaggagatcgagtaacaatttatttgacgatgataccagagttagcaattttaatgctggcctgtgtaagaattggtgcagttcattcgattatttttggaggtttttcagcagattcaatttcaggaagagtaaatgattgtgagtctgaatacatcataactgctgatgaaggagtgcggggtggaaaaactataccactcaaatatacagtcgatgaagctttaatgagttgtccaaatgttaagaaatgtattgttgttaaacgaacaggtaattacatcaactgggatcaaaatagagatgtttggtatcatgatttgattaaggacgttcctaatcattgtgaacctgaggaaatgaatgcagaggatcctttatttattttgtatacctctggttcaactggcaaacctaaaggggttcttcatactactggtggttatatggtttatgcatcaatgacacatcaatatattttcaactataaaccaaaagatatttattggtgtactgctgatattggttgggtaactggacacagttatattatttatgggccactttcgaatggtgcaactactataatgtttgaaggaatcccaaattatcctgatagttcaagatggtggcagatagttgacaaatacaaggtgaatactttttatacagcaccaacggcaataagagcattaatgcgtgaaggagataaaccagttaaaaaaacatctagaaaatcccttaaacttttagggacagtcggagaaccaataaatccag

SEQ ID NO: 308993 - DNA, 907 bp, Unknown
  Bacterial polypeptide expressing nucleotide sequence isolated from the Sargasso Sea
aataaaaataataaaaactcttcaacagaactaattattaaaactaaaccagagtggattaaaagtagcttagctaataaaaataaatatcaagaaaagtataatcaatccataaaaaataatgatgaattttggagaaaagaaggaaaaagaattacttggataaaaccatataaaaaaattaaagatgtaaagtatagtacaaaagaagttaaaattaattggtttcaagacggaactttaaatgcttcagcaaattgtattgataggcatttaaaagataaaaaagataaaacagcaataatttgggttggagatgatcctaaggatagccaaaaaatatcttatagacagcttcaccaaaaagtttcaaaagctgcaaatggtttaaaaaaattaggtattaaaaaaggtgatcgagttacaatttatttaacaatgatacctgaactagcgattttaatgcttgcttgtgtaagaattggtgcagtgcattcaattatttttggtggattttctgcggattcaatttctggaagagtaaatgattgtgagtctgaatatattattacggctgatgaaggtgtaaggggtggcaaaactattcctcttaaagatacaacagatgaagcgttactcaattgtccaaatgtaaaaaaatgtattgttgttaaacgaacaggtaataatatccgatggaattataacagagatgtttggtatcatgatttaattaaagatgtttcaaataaatgtgaacctgaagaaatgaacgctgaggatcctttattcatattatacacatctggttcaactggaaaaccaaaaggggttttacatactacaggtggttatatggtttatgcttccatgactcatcaatatatttttaattataaaccaaaag

SEQ ID NO: 308994 - DNA, 834 bp, Unknown
  Bacterial polypeptide expressing nucleotide sequence isolated from the Sargasso Sea
aatatggattttaaggatatataccaaagatctataagcaaacctgaggaattttggaaagaaatttcaaatgatatcttctggtttaagaagccaaccaaaatattaaacagcgataaacctcctttttataagtggtttgaagatggaattacaaatagttgttacaacgccctggattttcatattgatcaaggtagaggtgaaaaaacagccttaatatacgacagtcctataactagtaataaaggtaaatttacatttacacaattaaaagacaaagtttctaagtttgcgggtgctttatcaaatcaaggggtaaaaaaaggtgacagggtaattatttacatgccaatgataccggaggcagtggtagctatgcttgcttgtggaagaattggagctattcactctgttgtatttggaggttttgcatccaatgaacttgcaagcaggattgatgatagtaaagctaaagttctagtaaccgcctcctgtggatttgaaccaggtcgaactgttgagtatcgtccgctaatagatggtgcactaaaactagctaaacacaaagtggaaaaagttattttatttcaaagacaaggtcatgaaataaatcttaattccccattagagataagttgggaggagtccttatcgaatgcgggtgatatggattgtgtagagatgggctcaaatgagttcgcttacattttgtacacatctggaactactggagtaccaaaaggaatcgtaagagatattggtggccacatagtagctttaaaatggactatgaaaaatatatataatattgatacagacgatgtatggtgg

SEQ ID NO: 308995 - DNA, 747 bp, Unknown
  Bacterial polypeptide expressing nucleotide sequence isolated from the Sargasso Sea
acaaacctcccgcgccagcctgaagctgctgggcaccgtgggcgaacccatcaacccggaagcctgggagtggtattacagggtagtcggtgacagccgctgcccgattgtagacacctggtggcaaactgaaaccggcgccatcatgattgcgccgctacccggcgcagtggacctgaaagccgggtctgccactctgcccatgttcggggtgcaacccggcctaatggaccctgacggtaacgaactggacggtgccgcctccggcaacctagtgctcaaggccagttggcctagccaaattcgcaccgtctatggcgatcaccaacgcctaatcgatacctacttcagtgcctacaagggctgctacttcactggcgacggcgcccgccgcgatgaagatggctactactggattactggccgggtggatgacgtgctcaacgtgtctggccaccgcctaggcacagctgaaatcgaatccgctctagtactacaccccagcatctctgaagcggccgtggtgggctaccagcatgacgtaaaagggcaagggatctatgcctacgtatcgttaatggccggcaaggaaggcagcgaagagctggtcaaggctctccgcgacctagtgacacaggaaattgggcccatcgccaagcccgacctgattcactttgcaccgggcctgccgaaaacccgctctggcaaaatcatgcgccgtattttacgcaaaatcgccgcggatga

SEQ ID NO: 308996 - DNA, 710 bp, Unknown
  Bacterial polypeptide expressing nucleotide sequence isolated from the Sargasso Sea
aaaagattcaaaacatattagctataaagcacttcacaaaaatgtctgtaaagcagcaaatggtcttaaaagtcttgggattcaaaaaggtgacagagttacaatttatctaaccatgatccccgagttagcctacgttatgctagcttgtgcacgtataggtgcagttcattctataatattcggtggattttctccagattctatagccggaagaattaatgattgcaattcagattatataattacagctgacgagggggtaaggggaggaaaaataataccattaaaaaaaataactgatgaagctttggtcaaatgtccaaacgtgaagaaatgcattgtagtaaaaagaactggaaatgaagttaattgggtagatgatagagatgtctggtacgaagacatcacaaaaaatgcttctgcagaatgtgaacctgaagaaatgggagcagaagatccactattcatactttatacatcaggctcaacaggaaaaccaaagggagtacttcatacgactggtggatatatggtatatgcctcaatgacacatcaatacatttttaattatagaaaaaaagatatttattggtgcaccgcagatattggatgggtaactggccatagttatattatttatgggccgctatccaatggagcaacaactataatgtttgagggtgttcctaattatcccgatacttcaa

SEQ ID NO: 308997 - DNA, 872 bp, Unknown
  Bacterial polypeptide expressing nucleotide sequence isolated from the Sargasso Sea
tgccttgaccggcacgttgaggcaggcctaggcgagaaagttgccttccactgggagggagagccaggtgatacccgaaccatcacctatgacgaccttctaaacgaggtatcaaaattcgccaatgttttgaagtctctgggtgttgagaaaggcgatcgggtctgcatttacatgccgatgattccggaactgccggtcgccatgcttgcctgcgcaagaatcggagcgccccactcaatagtttttggcggattttctgcagactcgctctcggaccgtattgatgacgcaagcgcgaaagttcttattactgctgacggcggatacagacgaggcgagccgtttcctttaaagcccacagctgatgagtctgtagcagcgacctcgacaatagaaaacgtcgtagtcgttcgtcggacagaagaagaagtcgcatgggacgaaaacgtcgatcactggtatcacgatcttatgtcgagtgcctccactgactgccctgcggagcctcttgacagcgaagacttactttatttgctttatacgtcaggtactactgcgaagccgaaaggcattatgcacaccaccggcggctacctaacgcaagtcgcgttcactcataagtacatcttcgacttgcatcctgaaactgatatctactggtgtgctgcggatataggttgggtaaccgggcatagctacattgtttatgggccgctggctaatggagccacttcagtaatgtatgaaggtacccccgacaccccccgcccagaatttcgtctaggcgacagaggcgaatggcccaagaatcgcctttgggatattgcggaaagatacggagtaacgcagctgtacacggctcccaccgc

SEQ ID NO: 308998 - DNA, 835 bp, Unknown
  Bacterial polypeptide expressing nucleotide sequence isolated from the Sargasso Sea
gcagcaaatggtttaaaaaaattaggaattaaaaaaggcgaccgtgtgacaatttatttaacgatgataccagagttagctattttaatgctagcttgtgtaagaatcggtgcagttcattcgattatttttggaggtttttcagctgattctatttctggaagagtaaatgattgcgaatctgaatacataattactgcagatgaaggagtacgaggtggaaaaactataccacttaaatatacagtcgatgaagctttaatgagttgtccaaatgtgaagaaatgtattgttgtgaaacgaacaggaaattatattaactgggatcaaaatagagatgtttggtatcatgatttaattaaagacgttcccaatcattgtgagcctgaagaaatgaatgcagaggatcctttatttattttatatacttcgggttcaacaggtaaacccaaaggagttcttcacactactggtggttatatggtttatgcatcaatgacacatcaatatattttcaactacaaaccaaaagatatttattggtgtactgctgatattggttgggtaactggacatagttatattatttatgggccactttcgaatggtgcaactacaattatgtttgaaggaattccaaattatcctgataattcaagatggtggcaaatagttgataaatataaagttaatactttctatacagctccaactgcaataagagctttgatgcgtgaaggagataaaccagttaaaaaaacttctagaaaatctcttaaactattaggaactgtaggtgaaccaataaatccagaggcttggatgtggtattata

SEQ ID NO: 308999 - DNA, 377 bp, Unknown
  Bacterial polypeptide expressing nucleotide sequence isolated from the Sargasso Sea
acatttgcttgggacggctgaaattgaaagtgcttttgttgaacatggattagtttctgaagcagcggtagtaggctatccacacgatattaagggccagggtgtttatgcttatgtaacaacaaatactggggttcaagtgagtgaggatttgaaaaaagaacttatccagtggattagaaaaaaaattggtccaatcgcaacaccagataaattacaattttcaccagggcttccaaaaacaagatcaggtaaaattatgaggaggattttaagaaagatagcatcaaatgaacaagaccaactaggtgatacatcaacattagcagatccaaatgttgtacaatctttaatagacgggtctaaaaatatctaat

SEQ ID NO: 309000 - DNA, 854 bp, Unknown
  Bacterial polypeptide expressing nucleotide sequence isolated from the Sargasso Sea
tggtatcacgaaatgataaaaaatgtttctgctaaaagtgagcctgaagaaatgaatgcagaagatccattatttattctttatacttctggatcgactggaaaacctaaaggagttttacatactactggtggttatatggtttacgcttcaatgactcatcaatatatatttaattataagccgaaagatatttattggtgcacagctgacattggttgggttacaggtcatagttatataatttatggcccattatctaatggagcaaccacaattatgtttgaaggaataccaacttatcctgataattctagatggtggcaaatagtagataaatacaaagtaaatattttttatacagctccaacagcaatacgagctcttatgagagagggagaaaaaccagtaagaaaaacatcaagaaaaactcttaaattattaggaactgtaggagaaccaataaatcctgaagcttggcaatggtattataaagtagttggggattctagatgtcctatagttgatacttggtggcaaacagaaactggaggtattttaattagtcctcaaacaggagcaataaatttaaaacctggttcagcaacaaaaccattttatggaattaaaccagtaattgtagataaaactggaaaagttttaaaaggagagactcaaggaagactttgtatagctcaatcttggccgggacaaatgagaacagtttatggagatcatcaaagatttatagatacatatttctcacaatttgatggtaaatattttaccggtgatggttgtcgtagggacaaggatggatattattggataacaggaagagttgatgatgtaat

SEQ ID NO: 309001 - DNA, 464 bp, Unknown
  Bacterial polypeptide expressing nucleotide sequence isolated from the Sargasso Sea
atatttcactggtgatggatgtcgaagagataaagatggatattactggatcactggtcgagtagatgatgtaattattgtttcgggacataatcttggaacagctgaaattgaaagtgcttttgttgctcatccaaaagtagctgaggctgctgtagttggctatcctcatgatataaaaggtaatgggttatattgttatgtaactctaaatgcaggagaaacagaaactggtgaactagaaagagatctaaaactttgggttagaaaacaaatcggacctttggcaactccagacctaattcattttactccaggccttcctaaaacaagatcaggaaaaataatgagaagaattctaagaaagattgctgctaacgagcatggtcaattaggagacaccactactctagcagatccaagtgttgttgatagtttagtagataatagaaaaaatatttaaa

SEQ ID NO: 309002 - DNA, 639 bp, Unknown
  Bacterial polypeptide expressing nucleotide sequence isolated from the Sargasso Sea
tatgaatcaaaatttcaaagaaatatatgaaaattctattaaaaatcctgaagaattttggaaggaaatatctgaagatattttttggtttaaaaaaccaacaaaaattttaaatagaacaaaacatcctttctacaaatggtatgaagatggtactacaaacacctgttacaatgctctggacgtgcatattgataatggaaaaggtgatagggctgctttaatctatgatagtcccattactggaaataaaaaaaagtttacatataaagaattaagggaaaaagtttctaaatttgctggtgccttacaaaaccaaggaataaaaaaaggtgacagggttataatttatatgccaatgataccagaagcggttattggtatgcttgcatgtgcaagaattggtgccattcattctgttgtttttggaggatttgcttcaaatgaattagcaagcagaatagatgatagtaaagccagagttttgcttacagcttcatgtggttttgagccaggaaaaacagttcattataaacctcttgtagatgatgctttaaagttagcatcacacaaaattgaaaaattaatcttattccaaagaaaaggtaatgaagtaaaattaaatgcaccaaaagaaat

SEQ ID NO: 309003 - DNA, 644 bp, Unknown
  Bacterial polypeptide expressing nucleotide sequence isolated from the Sargasso Sea
aatgaaaaatgaccgtgattatagctacagcgctcttatggcggatgcatcagaagattctactcccgaggcgatgaaggcggaggaccccctttttattttatacacgtctggttcaactggaaaacccaaaggcgttttgcatacgtcgggaggctatctagtttgggcatcgttaacacacgagtatgtttttgactatcatgacggagatatatactggtgcacagcagacgtaggatgggtgactggacatagttatatcgtttatgggccactggcaaatggtgccacaacggtaatgttcgaaggagtaccaacttaccccgatgcatctcgtttctggcaagtttgtgacaaacataaaattaaccaattctacacagcaccgacagcgatacgagcattaatggggcaaggctccaaatttgttgaaaaatgtgacttatcgtcgttaaaagtgcttggaactgtaggtgaacccatcaatcctgaggcttggaattggtataatgaagtagtgggtaaaggcaggtgtccaatcgttgatacatggtggcagaccgaaactggaggccatttacttactcccatacctggtgcaattgctacgaagccagggtcggctaccttcccattttttt

SEQ ID NO: 309004 - DNA, 911 bp, Unknown
  Bacterial polypeptide expressing nucleotide sequence isolated from the Sargasso Sea
aatgtattggttgttaaacgaactgggaaattacatcaattggaatgaagaaagagatgtatggtatcatgatctaataaaagatgttccaagtcattgtgagccagaagaaatgaatgcagaggatcctttatttattttatatacttcaggttcaactggtaaaccaaaaggagttcttcatactactggtgggtatatggtttatgcatcaatgacccatcaatatatttttaattataaaccaaaagatatttattggtgtactgctgatattggatgggttactggacatagctatattatttatggacctcttgccaatggtgcaacaaccattatgtttgagggaattcctaattatcccgatacttcaagatggtggcagatcgttgataaatataaagttaatattttctacactgcacccacagcaattagagctttaatgcgtgaaggcgataaaccagttaaaaaaacttcaagaaaatcgctaaaattactaggcactgttggtgagccaattaatcctgaagcttggatgtggtattacaaaacggttggtaactctaagagcccgattgtggatacatggtggcaaaccgagacaggaggtatactgatagctcctcaaacaggagccataccattaaaacctgggtcagctactaaacctttctacggaataaagccagtcattgttgacaaaaacggtaaagagataaaaggcgctggtgaaggaagactttgtattgctcaatcatggccaggtcaaatgagaactgtttatggagaccatcaaagatttattgacacatatttttctcagtttaatggaaaatattttactggtgatggatgtagaagagataaagatggatattactggatcactggaagagttgatgatg

SEQ ID NO: 309005 - DNA, 875 bp, Unknown
  Bacterial polypeptide expressing nucleotide sequence isolated from the Sargasso Sea
actggttaataatacagattattctaaagcgcatatcgagtggttttcaaatggaaaactaaatgcatcctataattgcatagataggcatattgaaaatggcttaggagaaaaaacagcccttatttggcaatcaaatgatccaactatctcaacaaatgtctcttataatgaattattgaaaaaagtttcattatttgccaatggattaaaacgagccggaatcaataaaggagatcgagtatgcatttacatgcaaatgattccagaggcaattgtagcgatgctcgcctgtgctcgaattggagcagtgcattcagtggtatttggagcattttcaagtgatgcattaaaaaacagaatcaatgattcagaatgtaagctacttattacgcaagataatggagtgcgtggattaaagtttgatatccctatgaaagaaaatgcagataaaattgcagatgaatgcccttccttaactacagtagttatggttgaacgttcaggtaatgatatgttgatgaaagaaggtagagatattacttggaatcaatttattgatggatgctcaagcgattgtcctgctgaggtaatggatgcagaagacccattatttattttatacacttccggatcaacaggaaaaccaaaaggggtaatgcatacaacaggaggatatcttgtgtatgcgtcacatactcatgaattagtgtttgattatcacaaggatgatatctactggtgtacagctgatattggatggattactggtcattcatatatcgtatatggaccattatccaatgcagtaactcaggtgatatttgaaggagttcctaattacccagattttggaagattttggcaaattgttg

SEQ ID NO: 309006 - DNA, 735 bp, Unknown
  Bacterial polypeptide expressing nucleotide sequence isolated from the Sargasso Sea
aggtggtggcaaatagttgataaatttaaagtaaatattttttacacagctcctacggctattagagctttaatgagagaaggcgaaggtcctgtaagcaagacttcaagaaaatctttaaaattattaggaaccgtgggggaaccaataaatcctgaagcttggcaatggtactttaaaactgtcggggactctagatgtccaattgtagacacttggtggcaaacggaaactggtggtatactgattagccctcagacaggagcaattgacttaaaaccaggttccgcaacaaagccgttttatggaataaagcctgttatagttgataaagatggaaaagtattgaaaggtgaggctcaaggaagattgtgcatagctcaatcctggccgggtcaaatgagaactgtttatggagaccataatagatttattgaaacatatttttcccagtttgatggaaaatattttactggagatggctgtaggagagacaaagatgggtattattggataactggacgagtagatgatgtaattatagtttccggtcataatttaggaaccgcagaaattgaaagtgcttttgttgctcacacaaaagtcgctgaagctgcagttgttggatacccccacgatataaaaggtaatggattatattgttatgttactttaaatgttggagaacatcctgatggtgatttagaaagagagttaaaattatgggttagaaaa

SEQ ID NO: 309007 - DNA, 718 bp, Unknown
  Bacterial polypeptide expressing nucleotide sequence isolated from the Sargasso Sea
aatgggttataaagaagaatttcaagaatcgattgaaaaacctgaacagttctggcggaaacaagctgaattgatcaaatggtatgaattcccaaataatatcctgtcagaggatgaaaacggtttttaccgctggtttaagggaggaaaactcaacacatgttatttactactcgattatcacatagagtgtggacggggagatcaaacagcacttatctatgactcaccagttactaattctcagagtaaattaagcttcaaagagctcttagaaaaagttgcaaatttcgctggtgtacttagggataatggtattgaaaagggagatcgagcaatcatatatatgcctatgattcctgaagcattggtggctatgcttgcctgtgctcgtttaggagcaattcattcggttgtgttcggaggatttgcaccaaaagagcttgcgattcgtatagatgatgcaaaacctaaaatacttttgaccgcttcatgtggaattgaatttaacaacgtgattgaatataaaccactagtcgatgaagcaattcgcatttctaaatatccacctcaaacagttattctccttcagcgtccccaatcaaaagcatcaatgaagacaggacgcgattttgactggaatgaactttcaaatagaagctcaccggtaagtcctgttcctgttgatgccacagatccactatatattctttatacc

SEQ ID NO: 309008 - DNA, 790 bp, Unknown
  Bacterial polypeptide expressing nucleotide sequence isolated from the Sargasso Sea
gaccaaaaaatgggcaagaagcgcatatattgataaaagtggttatgaaaaaaaatacaaactatcaattaaagataatgaaaacttctggagaaaagaaggaaaaagaatcgattggataaaaccttataataaaataaaggatgtaaaatatagtaaaacagatgtaaaaataaaatggttttatgacggtactttaaatgcttcagcaaattgtattgatagacatttaaaagataaaaaaaacaaaaatgccattatttgggttggagatgatcctaaagattctaaaaatattacttacaaagaactttatagaaatgtttgtaaaacagccaatggattaaaaagtattggaattaaaaaaggtgacatagtaactatttatttaaccatgattcctgagctagcatatacgatgttagcatgtgcaaggataggagcaatccattcaattatatttggtggtttttctccggactctatagctggaagaattaatgattgccaatcagattatataattactgcggatgaaggagtgagaggaggaaaaataatacctttaaaaaaaataactgacgaagctcttactcaatgtccaaatgtcaaaaaatgtattgtagtcaaaagaacaggcaacgaagtagattgggtaaaagatagagatgtttcttacgaagaattaataaaattatcttcagataaattggatcctgaagaaatgagtgctgaggatccattatttattttgtatacatcagggtcaacaggtaaaccgaaaggagtg

SEQ ID NO: 309009 - DNA, 358 bp, Unknown
  Bacterial polypeptide expressing nucleotide sequence isolated from the Sargasso Sea
agaggttgaaagcgcgctggtgggtcatccgaaagtcgcggagagcgcggtcgtcgggtatccgcacgacatcaaggggcagggcatttatgcctatgttaccctgatggagggcgagatgccgtcggacgaactacgcaccgaactagtgcagtgggtgcggaaggaaatcggtcccatcgccagccccgacctgatccaatgggcgcccggcctgcccaagacccggtctggcaagatcatgcgccgcatcctgcgcaagatagccgccaatgaacacgaccaactcggtgacaccacgaccctcgccgaacccgccgtggtcgacgatctgttggacaaccggcaaaatcgttga

SEQ ID NO: 309010 - DNA, 487 bp, Unknown
  Bacterial polypeptide expressing nucleotide sequence isolated from the Sargasso Sea
ttttcacaatttgatggcaaatatttcacgggtgatggatgtaaaagagacaaagatggttactattggattactggtagagttgatgatgttattattgtgtctgggcataaccttggcactgcagaaatagagagtgcatttgtagctcatccaaaagtagctgaggctgcagttgttggatatcctcacgatattaaaggaaatggtttatattgttacgtaaccttaaatgcaggtgaacaaccaaacggagaccttgagagagaacttaagctttgggttagaaaacaaattgggccgattgcaacccctgatctaatacaattcgcaccaggattacctaagactagatccggaaaaattatgagaagaattttaaggaaaatcgcagcaaatgaatataatgaattgggggacacgacaacattggcagatccaagtgttgtggagtctttaattgagaacaggcaaaatagaaattaat

SEQ ID NO: 309011 - DNA, 301 bp, Unknown
  Bacterial polypeptide expressing nucleotide sequence isolated from the Sargasso Sea
cctcatgatattaaaggtaatgggttatattgctacgtaacattaaatgctggtgaacagcccaatggtgacttagaaagagagcttaagctttgggtaagaaaacaaattggacctatagctacaccagatttaattcagtttgctcctggtttaccaaaaacaagatcaggtaaaatcatgagaagaattttaagaaagattgccgctaatgaatataacgaattaggtgatacgactacccttgcagacccatccgtagtagaatctttagtagaaaataggcaaaataaagattaac

SEQ ID NO: 309012 - DNA, 766 bp, Unknown
  Bacterial polypeptide expressing nucleotide sequence isolated from the Sargasso Sea
aaatactcgctaaaactaaggaattttgagggagtcaatttgagtcggaattataaagaaatttatcaaaaatctatcagcaaaagagaggatttttggaaggaaatatcagaaaatattttttggtataaaaaaccaacaaaaatacttaattcggaaagacctcctttttataaatggttcgaggatggggttactaacacctgttataacgctttggatcttcatattgacaaagggagaggagaaaaaattgcaatcatctacgatagtccaataacaggaacaaaaaaaaatatttcttacaatgaacttaaggaaaaagtttctttatttgcaggagcattaaaaaatcaaggtgtaaataaaggtgacagagtaataatttatatgccaatgatacctgaggctgtagtagcgatgttagcatgtgggaggataggtgcagttcattctgtggtatttggtggctttgctgcaaacgaacttgcaagtagaattgatgactctaaagcaaaaattattgtttcggcttcatgtggttatgaaccagggagaaccgtttattacaaacctcttgtaaataaagctttagaattagcaaaccataaacctgaaaagtgtattatctttcaaagagagaaggataaagcggaccttaatccaaaaattgatataacctgggaagacgctaacaaaggtgcaaagccagcagattgtgaaaaaatgaattccaatgattatgcgtacatactttacacttcag

SEQ ID NO: 309013 - DNA, 655 bp, Unknown
  Bacterial polypeptide expressing nucleotide sequence isolated from the Sargasso Sea
tataccgcgccaacagcaattagagctttaatgcgagagggagataagcctgtaaagaaaacaagtagaaaaactctaaagttattaggaactgttggagagcccataaatccagaggcttggatgtggtattacaaaacagttggggactctagatgtccgattgttgatacttggtggcaaacagaaactggaggaattttaatagcgcctcaacctggcgccatagatttaaaaccaggctcagcaactaaacccttttatggcatcaagccagttctagttgataaagatggtaaaactataaaaggtgaaggtaaaggaagactttgtatggctgcttcttggccaggccaaatgcggacagtttatggagatcatcaaagatttatagacacatatttttctcaatttgatggaaaatatttcactggagacggatgtagaagagataaagatggttattattggattacaggaagagtggatgatgtaattattgtatctggccacaaccttggaacagctgaaattgaaagtgcatttgttgcgcatcctaaagtagctgaggctgctgtggttggatttccgcatagtataaaaggcaatggattatattgttatgtgactttaaacgctggtgaaaacccagctg

SEQ ID NO: 309014 - DNA, 916 bp, Unknown
  Bacterial polypeptide expressing nucleotide sequence isolated from the Sargasso Sea
gcatgtgttagaattggtgcggttcattctataatatttggtggtttttctgcagaatcaatttctggaagagttaatgattgtgagtctgaatatataattactgctgatgaaggtgttagaggcggaaaaactattccattaaaatatacaactgatgaggctttaataaattgtccaaatgtaaaaaaatgtattgttgtaaaacgaactggaaattacatcaattggaatgaagagagagatgtttggtatcatgatctaattaaagatgttcctagtcattgtgagccagaagaaatgaatgcagaggatcctttatttattctatatacttcaggatcaactggtaaaccaaaaggagttcttcatactactggtgggtatatggtttacgcatcaatgacgcatcaatatatttttaattataaaccaaaagatatttattggtgcactgctgatattggatgggtaactgggcatagttatattatttatggacctcttgctaatggtgcaacaacaataatgtttgagggaattcctaattatcctgacacttcaagatggtggcagatcgttgataaatataaagtaaatattttctataccgctcctacagcaattagagctttaatgcgtgaaggtgataaaccggtaaagaaaacctctagaaaatctttaaaactacttggaactgttggtgaaccaataaatcctgaagcttggatgtggtattacaaaacggttggtaactctaagagcccaattgtggatacatggtggcaaactgagacgggaggtatactaatagctcctcaaacaggagcgataccattaaaacctgggtcagcgacaaaacctttctacggaataaagccagtcattgttgacaaaaacggtaaagagataaaag

SEQ ID NO: 309015 - DNA, 742 bp, Unknown
  Bacterial polypeptide expressing nucleotide sequence isolated from the Sargasso Sea
tatggctaaaagaagtaagagaaaaaaaagtaaatcaaaatctaaaagaaagaaaagagtcaaaagaaaaaagataaaaactcttaaaaagaaaaaaccttcctctaaaataaataactctaaacaaacagaagacgctgatggaaatatagtttttaaagtaccgccagcttgggagaaaaaagcttatgttaatcaatcccaatatgcaaagaaatataaattatcattaaaggataacgaaggtttctgggctaaagaagggaaaagaattacctggatgaaaccttatactaaaattaaagatgtaaaatatagtaaagaggacgttagtatcaaatggtactacgatggtacactaaacgcatcagcaaattgtattgataggcatttagataaaaaaggaaataagactgctattatttgggttggagatgatccaagtgacaccaaaaaaatatcttacaaagagctacacaaaaatgtttgtaaagccgcaaatggattaaaaagtataggaattcagaaaggagatagagtaacaatttatttaactatgatacctgagcttgcttacattatgctagcatgtgctagaattggtgcggttcactcaattatatttggtggattttctccagactctatcgccacaagaataaacgattgtgagtctgattatgtaatcactgctgatgaaggcgtaagaggtggaaaaataattccattgaagaaaattgct

SEQ ID NO: 309016 - DNA, 943 bp, Unknown
  Bacterial polypeptide expressing nucleotide sequence isolated from the Sargasso Sea
tagctataacgaacttcatgaacaggtatgtaaattttctaatgtattgataaatgctggtgcaaaaaaaggtgatcgaataacaatctatatgccaatgattccagaagcaacagttgcaatgttagcatgtactagaataggagctattcattcagttgtctttggtggtttttctccagacgctctagctggaagaattgaggattgtaattcaacaattattgttactgcggatgagggtataagaggagggaaaacgatacctttaaaatctaatactgataaggctatttcaaaagctaaaatgtgcaaaactacaattgtagttaaaagaacaggagctgaaattaattggatagacggccaagatatttggtatcatgaagaaatggaaaaagcatcagctaactgtccacccgctgaaataaatgccgaagatccaatgtttatattatatacttcaggatcgacaggtaaacctaaaggagttcttcatacaactggaggatatatggtttatgcttctatgacacaccattatgtttttgattatcaagaaaatgaaatttattggtgtactgcagatgtaggctgggtaacaggacattcttatatagtttatggaccattatcaaatggcgctactacattaatgtttgagggtgtaccaaactaccctacagtaagtagattctgggaaatagtggataaacataaagtcaatatattctacactgctcctacagcaataagagcattgatggctgaaggcagtgagccagtaaaaaaaacaaaacgagacagcctaagaattttaggtagtgttggagaaccaattaatccagaagcatggaattggtataacaatattgttggtgatggaaggtgtccggtagtggacacttggtggcaaactgaaactggaggaatattaatcact

SEQ ID NO: 309017 - DNA, 376 bp, Unknown
  Bacterial polypeptide expressing nucleotide sequence isolated from the Sargasso Sea
cataggcttggcacggctgaagtagaaagtgcattagtcttgcatgaacaggtagcagaagctgctgttgttggttatgaacatgaaataaaagggcaaggaatttactgttacgttacgctaatggtaggttcgttgggtgaagactctctaaagaaagaattagtggatttggtagctaaagagattggtgccattgctaaaccagacattattcaattttctcctgacttgcctaaaacgaggtcaggaaaaattatgcgaagaattttgagaaaaattgctgcaaatgagatccatgatcttggagatacaacaacccttgctgatcctagtgtagttgaccatttgatcaacaatcgattaaataaataaa

SEQ ID NO: 309018 - DNA, 721 bp, Unknown
  Bacterial polypeptide expressing nucleotide sequence isolated from the Sargasso Sea
gttgatactttggtggcaaacagaaacaggtggtatattgattagtccacagactggagcaatagatcttaaaccaggttcagctactaaacctttctatggaataaaacctgtaatagttgataaagatggaaatgttttaaaaggtgaagcccaaggtagattatgtattgcacaatcatggccaggacaaatgagaactgtttatggagaccacaatagatttattgaaacatatttttctcaatttgacggaaaatatttcactggggatggatgtcgaagagataaagatggttattattggatcactggaagagttgatgatgttattatcgtgtcaggtcacaaccttggtactgcagaaatagaaagtgctttcgtggctcatccaaaagtagcggaagctgcagtcgtaggctatcctcatgacattaaaggaaatggtttgtattgttatgtaactcttaatgtaggtgaaaatcctgatggcgatttagaaagagagttgaagctttgggttagaaaacaaattggaccgatagccactcctgatataatacatttttcgccaggacttccaaaaactagatctggaaaaataatgagaaggatattgcgcaagatagcagcaaatgaacacgatcaacttggagacactacaactttagcagatcctagtgttgtcaaaagccttgttgatgaaagaaaaaatatttaa

SEQ ID NO: 309019 - DNA, 760 bp, Unknown
  Bacterial polypeptide expressing nucleotide sequence isolated from the Sargasso Sea
gaaagagatgtttggtatgatgatataattaaaaaagtctcaactcattgtgaaccagaagaaatgggtgctgaagatcctttatttatactttacacatcaggctcaactggaaagcctaaaggtgtattacacactactggtgggtatatggtttatgcatcaatgactcatcaatatatttttaattataaaccaaaagatatttattggtgtacagcagatataggttggattactggacatagttatattatttatggtccactctctaatggagcaactacaattatgtttgaaggaattccaacttatcctgataactctagatggtggcaaatagttgataaatttaaagtaaatatattttacactgctcctacagcaattagagcattaatgagagagggagataaacctgtaaaaaaaacatctagaaaatcacttaaattattgggaacagtcggtgaaccaataaatcctgaagcctggatgtggtattacaaaactgttggggattctaagtgtccaatagtagatacttggtggcaaacagaaactggtggaatattaattagtccacaaactggtgcaatagatcttaaacctggatctgcaacaaaacctttttatggaataaaaccagtaatagtagataaagatgggaaagtacttaaaggtgaatgccaaggaagattatgcattgcacaatcatggccaggacaaatgagaactgtttatggtgatcatcaaagatttt

SEQ ID NO: 309020 - DNA, 496 bp, Unknown
  Bacterial polypeptide expressing nucleotide sequence isolated from the Sargasso Sea
ttatagaaacatatttttctcatttgatggaaagtattttactggagacggttgtagaagagataaagatggatactattggataactggaagagttgatgatgttattattgtatcaggacataatttaggaactgctgaagtagaaagtgcatttgtagcacatccaaaagttgcagaagctgcagtagttggttgtccacatgatataaaaggaaatggattatattgttatgtaactctaaatgtaggagaggagcccaatggagacttggagagagaattaaaactgtgggtaagaaaacaaattggagcaattgctacaccagattttattcagttttcacctggactaccaaaaacaagatctggaaaaataatgagaagaattttaagaaagatagctgctaatgaacatgagcaacttggagatacaacaactttagctgatccgagcgttgttaaaaatctagttgataatagaaagaatatttag

SEQ ID NO: 309021 - DNA, 869 bp, Unknown
  Bacterial polypeptide expressing nucleotide sequence isolated from the Sargasso Sea
ttcaaaaggagatagggtaacaatatatcttacaatgatacctgagttggcttatacgatgcttgcgtgtgcaagaattggcgcaatacactctataatttttggtgggttttctgcagactctattgcagacagaattaataattgtaaatcagactacatcgtgactgcggatgaaggtataagaggtggaaaaacaatccatttaaaatcgatcacagatgaggcattaatacattgtccaaatgttaaaaaatgtattgttgttaaaagaactggaaacagaattaattgggatgagagtagagatgtttggtacaacgacatgattaaaggtgtaccatctcaatgtgagccagaggagatggaagctgaagatcctttatttattttatatacatctggttctacaggcaaacctaaaggtgtgcttcacacaacaggaggctatatggtttacgcatccatgactcaccaatatatatttaactataaaccaaaggatatatatttttgtacagctgacattggatggataacgggacatagctatataatttatggacctctggcaaatggagcaacaacaataatgtttgaaggtgttccaacatatcctgactcctctagatggtggcagattgttgataaatacaaagttaatatattttatactgctcccacagcaataagagccttgatggctcaaggagaggggccagttaaaaaaacatcaagaaagtccttaaaattattaggaacagttggtgaacctattaatccagaagcttgggaatggtattatcgaactgtaggagataacagatgtccaattgtagatacttggtggcaaactgagacgggaggaa

SEQ ID NO: 309022 - DNA, 675 bp, Unknown
  Bacterial polypeptide expressing nucleotide sequence isolated from the Sargasso Sea
attgcatcaaaatgtttgtaaagcagcaaatggtttgaaaagtttaggtgttcaaaaaggggatcgagtaacaatttacttaacaatgatacccgaactagcgtacataatgttggcttgcgcgcgaataggtgcggtacactcaattatttttggtggtttttcaccagactcgattgctactaggatcacagattgtgaatcagaatatttaattacagcagatgaaggcgttagaggtggaaaaattattcctcttaaaaaaatagcagatgaagctttagatcaatgcccaaatgttaagaagtgtgttgtagttgagagaacaggtaatcaagttaattggaacgaagaaagggatgtttcatacaaaaaactaatttcttctgttccaacaaaatgtgatgctgaagaaatgaatgctgaagatccattgtttattctttacacttctggttccactggtaaaccaaaaggagttttacatacaacaggtggttacatggtttatgcctcaatgactcatcaatatatttttgattataaacctaatgatatttattggtgcactgcagacattggttgggtcactggtcatagttatattatttatggtcctctagctaatggcgcaactacaattatgtttgaaggagttccaaactatcctgataa

SEQ ID NO: 309023 - DNA, 766 bp, Unknown
  Bacterial polypeptide expressing nucleotide sequence isolated from the Sargasso Sea
tattctatacggggccctttgtccaatgggaacaacaacaataatgtttgaaggaataccaacatacccctcttcatcaagatgttgggaaatatgtgataaatatgaagtcaatgtcttctatacagctccaacagcaatcagggctttgatgtctcagggagatgatccagttctgaaaacaaaaagaaatagcttaagggttttagggactgtaggtgagccaataaatccagaagcttgggaatggtactacaaagtggtaggtaatagctcatgtgatgtaattgatacatggtggcaaacagaaacagggtcggtattaatttctccaattgctggcattactccaatgaaacctggatcagcaacactgcccttctttggagttaaaccagctctatatgatgaacaaggtaagcctttagaaggtgcgaattctggaaatttagtcatagaaaaatcttggccaagccaaattaggagtgtttatggagatcatgacagaatgatatctacctattttgaaacatataaagatttatattttactggtgatggagcgcgaagagatgaggatggctatttttggattacaggccgagtagatgatgtgttgaatgtttcaggacataggttaggcacagcagagatagaaagcgctctagtgcttcatgataaagttgccgaagcagcagttgtaggttttgaacatcctattaaaggacaaggtatctatgcatttgttactcttatgaaagaagaa

SEQ ID NO: 309024 - DNA, 939 bp, Unknown
  Bacterial polypeptide expressing nucleotide sequence isolated from the Sargasso Sea
acgtcaacaatgaatgtgaaccagaaataatgtcagcagaagatcctttatttattttatatacttcgggatcaactggaaaaccaaaaggtgtgcttcacacaacaggaggttatttagtttatgcttcaatgactcatgaatatatttttaattataaaaaaaatgacatatattggtgcacagcagatattggttgggtaactggacatagttatataatttatggtccattagcaaatggcgcaacaacattaatgtttgaaggtgttcctaattatcctgatgcatcaagattttgggaagtggttgataaacataaggttaatattttttatactgctccaactgcgataagagccttaatgcgtgagggggatgcgccggttaataaaactaaaagaacatcattaaaattattaggaactgtaggagaacctattaatccagaagcatggcagtggtattttaatgtatgtggtaggagtaaatgtcctatagtagatacgtggtggcaaacagaaactggtggaatattaatctcgcctcaaactggtgctatacctttaaaacctggatctgctacaaagcctttttatggaattaaacccatagttgttaacaaaaaaggagaagagttgacaggtgaatgtgagggtatgttatgtatcgctgattcatggccaggtcaaatgagaactgtttatggagatcatcaaagatttattgatacatatttttcacaatttgaaggcaagtatttctcaggtgatggatgtaaaagagataaggatggttattattggataaccggaagagttgatgatgtaattattgtttcaggacataatttagggacagctgaattagaaagtgcatttgtagcacacaataaagttgctgaagcggcagttgttggttatccacatggaaattaaa

SEQ ID NO: 309025 - DNA, 905 bp, Unknown
  Bacterial polypeptide expressing nucleotide sequence isolated from the Sargasso Sea
tctaaaaagatacctctaaaaaataatgtagatacggctttagaagactgcccaaacgtacactcagtttttgttgtaaaaagaactaatgcgaatgtggattggaatgataggagggatgttgattatcaagagataattgatacagttccatcagaatgtgaagctgaaccaatggattctgaagatccattatttattttgtatacctctggatccactgggaaaccgaaaggtgttcttcatactactggaggctatcttttgcaggcatccatatctcataaactagtgtttgattataaagatgatgaaatttattggtgtacagcagatgttgggtgggtcacgggtcactcttatattgtttatggtcctcttgccaatgccgctacaaccttaatgtttgaaggaattccaacttatcctaacgcatctagattctgggaagtcatagataaacataaagttaatattttttacaccgctccaacagcacttagagccttaatggcacaaggagatgagtatgtgaaatcttcttctagagattccttgagagttcttggcactgtaggtgagcctataaaccctgaagcatgggagtggtattacaaagtggtaggcgattctaaatgccctatagttgatacttggtggcaaactgagacaggagcaatgatgataactcctttggcaggatcaactccacttaagcctggtagtgccactaaaccttttctgggtattgagcctgcacttcttgatgagaatggaaaagagatagagggagaaggatcaggaaatcttgtaattaaatcaagctggccttctcagattagatccgtttatggggaccatcaaagatgtatagaaacctattattctatgtaccctggttatta

SEQ ID NO: 309026 - DNA, 499 bp, Unknown
  Bacterial polypeptide expressing nucleotide sequence isolated from the Sargasso Sea
aatgattgatacttatttttcaacttatagcaatatttactttacaggcgatggcgcaaaaagagatgaagatggttacttctggattactggaagagttgatgatgttcttaatgtttcagggcatagacttgggactgctgaagttgaaagtgcccttgttcttcatccggttgtggctgaagctgctgtagtaggcttcgaacatccaataaaagggcaaggaatatatgcttttgttactttaatggtagatgaagaattttcagatgaattatcaacagaattaagaaattttgttggtaaagaaattggtcctattgcaaaacctgacttaattcagaatgctcccggtctcccaaaaactagatcagggaaaattatgagaagaattttacgtaaagttgctgaaggtgattttgaaaacttaggtgatacaacgactcttgctgagccttcagtagtttctgatcttattgagaataaaaaaagcctatga

SEQ ID NO: 309027 - DNA, 535 bp, Unknown
  Bacterial polypeptide expressing nucleotide sequence isolated from the Sargasso Sea
ggacaaatgagaagtgtctatggtgatcatcaaagatttatagatacttatttttcacagttcgaaggaaaatatttcacaggtgatggctgcagaagagacagggatggctattattggattacaggaagagtagatgatgtaattattgtttcaggacataatttgggtactgcagaaattgaaagtgcatttgtagctcatccaaaagtagctgaagcagcggtagtgggctatccacatgatattaaaggaaatgggctttactgttatgtaaccttgaatgctggagaaaaaagtactctagatttagagagagatttaaaactttgggtaagaaaacaaattggtccgatagcaactccagacttaattcagttttctccaggtcttccaaaaacaagatctggtaaaataatgagaagaattcttagaaaaattgctgctaatgagcatggtcaattaggagatactacaactttagctgatccctcagttgttgaaagtttagtagataatagaaaaaatatttaaa

SEQ ID NO: 309028 - DNA, 884 bp, Unknown
  Bacterial polypeptide expressing nucleotide sequence isolated from the Sargasso Sea
ttttctccagatagtatatctgggaagaattaatgactgtaaatcagattatgtggttacagcagatgaaggtgtaagaggaggaaaaataattccgttaaaatcaattactgatgaagcattaattaattgtccaaatgtaaaaaaatgcattgtaattaaaagaactggtaacagaatcaactgggatgaaagaagagacatttggtatcatgaaatgattgataacgtgcctacaaaatgtgaaccggaagaaatgaatgcagaagatcctttattcattctttatacatctggatcaactggaaaaccaaaaggagttttacatacaactggtggatacatggtttatgcatcaatgactcatcagtatatttttaattataagtcaaaagatatttattggtgtacggctgatatcggttggataacaggtcatagttacataatttacgggccactttctaatggagcaacaactattatgtttgaaggaataccaacttatcccgatacttcaagatggtggcaaatagtagataaatataaagttaacattttttacactgcaccaacagcaatacgtgcacttatgagagaaggagaaaaacctgtaaaaaaaacatcaagaaaaaccttaaaattattaggaactgtaggagagcctataaatcctgaagcttggcagtggtattataaaacagttggggattctaggtgcccaattgttgatacatggtggcaaactgaaacaggaggaattttaataagtccacaaactggagcaatcaatttaaaacctgggtcagcaacaaaaccattttatggaattaaaccagttatagttgataaagatggaaaaactttaaaaggagaagcgcagg

SEQ ID NO: 309029 - DNA, 943 bp, Unknown
  Bacterial polypeptide expressing nucleotide sequence isolated from the Sargasso Sea
gatgtttctagatggtggcaaatccgttgacaaatataaagttaatattttttatactgctccaacagctttacgggctctcatgagagaaggggcaggaccagttaaaaaaacaagcagaaaatctttaaaacttttaggtacagtaggtgaaccaatcaatccagaagcttggctttggtattataaaattgttggagattcacgatgccctattgtagacacttggtggcaaactgaaactggtggtatactaatttctcctcaacctggagcaatagatctaaaaccaggctcagcaacaaaaccattttatggaattaagccagtaatagttgatgaaaaaggaaaagtgttgaaaggtgcatgtcgtggaagactatgtattgcccaatcttggccaggacaaatgagaacagtatatggtgatcatcaaagatttattgatacctatttttcacaatttgacgggaaatactttactggcgacggctgtagaagagatgaagatggatactattggattactggtagagttgatgatgttataattgtttcaggccataatttaggcactgcagaattagaaagtgcatttgtagctcatccaaaagttgctgaagcagcagtagtgggttacccgcatgacataaaaggaaacggtctttactgctatgtcactttaaatgctgaagaaaggccatcaggcgaacttgaaagagatttaaaactttgggtcagaaaacaaattggccctatagctactcctgatcttatacaatttgcacctggtttgcctaaaacaagatcaggcaaaataatgagaagaatattaagaaaaattgcagcaaatgaacatgatcaacttggtgatactacaacattggcagatccatctgttgttgaaagtttagtagaaaatagacagaataataactattaa

SEQ ID NO: 309030 - DNA, 940 bp, Unknown
  Bacterial polypeptide expressing nucleotide sequence isolated from the Sargasso Sea
aatgttaaaaaatggtgggttgtggtaaaaagaacagggaatagcgtcaattgggataatgaaagagacgtatcttatgatgaaataattaaaaatgtatccgataaatgtgctcctgaagaaatgaatgctgaggacccattatttattttgtacacatcgggctcaacaggaaaaccaaaaggagttttgcatacgactgggggatatatggtttatgcttcgatgacgcaccaatatatttttgattacaaaccgaaagatatttacttttgtagtgctgatattggttgggtaacaggacacagttatataatttatggtcctttatcaaatggtgctactaccgtgatgtttgaaggtattccaacttatccggactcttctagatggtggaaaataattgataaatataaagtaaatattttctacactgcgccaacagctattcgtgctttaatgcgtgagggtgacggacctgtaaaaaaaacaagccgtaaatctctaaaactattaggtacagttggtgaaccaataaatccagaagcttggatgtggtattacaatgttgtgggagacaaaaaatgtccaatagtcgatacttggtggcaaacagaaactggaggaattttaatttcacctcagcccggtgcaataaatttaaaaccaggatctgccacaaagccgttttatggaattaaaccagcaattgttgatgagtctggaaaaatattaaaaggtgcctgtaaaggtaggctttgcatgttgcaatcttggccgggacagatgagaactgtttttggggatcaccaaagatttatagacacatatttctctcaatttgatggaaagtattttaccggagatgggtgcaggagagacaaagacggttattattggataacaggtagagtggatgatgtgataatagtctcgggac

SEQ ID NO: 309031 - DNA, 906 bp, Unknown
  Bacterial polypeptide expressing nucleotide sequence isolated from the Sargasso Sea
tccacttaagaaaattgctgatgaagcaatgatgcaatgtccaaatgtaaaaaagtgtgtggtagttaaaaggactggaaatactgttgattggaatgacgatagagatgtttcttacgatgagattacaaaaggtgtttccgataaatgtatagcagaggaaatgaacgcggaagatccgctgtttattctttatacatcaggatcaactggaaaaccgaaaggtgttttgcatacaaccggtggatatatggtttatgcatccatgacacatcaatatatttttgattataaaaataaagatatttactggtgtactgctgatattggttgggtaactggacacagttatattatttatggacctttagctaatggtgctactacaattatgtttgagggggttcctaattatcccgatagttcaagatggtggcaaatagttgataaatataaagttaatattttttacactgctccaacagcaattcgtgccttaatgcgtgaaggggacagtccagttaaaaaaacaagtcgaaaatcattaaaacttttaggtacagtgggtgaaccaattaatccagaagcatggatgtggtactacaaaactgtaggtgaaaaaaaatgtccaattgttgatacatggtggcaaactgaaacaggtggaattttaatcgctccgcaacccggagctattaatttaaaacctggatcggctacaaaaccattttacggtataaagccagcaatagtcgatgagtccgggaaagtcttaaagggagcttgcaaaggaagactttgtatgtcgcaatcatggccaggacaaatgaggacagtttatggtgatcatcaaagatttatagatacttacttttctcaattcgacggtaaatattttactggaga

SEQ ID NO: 309032 - DNA, 849 bp, Unknown
  Bacterial polypeptide expressing nucleotide sequence isolated from the Sargasso Sea
tgccaacgctgcgaccgtgctaattcatgaaggcgtacccaaccacccaacccctgcgcgccttggtgaaatgattgaccgccataaagtgaatattttatacactgcaccgacgttaatccgtgcattaatggctgaaggtaaagaacaatttagcaattataaaggtgactcattacgcataatgggttcagttggcgaacccattaacccagaagcttggcgttggtaccatgaggtgatcggtcatgaaaattgccctatcgtcgacacatggtggcaaaccgaaaccggcggtattttaattagtccgctgcctggcgcaacagacacgaaacctggctcagctactcgaccattttttggcgttcaaccagcgctcgtggacaatatgggcaatattgttgaaggcgcaacagaaggtaacctagtgattcttgactcatggccaggccaaatgcgcacagtatacggagaccatgacagattcgccctaacctactttaaaacgttccgcggaatgtactttacaggtgatggcgcacgtcgtgacgaagacggttattactggattactggtcgtgttgatgacgtcattaatgtgtcgggccaccgcctaggtactgcagaagtcgaaagcgcgttagttgcccatgagctagttgctgaggccgctgttgtaggctacccacatgatattaaaggccaaggtatctatgcttacgtgaccttgactcgtggtatagagccaactgaagaacttcgtcaagagttacgccaatgggtacgaaaagaaattggcgcattggcgactccagatttaattcaatgggcgagtggtctacctaa

SEQ ID NO: 309033 - DNA, 643 bp, Unknown
  Bacterial polypeptide expressing nucleotide sequence isolated from the Sargasso Sea
ttccgcgacaagaccgtttttcggaattcagccagtattgatggatgccgatggaaatgaagtcgagggagcagtttctggaaatctctgcattaagcatccctggccggggcagatgcgcaccgttttcggagatcatcaaaggttcaaggaaacctacttcagcacctatccaggttactattttactggtgatggctgccgcagggatgaggatggatactactggatcaccggaagggttgatgatgtcctgaatgtttccggacatcggatgggtactgctgaaatcgaatcggcactagtacttcacgaatccgttgctgaggctgccgtggtgggatttcctcatgaaatcaagggacagggaatttacacctatgtgaccctcaacagcggagttgaggaatctgaggatttgaagaaagaactggttcagcaggtcagaaaggaaatcggaccgattgccaccatcgacgtgcttcaatgggctccgggcttgccaaaaacacgttccggaaaaatcatgcgcaggattctacggaagattgcagaaaatgacattgaacatgtcggtgacacttcgacccttgctgacccatccgtggtggacgatttgatccaaaaccggccttctcaataa

SEQ ID NO: 309034 - DNA, 886 bp, Unknown
  Bacterial polypeptide expressing nucleotide sequence isolated from the Sargasso Sea
tatacagcaccaactgcaatacgtgctttaatgagagaaggagataaaccagtcaaaaaagcttctagaaaaacattaaaacttttaggaactgttggagaaccaataaatccagaagcttggcaatggtattacaaaactgttggggactccagatgtcctattgttgatacatggtggcaaacagaaactgggggtattttaattagtcctcaaactggagctataaatcttaaacctggttcagctacaaaaccattttatggtattaaaccagttatagtagacaaagatggtaagactcttaagggagaagcacaaggaaggttgtgtatttcacagtcttggcctggacaaatgagaacagtttatggagaccatcaaagatttattgatacttatttttctcaatttgatggtaaatattttacaggagatggatgtagaagagataaagatggttattattggataactggaagagttgatgatgtaattatagtatcaggtcacaatttgggaacagcagaaattgaaagtgcgtttgtagctcatcctaaagtagctgaggctgcagtagttggatatccacatgatattaaaggtaatggtttatattgttatgtaacattaaatgctggcgaagaaagctctctagatttagagagggatttaaaactttgggtaagaaaacaaattgggcctatagcaacacctgacctaatacaattttcaccaggtttgcctaaaacaagatcaggaaaaataatgagaagaattttaagaaaaattgctgcaaatgaacatggtcaattaggtgatacaactactttagcagatccaagtgttgtaaaaagtttggttgaaaatagaaaaaatatttaga

SEQ ID NO: 309035 - DNA, 637 bp, Unknown
  Bacterial polypeptide expressing nucleotide sequence isolated from the Sargasso Sea
agaggcggaagcgttattccgcttaagcaagcaacggatgaggcggtgacaaactctttgcacaaagtaaaaaatgttgtggtttttgaaagaacaggagaaaaaatagaatttgatcaagaaagagacgtttggtggacagacctgatctcagattgtccttctgactgtgatccagagccccttaatgctgaacacccattgtttatactctacacctcaggttccacaggcaaacccaaaggaattcaacactccaccgcagggtatattttgcatgcaaaaacgactttttcttgggtatttgatatcaatgaagatgatgttttctggtgtactgcagatgtgggctggattacaggacacacttatgttgcatatggtcccctgctcgcaggcgctacgattcttatctatgagggcgctcctacttttccagatgtgggaagattttggaagatttgcgaaaagcatgccgtgactattttttatactgcacccactgccatcagagccttaatgaagcatggagatgagattccaaaaagctataatttatcacagctacgcttgcttggtaccgtcggcgaaccgataaaccccgaagcttggatgtggtatcacagtgttattggtc

SEQ ID NO: 309036 - DNA, 563 bp, Unknown
  Bacterial polypeptide expressing nucleotide sequence isolated from the Sargasso Sea
aaacttggtaatggagcaatcttggccaagtcaaatcagaagcgtctatggagaccatcagagaatgctagatacctactttagcaggtataaagatatctactttactggtgatggggctagaagagacgaagatggttattactggattactggaagagtggatgatgtactaaatgtctcaggacataggcttggtactgcagaaattgaaagcgctcttgtattgcactcaaaagtagctgaagctgctgtggttggatttgatcaccctataaaaggtcaaggtatctatgcttttgttactttaatgattggagaatcatttgatgatgaattaaataatgaattaaaacaatttgtagctaaagaaataggcgcaattgcaaaaccagatttaatacaaaatgcgcctggtcttccaaaaacaagatctggaaaaataatgagaagaattttaagaaaaattgctgagggagacctttccaatttaggcgacaccaccacacttgcagacccatcggttgtaaaatctctaattagcaataaaataaatcaatgaa

SEQ ID NO: 309037 - DNA, 769 bp, Unknown
  Bacterial polypeptide expressing nucleotide sequence isolated from the Sargasso Sea
ttgagggttttagattattggtatcacgatttagtagataaacaagatgcagcatgtgaaccagaggtgatgaatgcagaagatatgctttacatactctacacatctggaactaccgcaaaaccaaagggaatagtccacacacaggccggataccttaccggagtaactaccacacattcggcagtttttgatgtaaaagaggatgatatctactggtgtgctgctgattgtggatgggtaactggtcatagctatattgtctatggtcctcttgctaataagacaacgagtgttatgtatgagggagcacctaacgctccagatgaaaaaagattgtggagtattgttgaaaaatataaagtaaatattttttacacagctccaactgcaataagagcatttatgaagtggggagtagaacatcctcaagcacatgatttatcttctctaaggttattaggaacagttggagagccaattaatccagaagcttggatgtggtaccacgaaaatattggaagcgaatcttgtgcgattgttgatacatggtggcaaactgagacaggatcaatcatgatcactccactaccaggtatcactagtacaaaaccaggatcagcttgtgggccgatgccaggaattgatgcaattgttgtagacgaaaaaggaaacgaagtttcaaaaggagaaggtggataccttgcaataaaaacaccatggccttcaatgttgagaacagtttttggagatgaaaaaagatatatcg

SEQ ID NO: 309038 - DNA, 745 bp, Unknown
  Bacterial polypeptide expressing nucleotide sequence isolated from the Sargasso Sea
gttggtgattcaagatgcccaattgttgatactttggtggcaaacagaaactggtggtattttaattagtccgcaaacaggagctattaatttaaaacctggttcagcaacaaaaccattttatggaattaaacctttaattgttgataaggctggtaaagttttaaaaggtgaagcacaaggaagactttgtatagctcaatcttggccagggcagatgaggactgtttatggagatcacaaaagatttatagatacgtatttttctcaatttgatggaaaatatttcactggtgatggttgtcgtagagataaagatggatattactggataacaggaagagttgatgatgttattattgtttcaggacataatttaggaactgcagaaattgaaagtgcatttgtagcacatcctaaagtagctgaagcagcagtggtgggttatccacatgatataaaaggaaatgggttatactgctatgtaacattaaacgcgggtgaggttcattccttggatttagaaagagaattaaagctatgggtaagaaaacaaattggtgctatagctactcctgatcttatccaattctctccgggattaccaaaaacaaggtctggtaaaattatgagaagaattttaagaaaaattgcagcgaatgagcatgatcaattaggagatacgacaacattagcagatccaagtgttgtaaaaagtttggttaataatagaaaaaataattaa

SEQ ID NO: 309039 - DNA, 747 bp, Unknown
  Bacterial polypeptide expressing nucleotide sequence isolated from the Sargasso Sea
gatgcttcaagatggtggcaaatagttgataagtataaagtaaatattttttacacggctcccactgcaatacgtgatttaatgagaaggggtgacggtccagtaagaaaaacatcaagaaaatctcttaaattattagggaccgtaggtgaacctattaatccagaggcttggcaatggtattttaagacagtaggagattcaaaatgcccaatcgttgatacctggtggcagacagaaactggtggtatattaattagtcctcaaactggagctattaatttaaaacctggatctgcaacaaaacctttttatggtattaagccagttattgtcgataaagatggaaaagtattaaaaggagaatgcaaaggaatgttgtgtattgcccaatcttggccaggacaaatgagaactgtctatggtgatcatcaaagatttattgatacatatttttcccaatttgatggaaaatattttacaggtgatggatgtaagagagacaaagatggatactattggataactggaagagttgatgatgttattattgtatcaggacataatttaggaactgctgaaatagaaagtgcatttgtagctcatcaaaaagttgctgaagctgcagtagtcggatatccacatgatataaaaggaaatggattatattgctatgttacccttaatgttggggaagaacctaatggagatttagaaagagaattaaaactttgggttagaaaacaa

SEQ ID NO: 309040 - DNA, 815 bp, Unknown
  Bacterial polypeptide expressing nucleotide sequence isolated from the Sargasso Sea
gctgaaaatatatttttggtacaaaaaaccaagcaaaattttaaattctgataaacctcctttttacaagtggtttcaagatggaactacaaatacttgttataacgcagtggatttgcatgttgataatggaaaaggtgaaaaagttgcaattatatatgacagtccaattacaaagtttcaaaaaaaaataacttataaacaattaaaagatcaagtgtcagtttttgctggagctttaaaaaatcaaggaataaaaaaaggtgacagagttataatttacatgccaatgattcctgaggcagtaattggaatgcttgcttgcggaagaattggggcagttcattctgtagttttcggtggctttgcccccaatgaacttgcaagcagaatagatgattcaaaagcaaaaattattttatcagcttcatgtggttatgaaccgggaagaacagttgaatataaaccccttcttaaaaaagcaattgagttagcaaaacataaaccagaaaaatgtattatctatcagagaaaagattttaaagttgatttagaaaaaaatgaaattgattggaacgattcgataaaagatacaaaacctgtggagtgtgttgagatgaatgcgaacgattatgcttatattctttacacatctggcacaacaggtgtccctaaaggaattgttagagacattggtggtcacatcgttgcactaaaatggacgatgaaaaatatttataacattgatccagatgatgtgtggtggtcagcgagtgatattggttggatcgtcggtcattcttatattgtttatg

SEQ ID NO: 309041 - DNA, 745 bp, Unknown
  Bacterial polypeptide expressing nucleotide sequence isolated from the Sargasso Sea
tatgagcaaaatctataaagtagaaaaaggtctggcagacacttctcatgtaaatgccagcgagtataaacaactttataaagagtcaatcgagaatcccgatttgttctggtcgaaacaagcagaagcattcatagactgggaagaaaagtgggatcagatatccagaacaaatatgaaagagggcgagattgcatggtttttaggagcaaagctgaatgttgctcaaaattgtttggatagacaccttcaaactaaatccgaaaaaacagcaattatctgggaaggcgacaaccctaatgagcaagaaaatataagctataaagaacttcacaagcgtgtatgtagattagcgaatggtttgaagagcagaggcatcgcaaaaggagacagagtttgtatctacctacctatgattcccgaagccgcaatcgcgatgctcgcgtgcgctagaataggagccattcacagtgtggtcttcggcggtttctctcctcaatctctcagggatcgaatacaagactctgagtgttgcgccgttatcacggccgacgagggccttagaggagggaagtcagtaccgctaaaacaaaattcagatattgcagttgaggagtgttcaaccgtccacagtgtcatagttgttaaaaggactgggggcgagatcaaatggaacacccaaaaggacatttggtatcacgaccttattcgaggacagagcgataactgtccgatagaaataatg

SEQ ID NO: 309042 - DNA, 799 bp, Unknown
  Bacterial polypeptide expressing nucleotide sequence isolated from the Sargasso Sea
gagccgggagatcacctaccaggctttgcacctgtatgtctgccagcttgccaacaccctcaagcgacagggggtcggcaagggcgaccgggtgatgatctatatgccaatgattccggaagctgtgtttgccatgctcgcctgcgcccgcattggcgctattcattccgtggtgtttgccggcttctccccggatgccctggccggtcgcattgccgactgtggcgccaaaatggtgatcaccgccgatgccggacggcgcggtggcaagccagtaccgctcaaggacaacgtggacgaggccctgcgccaggacggcaccagtggcgtggagaaagtgctggtggttcgccatgtgggcaccgacattcactggcaaccagggcgcgatctggactacgcagaagaacaggcacaaagcgacaaccactgcccaccagaaaccatgaacgcggaagacccgctgttcatcctttatacctccggctccaccggcaaacccaagggcgtgctccataccaccggcggttacctggtctacgcctcactgacccatcagctggccttcgattaccagcccggccaagtgtactggtgcaccgcagacgtgggctggatcaccgggcacacctatctggtctatggaccgctggctaacggtgccacctgcgtcatgttcgaaggggtacccaactaccccaacgaccagcgggtgggcgatatcatcgaccgttacgacgtggaaattctctacacagcccccaccgccatccgcgccctgatggccggcggcgatcac

SEQ ID NO: 309043 - DNA, 319 bp, Unknown
  Bacterial polypeptide expressing nucleotide sequence isolated from the Sargasso Sea
gagaatatttcatggataagtgattttaatgaagttcaaaatgatgggttcgcaaataccaaatggtttataggtggtaaaaccaatgttagtttgaattgtatagatcgacatcttgatgaaaattcaaataaaactgctttaatttgggagggggatgacccaaatgaatcaaagcaatttacctataaggaattacatttacaggtttgtaaattcgcaaatgttttaaaagagcttggtgttaaaaaaggatctagagtatgtatttatatgcctatgattcccgaagcagcttttgctatgttggcctgtacca

SEQ ID NO: 309044 - DNA, 910 bp, Unknown
  Bacterial polypeptide expressing nucleotide sequence isolated from the Sargasso Sea
tgtgctcgaataggagcaatgcataacgtagtttttgctggtttcagtgcgaaagctttaagtgagagaataaatgattcatcttcaaaaattgttattacggctgatggaggtaatagaggtggtaaagttctttctttaaagccaactgttgatgaagccttaaaagattgtcccttagtttcttcagtaatagtttataaaaggactggtaataaaatatcatttgataataaacgcgacagttggtggcatgaattaactgaaggtgttgcaaataaacataatgcagagacttttgactctgaacacccactgtttttactttacacatctggaagtacaggaaagccaaaaggtattttgcatactagcgctggttatttactcggagctactataagtactcgctatgtttttgatctaaaaaaagaagatatcttttggtgcactgctgatgctggttggattacagggcactcatacgtgacatatggtcctttgtctaatggagctactattgttatgtatgaaggatctcctaatattcctgattggggacgcttttggcagataatagaaaagtatagagtaagtactttttatactgctccaacagccataaggtctttagctaaatctggtaatgaacttcctgagaaatatgatttaagcagtttaagggttttgggttcagttggagagcctatcaacccctcagcttggcaatggtattatgaaacagttggtagtggaaagtgtccaatagtggatacttggtggcaaactgaaactggcagtataatgatcagccctattccaggagccatgcatcttaagcctggttctgcaacacgaccatttttaggaataaaagccgaagtcgtcgataatgacggaaggcctgtaa

SEQ ID NO: 309045 - DNA, 898 bp, Unknown
  Bacterial polypeptide expressing nucleotide sequence isolated from the Sargasso Sea
agttttgcatactactgggggttatatggtttatgcatcgatgactcatcaatatatttttaattataagcaaaaagatgtttattggtgcacagctgacataggatgggttactggacatagttatataatttatggaccactttcgaatggcgctacaacattaatgtttgaaggaattccaacctatcccgataattcaagatggtggcagatagtcgataaacataaagtaaatatattttatactgcaccaactgcaattagagcacttatgaaagaaggagataagccagttaaaaaaacttcaagaaaaactttaaaattattaggaacagtgggagaaccaattaatccggaagcttggcagtggtattataaaacagttggagattcgagatgcccaatagttgatacatggtggcaaacagaaactggaggaatattaattagtccgcaaactggggctataaatttaaaacctggatctgcaaccaagccattctttgggattagacctgttatagtggataaaagtggaaaagttttaaaaggagaagctgaaggtagactttgcattgctcaatcatggccaggtcaaatgagaacagtttatggagatcatcaaagattcatagatacttatttttctcaatttgatggtaaatactttacaggagatggatgcaggagagataaagatggatactattggataacaggaagagtagacgatgtaattattgtctctggacataatttaggaactgcagaaattgaaagtgcattcgtagcgcatccaaaagttgcggaagctgctgtagtgggttttccacatgatataaaaggaaatggattatattgttatgtaactttaaatgcaggtgaaaaccattct

SEQ ID NO: 309046 - DNA, 793 bp, Unknown
  Bacterial polypeptide expressing nucleotide sequence isolated from the Sargasso Sea
taggaataattttatggctaagaaaaaaaagagaaaaattaaaaaaaaaagagttaagagaaaaaagagaaaaattaaaaagaaaagaattaaaaaattaaaaagaaaaaagttaaaaaaaataaaaaaaaaccaatcttctgaattaatttttaaagttccaaaaaaatggtcaaataaagcttacgttgataaggctgaatatgaaagaaagtacagattatcaattaaagacaatgagggtttttggaaaaaagaaggaaaaagaattgattggataaaaccttacaccaaaattaaagatgtcaaatatagtaaaactgaagttaagattaaatggtactatgatggaactcttaatgcctctgttaattgtattgatagacatttaaaagataaaaaaaataaaactgcaataatttgggtaggagatgatccaaaagtatctaaacaaattagttacaaagaacttcacaaaaatgtttgcaaagctgctaatggtcttaaagaacttggtataaaaaaaggagacagagtaacaatctatctaactatgattcctgaactagcatacgtaatgttagcttgtgcaagaatcggcgcaatacattcgataatctttggaggattttctccagactctatagctggaaggattaatgattgccaatctgactacattatcactgctgatgaaggtgttagaggaggaaaaatagttcctcttaaaaaaataactgatgaagctttatcacaatgtcctaacgtgaaaaaaatgtgttgtagtaaaaga

SEQ ID NO: 309047 - DNA, 844 bp, Unknown
  Bacterial polypeptide expressing nucleotide sequence isolated from the Sargasso Sea
gaaatgaatgcagaggatcctttatttattttatatacctcaggatcaactggtaaaccaaaaggagttcttcatactacgggtgggtatatggtatatgcatcaatgacacatcaatatatttttaactataagccaaaagatatctattggtgtactgctgatattggatgggtaacgggtcatagttatattatttatggaccccttgctaatggtgctacaacaataatgtttgagggaattcctaattatcctgacacttcaaggtggtggcagatcgttgataaatataaagttaatattttctatactgctccaacagcaatcagagctttaatgcgtgagggtgataagccagttaaaaaaacctctagaaagtctcttaaattgcttggcactgttggtgaaccaattaatccagaggcttggatgtggtattacaaaacagttgggaactcaaagtcaccgattgttgatacttggtggcaaacggaaacaggtggaatactaatagcccctcaaactggagctattccattaaaacctggttcagctacaaaaccgttctatggaattaagcctgttatcgtcgataaaaacggcaaagagataaaaggagctggcgaaggaaggctttgtattgctcaatcatggccaggtcaaatgagaactgtttatggagaccatcaaagatttatcgacacttatttttctcagtttaatggtaaatattttactggtgatggctgtagaagagataaagatggatactactggatcacaggacgagttgatgatgtaattattgtatctggacataatctaggtactgctgagatga

SEQ ID NO: 309048 - DNA, 879 bp, Unknown
  Bacterial polypeptide expressing nucleotide sequence isolated from the Sargasso Sea
aaaaatattagttataaagaattacacaaaaacgtttgcaaaacggcaaacgctcttcgagaacttggcattaaaaaaggtgatagagtaacaatttacttaactatgattccggaactagcttatgtaatgctagcctgtgcaagaataggagctatacactcaataatatttggaggattttcaccagactcgattgctggaagaataaatgactgtaaatctgattatattattactgctgatgaaggtgtgagaggaggtaaaataataccacttaaaaaaattgctgatgaagctttagttcagtgtccaaatgtaaaaaaatgtgttgttgttaaaagaacaggtaatgaagttaactggattaacgatagggatgtttattttcacgatttaataaaaaatgtttccgataaatgtgagcctgaagaaatggaagcagaggatccactatttattctttatacatctggatctacaggaaaaccaaagggagttcttcacactactggcggttatatggtttatgtttcaatgactcatcaatatatttttgattataaaaaaaatgatatttattggtgctcagctgatataggttgggtaactggccatagttatattatttatggtcctctatcaaatggagcaacgacaattatgtttgaaggggttcctaattatccagacttttctagatggtggcaaatagtagataaatataaagttaatattttttacactgcacctacggcattaagagctttaatgagagaaggtgaaggtccagttaaaaaaacaagcagaaaatctcttaaattacttggaagtgtgggggagccaataaaccctgaagcttggctttggtattataaa

SEQ ID NO: 309049 - DNA, 757 bp, Unknown
  Bacterial polypeptide expressing nucleotide sequence isolated from the Sargasso Sea
aatatcctataaacaattacatcaagaagtttcaaaggcagcgaatggattaaaagatattggagttaaaaaaggagataaagttacaatttatttaacaatgatacctgagttagcatatacaatgttagcctgcgcaagaataggtgcggttcattcaattatatttggaggtttctctgcagacagtattactggaaggattaatgactgtaagtctgactacgttattactgctgatgaaggtgtcagaggtggaaaaattattgatttaaaagctacagttgatgaagctttactaaattgtccaaatgttaaaaaatgtgttgtggtaaaacgaacaggaaacagaattaattgggatgaaagtagagatgtttggtatcacgaaataactaaaatggcatctaagaattgtgaacctgaggaaatgaatgcggaagatccgttgtttattttatatacctctggatctacaggaaaacctaaaggagttatgcacacgaccggtggctatatggtttatgcatcaatgactcatcaatacatttttaattataaaccaaaagatatctattggtgtactgctgatattggatgggtgacaggtcacagttatattatctatggacctctttctaatggagcgacgacaattatgtctgaaggtattcctaattatccagactggtccagatggtggcaaatagttgataaatataaagtaaatattttttatacagctccaacagctata

SEQ ID NO: 309050 - DNA, 571 bp, Unknown
  Bacterial polypeptide expressing nucleotide sequence isolated from the Sargasso Sea
aagttggaagtaagtaagtttgccaatgtgctgaagaagatgggcgttcaaaaaggtgatcgcgttacaatttatcttacgatgattcccgaagttgcatttgcaatgttggcatgtgcaagaataggagctgttcattctgtaatttttggtggctttgctcccgagtcaattgctgggcgaatacaagattgtaaatctcaatttgtaatcacagccgatgaaggactacgtgggggaaaaacaattcccttaaaaaaatatatcaacactgctttagagagttgtgatgacactataaaaacactagtaatcaaatacacaaaattaaaagaagatatttataaagacaatgattttgattacgctgagttaaaagaagaagttgatgagagttgtgaatgtgaatctatgaatgcggaggatcctctttttattttatatacctcggggtctacaggaaaacctaaaggagtcttacacaccacaggtggctatttagtatatgcttcattcactcataaatattcattcgattatcatcaaggagatgtttattggtgtacggctg

SEQ ID NO: 309051 - DNA, 475 bp, Unknown
  Bacterial polypeptide expressing nucleotide sequence isolated from the Sargasso Sea
tccgtgttctataccgctcccacagctattcgcgcattgatggcttatggagatgaaccggtgaagaggcacgaccgctcctctctacgtatcttaggtaccgtgggagagccgatcaacccggaagcctggcgctggtacttccaggtggtgggcgatagcaaatgtgctattgctgatacttattggcagacggagacgggcggccacgtcatgacgcctttgcccggggtcacgcccatgaagcctgggtcctgttgcctgcccttctttggggtcgaaccgaaggtcctagatgcacaatccggccaggaggtggcctggtcgaaaggcacgagggctgatggagtattagccctagcaaagccgtggccgtcggcgtgccgcacggtctggggcgaccacgagcgctacatggccacctatctagactgctacaagccctacttatttcacgggcgatggttgtactaaa

SEQ ID NO: 309052 - DNA, 595 bp, Unknown
  Bacterial polypeptide expressing nucleotide sequence isolated from the Sargasso Sea
tatgactgacaaatttcaaaaaatttatgatcaatcaattaaaaatcctgaaaaattttggcaagaagcctctaatgatatcttttggtttaaaaagccatctaaaattttaaataaatctaatccacccttttataaatggtttgaagatggaacaacaaatacctgctacaatgcattagacatccacataaataatggaagaggaaaaaaagtagcgttaatctacgatagcccaattacaggtaataaaagtaagttcacttacgaagagcttaggtcaaaggtttcaaaatttgccggagcacttctagctcaaggtgctaaaaaaggagatcgagtaataatttacatgccaatgatacctgaggctgtaattgcaatgctggcctgtgctagaattggagcaattcactctgttgtctttggtggctttgcatcaaatgaacttgctagcagaattgatgatagtaaagccaaattattagtaacagcatcatgtggctttgaacctggaagaactgttgaatataaacctttagtagacgaggctataaaaatagcaaaacataagattgaaaaaatgattttgttt

SEQ ID NO: 309053 - DNA, 763 bp, Unknown
  Bacterial polypeptide expressing nucleotide sequence isolated from the Sargasso Sea
gaaatggtactttgaaataccaggaaattcaaaatgccccattgttgatacttggtggcaaactgaaacaggcggtatattaatatcgccacaaactggtgctataagattgaaacctggttctgcttcaaaacctttttttggaattgaaccttgtattgttgataagtatggtaatgaattggaaggtgaatgtgagggaatgttgtgtatgaaacgatcatggcctggccaaatgcgaaccgtttatggtgatcataaaagatttattgatacttatttctctcaatttgatggaaaatattttactggtgatggttgtaaaagagatgaagatgggtattattggattacaggtagggtcgatgatgtaatcattgtatctgggcataatctaggtactgctgaaatagaaagtgcattcgtatctcataaggatgtttctgaagccgctgtagtaggctacccgcatgatgtgaaaggcaatggtctatattgctatgtttctttaaaagtgggtgtgaactcttcaaatgaattagttttagatttaaaaaatactattagggaaaaaattggccctatagcaacacctgattttatacacattacctctggtttaccaaaaacaagatctggaaaaattatgagaagaattttaagaaaaatagcatgtaatgattttgaaaacttaggagatacttcaactttggcagatccttctgttgtagaaaatttaattgaaaatagaaaaaataaataa

SEQ ID NO: 309054 - DNA, 919 bp, Unknown
  Bacterial polypeptide expressing nucleotide sequence isolated from the Sargasso Sea
cctgaaaagttttggcaagaagctagtgaagatatctttttggtttaaaaaaccaacaaaaattttaaataaatctaatcatcctttctataaatggttcgaagatggtgtgactaacacctgttataatgctttagatattcatattgaccaaggaagaggacaaaaaactgctttgatctacgatagtcctattactggtaataaagctaagttcacttatgaggaacttagagcaaaagtatcaaaatttgctggatccttaaaaaatcaaggtgttaataaaggagacagagtaattatttacatgccgatgatccctgaggcagtgattgctatgcttgcttgtgcaagaattggggccatacactcagttgtctttggtggatttgcctcaaatgaacttgcaagcagaatagatgacagtaaagcaaaattattagtaacagcttcatgtggttttgagcctggaaggactgttgaatacaaacctttggtagatgaggcgatcaaaatagcaaatcataaaattgataagatgattttgtttcagagaccaggaaacgaagtcaaattaaatgctcctaatgagataagttgggaagaagcagtctcaaatgcaacagatgctgattgtgttgaaatgaattcaaatgaatttgcttatatcctctacacatctggaacaactggaacaccaaaagggatcgtaagagacaccggcggtcatatcgtggctcttaaatggaccatgaagaatatctacaatattgatatggaaaatatttggtggtcagcaagtgatattggctggattgttggacactcatacattgtttatgctccattgttcaaaggatgtacgacagttttatttgagggaaagccagttggaactccagatgctggtgctttctga

SEQ ID NO: 309055 - DNA, 862 bp, Unknown
  Bacterial polypeptide expressing nucleotide sequence isolated from the Sargasso Sea
catatagaccaaggtcgaggggataaaactgcattaatatatgacagcccgataacggggaacaaagccaaattcacatttaatcaattaaaacaaaaagtttcaaaatttgcgggagctctagacaaacaaggaattacaaagggagatagaattattatttatatgcccatgatacccgaggctgttgtcgctatgcttgcttgtggaagaattggagcaatccactcagtagtgtttggcggatttgcgtcaaatgagttagctagcagaatagacgacagtaaagctaaaattttaattactgcttcatgcgggtttgaacctggaagaacagttgaatatcgtcctctagtagatggtgctttaaaacttgcaaaacataaagttgaaaaagttattctttatcaaagaaaaggccatgaagtgaaacttaatcaacctttagagataagttgggaagaatctttagttaacgctagtgaaaaagattgtgttgaaatgggatctaatgaatttgcttatattttatatacatctggaaccacaggtgttccaaaaggaattgttcgggacatcggaggacatatagttgctctaaaatggacaatgaaaaatatatacaatattgacacggatgatgtttggtggtctgcgagcgatataggatggatcgttggccactcatacattgtttatgctcccttatttaaaggatgcacaactattttatttgaaggaaagccagttggaactccagacgcaggtacgttttggaaaattatatctgattataaagttaaatctctatttactgccccaactgcttttagagcaatcaagaaagaagatccagaaggta

SEQ ID NO: 309056 - DNA, 919 bp, Unknown
  Bacterial polypeptide expressing nucleotide sequence isolated from the Sargasso Sea
ttatgcgtcaatgacacatcaatatatttttgattataaacctaatgatatctactggtgtactgctgatattggatgggtaacaggacatagttatattatttatggtccacttgctaatggagctacaacaataatgtttgaaggagttccaaattacccggacaattcaagatggtggcaaattgtagataaacacaaagttaatatattttatactgctcctactgcgattcgtgcattaatgagagagggcgatggtccagttaaaaaaactagtagaaaatctttaaaattacttggaacagttggcgagccgataaatccagaagcatggttgtggtattacaaaactgttggtgactcgagatgcccaatagttgatacgtggtggcaaactgaaactggaggaatattaattgctcctcaacctggagccattgatttgaaacctggctctgcaactaaacctttctatggaataaaacctttactagtagataaagacggaaaaattataaaaggtgaaggacagggaagattgtgtatggctggatcttggcctggacaaatgagaactgtttacggcgaccatcaaagattcatcgatacttacttttctcaatttgatggcaaatattttactggagatggctgcagaagagataaagatggatattattggattacaggacgtgttgatgatgtaattattgtatctggacataaccttggcactgctgaaatagaaagtgcttttgttgctcatccaaaagtagccgaagctgcagttgttggtttccctcacagtattaaaggaaacggattatattgttatgtaacattaaatgctggagaaaacccaactggcgatttagaaagagatttgaagcagtgggtaagaaaacaaatcggccct

SEQ ID NO: 309057 - DNA, 876 bp, Unknown
  Bacterial polypeptide expressing nucleotide sequence isolated from the Sargasso Sea
aggaaaaattataccactaaagaaaattgctgacgaagcactgcttcaatgtcctaacgttagaaaatgtttggtggtaaaacgtactggtaatcaagtaaattggaataacgaaagagacgagtcttatgaggaacttttggctaaagcttcaccaaaatgtgatcctgaagaaatgagtgcagaggatccgttatttattctttatacctctggctcgaccggcaaacctaagggtgtacttcacacaacaggaggatatttagtttatgcctcaatgacacatcaatatattttcgattataagcagaaagatatttattggtgtacagcagatattgggtgggtaactggacacagttatataatttatggaccactatcaaattgtgcaacaacaataatgtttgagggaattcctaactatcctgacagttcaagatggtggcagatagtagacaaatataaagtgaaaatattttataccgcgcctacagcgataagagctttgatgaaagaaggtgatggaccggtaatgaaaactagtaggaaatctttgaaattattgggaactgtaggagagccaattaatccagaagcatggatgtggtactacaaagttgttggggactcaaaatgtcctattgtagatacttggtggcaaacagaaactggtggaatattgattgcccctcaaccaggagctattgatttgaaaccaggttcagctacaaaacctttctatggaataaaaccagttattgtcgatgaaactggaaaagttttaaagggagcgtgcaaaggtaggctttgtatttcagcttcatggccagggcagatgagaactgtgtatggaaatcatcagagatttattga

SEQ ID NO: 309058 - DNA, 723 bp, Unknown
  Bacterial polypeptide expressing nucleotide sequence isolated from the Sargasso Sea
aaaacatctagaaaaactttaaaacttttaggtactgttggtgaaccgattaatcctgaagcttgggaatggtactacaaaactgttggtgatagtagatgtccaattgttgatacatggtggcaaacagaaacaggtgggattttgatcagtccgcaaactggagcgatagatttaaaacctggttctgcaacaaaaccatttttcggaattaaaccagagatcctagataaagatggcaaggttttaaaaggagaagcgcaaggtagactttgtatttcacaatcgtggcctggacaaatgagaagtgtctatggagatcatcaaagatttatagatacttatttttcacaatttgatgggaaatattttacaggcgatggctgcagaagagataaggatggatactattggattacaggaagagtagatgatgtaataattgtttctggtcataatttaggtactgcagaaattgaaagtgcgtttgtagctcatccaaaagtggctgaagcagcggtagttggttacccacacgacataaaaggaaacggtctatactgttatgtaactttaaatgctggagaaaaaagtactcttgatttagagagagatttaaaactttgggttagaaaacaaattggtccaatagcaactcctgacttaattcaatttgctccagggctaccaaaaacaagatcgggtaaaaataatgagaagaat

SEQ ID NO: 309059 - DNA, 337 bp, Unknown
  Bacterial polypeptide expressing nucleotide sequence isolated from the Sargasso Sea
gccgaggctgcagtggtcggtgtaccgcacgacatcaaagggcagggcatctacgtctacgtcaccctcaatgcgggcgaggaagcatcggagcaactgcgtcaggaactgcgtaactgggtgcgcaaggaaatcggcccgatcgccacgccggacgttattcagtgggctccgggcctgccgaagacccgctcgggcaagatcatgcgccgtatcctgcgcaagatcgctaccgccgaatacgattctctcggcgacatctccacgctggccgatcctggcgtggtgcagcacctcatcgacacgcatcgtcagatgcaagccgcctgcgcctgat

SEQ ID NO: 309060 - DNA, 815 bp, Unknown
  Bacterial polypeptide expressing nucleotide sequence isolated from the Sargasso Sea
tatgaaaagtaaatataatgagatttaccaggaatctttaaataaaccagaagagttttggaaaaatatttcagaagatattttttggtttaaaaaaccgagcaaaattttaactaaatctaaaccacctttctacaaatggtttgaggatggagtaacaaatacttgttataatgctttagattatcacatcgatcaaggtaaaggagaaaaaattgcattaatatatgatagtccaattacaggtaacaaagctaagtttacttttaacaagctaagagaaaaagtttcaaaatttgcgggagcattaaaaaatcaaggtataaaaaaaggtgatagagttataatttatatgccaatgatacctgaggccgttgttgcaatgctagcatgtggtagaattggagcaatacattctgttgtatttggaggatttgcatctaatgagcttgctagcagaattgatgacagtaaagcaaaaattttaattactgcgtcatgtggttttgagcctggtcgaactgtagaatataaacctctagtggatgaagccatcaagctagcaaatcataagatcaataagatgattttattccaaagaccaggaaatgaagtaaaattaaattctccaatagaagttagttgggaagaagtcatttcaaatgctaaggatgttgattgtgttgaaatgaattcaaatgaatttgcttatatcttatacacttcgggaactaccggagcacctaagggtattgtaagagatatagggggtcacatagttgcacttaaatggactatgaaaaatatctacaata

SEQ ID NO: 309061 - DNA, 688 bp, Unknown
  Bacterial polypeptide expressing nucleotide sequence isolated from the Sargasso Sea
gatgataagtcccttgccgggagtcgttgcgacaaaaccaggttcagctactttccctctgccaggaattgaagttgaaatcgtcgataagaatggaaataaggttaaagagaatgagggtggctatttaattattaagaaaccatggccaggaatgatgagaacaattcacggaaacccagagagatatttggagagttattgggaatatatttcctttaaaggagaaaaaaatgtttattttgctggagatggagcacgtattgatgaagatggatatatatggattatgggaagagttgatgatgtcataagtgtttcaggacatcggttaggaacaatggaaatagaatctgctttggtaagtcataaatctgttgcagagtctgcagtcgttggcaaaaaagatgatttaaaaggtgaagttatagttgcttttgtatctctcgagaaagacgtgaaaggttcttcagaattagtagataatctaaagaaacatgttgttaatgaaattggaattatcgcaaaacctgaaaaaattataatttctgactctcttccgaaaacacgtagtggaaaaattatgaggagaattttgagatctttggctgctggagaaaaaattagtggggatataagcactctcgaagatagttctgttttggaaaaattgaaagaattatcctaa

SEQ ID NO: 309062 - DNA, 670 bp, Unknown
  Bacterial polypeptide expressing nucleotide sequence isolated from the Sargasso Sea
actacaggtggttacaatctttggtcccatttgacatttaaatggatttttgatttaaaagatgacgatatttactggtgtactgctgatgttggttggattacaggtcatagttacatagtttatggccctttatctaatggtgctacaaccttaatgtatgagggagtgccaagaccctcaaatttaggggctttttgggaaattgttcaaaaatataaggtttctattttttatactgcaccaactgcaataagagcatttatgaagtctgggcgtgaaatccctgataaatataatttggaaagtcttagacttttgggcacagttggtgagccaattaatcctgaagcatggatgtggtacagggatgttattggtaaagatagatgtcctattgttgatacttggtggcaaactgagactggtggtgtgatgataagtcccttgcctggagtcgttgctacaaagccaggttcagctactttccctctgccaggaatcgaagttgaaattgtcgataagaatggagataaggttaaggagaacgagggtggctatttaattgtaaagaaaccttggccaggaatgatgcgaacaattcacggaaactcaaagagatatttggagagttattgggaatatatttcctttaaaggagaaaaaaatt

SEQ ID NO: 309063 - DNA, 931 bp, Unknown
  Bacterial polypeptide expressing nucleotide sequence isolated from the Sargasso Sea
aaaaaaaggtgacagggtacaaatatatttaactatgataccagagttggcttacataatgcttgcttgtgcaagaattggggcagttcactcaattatttttggaggtttctctgcagagtctatcgctggtagaattaaagattgtcaatctgaatatattgtaaccgctgatgaaggagtaagaggtggtaaaactattcctttaaaattaacaacagataaagcattagaatcatgtcccgatgttaagaaatgtttagttgttaaaagaacaaataaagagatagaattaataaaagatagagacttattctatgatgatgttctaaaggaagttgatgatttttgtgaaccagaaattttaaatgctgaagacccgttatttattttatatacatcaggatcaactggtaaaccaaaaggagtaatgcatacatctggtggttatattgtatacgcatcaatgactcatgaatatatctttaattataatgatggagatatatattggtgtaccgcagacataggatggatcactggtcatagttacataatttatggacctctttctaatggagctacaactttaatgtttgaaggagttcctaattatcctgacttctctagattctggaaaatagtcgataagcataaagtaaatattttttatacagctccaactgcaattagagccttaatgagagaaggtgatgattatgtatctaaaactagtagatcatcattaaaacttttgggaacagttggtgagcctataaatccagaagcatggaaatggtactttgaagttccaggtagttcaaactgtccaattgttgatacttggtggcaaactgaaacagggggaatattaatatctcctcaaagtggtgccataaaattaaaacctggttcagcttctaaaccattt

SEQ ID NO: 309064 - DNA, 484 bp, Unknown
  Bacterial polypeptide expressing nucleotide sequence isolated from the Sargasso Sea
aatgttcgaaggtgttccaaattatccaaattcttctcgcttttgggaagtagtagataaacataatgtaaatatattttatacagctccaacagctataagagcattaatgaaagaaggaaatgaacctgtaaataaaacaagtagaagtagtttaaggcttttaggaagtgtaggtgaacctataaatccagaagcatggaattggtattatactgtggtaggatcaagtaaatgtcctatagtagacacttggtggcaaacagaaaccgggggtatactcattagtccactacctggcgcaatagatttgaaacctgggtctgctacaaaaccattttttggtatatcaccggctttagtagataatgaaggaaatgaattagaaggagaagccgaaggaaatctgattataaaagattcttggccaggacaaatgagaacagtttatggtgaccataaaagatttgcagaaacatatttt

SEQ ID NO: 309065 - DNA, 853 bp, Unknown
  Bacterial polypeptide expressing nucleotide sequence isolated from the Sargasso Sea
gtggcaaattgtagacaagtacaaggtaaatattttttatacagcgccaacagcaataagagctttgatgagagaaggagataaaccagttaaaaaaacaagtaggaaaacattaaagttattaggcaccgtcggagagccaatcaatcctgaagcttggatgtggtattacaagactgtaggagactcaaggtgcccaatagtagatacatggtggcaaacagaaaccggtggaatcttgattgcacctcaacctggtgccatagatttaaaacctggttctgcaacaaaaccattttatggtattaaacctgtcttggttgataaagatggtaagattatcaaaaaagagggtaaaggacgactttgtatggcctcttcatggcctggtcaaatgagaacagtttacggagatcatcaaagattcatagatacatatttttctcaatttgatggaaaatattttactggtgacggttgcaggcgtgacaaagatggatactactggataactggaagagtagacgatgtaattatagtttcaggccataaccttgggactgctgaaattgaaagtgcatttgttgctcatcctaaagttgcagaggcagctgtagtaggttttccacatagtattaagggtaatggattatattgttatgtaacacttaatgcaggagaaaacccaactggtgacctagaaagagatcttaaactttgggtaagaaaacaaattggaccaatagcaacaccagatgttattcaatttgctccaggattaccaaaaacaagatctggaaaaattatgagaagaattttaagaaaattgctgccaatgagccagataatttag

SEQ ID NO: 309066 - DNA, 829 bp, Unknown
  Bacterial polypeptide expressing nucleotide sequence isolated from the Sargasso Sea
aactgccataagagctttgatgtcactaggggatgaatttgtttcaagtacctcgagaaaatcgattaaagttctgggtaccgtcggtgaaccaataaatcctgaggcatgggactggtattactcggttgtaggtaataagtcttgtgaagttattgatacatggtggcaaacagaaactggttcagttcttatctctcccattgcaggcattacaccaacaaaaccaggctctgcaacattaccattttttggagtaaggcctgagttgttcgatgagaatggtattaagcaatcaggagaagcttcgggtaatctggtaattgaatcttcatggccaagtcaaattagaagtgtttataacgatcatcaaagaatgattgatacttatttttcaacttatagcaatatttactttacaggcgatggtgcaaaaagagatgaagatggttacttctggattactggaagagttgatgatgttcttaatgtttctgggcatagacttgggactgctgaagttgaaagcgcccttgttcttcatccagttgtggctgaagctgctgtagtaggcttcgaacatccaataaaagggcaagggatatatgcttttgttactttaatggtagatgaagagttttcagatgaattatcagcagaattaagaaattttgttggtaaagaaattggtcccattgcaaaacctgacttaattcagaatgctcccggtcttccaaaaactagatcagggaaaattatgagaagaattttacgtaaagttgctgaaggtgattttgaaaacttaggtgatacaacaatctcttgctga

SEQ ID NO: 309067 - DNA, 324 bp, Unknown
  Bacterial polypeptide expressing nucleotide sequence isolated from the Sargasso Sea
gttggcgatagcagatgcccaatcgttgatacatggtggcaaacagaaacaggtgggattttgatcagtcctcaaactggtgccatagatttgaaatctggttctgcaacaaaaccgttttatggaattaaaccagaaatcttagataaagatggcaaggttttaaaaggagaagctcaaggtagactttgtctttcacaatcgtggcctggacaaatgagaagtgtgtatggtgaccatcaaagatttatagatacttatttttcacaatttgatgggaaatattttactggcgatggatgcagaagagataaggatggatag

SEQ ID NO: 309068 - DNA, 367 bp, Unknown
  Bacterial polypeptide expressing nucleotide sequence isolated from the Sargasso Sea
catcgtataggctctgcggaggtagaaagcgctcttgtttctcatatttcatgtacggaggcagctgtggtgggcatcgatcatgaaattaagggacaagctatttatgcatttgtgacggtcataccggggactgcttgcaatgaaaaactccgtaaggaactcgtgcaaactattcgtagtgtcataggaccatttgcgtcacctgatgtgatacactgggcgcctggattgcccaaaacaagaagtggaaagatcatgcgccgtatactgcgtaagatcgcaaacagtgacctggaaaatctgggcgatactagcacgctcgcagatcccacagtagttgaacaacttatacaaacgcgttaat

SEQ ID NO: 309069 - DNA, 790 bp, Unknown
  Bacterial polypeptide expressing nucleotide sequence isolated from the Sargasso Sea
tgggaaggcgactcgcctgaagacagtgatgaaattagtttccaacagcttcattatgaagtctgtaagctggccaacggcctgaaaaagctgggcgtcgaaaaaggcgaccgcgttgctatttacatgccgatggtgccgcaggcagcgtacgccatgctggcgtgtgcgcgcattggtgctgtgcactcagtcatttttggtggtttctcgccaaacgctattgccgaccgtattaacgacagcagtgccaaggtagtaattacctgtgacgaaggccgtcgtgccggtcgcagtgtaccgcttaaagcaaacgttgaccgcgcgctggccaatgatgcctgtccttctatcacaaacgttatcgtgcataagttaacgggcggtgatgttgcctttgatgacagcgttgatgtgtggtgggacgcactggtagaggactgctctgcgcagtgcgagccagaagtgatgaacgcagaagatccgctgtttattctgtatacctcaggatctaccggtacccctaaaggtgtggttcacactaccggcggttacctgctatatacggcaatgacctttaaatatgccttcgattatcgcgaagatgatatttactggtgtaccgccgatgtgggttggatcaccggtcacagctacatgacctacggcccgctgattaacggtgctacgcaggtattctttgaaggtgtgccaacttatccggacgtgcgccgtattgctcaggttgtcgaaaagtacaaagtcaactctctgtataccgcgcctactg

SEQ ID NO: 309070 - DNA, 752 bp, Unknown
  Bacterial polypeptide expressing nucleotide sequence isolated from the Sargasso Sea
catgccaaaaaaaaataaaaaagttaaagttaaaaagaaaaagtctattaagaaaaaaaaaattataaaaaaaaaatctgatcagaacatagaaaaagaattaatttataaaactaagaaagattggatcagtaaagctacagtaaataaatctcaatacgaaaaaaaatataaatcttcaatttcagataatgatgctttttggaaaaaagaaggaaagagaattagttggattaaaccttatacaaaaattaaagatgtgaaatatagcaattcagatgttagaataaaatggttttatgatggaaccttaaacgcttctacaaattgtattgatagacatttaaaaaaaaataaagataaaactgcgataatatgggttggcgatgatccaaaaattcaaaaaaaaattacttataaagaacttcacaaagaagtatcaaaagcagcaaacggattaaaagaaataggcgttaaaaagggtgatagagttacaatttatttaactatgatacctgagttagcatacacaatgcttgcttgtgctagaattggggcagttcattcaattatattcggaggattttcaccagatagtatttctggaagaattaacgattgcaaatctgattatgtaattactgctgatgaaggtgtaagaggaggaaaaacaatacacctaaaatcaattatggatgaagctttagttaaatgtacgaaagtaaaaaaatgtgttgtggtaaaaagaactg

SEQ ID NO: 309071 - DNA, 1006 bp, Unknown
  Bacterial polypeptide expressing nucleotide sequence isolated from the Sargasso Sea
gaaatgagcgctgaagatccattgtttattctttatacatcaggatcaactggtaacccaaaaggtgttttacatacaacaggtggttacatggtttatgcttcaatgacccatcaatatattttcaattataaacccaaagatatttactggtgtactgctgatattggttgggtgacaggacatagttatataatttatggaccactctctaatggtgctacaacaataatgtttgagggagtgcctaattatccagacagttcaagatggtggcaaattgttgataaatttaaagtgaatacattttatactgcacctacagctattagggctcttatgagagagggaaatgaacctgtcaataaaacatcaagaaaatcactaaaattattagggactgtcggtgaacccataaatccagaagcttggatgtggtattataagacagtaggaaactcaaaatgtccaatagttgatacctggtggcaaactgaaacaggaggaattttaatttcaccacaaactggcgctattcctttaaaaccaggttcagctacaaagcctttttacggaattaaacctgttcttgtagacaaagatggtaaagaaataaaaggagctggtgaaggaagattgtgtatagctcaatcatggcctggccaaatgagaactgtttatggtgatcatcaaagatttatagatacttatttttcacaattcgatggaaaatattttactggagacggttgtagaagagataaagatggatactactggattacaggaagagttgatgatgtaattattgtttcaggtcacaatctaggtacagccgaaattgaaagtgcatttgttgcccatccaaaagtagcggaggctgctgtagttggttatcctcatgatatcaaaggtaatggtttatattgctacgttactcttaatgcgggagaaagtgaaactggggatcttgaaagagagttaaagttatgggttagaaaacaaa

SEQ ID NO: 309072 - DNA, 460 bp, Unknown
  Bacterial polypeptide expressing nucleotide sequence isolated from the Sargasso Sea
tttacaggtgatgggtgcaaaagagataaagatggatattattggattacaggtagagtagatgatgtaattattgtgtcaggacataatttaggtactgcagaaatagaaagtgcttttgtttctcataaagatgtttctgaagcagcagttgttggttatcctcatgatataaaaggtaatggtttatattgctacgtttctcttaaagttggtgtagattcatcagaagagttagtcttggatctgaaaaaaaccattagggaaaaaataggtcccatcgcttctcctgactttatacatgttacatcgggcttgccaaaaacaagatcaggcaagattatgagaagaattctaagaaaaattgcttcaaatgaatttgaaaatttgggagatacctcaacacttgcagatccttcagttgtagatgatttaattgctaacaggaaaaatagataaa

SEQ ID NO: 309073 - DNA, 549 bp, Unknown
  Bacterial polypeptide expressing nucleotide sequence isolated from the Sargasso Sea
tgcgggctccctggcccggaatgatgcgcacggtgcatggcaacccccagcgctttcgcgagagctattgggagcacatccgtcctgccgatggttcctacctctatttcgctggggatggcgcccgccgcgacgccgatgggtacttctgggtgatgggccgggtggatgacgtgatcaacgtttccggtcatcgccttgggacgatggagatcgagtcggctctggtgagccatcccgcggtggcggaagccgctgtggtcggtcgccccgacgacctcaagggtgagggcatcgttgcgttcgtcacgctggaggcagggcgtgagtcgtcagaggatctgatcaagcagctcagggcccatgtgggcacagagatcggaccgattgctcggccggacgagattcgctgcagtgatgccctgcccaagacccgcagcggcaagatcatgcgccggatcctgagggccctggccgctggccaggacgtcaccggtgacaccagcacccttgaggaccgttcggttctggaccgcctgcgggcctgat

SEQ ID NO: 309074 - DNA, 625 bp, Unknown
  Bacterial polypeptide expressing nucleotide sequence isolated from the Sargasso Sea
tatggaattaagccagtactagttgataaaaatggtaaagaaattaaaggcgctggtgaaggaaggttgtgcatagctcattcatggcctggacaaatgagaactgtttatggtgatcatcaaagatttattgatacgtatttttctcaatttaacggaaaatattttactggtgatggatgtcgaagagataaagatggttattactggatcaccggtcgagtagatgatgtaattattgtatcagggcacaacttaggaactgctgaaattgaaagtgcatttgttgctcatccaaaagtagctgaagctgctgtagttggttaccctcatgatattaaaggtaatggattatattgttatgtaacccttaatgcaggagaaaacgaaactggagagttagaaagagatttaaaactttgggttagaaaacaaattggacctttagcaactccagatctaattcattttactccgggtcttcctaaaactagatcaggaaaaataatgagaagaattctaagaaaaattgcagctaatgagcatggtcaattaggagatacaaccactttagcagatccaagtgttgttgatagtttggtagataatagaaaaaatatttaaa

SEQ ID NO: 309075 - DNA, 869 bp, Unknown
  Bacterial polypeptide expressing nucleotide sequence isolated from the Sargasso Sea
gtttcaggatggaataacaaatacttgttataatgctgttgatctgcatgttgaaaaaggtaagggacaaaagacagctattatttacgatagtccaataacaaattcacaaaaaaaaataacttataacgaattaaaagatcaagtctcaatttttgctggagctctaataaatcaaggaataaaaaaaggagatagagtcataatctatatgccaatgattcctgaagctgtaatcgctatgctggcttgcggaagaattggagctgttcattctgtggtttttggtggctttgctccaaatgaactcgctagcaggatagatgattctaaggcaaaaattattttatcagcttcctgtggttatgaaccaggaaaaacaattgaatataaaccattacttaaaaaagccattgaattagcaaaacataaaccagaaaaatgtattatctatcagagaaaagattttaaagttgatttagagaaaaatgaaattgattggaacgatgctgtaaaagatgcaaaacctgcggagtgtgttgagatgaatgcaaacgattatgcttatattctttacacatcaggaacaacaggtgttcctaaaggaattgtcagagatattggtggacatatcgttgcacttaagtggacgatgaaaaatatttataacattgatccagatgatgtctggtggtcagcaagtgatataggttggatcgtcggtcactcatacattgtttatgcgcctctttttcacggatgtacgactgtactatttgaaggaaaacctgttggtacacctgatgctggagtcttttggagaattatttctgagcacaaagttaaatcacttttcaccgctccaacag

SEQ ID NO: 309076 - DNA, 940 bp, Unknown
  Bacterial polypeptide expressing nucleotide sequence isolated from the Sargasso Sea
ttgataaccgcagatgaatcagtgagaggaggaaaaatatttcctttaaaaagcaacgttgacaaagcactcgaaaaagaaaataaaattaataaagtacttgtaattaaaagaacaggtaacaatataaattttttaaaagaaagagacatttggtggcacgaagaaaaaaataaagttgacgatactaataagcctgctgaattaaaagcagaggatcctctttttattttatatacctcaggatcaactggaaaacctaaaggggtcttacatacttctggaggttatattgtgtatgcttcacttacacatgaatacattttcaattataaagaaaatgacgtttattggtgcactgctgatgtaggatggataactggtcatagctacatagtttatggaccattggcaaatggagcaactactttaatttttgagggtgttcctaattaccctgatgcagctagattttgggaaatatgtgataaacatgatgtaagtattttctatactgctcctacggcgttaagagctataatgagggaaggagatgagtttgtaaaaaaaacagatagaagtagtctaaggattttaggaacagtaggagagcctattaaccctgaggcatggaaatggtattatgaagtagtaggaaatcaaaattgtccaatagtggatacatggtggcaaacagaaactggtggagttttaatatcacctcttccgggaacaatagacatgaaacctggttcagcaacattacctttttttggaatccagccggcaatagttgataaccagtctacagtattagaaggaatggctgaaggaaatctggtaataacagacagttggccaggacaaatgagaacagtatacggagatcaccaaagatttattgacacatacttttctacctttgataaagtttatttac

SEQ ID NO: 309077 - DNA, 797 bp, Unknown
  Bacterial polypeptide expressing nucleotide sequence isolated from the Sargasso Sea
aatttatggacctctttcaaatggagctacaactataatgtttgagggtgttccaaattatcccgatagttcgagatggtggcaaatagttgataagtataaagttaatatattttatacagctccaacagctattagagctttaatgagagaaggagacaaaccagttaaaaaaactagcagaaaaacactaaagcttttaggaacagtaggtgaaccaattaatccagaggcatggatgtggtattataaaaccgtaggagactcaagatgtcctattgtcgatacttggtggcaaactgaaactggaggtattcttattgctcctcaacctggagctattgatctaaaacctgggtcagctacgaagcctttttatgggattaagccagtgctggtagataaagatggtaagattgtaaaaggtgaaggcaaaggtcgcttatgtatggcttcgtcttggcctggacaaatgagaacagtttatggtgaccatcaaagatttattgatacttatttttctcaatttgatggcaaatattttactggtgatggctgtagaagagataaagatggctactactggattacaggtagagtagacgatgtaataatagtttcggggcataatcttggaactgcggaaattgaaagtgcatttgttgcacatcctaaagtagctgaagctgcagtagttggttttccgcacagtattaaaggaaacggtttatactgttatgtaacacttaatgcaggagaaaacccaacgggtgatttagaaagagatttaaagcttt

SEQ ID NO: 309078 - DNA, 409 bp, Unknown
  Bacterial polypeptide expressing nucleotide sequence isolated from the Sargasso Sea
acaggaagagtggatgacgtattaaacgtctcagacatagaaattggcactgctgaggtagagagtgctctcgtaactcaccctgacattgctgaagctgcagttgttccaattgaacatgaaataaaaggacaagctatttatgcctatgtgatattgaaggagaaaaatatgaatgcagattcattggtcaaagaattaaatgaatgtgtttcctcagagattggcaaaattgcaaaaccagaatatattcatattattcgagatcttccaaagacaaggtccggcaaaataatgagacgtatattaagaaaaattgcaaataaccaattttctgattttggcgacacttcaacacttgctgaccccacaattattgaagaattaattaggagtaaaggtgagtgaa

SEQ ID NO: 309079 - DNA, 625 bp, Unknown
  Bacterial polypeptide expressing nucleotide sequence isolated from the Sargasso Sea
ttatggaattaaacctgttcttgttgataaaaatggcgatgaaattaaaggtgctggagaaggaagactttgtatcgctcagtcatggcctggccaaatgagaacagtctatggagatcatcaaaggttcattgatacttacttttctcagttcaatggaaaatattttacaggagatggatgtagaagagataaagatggctattattggataacaggaagagtggatgatgtaattatagtttcaggacataacttgggaactgcagaaattgaaagtgcatttgtcgctcatccaaaagtagcagaggcggcagtagttggatatccacatgatataaaaggaaatggtctctactgttatgtaactctaaatgctggtgaaacagaaacaggtgagcttgaaagagatttaaaactttgggtaagaaaacaaattggacctttagcaactccagaccttgtccattttactccaggtttaccaaaaacaagatctggtaaaataatgaggagaattttaagaaaaattgctgctaatgaacatgagcaattaggtgatactaccactttagcagacccgagtgttgtaaacagtttggttgaaaatagaaaaaatatttaa

SEQ ID NO: 309080 - DNA, 778 bp, Unknown
  Bacterial polypeptide expressing nucleotide sequence isolated from the Sargasso Sea
ccagaagcatgggaatggtattatagggttgttggtgaagaacggtgcccgattgtcgatacttggtggcaaactgaaacaggtggaatcatgataactccgcttcctggtgctagagcactgaaaccaggatccgccactcttccctttttcggagtggttctagcgttgttggatggagatggccatgaaattgagggtcagggtgaaggttccctggtgattaagaactcttggcctggtcaaatgcgtactgtttttggtgatcatcaacgttttaaagagacttatttcagcacctatccaggatactactttactggtgatggggcccgtcgagatagcgacggttattactggattactggcagagtggatgatgtgatcaatgtatcaggccataggctgggaactgcagaggtagagagcgcgctagtccttcatgaaaacgtttcagaagcggcagtggtaggttacccgcatgatataaaaggccaaggaatatttgcatacgtgaccttaatgaatgggattcaaccgtcagaaaatctacggaaagagttggttgatttagtcagaaaggaaataggacctatagctaacccagacaagatacaatgggcgccaggattacctaagacccggtcaggaaaaatcatgaggagaatcttaaggaaaatcgccgcaaatgagttagaaaatctgggagatactactaccctagcagatccgtcggttgttgaagagctaaaaaacagttatatgcaatcactataaa

SEQ ID NO: 309081 - DNA, 838 bp, Unknown
  Bacterial polypeptide expressing nucleotide sequence isolated from the Sargasso Sea
ttttagaaaatcagacctttcttccctcaaagttattggatcggttggtgaaccaatcaatgaggaagcttggaattggtataatgaaaaggtaggtaaaaataattgtccgatagttgatacatggtggcagacagaaactggtggtattatgatatcaccacttccaaatattatcgaatgtaaaccaacatatgcaactttaccgttacctggaatacagccagtcctactagataacaatggtaatgaaattttagagaataatatagaaggaaatttatgtattaagtttccttggccatctatcttaagaaccacgtacggtgatcacaagagatgtaaggaaacttatttttctacctttaaaggtttctattttacaggcgatggtgcaaaaagagatgagaatggtatgtatagaattttaggaagagtcgatgatgtaataaacgtttctggacataggataggaactgctgaggttgaagatgctattaaccaaaatagtgatgtagttgaatctgctgttgttggatatccacacgacattaaaggtcaaggtatctttgggtttgttataataaataatgaaagtgaaaaaacagattattttgactctattagaaaaactgtctcaaatcatatcggacctattgcaaaaccggataaaattttaatagttcctgggttaccaaaaacaagatcaggtaaaattatgagaagaattttgcgaaaaatcgcttcaaatgagtttaataattttggagatatttcaactttattaaatccagaaattgttgataaaataattagttcttttaaaaaaactaattaa

SEQ ID NO: 309082 - DNA, 838 bp, Unknown
  Bacterial polypeptide expressing nucleotide sequence isolated from the Sargasso Sea
attggaggcttcgctccggagtcaaatgcaggacgcattaaagattgtaaatctaagtttattattactgctgatgagggaattcgtggtggtaaaataattccattgaagaaatacattaatacagcattagaggactgtgatgactctataaaaactttagtagttcggtgcacgaataccaaagaagacttacatcaggttaacaatttttattacgatgaattaattaaagaagtagatgatcagtgtgtgtgcgtctctatgaacgctgaggaccctttgttcattttatatacttctggttctactggtaaacctaaaggggttcttcataccactggaggatatttagtctatgcttcctttacacataaatactcttttgattatcacactggggatgtttattggtgcactgcagatgccggttggatcacaggacattcttattctgtttacggccctctagcaaatggcggcacaacattactttttgaaggtgttcctaactatccggatttttcaagattttgggaagtttgcgaaaaatataaagtcaatattttttataccgcccctacagtattaagatctttgatgaaagaaggtaattcttatattgaaaaatgtgatttaagttctttgagaattttaggaacagttggggagccaattaatccagaagcttggaattggtattcgtcgattgttggtaaggataaatgtcctgtgattgatacttggtggcagacagaaacaggagggcatctgatttcgccaatacctggtgtctcaaagcttaaacctggcagcgcaactcaaccatacttcggga

SEQ ID NO: 309083 - DNA, 311 bp, Unknown
  Bacterial polypeptide expressing nucleotide sequence isolated from the Sargasso Sea
cttaacttgggaaggggatgagccaggaaactctaaagagaaaactttcaaagaattgcactctgaggtttgcagggttgcaaatatccttaaaacacttcaaattaaaaaaggctccagaatttgtatttatatgccgatgaatcctgaagctgcatttgcaaggtttgcatgtgcaagaattggtgcgatccactcagttgttttcggtggaatttctccagaatctcaaaaggataggaatctggatgctgactgcagaattgtaattacggctgatgagggtgtgcgaggcggtaaaaagggtcctt

SEQ ID NO: 309084 - DNA, 810 bp, Unknown
  Bacterial polypeptide expressing nucleotide sequence isolated from the Sargasso Sea
gatgccaaaaaaaaaagttaaaaaaagaaaaaaaaaaataatcactaaaagaaaaactaaggcaaagtctttagctccaaagcaagaaaaagaacttatatatagaacaaagaaagactggattagcaaagccttagtaaacaaatctcagtacgaaaaaaaatataaatcttcaataaaagataatgatggcttctggaaaaaagaaggaaagagaattaattggataaaaccgtatacaaaaattaaagatgttaaatatagtaaatcagatgttaagataaaatggttttacgacggtactcttaatgcatcggcaaattgtattgatagacacttaaagaagaataaagataaaactgcgattatatgggttggagatgatccaaaagttcaaaagaaaatttcctacaaagaattacacaaagaagtttctaaagctgcaaatggtcttaaagaattaggggttaaaaaaggtgatagagtaacaatctatttaaccatgataccagaacttgcatatacaatgttggcgtgtgcaagaataggagctgtgcattcaataatttttggaggattttctcccgatagtatttctggacgaataaacgattgtgagtctgattatctaattacagctgatgaaggtgtaagaggtggaaaaataatacctctgaaatcaatagctgatgaagctttagtaaattgcccaaatgtaaaaaaatgtgttgttgttaaaagaacaggcaatagaataaattgggatgaacgaagagatgtttggtaccacgagttaacgaaaaaagtttc

SEQ ID NO: 309085 - DNA, 928 bp, Unknown
  Bacterial polypeptide expressing nucleotide sequence isolated from the Sargasso Sea
aaagtacgacgagatgtattctgaatcgataaataaccccgatgccttttggtcaaaacacggattgagaatagattggattaaacccttcacaaaaattaaagacgtgtcatacgagcaccccaatgtttcaataaaatggtttgaagatggtgaacttaatgtttctgccaactgtatcgaccgacatctaaaaaaacgcggaaaccagacagcgattgtttgggagggagataacccagaagaaagtcaacatgtcacttataacgaattgcatcatcaagtttgtaagcttgcaaatgtgtacaagaacttgggtgtcgctaagggcgaccgcgtagttctatacatgccgatgataccagaggcagcttatgctatgctagcatgtgctaggattggtgctattcactctattgtttttgccggtttctcgccagaggcattagccgctagagttgaaggctgtaaagcctcgttaatagtcacagctgatgaagctcctaggggtggaaaaaataccccgctaaaagccaatgtagataaagctttgaaaatctgtggtgacgttaaaactctcgtagtcgaaagaactggagggaatgtatccatgaaagatggccgagatacatctttcaatgcagcaatgaaggaggcatcagaagaatgtgagccaacagtgatgaatgctgaagacccactatttattctttatacttctggctcgaccggcgcccccaagggtgtccaacattgttccggcggttacctagtatgggcatcaatgacccatgaatatgtttttgactatcatgatggtgatatttattggtgcacagcagacgtgggatgggtaactggccacagctatattgtctacggacctcttgcgaatggggcaacaacactgatgttgaaggtattccaa

SEQ ID NO: 309086 - DNA, 721 bp, Unknown
  Bacterial polypeptide expressing nucleotide sequence isolated from the Sargasso Sea
gttgatactttggtggcaaacagaaacaggtggaataatgatttctccacaaaccggcgcaattcctttaaagccgggttcggctacaaaaccattttatggaattaaaccagtgttagttgataaaaatggtaaagaaattaaaggtgcaggtgaaggaagactttgcattgctcaatcatggccaggccaaatgagaaccgtgtacggagaccatcaaagatttattgatacatatttttctcaatttgatggaaaatactttacaggtgatggatgcagaagagataaagatggctactattggattactggaagagttgatgatgtaatcatagtttcaggacacaatttgggtactgctgaaattgagagtgcttttgttgctcatccaaaagtagctgaagctgctgtggttggatatccacacgatataaaaggaaacggtttatattgctacgtaactttaaatgctggagaaagagagacaggtgatcttgaaagagatcttaagctttgggtcagaaaacaaattggacctttagctactcctgatttgattcattttacgccaggacttcctaaaactaggtcgggcaaaataatgagaagaattttaagaaaaatagctgcaaacgaacatgaacagttgggcgacacaacaactttagcagacccaagtgttgttgaaagtttggttgataatagaaaaaatatttag

SEQ ID NO: 309087 - DNA, 826 bp, Unknown
  Bacterial polypeptide expressing nucleotide sequence isolated from the Sargasso Sea
ctagcatgcgcaagaattggagcaatacactcaattatattcggtggtttttcaccagacagtatagctggtagaataaatgattgtaaatcagattatgttataacggcagatgagggcttaagaggtggcaagactattgcactaaaatcgattactgatgaagctctaatgaattgcccaaaagttaaaaaatgtatagttgttaaaagaacaggtaatagaattaattgggatgaaagtagagatatttggtatcacgaaataacaaaaaaagtttcttcacattgtgaaccagaggaaatgaatgctgaggacccgttgtttattttatatacatccggatctactggaaaacctaaaggtgttttgcacacaacgggtggctatatggtttatgcctctatgactcatcaatacatttttaattataaacctaaggacatatattggtgtactgcagatattggatggattacaggtcatagctatataatttatggtccactttcaaatggagctacaactataatgtttgagggtattcctacttatccagatacttcaagatggtggcaaattgttgataaatataaagttaacattttttataccgctcctactgcaataagagctttgatgagagaaggtgatggaccagtaaaaaaaacatcgagaaaaactttaaagttattggggacagtaggagagccaataaatcctgaggcatggcaatggtattataaaactgttggggattctaaatgcccaatagttaatacttggtggcaaactgaaactggtggaatattaattagtccacaaa

SEQ ID NO: 309088 - DNA, 796 bp, Unknown
  Bacterial polypeptide expressing nucleotide sequence isolated from the Sargasso Sea
aagtctaaccctcctttctataagtggtttgaagatggtattactaattcctgttacaatgcattggatttgcacgtagaccaaggtcgaggtgataaaattgcattaatatacgatagtcccattacaggtaataaagcaaaatttacttttagtgacttaaagcaaaaagtttcaaaatttgctggcgcacttgagaaacaaggagttaaaaagggagacagggtaataatttatatgcctatgatacctgaagctgttatagctatgcttgcttgtggaagaattggagccgttcactcagttgtatttggtggatttgcatctaatgaattagccagcagaatagatgatagtaaagctaagattttaattactgcttcatgcggatttgaacctggaagaacagttgaatatcggcctttagtagatggtgcgctaaaacttgcaaaacataaagttgaaaaagttattttttatcaaagaaaagatcatgagataaaacttaatgaacctttggagataagttgggaagaatccttggtaaacgctaccgaaaaagattgtgttgaaatgggatccaatgaatttgcttatatcttatatacctctggaaccacaggtgtgccaaaaggaattgttagagatattggaggacatatagttgctctaaaatggacaatgaaaaatatatacaacattgatacaggtgatgtttggtggtcagcgagcgatataggatggatcgttggtcattcatatattgtttatgcacccttattaaaggctgcaccac

SEQ ID NO: 309089 - DNA, 760 bp, Unknown
  Bacterial polypeptide expressing nucleotide sequence isolated from the Sargasso Sea
atatggtatcgggatgttattggaggaggtcgatgcccgatagttgatacatggtggcaaacagaaactggaggagtgatgattagccctctccctggggcgacgccaacgaaacctggatcagcaactttccctttacccggaattgaagctgatgtagtcaattcagatggggattctgtcgctaataatgagggtggatatttggtagttaaaagaccttggcctggaatgatgaggaatgtttatggagacgaaaaaagatttagagagagttactgggagtatttaaaaccttcagacaatagctatatttattttgctggagatggggctcgaagagatgaagatggttatttttgggttatgggcagagttgatgatgttataaacgtctctggtcataggcttggaacaatggaaatagaatcagctttagtaagtcatgagctcatttcagaagccgcagttgtgggtagacctgatgatttaaaaggagaatcaatcgtagcctttgtaaccttgaaaactggtgcagaagcaaatgaaaatatcgaggcacaattaaaaaaacacgtcgtgaatgaaataggccctattgctaaacctgatgaatttaagtttactgattctcttcctaaaacaagaagtggaaaaataatgcgcagaattttgagagcacttgcttcaggagatgaaataagcggagatacaagtacccttgaggatagatcagttttagataaattaagaagttaag

SEQ ID NO: 309090 - DNA, 349 bp, Unknown
  Bacterial polypeptide expressing nucleotide sequence isolated from the Sargasso Sea
aagtgcttttgttgctcatccaaaagtcgcagaggcagctgtagttggttacccgcatagcattaaaggaaatggactttattgttacgtaacattaaatgcaggtgaaaaatctacaggcgaattagaaagagatttaaaactttgggttagaaaacaaattggacctattgcaacacctgacctaatacaattttctccaggtttgccaaaaactagatcgggtaaaattatgagaaggatacttagaaaaattgctgcaaatgaacacgatcaactaggggacacaactactttagcagatccaactgtggtcgaaagcttagtagaaaataggaaaaacaaatag

SEQ ID NO: 309091 - DNA, 921 bp, Unknown
  Bacterial polypeptide expressing nucleotide sequence isolated from the Sargasso Sea
tcagatggtggcaaatttgttgataaatataaagtaaatattttttatactgcgccaactgctcttagagctcttatgagagaaggtgtcgagccggtaagaaaaacaagtcgaaaatctttaaaacttttaggtactgttggtgaaccaataaatccagaagcttggctttggtattatagagttattggaaattctaagtgtcctattgttgatacctggtggcaaactgaaactggaggaatattaatttctcctcaaccaggtgcaatagatttaaaacctggatcagcaaccaaaccattttacggaattaaaccagttattgttgatgaacaaggaaagactttaaaaggagcatgcagaggaaggttgtgtatagcacaatcttggccaggacaaatgagaactgtttatggcgaccaccaaagatttatcgacacttatttttctcaatttgatggtaaatattttacaggagatggttgtagaagagatgaagacggatactactggataaccggaagagtagatgatgtgattatagtatctggacataaccttggaacggcagaaattgaaagcgctttcgttgcacatccaaaagttgctgaagctgctgtggtaggctatccacatgatattaaaggaaatggactttattgctatgtaaccctaaatgcaggagaaaatccttcgggagatttggaaagagatttaaagttatgggtacgaaaacaaattggcccgatagcaacacctgatttaatacaattcgcacctggtttaccaaaaacaagatctggtaaaattatgagaagaatacttagaaaaattgcagcaaatgaacatgatcaattaggagacaccactactttagccgatccaactgtagttgaaagtctagtagaaaataggaaa

SEQ ID NO: 309092 - DNA, 477 bp, Unknown
  Bacterial polypeptide expressing nucleotide sequence isolated from the Sargasso Sea
aatttgatggaaaatattttactggagatgggtgtaaaagagataaagatggctactattggattactggacgagtggatgatgtaattatagtttctgggcataatttgggaacagcagagatagagagtgcatttgtagctcatacaaaagttgctgaggctgcagtagtaggattcccacatgaaattaagggtaatggactttattgttatgtaactttgaatgcaggagaaagttcgagtggagatttagaaagagagttaaaactatgggttagaaaacaaataggaccaatagcaaccccagatcatattcaattttcaccagggttaccaaaaacaagatctggaaagataatgagacgtattttaagaaaaattgccgcaaatgaacatcatgaccttggtgacaccactacattagctgacccttcggttgtagattctttagttgaaaatagaagaaataaatagt

SEQ ID NO: 309093 - DNA, 574 bp, Unknown
  Bacterial polypeptide expressing nucleotide sequence isolated from the Sargasso Sea
tgaaggtgaaggaagactttgtatagcccaatcttggccaggtcaaatgagaactgtatatggagatcatcaaagatttattgacacatatttttcacaatttgatggaaagtacttcacaggagatggatgtaaaagagacaaggatggttattactggattactgggagagtagacgatgtaattattgtatcaggtcataatcttggtactgctgaaattgagagcgcattcgttgcacatcccaaagtagctgaggcagctgtagttggttatcctcatgatattaaaggaaacggattgtattgttatgttactttaaatgctggggagagcgaaacaggggacttggatagagaactcaaactttgggtaagaaaacagattggacctttagcaactcctgatttgatacattttactccaggacttccaaaaactagatcaggaaaaattatgaggagaattttaaggaaaattgctgcaaatgaacacggccaacttggagatacaactactctagcagatccaactgttgtagatagtttagtagataatagaaaaaatatttaa

SEQ ID NO: 309094 - DNA, 697 bp, Unknown
  Bacterial polypeptide expressing nucleotide sequence isolated from the Sargasso Sea
gtcccgacatatccagatgcatccagatggtggcagatcattgataaatataaagtaaatattttttatactgccccgactgcaataagagcattgatgaaagagggtgataaactggtcaaaaaaacatcgcgaaaatctcttaaactacttggtaccgttggtgaaccaataaaccctcaggcatgggagtggtattataaaacagtaggtgactcaaggtgtccaatagttgatacatggtggcaaaccgaaactggaggtattttaataagtcctcaaactggtgctattgatttgaaacctggttctgcgaccaagcctttttatggaattaaaccagtaatagtcgataaaaacggatcagttattaagggacaaggacaaggtagattgtgtattgcacaatcatggccaggtcaaatgagaacagtttatggagatcaccaaaggtttattgatacatatttttctcaatttgatggaaaatattttaccggggatgggtgtagaagagataaggatggttactattggattactggacgagtagatgatgtaataattgtatcaggacataatctaggaactgccgaaattgaaagcgctttcgttaaacaccctaaagttgctgaagctgcagttgttggatatccacatgacataaaaggaaatggtttatattgttatgtaactt

SEQ ID NO: 309095 - DNA, 334 bp, Unknown
  Bacterial polypeptide expressing nucleotide sequence isolated from the Sargasso Sea
cacccaaaagtagcagaagcagcagtggttggttacccacatgatattaaaggaaatggtctctactgttatgtaactctaaatgctggagaaatagaaacaggagagcttgaaagagatttaaaactttgggtaagaaaacaaattggacctttagcaactccagaccttattcattttactccaggtcttccaaaaacaagatctggtaaaataatgagaagaattttaagaaaaattgctgctaatgaacatgagcagttaggtgatactactactttagcagacccaagtgttgtaagtagtttagttgaaaatagaaaaaatatttaaa

SEQ ID NO: 309096 - DNA, 898 bp, Unknown
  Bacterial polypeptide expressing nucleotide sequence isolated from the Sargasso Sea
aggtgatgcgaatccggccaagcatgtcattgtggttaaacatgtgggggaaaacatcgatttccatcagggccgcgatctgtggtatcacgaaattctggcgaaagagccaaaacattgtgagcctgaagtgatgaatgctgaggatccattgtttatcctttatacctcaggctccactggcaaacctaaaggtgtgttacataccacaggcggctacatggtgtgggcgtccatgacacatcaatatgtatttgactacaaagacagagacatatactggtgtgccgcggacatcggctgggtcacaggccatacctatatagtgtatggtccgttagcgaacggcgcgaccagcattttatttgaaggtgtccctacttatccgagcgttaagcgtattgctcaggtggtcgacaagtacaaagtgaacattttgtatacagcgccaaccgctatccgcgctttaatggcacatggcactgtggctgtcgatggagccgatttatcctcgctgactattttaggcagtgtaggcgaacctattaaccctgaagcctggaactggtatcaccagagttatggcaaaagtaactgccctattgtcgatacctggtggcaaacagaaacaggcggtattttaattacgccattgccaggtgcaacagccttaaaaccaggttctgccacacgaccattttttggcgtaaaacccgctattgttacgaacgaaggtgagctgatcgatggtgtagctgaaggtaacttagtgatcctcgatagctggcctgggcaaatgcgttctgtgtttggtgatcatgaacggtttgaacaaacctatttcagcacctacaaaggcatgtactttaccggtgacggcgcaaaacgcgatgaagac

SEQ ID NO: 309097 - DNA, 402 bp, Unknown
  Bacterial polypeptide expressing nucleotide sequence isolated from the Sargasso Sea
atgtgattaacgtctccggccacagattaggcacagcagaagtagaaagtgcactagtgtcacacgaactggtcgctgaagccgccgttgtgggctatccccatgatattaaaggtcaaggtatttatgcctatgtcaccttaacccgcggcacagaagagagtgaagagcttcgccaagagctgcgccaatgggttcgtaaagaaattggcgctctggccacaccggatcttatccagtgggcgacaggattacctaagacacgttctggcaaaatcatgcgccgtttcctgcgtaagattgccgctaacgaagtgaccaacttaggtgacgcatcaacactggccgacccagccgtgattgagaccttgattgaaactcgcttgaatcgtaacgagtaat

SEQ ID NO: 309098 - DNA, 430 bp, Unknown
  Bacterial polypeptide expressing nucleotide sequence isolated from the Sargasso Sea
ggatggttattattggattactggtcgggtggatgatgtaataattgtttcatgtcacaatcttggcaccgcagaaattgaaagtgcgttcgttgctcatccgaaagttgctgaagctgcagtcgttggctatcctcatgatataaaaggtaatggtttatactgctatgtaactttaaatgcaggagagacacctgatggagacttggagagagatttaaaactttgggtaagaaaacaaatagggccgatagcaacaccagattttattcaattttctccgggcttacctaaaaccagatctggaaaaataatgagaagaattttacgaaaaattgcggccaatgaacatgaacagcttggggatacaactacactagccgatccttctgttgtttcatctttagttgataatagaaagaacgtttaa

SEQ ID NO: 309099 - DNA, 814 bp, Unknown
  Bacterial polypeptide expressing nucleotide sequence isolated from the Sargasso Sea
attttttgatgatgtcataaaagaagttgatactatttgtgaaccagaagttttaaacgctgaagatcctttgttcattttgtatacctcaggttcaaccggtaaaccaaaaggtgttatgcatacaacaggtgggtatatagtttatgcctctatgacacatgaatatatctttaactacaatgatggagatatatactggtgtaccgcagacataggttggattactggacacagttatataatttatgggccacttgctaatggtgctacaactttaatgtttgagggtgtccctaattatcctaacttctccagattttggcaaatagttgataaacataaagtaaatatattttacactgcgccaacagcgattagagctttaatgagagaaggggatgattatgttacaaaaactaacagatcatccttaaaacttctaggaacagttggtgaacctattaatccagaggcatggaagtggtactttgaagtacctggtaattcacaatgtccaattgtagatacttggtggcaaacagaaacaggtggaatattaatatctccacaaactggtgctataaaacttaagccaggttctgcttctaaacctttctttggaattgagccatgtattgtagacaaagaaggtagggaattagaaggtgaatgtgaaggaatgttatgcatgaaacgatcatggcctggtcaaatgcgaactgtctatggtgatcataaaagattcattgatacttatttttcacaatttgatggaaagtattttacgggcgatggatgtaaaaagagataa

SEQ ID NO: 309100 - DNA, 748 bp, Unknown
  Bacterial polypeptide expressing nucleotide sequence isolated from the Sargasso Sea
ggcccagtcaaaaaaacaagtcgaaaatcacttaaacttcttggaacagttggagagcctataaatcctgaggcatggatgtggtattataaaacagtcggtgaaaaaaaatgtccaattgtagatacttggtggcaaaccgaaactggtggaattttaattgctccccagcctggtgctataaatttaaaacctgggtcagcaactaagcctttttatggtatcaaaccagcaatagtagatgagtcaggaaaagttttaaagggagcttgtaaagggagactttgcatgacccaatcttggcctggacaaatgagaacagtttatggtgaccacaaacgatttatagatacatatttttcccaattcgacggtaaatattttaccggcgatggatgtagaagagacaaagatggatattattggattactggaagagtagacgatgttataattgtttcaggccacaatctaggtactgccgagatagaaagcgcattcgtagcccataataaagttgctgaagctgccgtggttggttttcctcacgaaataaaaggtaatggtctttattgttatataactttgaatgcaggtgaaaatccgaatggggatttagaaagagaactcaagctttgggttaggaagcagattggtcctattgcaacaccagattatattcagtttgctccaggattgcctaaaacaagatcaggaaaaattatgagacgtatattaagaaaaattg

SEQ ID NO: 309101 - DNA, 796 bp, Unknown
  Bacterial polypeptide expressing nucleotide sequence isolated from the Sargasso Sea
ccaagcaaaacagcaatcatttggggttggcgatgatcccgctgatactaaaaaaatttcttacaaagaattgcaccagaatgtatgcaaagctgcaaacggtttaaagagtttaggtatacaaaagggagatagagttacaatttatctaaccatgatccctgaattagcttacattatgttagcttgtgcgaggattggtgctgttcactcaattatttttggtggtttttcacctgactcgatagctactagaattactgattgtgagtctgaatatctaataactgcagatgaaggagttagaggcggaaaaataattccgttaaaaaaaattgctgacgaagcattagatcaatgtcctggtgtaaaaaaatgtattgtagttgagagaacaggaaatcaagtaaattggaataatgaaagggatgtatcatataaagatttaatttcgtcggtgccgtctaaatgtgaacctgaagagatgaatgcagaagatccattatttattctttatacatctggttctaccggtaaaccaaaaggagttcttcatacgacaggcggttatatggtttatgcttctatgacacatcaatatatatttgattacaaagcaaacgatatttattggtgcactgcagacattgggtgggtcacgggacacagttatattatttatggcccgctttcaaacggagccactactataatgtttgagggagtcccaaattatcccgacagttcaagatggtggcaaattgtagacaagcacaaggtaaatattttttacact

SEQ ID NO: 309102 - DNA, 808 bp, Unknown
  Bacterial polypeptide expressing nucleotide sequence isolated from the Sargasso Sea
atgccaaaaaagaaaaaaagaaaaaaaattaaaaagaaaaaatcttcaagaaaaaaaagattaaaaaaaagtaaatcaaaaaaaattgaaaataaggaattaatatacaaggccaaaagtgactggattaaaaaagctatagtaaataaatctacatacgaaaaaaaatattcagaatctttaaaaaacaacgataacttttggaaaaaagaaggtaaaagaattacctggatcaagccatatacaaaaattaaagactataaatatagtaaaaccgatgttcatattaaatggttttacgatggaaccttaaatgcttcagctaactgtattgatcgtcatttaaaaaaaaataaagataaaactgcaataatttgggttggtgatgatccaaaagttcaaaaaaaaattagctacaaacaattacaccaagaggtttcaaaggcggcaaatggattaaaagaaataggagtaaaaaaaggagatagagttacaatttatttaactatgatacctgagttggcatatacaatgctagcatgtgcgagaataggagcagttcattcaattatttttggaggtttttcagcagatagtattactggcaggattaatgattgcaaatctgactatgttattactgctgacgaaggtgttagaggaggaaaaattatacatttaaaagaaacagttgatgaagctcttttgaattgtccaaatgtaaaaaagtgtgttgtagtaaagcgaactggaaacagaattaattgggatgaaagtagagatgtttggtatcacgaatataactaaa

SEQ ID NO: 309103 - DNA, 819 bp, Unknown
  Bacterial polypeptide expressing nucleotide sequence isolated from the Sargasso Sea
ttggtgctgttcctctgttgtttttgcaggtttctcatctacctcttttgcggacagaataaatgactgtcaggcaaaaattgtactaacttctgatggtaattttaggggtaataaaactattcctgttaaacctgttgttgatgaggcacttgaaaagtgttcaacaattgagagtgtaatagtattaaaaagaacaaaacaaaaaattgatatgacagaggggagagattattggtggcatgattgtgttaatgatgtttcctctcaatgtgatcctgagattttagattcagaaggcatgctatttatattatatacttctggatcaacaggaaagcctaagggagtcgttcattcctctgcaggatatatggtgtattctgcatatacattcctcaacgtatttcaatattacgaaaatgatatctattggtgtactgcagatgttggctggataaccggccactcatatatagtatatggacctttactttgtggtgctacttctataatgtttgaaggagttccaacattcccaaatgttagtaggttctgggatattattgataaatataaagtcaatcaattttatactgctcctactgcaattagagcacttcaagctcatgggctagaacctttaaaaaataattctttggagtctttaaaggtaataggatctgttggagaaccaattaatgaggaagcttggcactggtatcatgataatattggaaaaggaaactgtcctttagttgatacatggtggcagactgaaacaggaggtataatgatttctgcgcttgccggaataac

SEQ ID NO: 309104 - DNA, 535 bp, Unknown
  Bacterial polypeptide expressing nucleotide sequence isolated from the Sargasso Sea
atgtcttcaagatttaataaaatttaccaaaattctataaaaaatcctgaaaaattttggcaagaagcgtctgaagatatcttttggtttaaaaaaccaacaaaaatattaaataaatctaatcctcctttctataaatggttcgaagatggagtgacaaatacttgttacaacgctttagacattcatattgatcaaggaagaggtcaaaaaacagctttgatctacgatagtccaatcacaggtaacaaaagtaagttcacttatgaggagttaagatcaaaagtttctaaattcgcaggagcattgaaatctcaaggggcaaataagggtgatagagtaataatttacatgccaatgatcccagaagcagtagttgctatgctggcttgtgctagaattggtgcaatacactcagtggtctttgggggttttgcttcaaacgagctcgcaagcagaatagatgacagtaaagcaaaattattagtaacggcttcatgtggttttgagccccggacggacagtgggaatacaa

SEQ ID NO: 309105 - DNA, 880 bp, Unknown
  Bacterial polypeptide expressing nucleotide sequence isolated from the Sargasso Sea
atatacaatgttagcatgtgcaagaattggggctattcattcaattatttttggtggtttttctccagatagtatttctggaagaatcaatgattgtgaatcagattatgtaataactcaagatgagggcttaagaggtaacaaagttattcctatgaaatcaaatgtagatgaagcattagtaaattgtcccaatgttaaaaaatgtgttgttgttaaaagaactggcaattttgttaatatagaaaaagaaagagatgtttggtatcacgaaataacaaaaaaagtttcaaacaagtgcgaacccgaagaaatgaacgcagaagatcctctatttattctgtatacatctggatcaacaggaaaaccaaaaggtgttttacatactacaggcggttacatggtttacacttcaatgactcatcaatatatttttaactataagccaaaagatatttatttctgtacagctgatataggttgggtaacaggccatagttatataatctatggtccgttatctaatgcagcaacaaccgtaatgtttgaaggtgtacctaattacccagacaaatcgagatggtggcaaatagtcgataaatataaagttaatattttttacaccgcaccaacagcaataagagatttaatgagagaaggagataagccagttaaaaaaacttctagaaaatcattaaaacttttaggaactgttggggaaccaataaatcctgaagcttggcaatggtattataaaactgttggtgactctagatgtcctatagttgatacatggtggcaaacagaaacagggggtattttaattagtccacaaactggagctataaaccttaaacctggttcagcaacaaaaccattt

SEQ ID NO: 309106 - DNA, 883 bp, Unknown
  Bacterial polypeptide expressing nucleotide sequence isolated from the Sargasso Sea
acatagtattactattttctatacagccccaacagctattagagcattaatgaaagaaggagaaggcccactaaaaagcactagtagaaattcacttagactacttggctcagttggagaacctataaacccagaagcatgggaatggtattataaatctgtagggaaaactaaatgtccaatagtagacacttggtggcaaactgaaacaggtggcattcttatttctgctctaccaggggcaatggaccttaagcctgggtcagcaacacttcctttttttggtataaggccgataattcttgatgataaaggaaatattttagagggaccatgtaaggggaatttatgctttgaagaatcttggccaggtcaaatgagaaccgtgtatggaaaccatgaacgatttaaagaaacgtattttagtcaatttccaggtaaatattttacaggagatgggtgcagaagagataaagatggatactattggataacaggaagagtggatgatgtaataaatgtatcaggccatagacttggtacagctgaaatagaaagtgcactagttgctcatccaaatgtagctgagtcagcagttgttggatattcacatgatataaaaggtcaaggtatatatgcttatataactcttcaagttgaaatctctccatcagaaaagctaaaaaaagaattgattaattgggtaagaaaagaaataggccctatagcaacaccagatattttgcattgggcaccaaacctaccaaaaacaaggtcaggaaaaatcatgagaagaatattgagaaaaattgccgaaaagcaatacgaggaattaggagacacttcgactttagcagatccgaacgttgtaaccaactcatag

SEQ ID NO: 309107 - DNA, 799 bp, Unknown
  Bacterial polypeptide expressing nucleotide sequence isolated from the Sargasso Sea
agatgaagccataagaggtggaaaaaaaatacctctcaagatgaacgttgataccgcgttattggattgtccagatgttatgaattgtcttgttataaagcgaacaaaaagtgacattgattgggttgaaggcagagacaaagattatgatgaaatgtttgctgaagcatcaaatgagtgcccttgtgaaccaatgtcttctgaagatcctttatttatattgtatacctccggctcaacaggaaaaccaaaaggtgtaatgcacactactggaggatacttactgggagcacatttaagttttaaatatctttttggatataaaggagaggataaatattggtgtactgcagatgttggatggatcactggtcacacatatattatctatgggcctttatctaatggcgccacgagtttaatgttcgaaggcattccaacatatccaagtccctcaaggttttgggatgtttgcgataaacatcaaatatctattttttacacagctccaaccgctctaagagcattaatggctcaaggagatgagcatgtgttaaaaacaaatagaaaaagcttacgtattctaggaactgttggtgagccaatcaatccagaggcatgggagtggtattttaaagtggttggtaatgagaactgtcatattattgatacctggtggcaaacagaaactggctcagtactaatttctccaatagcgggaattactccagttaaaccaggatcagcaactttaccattctttggagttaggcctgagcttgtcgatgaaaatggaaat

SEQ ID NO: 309108 - DNA, 781 bp, Unknown
  Bacterial polypeptide expressing nucleotide sequence isolated from the Sargasso Sea
attgaaagaggtagctcaatttgcaaatgcattaaaggagttgggtgtcaacaaaggcgatcgaatatgtatatacatgcaaatggttcctgaattagcaatatctgttttagcatgtgcaaggataggagctattcattcagttgtatttggtgcattctcaagcgattcgttgagagatagaattaatgattcttcatgtaaaattttgataacccaagatactggtgttagagggaaaaaacaaaatattcccatgaaagagaatgcggataaagctattgtccaaacaccatcaatagaacacacaattgttgttagaaggactggtgagtatgtttatatggacacaaatcgagatatatggtggcacgaagcagtttcaggggtggataggttttgtccacctgaggtgatggaagcggaagacccactgtttatactatatacatccggttcaacaggtaaaccaaaaggtgtgctccataccactggagggtatttaacttatgtatcttattcgcatcaattaatttttgattataaaccaggagatatatattggtgtactgcagatttaggatggataacgggtcactcatatatcgtttatggacccctatccaatagagctactacattgatgtttgaaggagtaccaaactatccagatttcggacgattttgggacgttgttgacaaacataaagtcaaccagttttacacagctccaaccgcgcttcgtgctcttatgaaagaaggaaataaatgggtgctaaat

SEQ ID NO: 309109 - DNA, 496 bp, Unknown
  Bacterial polypeptide expressing nucleotide sequence isolated from the Sargasso Sea
atgtcttctaagtttaatgaaatttatgaaaattctataaataatcctgaaaaattttggcaagaagcctcccaagatatcttttggtttaaaaaaccatcaaaaattttaaataagtctaaccctcctttctataaatggttcgaggatggggtaacaaatacttgttataatgctttagacattcatattgaccaaggaagaggtcaaaaaactgcattaatctatgatagtcctatcacaggtaacaaaagtaagttcacttatgaggaattaaggtcaaaagtttctaaattcgctggggcattaaaggctgaaggtgcaaataaaggtgatcgagtgatcatttacatgccaatgatccctgaagcagtagttgccatgcttgcttgtgcaagaattggcgcaattcattcagtggtctttggtggatttgcttcaaatgagcttgcaagcagaatagatgatagtaaagcaaagatattggtgactgctt

SEQ ID NO: 309110 - DNA, 559 bp, Unknown
  Bacterial polypeptide expressing nucleotide sequence isolated from the Sargasso Sea
aatgctgtgtctaaaaacttcttggccaggtcaaatgcgaactgtttatggtgatcataaaagatttatatcaacttatttttcacaatttgaagggaaatattttacaggagatgggtgtagaagagacaaagatggatacttctggattacaggaagggtggacgatgttataattgtatcaggacacaatttaggaacagcagagctggaaagtgcttttgtatctcatcctaaggtatcagaagctgcagttgttggatacccacatgatattaagggtaatggattatattgttatgtctctctaaaagttgggacgcaaagcaacgaaaatttaaaaaaagaattaatacaaaccatcagatcaaaaattggacctattgctactccagactttattcattttactgatggattacctaagacacgttcaggaaaaataatgagaagaatattaagaaagatagccgcgaatgagcatgaccaactaggagatattacaactttggcagatcctagtgttgttaaaaaactaatagaaaataaactaaattaa

SEQ ID NO: 309111 - DNA, 457 bp, Unknown
  Bacterial polypeptide expressing nucleotide sequence isolated from the Sargasso Sea
tacaggtgatggatgtaaaagagataaagatggttattatttgattacaggaagggtagatgatgtaataattgtatctggacataatttaggtactgctgaaatagaaagtgcttttgtgtctcataaagatgtttcagaagctgcagtagttggctatcctcacgatgttaaaggaaatggtttgtattgctatgtttctctaaaggttggtgtagacccatcagaaaatttagttttagctttaaaaaaaactattagagaaaaaattggccctatagctacgcccgacttcatacatattacagctggcttaccaaagacaagatctggaaaaataatgaggaggattttaagaaaaattgcttctaatgattttgaaaatttgggtgatacatcaacactggcagacccttctgttgtggaaaatataatagaaaatagaaaaaatagataa

SEQ ID NO: 309112 - DNA, 855 bp, Unknown
  Bacterial polypeptide expressing nucleotide sequence isolated from the Sargasso Sea
tactgctgatgttggctggataacaggacatacctatatcttatatggcccattatctaatggtgcaacaactttgatgtttgagggagtgccgacttaccctgatccttcaagattttgggaagtgtgtgatcaacatgaaataaatattttttatacagccccaacagcaataagagccttaattgcaaagggtgaagagtatttagaaagttcaaacaggaattcacttaaagttctagggacggtaggagaaccaattaatccagaagtttggcaatggtactttgaaaaagtaggcaaatctaaatgtgaggtagttgatacatggtggcaaacagaaactggatcggttttaatcagccctattgcaggaataacgccaaagaaaccaggttcagcaacattacccttttttggtatagagccatcaattgttgatgttaatggaactattttggagggcaaatcaaaaggcaatctttgcatcaataacacatggccaagtcaaatcagaactgtatatggagaccacgagagaatgcttcagacctatttatctcagtattcagaaaaatattttacaggagacggagcaaggcgtgatgaagatggttattattgggttactggtcgagttgatgatgttcttaatgtgtcaggacatagaattggaactgcagaagtagaaagtgccatcgttaatcatccacaagttgcagaatcagcagttgtaggtgttgaacatgaaataaagggccaagctatctacgcctatatcattcttaagaagacaacagaagaccataataaattagagtctgagattaaagatgaggtcgcaaagattattgg

SEQ ID NO: 309113 - DNA, 908 bp, Unknown
  Bacterial polypeptide expressing nucleotide sequence isolated from the Sargasso Sea
aatgattcctgaattagctatcgcagttttggcgtgcgcacgtattggtgcagttcattctgtggtttttggagctttctcaagtgactctttgagagaccgtattaatgattcggaatgcaagatattggtaacgcaggatactggtgttagagggaccaagcaaaatattccgatgaaggcaaatgccgatcaggctttatttgatgctccatctatcgaacatgttatagttgtacgaaggacaggagagcctgttaatatggatgccaagcgtgatctttggtggcatgaagcaacatcgggagtcagtgcaagatgtgaacctgtggctatggactctgaagaccctctttttatcttatacacgtctggatcgacaggtaagcctaagggtgtattgcacacaacaggtggttacttggtttacgcatcattcactcatcaaatggtatttgattaccatccaggagatatttattggtgtacagctgatctgggttggataacgggtcattcctatattgtttatggcccattatcgaatcgagcgacaaccattatgtttgaaggtgtaccaaactatccagattttggtcgcttttgggatgtggttgacaaacataaagttaatcaattctatacagcgcctacggctttacgcgcattgatgaaagagggaaatgaatgggtttcttctagagatctatcttccttgagattactaggtacggttggagaaccaataaaagaaccagagtggaagtggtattatgatattgttggccaaggacaatgtccaattgttgatacgtggtggcaaacagagacaggcggtattttgataacgcctttgcccggtgcgacacctactaaacctggttctgcaaccttgccattttttggag

SEQ ID NO: 309114 - DNA, 793 bp, Unknown
  Bacterial polypeptide expressing nucleotide sequence isolated from the Sargasso Sea
ggagaaccaattaatcctgaagcatggatatggtatatggatgttattggtaaaaataaatgcccaattgtggatacttggtggcaaactgagactggtggtgtgatgataagtcccttgcctggaatcgttgctacaaagccaggttcggctactttccctctgccaggaatcgaagttgaaatcgtcgataagaatggagataaggttaaggagaatgagggtggttatttaattattaagaaaccatggccaggaatgatgagaacaattcatgggaactcagagagatatttggagagttattgggaatatatttcctttaaaggagaaaaaaatgtttattttgctggagatggagcacgcattgatgaagatggatatatatggattatgggaagagtagatgatgtcataagtgtttcagggcatcggttaggaacaatggaaatagaatctgctttggtaagtcataaatcagttgcagagtctgcagtcgttggcaaaaaagatgatttaaaaggtgaagttatagtagcttttgtatctctagagaaggacgtgaacggttcttcagaattagtagaggatctaaagaaacatgttgttaatgaaattggaattatcgcaaagcctgaaaagattataatttctgactctctcccaaaaacacgtagtggaaaaattatgaggcgaattttaagatctttggctgctggagaaaaaattagcggtgatataagcactcttgaagatagttctgttttggaaaagctgaaagaattatcctaat

SEQ ID NO: 309115 - DNA, 820 bp, Unknown
  Bacterial polypeptide expressing nucleotide sequence isolated from the Sargasso Sea
ttttcaagtaccagaaaaatgggctaaacaagcctacgtaaataaagttaaatataaaaaaaaatataatttatcaattaaggaaaatgacagattttggaaaaaagaaggaaaaagaatttcttggataaaaccttatacaaaaattaaagacattaaatacagcaaagatgaagtaaaaataaaatggtattatgatggaactttgaatgcctcctctaactgcattgataggcatttaaaaaaaaatggtaaaaaaactgctatcatttggataggagatgatccttcagtttctaaaagaatttcatataaagaacttcacaaaaacgtttgtaagactgccaatggattaaaaagtattggagtaaaaaagggagacagagttacaatttatttgacgatgattcctgaacttgcttacacaatgcttgcttgtgcaagaatcggtgcgatacattcaataatatttggaggtttttctccagactcaatagctacaagaataaatgattgtgagtctgattatttaatcactgcggacgaaggtgtaagaggaggaaaaattattcctcttaagcaaatagcagatgaagctcttctgcagtgtcctaatgtaaaaaaatgtgtggttgttaaaagaacaggtaatcaagttaattgggatcatgaaagagatatctcttatgaagaacttatttcaaatgcctctggaaaatgtgaaccagaagaaatgaatgctgaagatccactttttatattatatacctcaggatcaactggtaaacccaaaggagttttacataccacgggtggatat

SEQ ID NO: 309116 - DNA, 919 bp, Unknown
  Bacterial polypeptide expressing nucleotide sequence isolated from the Sargasso Sea
gtttgtaaagcagcaaatggtttaaaaagtataggagtacaaaaaggagatagagtaacaatttatttaaccatgattcctgaactagcctatgtaatgcttgcttgtgcaagaataggagccatacactcaattatatttggaggtttttcaccagactccattgcaacaagaattaatgattgtgaatccgactatgtcatcactgcagacgaaggagttaggggcggaaaaataataccacttaaaaaaattgctgatgaagctatgatgcaatgtccgaacgttaaaaaatgtgttgtaataaaaagaacaggtaatcaagtaaactgggataatgaacgagacgtttcgtatgaggatattatctcaaatgtttctgacaagtgcgttccggaagaaatgggagcggaagatcctttatttatcctatatacatctggatcgacaggtaagccaaagggagttttacatactactggtggctacatggtttatgcttctatgactcaccaatatatttttgattataagaataaagatatttattggtgtactgcagatattggatgggtaacaggacacagttatattatttatggtcctttatctaatggagctacaacaattatgtttgaaggtgtaccaaattatccggatagctctagatggtggcagatagtagataaatataaagtaaatatcttttatacagctccaacagcaattagagctcttatgagagagggtgatgcgccagttaaaaaaactagtaggaaatcacttaaacttctcggaactgttggagaacctataaatccagaagcttggatgtggtactataaaatagttggagaaaaaaaatgcccagtagtagatacttggtggcaaactgagacaggtggaattttaattgccc

SEQ ID NO: 309117 - DNA, 543 bp, Unknown
  Bacterial polypeptide expressing nucleotide sequence isolated from the Sargasso Sea
gatgtccggaaaaacttatttgccatcagaagaatttagcaataatgcagttttgcaagagaatgagtttaattccatgcatggtcaatttaatgaagatccggaagagttttggagacagcaagggcatagattaaactggataaaaggttattcaaaagttaagaatgtagatttttctttccctcacgtatcaataaagtggtttgaggacggagtattgaatgtttgtgaaaactgtgtagatcgccaccttgaagctaaaggtaacgatacagcaataatttgggaaggagatgagccaacagacagtgagtttataacatataatgaacttcataagaatgtttccaagttagccaattcctataaggctttaggcgtaaggaaaggtgataggatcattatttatatgcctatgataccagaagcagcatatgcgatgctagcttcagctaggataggtgcaattcattcggttgtttttgcaggctttagcccagatgctctttctgcacgaattcaagactgcgaaagcttctt

SEQ ID NO: 309118 - DNA, 937 bp, Unknown
  Bacterial polypeptide expressing nucleotide sequence isolated from the Sargasso Sea
aaaaattaatttagttccagaaagagattttcttttagatgacttaataaaagatgtagattacaattgtgaaccagaaacaatgagtgcagaagatccattatttattttgtacacatctggatctactggaaaaccaaaaggtgttatgcacactagcggtggttacatagtttacgcatcaatgactcatgagtatatttttaattatcaagctgaagatatatattggtgcactgcagatattggttggataactggacatagttatattatttatggtcctttatctaatggggcaactactctggtgtttgagggtgttcctaattatcctgatttttcaaggttttggcaaattattgataaacatcaagtaaacattttttatactgcacctacagcaattagagctttaatgagagaaggtgatgatcatgtaaaaaaaacaaaacgaaattcattaaaactacttggaactgttggtgagccaataaatccagaagcttggaaatggtattttgaaattcccggaaattcaaaatgtccaattgttgatacgtggtggcagacggaaacaggtggaattttaatatctccacagacaggcgcaatagaattaaaaccaggttcagcatcaaaaccattttttgggattgagccttgtattgtaaataaggatggtgttgagcttttaggagagtgtgaaggtatgttatgtattaaaagatcttggccgggccaaatgagaactgtttatggtgatcacaacaggtttattaaaacatatttttctcaatttaatggcaaatattttaccggagatggttgtaaaagggataaggacggttattactggattactggaagagttgatgatgtaataattgtgtccggacacaatcttggtactgctgaaatcgaaagtgcgtttgtt

SEQ ID NO: 309119 - DNA, 805 bp, Unknown
  Bacterial polypeptide expressing nucleotide sequence isolated from the Sargasso Sea
gctataattaataaatcaggttatgaaaaaaaatattctgattcaataaaaaataatgataatttttggaaaaaagaaggtaaaagaattacctggatcaagccatatacaaaaattaaagattataagtacagcaaaaccgatgttaatattaaatggtattatgatggaactttaaatgcgtcagctaattgtattgatcgtcatttaaagaaaaacaaagacaaaactgcaataatatgggttggagatgacccaaaagtacaaaaaaaaattagctataaacaattacatcaggaagtttcaaaagcagcaaatggattaaaagaaataggagtaaaaaaaggagacagagttacaatttatttaacaatgatacctgagttggcatatacaatgctagcatgtgcaagaataggagcagtacattcaattattttcggtggtttttctgctgacagtattactggcagaattaatgattgtaagtctgactatataattactgctgatgaaggtgttagaggtggaaaaattatacatttaaaagatacagtagatgaagctcttttaaattgtccaaatgttaaaaagtgtgttgtggtaaaaagaactggaaacagaattaattgggatgaaagtagagatgtttggtatcatgatataactaaaaaagtttctaagaattgtgaacctgaagaaatgaacgcagaagatccattatttattttatatacatctggatctacaggaaaacctaaaggagttttgcacactaccggtggttatatggtttatgcctcaa

SEQ ID NO: 309120 - DNA, 754 bp, Unknown
  Bacterial polypeptide expressing nucleotide sequence isolated from the Sargasso Sea
atgagccaaatacataagcactctattcccgctaacattgcggacagctgcctgattaacccggaacagtacaaggcgcagtatcaccaatctgtcaccgacccggatgcgttctggggtgagcaaggcaaaatccttgactggatgcggccctatacgcgcgtgaagaacacctcattcgcaccgggcaacgtctctattaaatggtatgaagacggcacgctgaatcttgccgctaactgcctcgatcgccacctggccgaacgcggcgaccagactgcgattatctgggaaggcgacgacgccagccagagcaaacacatcacttatcgtgagctccatcacgacgtctgccgttttgctaacgtcctgctcgacctcggcattaaaaagggcgatgtcgtcgctatctatatgccaatggtgccggaagccgccgtcgccatgctggcctgcgcccgtatcggcgctatccactcggtgatcttcggcggtttttctcccgaagcggttgccggacgtatcattgactcgaattctcgtctggtcattacttccgatgaagggttgcgcgccggacgtgcgattccgctgaagaagaacgttgacgacgcgttaaaaaatccgaacgtgaaaagcatcgagcacgtggtggtgctcaaacgtaccggcggcaaaatcgactggcaggaaggtcgcgacctgtggtggagcgacctgattgcgcaagccagcgaccagcatcagccggaag

SEQ ID NO: 309121 - DNA, 532 bp, Unknown
  Bacterial polypeptide expressing nucleotide sequence isolated from the Sargasso Sea
aatgagaacagtttatggagaccatgagagatttattaaaacttatttttctcaatttgatggaaaatattttactggagatggttgtagaagagacagggacggttatttttggataaccggaagagttgatgatgttattatagtatctggccataatcttggaacagctgaaattgaaagcgcttttgtcgctcacaataaagtagctgaagcagcagtagttggttttcctcatgatatcaagggaaacggactatattgttatgttactttaaatgcaggagaacaatcaagtggtgacttggaaagagaattaaaactttgggtgagaaaacaaattggaccaattgcaacacctgatattatacaattcgcacccgcattgccaaaaacaagatcaggaaaaattatgagaagaattttaagaaaaatcgccgcaaatgaacatgaagaacttggcgatacaactactttagcagatcctagtgtggtagagagtttaattgaaaatagacaaaataaaaattaa

SEQ ID NO: 309122 - DNA, 806 bp, Unknown
  Bacterial polypeptide expressing nucleotide sequence isolated from the Sargasso Sea
atacccgaattagcaatacttatgttagcttgtgcaagaataggtgccgtccactcaataatttttggcggtttctctgcagagtcaatttcaggaagagtgaatgattgtaaatcagaatatataattactgcagatgagggagtaagaggaggcaaaactattcctttaaaagcaacaacagatgaagctttatctaattgtccagatgttaaaaaatgtattgtagtaaaaagaactggtaattatgtatattgggatcaagatcgagatgtctggtatcacgacctaattaaagatgtaccaaattattgcgagcctgaggaaatgaatgcagaggatcctttgtttattctttatacatcaggatcaaccggaaagcctaaaggagtattgcataccactggaggatatatggtttatgcttctatgactcatcaatatatttttaattataaaccaaatgacatttattggtgtacagctgatattggatgggtaactggtcatagttatataatttatggaccattagctaatggtgcaaccactattatgtttgaaggtgttccaaattaccctgatagttcaaggtggtggcagatagtagataagtataaagtaaatactttttatacagccccaacagctataagggctttgatgagagagggtgatggtccagttaataaaacttcaagaaaatctttaaaattacttggaactgttggggaacctataaatccggaggcatggatgtggtattacaaaactgttggaaattcgaaatgtccaatagtcgatac

SEQ ID NO: 309123 - DNA, 517 bp, Unknown
  Bacterial polypeptide expressing nucleotide sequence isolated from the Sargasso Sea
tatgagtgaaaatgaaaagtttgaagtaagcagtgaatggtctacagaagctcaaattaataacgacaaatataataaatggtatgataattctctcaataacaatgaagagttttggagtgaacacggtaaaagaattgattggattaaaccatatacaaatgtaaaagacgtttcttacaataaagataatttttcaatcaagtggtattacgacggcacacttaacgcatcaagcaactgtattgatagacatttaaaagataaagcagatcaaactgcaatcatctgggaaggcgatgatccagcagattcaaaacacattacttataaagagttacacagtgaagtatcaaaacttgctaacggcatgaaatctcttggtgttaaaaaaggtgaccgtgtaactatttatatgccaatgattcctgaagcggcttatgcgatgcttgcttgtacaaggattggcgcaattcactctgtcgtatttggaggcttttctccagactctttagct

SEQ ID NO: 309124 - DNA, 448 bp, Unknown
  Bacterial polypeptide expressing nucleotide sequence isolated from the Sargasso Sea
tggatgtaaaagagacgaagacggttattattggataactggaagagtagatgatgttataaatgtttctggtcatagaatggggacagctgaagtagaaagcgccctagtttctcatgaaaaagtatctgaagccgctgttgtaggctttcctcatgaaatcaaaggtcaaggaatttatgcatatgtaacccttaatgctggagaaaatggtaacgaagaaattagaaaagagttaataaactgggttagaaaagaaattggtccaatagctagcccagatttaattcaatttgcaccaaatttacctaaaacaagatcaggaaaaatcatgcgtcgtatcttaagaaaaatcgctgaaaatgactattcagaattaggtgatacatcaacgctagcagaaccgatggtagtcgatgaattaatagaaaatagacaaaataaataa

SEQ ID NO: 309125 - DNA, 943 bp, Unknown
  Bacterial polypeptide expressing nucleotide sequence isolated from the Sargasso Sea
ttataaaccaaatgatatttatttggtgtacaagctgatatttgggtggataacaggacacagttatattatttatggacctttatctaatggtgcaactactataatgtttgaaggagttcctacttatcctgatacttctagatggtggcaaatagtagacaaatataaagtaaatattttttatacagctccgactgcaatacgcgcacttatgagagagggagataaacctgttaaaaaaacatcaagaaaaacgcttaaattactaggaactgttggtgaaccaataaatccagaggcctggcaatggtattataaaactgtaggagattctaaatgtccaattgttgatacttggtggcaaactgaaactggaggaattttaattagtccacaaactggtgcaataaatttaaagcctggttcagcaacaaaaccattttatggtattagacctgttatagtagataaaaatgggaaaactttaaaaggagaagctcaaggaagactgtgtatagctcaatcttggcctggacaaatgagaactgtatatggagatcatcaaagatttattgacacatatttttctcaatttgatggaaaatattttacaggagatggatgtagaagagataaagatggatactattggataacagggagagttgatgatgttattatagtttcgggtcataatctcggaacagcagaaatagaaagtgcttttgtagctcatcctaaagttgctgaggcggcagtggttggttatcctcatgacataaaaggaaatggactatactgttatgtgactttaaatgtaggtgaaaaaagttcattagatttagagcgtgagttaaaactttgggtaagaaaacaaataggtgctattgctactccagatttaattcaattttcacctggcctacccaaaactagatct

SEQ ID NO: 309126 - DNA, 669 bp, Unknown
  Bacterial polypeptide expressing nucleotide sequence isolated from the Sargasso Sea
tatgtcagataaattcagcaaaatttacgatcattcaataaaaaatcctgaaaaattttggcaggatgcagctgaagacatcttttggtttaaaaaaccgacaaaaattttgaataaatctaatcctcccttctataaatggtatgaagatggagtaaccaacacctgttacaacgctttagacattcatatcgatcaaggtcgaggaaaaaacattgctcttatctatgatagccccattacaggtaacaaaagtaaatttacatacgaagaacttagatccaaagttgcaaaatttgctggagcattaaaaaatcagggagtaaataaaggtgaccgagtaattatttacatgccaatgatcccagaggctgtgattgcaatgcttgggtgtgcaagaattggagcaatccactctgtagtctttggtggatttgcatctactgaacttgctagcagaattgatgatagtaaagcaaaactattagtgactgcttcatgtggttttgaacctggaagaacagttgagtataaacctttagttgatgaagcaatcaaaatagcaaatcataaaatagagaagatgattttatttcaaagatcaggtcacgaggtaaaattaaatgctcctcttgaaattagctgggacgaagtagtgtccattgcaga

SEQ ID NO: 309127 - DNA, 667 bp, Unknown
  Bacterial polypeptide expressing nucleotide sequence isolated from the Sargasso Sea
atgtcttacgaaaacaattacttatattggaaaaaatctcccttaaagttttgggagacaaaagcttctaatattgactggataaagccttgggataaagtactctgttctgagaataataattataaatggtttaaaggtggcatattaaatacatgttataattgtgttgatagacatgtaaataagggcaaagcatcaaaagttgctattatatatgatagccctgttactggaaaaaaagattttataacttacagtgaattattacagaaagtctcttctttagccgcctcccttcattataaaggagtaaaaaaaggagatagggtagttctttacatgcctatgataccagaagtaatagtttctatgctagcttgcgccagaataggagctattcattcagttgtttttggtggctttgcagcagaagaactagctaatagaatacaagatgtaagtcccaaagcagttatttcagctagttgtggtttagaacctaatagaactattgattataaaaaaatactaaatgaggctattcaaattagctctcacaagcctgcatttcaaattatttttcaaagagaacagtataaatgtttattagataagaaaggtgatattgcttggactgactttgttgatcatagtaaaaaaattg

SEQ ID NO: 309128 - DNA, 652 bp, Unknown
  Bacterial polypeptide expressing nucleotide sequence isolated from the Sargasso Sea
catggatgctgaagatcctctttttattttatatacgtcaggctcaacaggaaagccaaagggggtaatgcatacttctggtggatatttagtctatgcatctttaacccataaatatatttttaattatgaggatgaagatatatattggtgtacggcagatattggatgggtgacgggacatagttatataatttatggacctctatctaatggtgcaacaacacttatgtttgaaggggttccaaactatcctgatacttcaagattttggaatattatagataagtataaagtaaatattttttatactgcgccaacagcaataagagctttaatgagggagggtaatgagcctgttaaaaaaacatcaagagaatctttaaaattacttggcacagttggagaaccaattaatcctgaagcatggaaatggtattatgaagtaccaggtaatagcaaatgtccagtagtagatacatggtggcaaacagaaacaggcggtatattaatatcacctcaaagtggtgcgattgaattaaaacctggctcagcatcaaaaccattttttggtataatgcctgctatattagataaagatggtaatgaactaaaaggtgagtgtgaaggaatgctatgtttgaaatattct

SEQ ID NO: 309129 - DNA, 787 bp, Unknown
  Bacterial polypeptide expressing nucleotide sequence isolated from the Sargasso Sea
attattttacggaccactggctaatggcgccacaacattaatgtttgaaggtgtacctaattatccagatttctcaaggttttggcaaataattgataaacataaggtaaatattttttatacagctcctacagctatcagggctttgatgcgagaaggtgatgattacgtagctaaaacaaatagagcatccttaaaacttttgggcactgttggtgagcctatcaatcctgaagcgtggaaatggtactttgaagtgcctggaaattcaaaatgcccaattgttgatacttggtggcaaactgaaacaggaggaattctgatatctcctcaaacaggtgctataaaattaaaacctggatctgcatcaaaacctttttttggcattgagccttgtattgttgataaaaatggaaatgaactagaaggtgagtgtgagggtatgttatgtatgaagcgctcatggcctggtcaaatgcggactgtttatggtgatcataaaagatttattgatacatatttttctcaatttgatggaaagtattttactggagatggatgtaaaagagatgctgatggttattattggattacaggaagggtagatgatgtaattattgtatcaggacataatttgggaactgctgaaatagaaagtgcatttgtatcaaacaaaaatgtttctgaggcagcagtagttggttatcctcatgatgtaaagggtaatgggttgtattgttatgtttctctaaaagtgggtgtgaatccatcagatgaattaatttta

SEQ ID NO: 309130 - DNA, 826 bp, Unknown
  Bacterial polypeptide expressing nucleotide sequence isolated from the Sargasso Sea
acatcagaaaaatcattaaaattattaggaaccgtaggtgaaccaattaatcctgaagcatgggaatggtattataaaaccgttggagattctaattgtccgattgttgatacttggtggcaaacagaaacaggtggaatattaatcagtccacaaactggtgctataaatttaaaaccaggttcagcaacaaaaccattctatggaattaaaccagtaatagttaataaagatggaaaagttttaaaaggagaagctgaaggtagattatgtattgcgcaatcttggcccggtcagatgcggacagtttacggtgatcatcaaagatttattgatacttatttttctcaatttgacggaaaatattttacaggagatggatgcagaagagataaagatggatattactggattacaggaagagttgatgatgtaattattgtttcaggacataatcttggaactgccgaaatagaaagtgcttttgtagctcatccaaaagttgctgaggctgctgtggttggatatccacatgatattaaaggtaatggtttgtattgttacgttactttgaatgtgggagaaaaatcaactttagatttagagagagatttaaagctgtgggttagaaaacaaattggtccaatagctactccggatctaattcaattttctcctggtcttccaaaaactagatcaggcaaaattatgagaagaattctcagaaaaattgcagcaaatgagcatgatcaattaggtgatacaaccacattggcagatccaagtgtagtaaaaagtttagttgaaaacagaaaaaatacttaaa

SEQ ID NO: 309131 - DNA, 817 bp, Unknown
  Bacterial polypeptide expressing nucleotide sequence isolated from the Sargasso Sea
cattccttgggtttcgttccccaaacagattttaggaaaagataccaatggggttggaaggtggttcgtagacggggagatgaacacctgctttgcggctttggattggcacgtagaggaggggcgtgggaataatgttgctctgatttatgactcccccgtaacggcgactaaggcgcaatatacctataaggaattgttggactgggcagcaaggatagcgggaggtctcgtgtccctgggcgttagtaaaggtgaccgggtagtgatctatatgcctatggtgccagagaccgtagtggccatgttggcttgtgctcggataggggctatacattctgtggtttttgggggttttgcggcaccggaactggccagtcgaatcgatgatgcggaacccaaggttattttatcggcctcctgtggtattgagttcgagaaggtaattgaatacaagccgctcctggatgccgcgattgaaattgcaagttttaaaccagcgcattgcgtggttttacagcgtcctcagtctcaggcaactttagttgagccccgagatatagactggaaaagttgggagtccgagtcggagtcggttgggtgcgtggcggttctggcgactgatccactctacattctgtacacgtcgggcacgaccggtaaaccaaagggtattgtcagagacaacgggggtcacgctgtcgctttgaaatacagtatgggcgctatttacgatgttgatgttggagatgtattttgggctgcctcagatgtgggttgggtcgtgggtcattcttatattgtttatgggccgctc

SEQ ID NO: 309132 - DNA, 694 bp, Unknown
  Bacterial polypeptide expressing nucleotide sequence isolated from the Sargasso Sea
atgcccaaaaaaaaagtaaaaaaaaagaataaatttaagaaaaaggtaaaaaaaaataaaattaagaaaaaaataagaaaaattgccaaacttaaaactgaaaaagaaatagtttataaaactaaaaaagagtggattagtaaagctatagtaaataaatctcaatatgaaaaaaaatataatgagtctttaaaaaacaatgatggtttttggaaaaaagaaggaaaaagaattaagtggattaaaccttataaaaaaattaaagatgttaaatacagtaaagaagatgttaaaattaaatggttttatgatggaactttaaatgcttcagaaaattgtatcgatagacatttaaagaaaaataaaaataaaactgcaataatttgggttggtgatgatccaaaaattcaaaaaaaaatttcctacaaagagcttcataaagaagtatcaaaagcagcaaatggattgaagaaaattggagtaaaaaaaggagatagagttacaatttacttaacaatgatacctgagctagcttatacaatgcttgcttgtgcaagaattggtgcagtacattctatcatttttggaggtttctctcccgatagcatctctggaagaattaatgattgtaaatctgattatgtaattactgcagatgaaggagttagaggtggaaaaaccatcccactaaaat

SEQ ID NO: 309133 - DNA, 430 bp, Unknown
  Bacterial polypeptide expressing nucleotide sequence isolated from the Sargasso Sea
gatggatattatttggataacaggaagagtagatgatgtaattattgtttcaggacataacttgggtactgcagaaatagaaagtgcatttgtagcacattctaaagtggccgaagctgcggtagttggataccctcatgatataaaaggaaatggattatattgttatgtgactttaaatgtaggagaagagcctaatggagacctggaaagagaattaaaactatgggtaagaaaacaaattggcgcaattgctactccagattttattcagtttgcacctggactaccaaaaacaagatctggaaaaatcatgagaagaattttaagaaagatagctgctaatgaacatgaacaacttggagatacaacaactttggctgatccaagtgttgttaaaagtctagttgataatagaaaaaatacttag

SEQ ID NO: 309134 - DNA, 573 bp, Unknown
  Bacterial polypeptide expressing nucleotide sequence isolated from the Sargasso Sea
gatggcacaagaaatttataatcctaatcccggattttcaaatccgcatataaaagattttgatgaatacttaagtctatataaagagtcaattgagaaccctgaaaaattctttggcgatctggcaaaagaaaatatttcatggattgaagattttaaagaggttcataactctgaattccaggaaactaaatggtttgttggaggaaaaacaaacataacgctcaactgtattgatagacaccttgaaaaaaatggagataaggttgccttaatttgggaaggtgatgagccaggaaactctaaagagataactttcaaagaattacactctgaggtttgcaggtttgcaaatatccttaaaacactccaaattaaaaaaggctccagagtttgtatttatatgccgatgattcctgaagctgcatttgcaatgtttgcatgtgcaagaattggtgcgatccactcagttgttttcggtggattttctccagaatctttaaaggataggattctggatgctgactgcagaattgtaattactgctgatgagggtgttcgaggcggtaaaaa

SEQ ID NO: 309135 - DNA, 865 bp, Unknown
  Bacterial polypeptide expressing nucleotide sequence isolated from the Sargasso Sea
gaagataaaaactacatctaaagctgaaaaagaacttatatataaaactaaaaaagattggataagcaaagctcttgttaacaaatcacaatacgaaaaaaaatataaggcatctatcaaagataacgatggattttggaaaaaagaaggtaaaagaataaattggataaagccatatacaaaaattaaagatgttaaatacagtaaatcagatgttaagataaaatggttttatgatggaactcttaatgcatctgcaaattgtattgatagacatttaaaaaaaaataaagataaaactgcaattatatgggtcggagatgatccaaaagttcaaaagaaaatttcttataaagaattacacaaagaggtttctaaagccgcaaacgcgcttaaggaattaggaattaaaaaaggagacagagttacgatttatcttaccatgatacctgagttagcttacactatgttagcttgtgcaagaataggagcggtgcattcaataatttttggaggcttttctcccgatagtatctctggaagaataaatgattgtgaatccgattatctaattacagctgatgaaggagtaagaggtggaaaaattatacctttaaaatcaattgctgatgaagctttagtgaattgtccaaatgtaaaaaaatgtatagtggtcaaaagaacaggtaatagaattaattgggatgaacgaagagatgtctggtaccacgagttaacaaaaaaagtttcaaataaatgtgagcccgaagaaatgaatgcagaagatcctttatttattttatatacctcaggatcaacgggaaaaccaaaaggggtgatgcatactactggtgggtacatggtt

SEQ ID NO: 309136 - DNA, 869 bp, Unknown
  Bacterial polypeptide expressing nucleotide sequence isolated from the Sargasso Sea
taaaaagggagatagagtaataatttatatgcccatgatacctcaagcagttattgcaatgcttgcgtgtggaaggatcggggctattcattcggtagtatttggtggctttgcggctaatgagttagcgagcagaatagatgactcaaaagcaaaaataattatttctgcttcgtgtggatatgaaccaggaagaactgttcattataaacctcttttaaataaagcaattgaaattgcaaaacataaaccagagaaatgtatcatttggcaaagagaaaaagataaagcagaacttgatcctcaaaaagatattgattgggttgaaactttgaaaggtgttaagcctgctgaatgtgaaaaaatgaattcaaatgattatgcttatattctttatacatctggaactacaggaactccaaaaggaatagtaagagatataggcgggcacatcgtagctttaaaatggacgatgaaaaatatttatgacataaaccaagatgatgtttggtggtctgcaagtgacattggttggattgttggtcattcttatattgtttatgctcctctattttatggctgcaccacagttttatttgaaggtaaaccagtaggcactcctgacgcaggtgtcttttggagaataatttcagaatataaggtaaagtcattatttacagctcctacagctataagagcaattaaaaaagaggatcctgatggaaaatattttaaaaaatatgatttatcaaaatttgatactttatttttagctggtgaacgtgctgacccagatacaattaaatggtttgaaaagctatcaaatgctcctgtgatagatcattggtggcaaactgaaacaagctggg

SEQ ID NO: 309137 - DNA, 560 bp, Unknown
  Bacterial polypeptide expressing nucleotide sequence isolated from the Sargasso Sea
ttgtatgctttcatcatggccaggtcagatgagaactgtgtatggtgatcatcaaagatttatagatacttatttttcacaatttgatggaaaatatttcactggggacggatgcagaagagataaagatggttactactggattactggaagggtggatgatgtaattattgtatcaggccataacctgggaacagctgagattgaaagtgcattcgtggcgcatcctaaagtagctgaggctgctgtagttggatttccacatagtataaaaggtaacgggttatattgttatgttactttaaacgcaggtgaaaaccctactggagatttagaaagagatcttaaactttgggttagaaaacaaatcggtccaatagctacaccagatgttattcaatttgcacctggattacctaaaactagatcaggaaaaattatgaggagaattttaagaaaaattgctgctaatgagcctgataatttaggagacacaacaactttggcagatcctagtgtagtaacttctcttgtagagaatagacagaataaaggttaat

SEQ ID NO: 309138 - DNA, 796 bp, Unknown
  Bacterial polypeptide expressing nucleotide sequence isolated from the Sargasso Sea
aaaaaaattaaagatgttaaatatagtaaagatgatgttcatattaaatggttctatgatggaactttaaatgcctcagcaaattgcatcgatagacatcttaaaaagaatgctcacaaaactgcaattatatgggtaggagacgatcctaaagttcaaaaaaaaattacatataaagaacttcataaagaggtttcgaaagcagcaaatggattgaaaaatttgggagttcaaaaaggtgatagagtaacaatttatcttaccatgataccagaacttgcctacacgatgcttgcatgtgctagaataggtgcagttcattccataatatttggaggtttttcaccagatagtatttcaggaagaattaatgattgcgaatctgattatgttataactgcagatgaaggtgtaagaggtggcaaaacaattcctttgaaatctattacagatgaggctttacagagctgtccaaatgtaaaaaaatgtatcgtagtaaagagaacaggtaccaaaaaaattgattggtttaatgatcgtgatgtttggtatcacaaaatgacaagtaaagtgtcagtaaaatgtgagcctgaggaaatgaatgctgaggatccattattcattctttacacatctggttcaactggtaaaccaaaaggtgtactacatacaactggtggatatatggtttatgcatcaatgactcaccaatatatttttaattataaacctaaagatatttactggtgcacggctgatataggctgggttacaggacatagttatattatttacg

SEQ ID NO: 309139 - DNA, 931 bp, Unknown
  Bacterial polypeptide expressing nucleotide sequence isolated from the Sargasso Sea
gcaagctcgctatctcacctggaaaagagagttcgacgagatcctcgactggagtgacgcaccgttcgcccgctggttcaccggtggaacgctgaacgtcgcctacaactgcgtcgatcgccacgtcgagaacggcttcggcactcaagtggcgatccgatttgaaggggaacccggggatcggcgtgacatcacctacgccgaactgaaggacgacgtctgcaaagcggccaacgcgctccttgaactcggcgtcgcctccggtgatcgcgttgccatctacatgccgatgattccggaagcgatcgtcgccatgctggcgtgcgcgcgcatcggcgcagcacactcggtcgtcttcgccgggttcagttcggaggcgcttcgcagccgtatcgacgacgcccaagctgtcgtggtcattaccgctgacgggcagaaccgtcggggctcggccatgccgctgaaacccgctgtcgatgaggcggtgtcccaaacgcccaccgtcaccaacgtccttgtcgttcgccgcacagggggtgatgtcgactgggacgacagtcgtgacgtgtggtggcacgacatcgtcgatcgtcagtcacccgaccacacacccgaggcgttcgacgccgagcatccgctcttcatcctctatacgtcggggacaacgggtaagccgaaaggaatcctgcacacgagcggcgggtatctgacccaagcggccttcactcaccggaacgtcttcgatctcaagcccgacgacgacatctactggtgcaccgcggacatcgggtgggtgaccggtcactcctacatcgtgtacgggccgctcgccaaccgtgtgacgcaagtggtgtacgaaggcacacccgatacaccgggcaaggaccgttggtgggacatcgtcgagcgccacaaggtctcgatcttctac

SEQ ID NO: 309140 - DNA, 475 bp, Unknown
  Bacterial polypeptide expressing nucleotide sequence isolated from the Sargasso Sea
ttttctggttactattttaccggtgatggttgcagaagagatgctgacggctattactggattacaggtcgtgtagatgatgttattaatgtatccggacataggatggggactgccgaagttgagagtgctttagtggctcatgaaaaggtaagtgaaagtgcggttgttggatatcctcatgagataaaaggccaaggtatctatgcgtatgtaacccttatggcaggtgaagagccatcggaacagttaagaagcgaccttgaaaaatgggtccgaaaggaaatcggtccgatagcaaaaccagatctgatacaatgggctcctggccttccaaagacgcgctcaggaaaaattatgagacggatattaagaaaaatcgccgaaaatgattattcagatttgggagacacctcaactttagctgatccgtcagtagtagatgaattagtttcaaacagaatgaataaatgat

SEQ ID NO: 309141 - DNA, 933 bp, Unknown
  Bacterial polypeptide expressing nucleotide sequence isolated from the Sargasso Sea
tattttatatacttccgggtcaacaggaaaaccaaaaggggtaatgcatacaacaggtggatatcttgtatatgcttcacatacccatgaattagtatttgattatcacaaagatgatatttactggtgtacagctgatattggatggattacaggtcattcatatattgtctatggaccattatctaatgcagtaactcaagttatctttgaaggagttccaaattacccagactttggaagattttggcaaattgttgaacaacataaagtgaatgtattttatacagctcctactgcattgcgtgcattaatgaaggaaggggatgattgggtagctaagtatgatttatctagtttaaaagtattgggaaccgttggtgagccaattaaatcaccagaatggcattggtattttaatgtcattggaaatgaaaaatgtcctatagttgatacatggtggcaaaccgaaactggaggaattttaatgtctccaattcctggatgtgttccaacaaaaccaggatcagccacattaccattgccaggtattattccagcaatcttagatgaagaaggaaatgaaataacaaaaagaaatactactggctatttagtaatgacacaatcctggcctggacaaatgagaacagtgtatgacgatcatcaacgattcatagatacctatttttcccaagcaccaggaaattattttacaggcgatggagcttatattgatgatgatggatatttttggattactggaagagtagacgatgtattaaatgtttctggacatagaattggtactgctgaagtggagggagctatcggtgctgcaagtggtgtagcagaagctgcagtcatcggatatacccatgaaattaaaggagagggtatttatgcatttgtcacattaatgacaagtgtaga

SEQ ID NO: 309142 - DNA, 496 bp, Unknown
  Bacterial polypeptide expressing nucleotide sequence isolated from the Sargasso Sea
atgacaaaaataaaatcgctattagattatactaaatcctatcagaaaagtatcgattcgcctgaaaatttttgggaagagatcgcttcaagatttaagtggagaaaaaaatgggataaaattttagattgggactttaagcttccaaaaatagtatggtttaaaaacgctagattaaatataacagaaaatatttttgaaaaaaacatcaaagaaaatggcaataaggatgcaatcatatgggagccaaatgatccaaatgaaaaatctattaggataacttataataaattatttgatttgacttgtcaatttgcaaacgcacttatctcaaatgggataaaaaaaggagatcgggtaataatttatatgccaatgatccccgaagctgcaatagctattttagcttgtgcaagaattggagcagttcattcagtagtttttgctggtttttcttcaacagctttatcagatcgaataaatgatgtcaagcaaa

SEQ ID NO: 309143 - DNA, 541 bp, Unknown
  Bacterial polypeptide expressing nucleotide sequence isolated from the Sargasso Sea
ccttcgatgttacgaggaattgggggtgacccacagcgttaccttgatacctactggagtacatacgaaggtagatatttcgctggtgatggagcgaaagtagatgatgatggttacttatggcttttagggagagttgatgatgtgatgaatgtctctgggcataggatctcaactgctgaggtagaatccgctttagttgatcacccaagtgttgcagaagcggctgtcgttggggcaactgatgagacgacaggacaagcaatcataggctatgtcattcttcgtgggggatttgattctacagacgaacttcgtcaagagatacgggctcatgtcgctacgaaacttgggccgatagcgcgacccagagcagtctttcttgttccagacctacctaaaacacgttcaggaaaaattatgcggagacttcttcgagacgtggcggaaggccgtgaccttggagatactacaaccttggcagactcttctgtcgtctcagctattcaggaaggcgccaacgagtctgacgaagattaga

SEQ ID NO: 309144 - DNA, 646 bp, Unknown
  Bacterial polypeptide expressing nucleotide sequence isolated from the Sargasso Sea
cccggatctggtacaaaacctttatttgggattgaacctttactagttgacaacgaaggtaatgaattgaaaggcgcaactagtggtaatttatgtatcaaatcttcctggcctgggcaaatgagaggtgtatatggagacccagaaagattttacaatacttactttactacctataaaggctattactttacaggagatggctgtagaagagatgaagatggttattactggattacgggcagagttgatgatgtaataaacgtatctggacacagattaggaacagctgaaattgaatcagctttagttttacataaagatgtagcagaatcagctgtagtaggattccctcatgatataaaaggtcaaggtatatatgcatttgtgaccttaaatcaagaagtagaaccaacagatgagttaaaaaaggaattggtgcaacaggtaagaacacaaataggacctatagcaaatttggacaatgttcaatgggcacctgctcttccaaaaactagaagcggaaaaattatgcgaagaattttaagaaaaattgctgaaaaagatttagacagtattggtgacacatctacactagcagagccagaagtagtggatgatttagtgaaaaatgctgccaaataaa

SEQ ID NO: 309145 - DNA, 895 bp, Unknown
  Bacterial polypeptide expressing nucleotide sequence isolated from the Sargasso Sea
ttttgagagtttagatattaagtggtttaaaaatgcgaagcttaatataaccgaaaacatttttgagagaaatctaaagggtcgtggtgacaaaacagctattatttgggaaccaaatgatccaaatgagccctcaattcatttaacatacaatgagctttatgaagaaacttgtaagttttcaaatgctctaagagataaaggaattaaaaaaggagatagagtaattatatacatgccaatggtacctgaagcagcaattgcaatgttagcatgtgctagagttggtgctgttcactctgtagtttttgcaggtttttcatctacctctcttgctgatagaataaatgactgtcaagcaaaaatgatactaacttctgatggtaattttaggggtaataaaaccattcccgttaaacctgttgttgatgaggcacttgaaaagtgctcaacaattgagagtgtcattgtattagaaagaacaaaacaaaaagttaatatgacaaaggggagagactattggtggcatgattgtattaatggtatttcctcacaatgtgctcctgagattctagattcagaggacatgctgtttatattatatacttcaggatcaacaggaaaacctaaaggcgttgttcattcctctgctggatatatggtatattctgcatatacattcctcaatgtatttcaatatgacgaaaatgatatttattggtgtactgcagatgttggttggataactggtcactcatatatagtatatggacctctactttgcggtgctacctcagtaatgtttgaaggtgttccaacatttcctaatgtgagtaggttctgggatgttgttgataaatataaagtcaatcaattctacactgctcctactgca

SEQ ID NO: 309146 - DNA, 884 bp, Unknown
  Bacterial polypeptide expressing nucleotide sequence isolated from the Sargasso Sea
aatggttgatggcagagaccactggtatagcgaacttgtagataagcaggaagctgattgtgaacctgaagtaatgaacgcagaggacatgttatatatcctctatacatctggtacaacagctaagccaaaaggaatcgttcacacacaggctggatatcttactggtgttactacaacacattctgcagtatttgatgtaaaggaagatgacatctattggtgtgccgcagactgtggttgggtaacaggtcatagctatattgtgtatggtcctttagcaaacaaaacaacaagtgttatgtatgagggtgcaccaaacgcaccagatgaaaaaagattatggagtatcgtagaaaaatataaagtaaatattttttacactgccccaactgcaatcagagcttttatgaagtggggagttgaacatccgcaagcacatgacctaacgtcactcagattgttaggtactgttggagagccaattaatccagaagcctggatgtggtaccacgaaaacataggaagtgaatcatgtgcaattgtagatacatggtggcagacggagactggttcaataatgattacaccactaccaggaattactagtactaaaccggggtcagcatgtggtccaatgccaggcatagatgcagttgttgttgatgaaaatggaaatgaagtatcaaagggtgaagggggatatttagcaatcaagacaccttggccgtcaatgcttagaacagtatttggtgatgaaaaaagatatatcgacacttattggtcaaagtatgacgggatgtattttgcaggagatggtgcaaaatatgatgatgatggatacttctggcttttaggaagagttgatgatgttatgaatattt

SEQ ID NO: 309147 - DNA, 927 bp, Unknown
  Bacterial polypeptide expressing nucleotide sequence isolated from the Sargasso Sea
agataaaactgcaattatttgggttggagatgatccaaaagaaacacaaaaaatttcatataaacaactacaccaaaaagtttcaaaagcagcgaatggtttaaaaaaactgggaataaaaaaaggtgaccgagtaacaatttacttaaccatgattccagaactagcaattttaatgttagcttgtgcgagaattggggcaatacattcaattatttttggtgggttttcagcagaatctatatcagggagagttaatgattgtgagtctgaatttataataactgctgatgaaggtgtaagaggtggaaaaaccattccacttaaagcaacaacagatgaagcgcttactaattgtccaaatgtaaaaaaatgtattgtggttaaaaggacaggaaattatgttttttggaatagtgatagagatgtttggtatcatgatttaataaaggatgtttcgagtcaatgtgaccctgaggaaatgaatgcagaagatcctctatttattctttatacttctggatctaccggaaaaccaaaaggggtattacatacaactggtggatatatggtttatgcatcaatgacccatcagtatatttttaattataaaccaaaagatatttattggtgcacagcagatattggttgggttactggtcatagttatattatttatggtccactttctaatggagcaacaacaatcatgtttgaaggtgttccaaattaccctgatagttctagatggtggcaaatagtagataaatttaaagttaatactttttatactgcaccaactgctattagagctttaatgagagaaggtgatgaaccagtaaataaaacatcaagaagatctttaaaattattaggaacagttggtgaaccaataaatcctgaaacatggatgtggtactacaagac

SEQ ID NO: 309148 - DNA, 935 bp, Unknown
  Bacterial polypeptide expressing nucleotide sequence isolated from the Sargasso Sea
ctcaatagctggcagaattaatgattgccaatctgactatattataactgcttatgagggtgtaagaggtggaaaaattattcctttaaaaaaaattactgatgatgcattaacaaaatgtccaaatgtaaaaaaatgtattgtagttaaaagaactggtaatgaaattaattgggataatgacagagatatttggtatgatgagattacaaaagtagcttcggataaatgtgagccagaagaaatgaatgcggaagatccactatttattttatatacatctggatctacaggaaaacctaagggagttttgcatacaactgggggatatatggtatatgcctcaatgacacatcagtacatttttaattataaaaaaaatgatatttactggtgctcagctgatataggttgggttacagggcatagttatattatttatggtccactttctaatggagctacaaccattatgtttgaaggtgttccaaactatcctgatacctctagatggtggcaaattgtagataaatataaagttaatatattttatactgcaccgactgcgctgagagctttaatgcgagagggtgctggacctgtaaaaaagaccagtagaaaatcacttaagcttttaggaactgttggtgaaccaataaaccctgaagcttggctttggtattataaagtaattggtgactcaaggtgcccaattgttgatacttggtggcaaacagaaacaggcggaattttaatatcaccacaaccaggtgcaatggatcttaaacctggctcggcaactaagccattttacggtatcaaaccagtaattgttgacgaagcaggtaaaacattaaaaggagcttgtcgaggtagattatgtatagctcagtcttggcctggacagatgagaactgtttatggagatcatcaaa

SEQ ID NO: 309149 - DNA, 698 bp, Unknown
  Bacterial polypeptide expressing nucleotide sequence isolated from the Sargasso Sea
tatgagcgatattgaaaaatttgacgtcagtgccgattggtctgccaacgcccagataaatcaagataaatataatgaatggtatgaaacatcattcaacaataacgaagatttttggaacgagcacggcaaacgtatcgaatggatgaagccatatacaaaagtgaaagatgtttcatttgataaagataatttttcaatcaaatggtacgaagatggctcacttaatgcgtcagccaattgcatcgatcgacatttaaaagataaaggggatcagacagctatcatttgggagggcgatgatccaaaaaactcaaaacacattacttataatgaacttcataaagaagtatcaaaattatctaatggcatgaaatcccttggtgtaaaaaaaggtgaccgtgtaacgatctatatgccaatgattcctgaagctgcttatgcaatgcttgcgtgtacacgcattggtgctattcattcagttgtctttggaggtttttctcctgactcacttgcaggacgcatcagtgattgtaaatcagatattgtaataacagctgatgaaggattaagaggcggcaagccaattccattaaaaaagaatactgacgatgcccatcacatctcaggcggtgtgagacattgcattgttgtcaaaagacaggcggggcgatcgattggcatgatgacggtgatgt

SEQ ID NO: 309150 - DNA, 907 bp, Unknown
  Bacterial polypeptide expressing nucleotide sequence isolated from the Sargasso Sea
ttttaactataagccaaaagatatctattggtgtactgctgatattggatgggtaacaggacatagttatataatttatggacctcttgctaatggtgcaacaacaataatgtttgagggaattcctaattatcctgacacttcaagatggtggcagatcgttgataaatataaagttaatattttctacactgcacccacagcaattagagctctgatgcgtgagggtgataaaccagtgaaaaaaacttccagaaaatctttaaaattacttgggactgttggtgaaccaattaatcctgaggcttggatgtggtattataaaacagtcggaaactctaaaagcccaattgtagacacttggtggcaaaccgagacaggaggaatactgattgcgcctcaaacaggagccattccattaaaacctggttcagctacgaaaccattctatggaattaaacctgttattgttgataaaaatggcaaggagataaaaggtgctggcgaaggaagactttgtattgctcaatcatggccaggccaaatgagaaccgtctatggagaccaccaaagatttatcgatacatatttttctcagttcaatggaaaatattttaccggcgatggttgtagaagagataaagatggatattactggatcacaggaagagttgatgatgtaatcattgtatcaggacataatttgggtacagctgaaatcgaaagcgcgtttgttgctcatccaaaagttgctgaggcagcagtagttggttacccacatgatattaaaggaaatggtttgtattgttatgtgactttaaatgcaggtgaaactgaaactggagatcttgaaagagatttaaagctttgggtcagaaaacagatggaccactgcaactccagacta

SEQ ID NO: 309151 - DNA, 844 bp, Unknown
  Bacterial polypeptide expressing nucleotide sequence isolated from the Sargasso Sea
gccgaagacccgctgttcatcctctacacctcgggctccaccggcaaacccaagggcgtgctgcacaccaccggcggctacctgctcggcgcggcgatgacccacaagtacgtgttcgactaccacgaaggcgacatctactggtgcaccgccgatgtcggctgggtgaccgggcacagctacatcgtctacggcccgctggccaacgccgccaccacgctgatcttcgaaggcgtgcccaactacccggacgcctcgcgtttctggcaggtgatcgacaagcaccgggtcaacaccttctacaccgcgcccaccgccctgcgcgcgctgatgcgcgaaggcgaagccccggtgaaggcgacctcacgggaaagcctgcgcctgcttggcagcgtcggcgaaccgatcaacccggaagcctgggaatggtacttccacgtggtcggcgacacccgctgccccatcgtcgacacctggtggcagaccgagaccggctcgatcctgatcacgccgctgccgggcgccaccgacctcaagccgggatcggcgacccgtccgttcttcggcgtgcagccggtgctgctcgacgagcaaggcaaggaaatcgacggccccggcgcgggcgtgctggccatcagggccagttggccgagccagatccgcagtgtctacggcgaccaccagcgcatgatcgacacctacttcaaaccctaccccggctactacttcaccggcgacggtgcgcgccgtgacgaggatggctactactggatcaccggtcgtgtcgatgacgtgatcaacgtctccggccatcgcatcggtaccgccgaggtggaaagcgccc

SEQ ID NO: 309152 - DNA, 777 bp, Unknown
  Bacterial polypeptide expressing nucleotide sequence isolated from the Sargasso Sea
gggagccgattaaccctgaagcttggatgtggtattacaaaaccatcggtaaagagcgctgtccaattgtagatacctggtggcaaacagaaaccggatctcacatgttaacaacgctgccgggtgccaactcgatgcggcccggttctgcgggggttccgttctttggagtggatattgcggtggtcgacgatcagggagaagaagttccaccgaatacaggtggaaagctcgttattcgtcagccttggccgtcgatgctgcgaaccatttatggtgatcagaagcggtataaggaaacgtactggaatgaggtcgaggattgttactttactggtgatggggctcgacgtgataaaaaaggctatttctgggttgtcggtcggattgatgatgttttgaacgtctctggtcatagactgggaaccgccgaggtcgaaagtgcactcgtcagccatcccaaggttgcggaagctgcagtggttggtcgtcccgatgaaattaaaggtcagggaatcgttgcctttgttaccttgaaaggaagtgagaaaaaatcttctgaattacgcaatgagctgattaagcatgttactaaggagattggtgcaattgcgcgtccggactccatccgctttgcggatgctttacccaaaactcgtagcggtaaaattatgagaagattgctgcgtagtatcgctgcgggtgaagatgtcacgggtgatgtttcgaccttggaagataagagcgtaattcagtcattacagcaggaagtgtaat

SEQ ID NO: 309153 - DNA, 433 bp, Unknown
  Bacterial polypeptide expressing nucleotide sequence isolated from the Sargasso Sea
gcgcgaataggcgccatccattccgttgtttttgcaggtttttcaccagaagcattaaaggaacgaattttagattcagaatgttctgcactaattacatctgatgaaggcattcggggaggaaaaaaaatcccactaaagtctaacgctgataaagctatgtctttttgtccaaatattcaaacttgcgttgttgtaaaacatacgggcgccgaaattgaaatgaaaaatgaacgagatttcttctatctcgatttgataagcaatgaaagcgagatttgcgaaccagaaccgatggaagcggaagaccctttatttattctttatacttctggttccaccggaaaaccaaagggcgttttgcattcaacaggcggctacctacttcaagctaccatgacttttaaatacatctttgactatcaagaacgga

SEQ ID NO: 309154 - DNA, 793 bp, Unknown
  Bacterial polypeptide expressing nucleotide sequence isolated from the Sargasso Sea
acttatccaagctcatcgagatgttgggaggtatgtgataaatataatgtaaatgttttttacacagctccaacagccataagagccttaatgtctcaaggtgatgaacccgttcttaaaactaaaagagactctcttagagttcttggaacagtgggagaaccaattaatcccgaagcttgggattggtactataaagttgtagggaatggctcgtgtgatgttattgatacttggtggcaaacagaaacaggttcagttttaatatcgccaatatcaggtgttactccggtaaaacctggatcagcaacattgccattttttggagtaaagccagcaatttatgatgaagaaggccaagcattagaaggcgcagcctcaggtaatttagttattgaatcctcctggcctagtcaaattagaagcgtctatggtgatcatgaaagaatgatatcaacttactttaaaacatatgaagatatttattttactggtgacggagcaagacgagatgaagatgggtatttttggataacaggtagagttgatgatgttctaaatgtttctggccacagacttggaacagcagagattgaaagtgctttagtacttcatgattctgttgcagaggcagcggtggtaggatttcaacatccaattaagggacaaggtatctatgcatttgttaccttaatgaaaggtgaagattttaatgatgctcttgagcaggaactaacaaaatttgtttcaaaagagataggccctattgcaaaacctgaccttttcaaaacgc

SEQ ID NO: 309155 - DNA, 635 bp, Unknown
  Bacterial polypeptide expressing nucleotide sequence isolated from the Sargasso Sea
ctttacacatctggttcaactagggaaaccaaaaggtgttctacatactactggcggatatatggtttatgcatcaatgactcaccaatatatttttaattataaacctaaagatatttactggtgcacggctgatataggctgggttacaggacatagttatattatttatggtccacttgctaatggtgcaactacaattatgtttgagggaatacctacttatcctgatacatctagatggtggcaaatagttgataaatataaagtaaatatattctatacagctccaacagcaatcagagctttaatgagagaaggggataaacctgtaaagaaaacatctagaaagactttaaaacttttaggcactgttggtgaaccaattaatcctgaagcttgggaatggtattacaaaactgttggtaatagcagatgcccaatcgttgatacatggtggcaaacagaaacaggtgggattttgatcagtcctcaaactggagcaatagatttaaaacctggttctgcaacaaaaccattttatggaattaaaccagaaatcctagataaagatggcaaggttttaaaaggagaagcacaaggtaggctttgtatttcacaatcatggcccggac

SEQ ID NO: 309156 - DNA, 477 bp, Unknown
  Bacterial polypeptide expressing nucleotide sequence isolated from the Sargasso Sea
tatggtgatcatgaaagaatgatatcaacttactttaaaacatatgaagatatttattttactggtgacggagcaagacgagatgaagatgggtatttttggataacaggtagagttgatgatgttctaaatgtatctggccacaggcttggaacagcagagattgaaagtgctttagtactccatgattctgttgcggaggcagcggtggtaggatttcaacatccgattaaaggacaaggtatttatgcatttgttaccttaatgaaaggtgaagattttaatgatgctcttgaacaggaactaacaaaatttgtttcaaaagagataggtcctattgcaaaacctgaccttattcaaaatgctcctggtcttcctaaaacaagatctggaaaaattatgagaagaatattaagaaaaattgctgaaggtgatttcgataatcttggagacacaaccacttcttgcagagcctgc

SEQ ID NO: 309157 - DNA, 380 bp, Unknown
  Bacterial polypeptide expressing nucleotide sequence isolated from the Sargasso Sea
ggggcatcgtatgggtactgcagagctagaatcagcattagtacttcatgaaaatgttgctgaagcagcagttgttggttttcctcatgaaataaagggacagggcatttatgcttttgtaactttaaatactggagtagaccctactgatgaattacaaaaagaattaatacgtctagttcgcaaggaaatagggcctattgcttcttttgatgtagttcaatgggctccaggactaccaaagactcgctccggaaaaataatgcggcgcatattacgtaaaattgctgaaagtgataccgaaagcattggagatgtttccacacttgcggatccatctgtagtagatgatttaatttccaatcgccctgcaaattaat

SEQ ID NO: 309158 - DNA, 841 bp, Unknown
  Bacterial polypeptide expressing nucleotide sequence isolated from the Sargasso Sea
atgagtgaaaatgaaaagtttgaagtgagcagtgaatggtctgcagaagctcaagttaatactgataaatattatgaatggtacgaaaattctctcaatgacaatgaaaagttttggagtgaacacggtaaaagaattgattggattaaaccatatacaaaaataaaagacgtttcttacaataaagataatttctcaattaagtggtattacgatggtaccctgaacgcatcaagcaactgtattgatagacatttaaaagataaagcagatcaaaccgcaatcatttgggaaggcgatgatccagcagactcaaaacatataacttacaaagaattacacatcgaggtatcaaaacttgctaacggcatgaaatctcttggtgttaaaaaaggtgatcgtgtaactatctatatgccaatgattcctgaggcagcttatgcaatgctagcgtgtacaaggattggtgcaattcactctgttgtatttggaggcttttctccagactcattagctggaagaataagtgattgcaaatcagatattgtgatcacagcagatgaaggagtgagaggtggcaaagaaattccattaaagaaaaatacagatgaagcaatttcaatttcaggcggagtgcgtcattgtattgttgttaaaagaacaggtggagatattggttgggtcgatgaaagagatgtttggtatcacgaactgactgaaaaagaatctgatgattgtccaccagaagaaatgtcagcagaagatcctctttttatattgtatacatctggatcgaccggaaaaccaaaaggagtcatgcatacgactggtggttacatgg

SEQ ID NO: 309159 - DNA, 779 bp, Unknown
  Bacterial polypeptide expressing nucleotide sequence isolated from the Sargasso Sea
ttatgcttctatgactcatcaatatattttcaattataaaccaaatgacatttattggtgcacagcagatatcggatgggtaactggtcatagctatataatttatggaccattagctaatggtgcaacaaccattatgtttgaaggtgttccaaattaccctgatagttcaaggtggtggcaaattgtagacaagtataaagtaaacaccttttatacagcgccaacagctattagggccttgatgagagaaggtgatggcccagttaataaaactactagaaaatctctgaaattattaggaactgttggagaacctataaatccagaagcatggatgtggtattacaaaactgttggtaattcaaaatgtccaatagttgatacatggtggcaaacagaaacgggaggaattcttatagcaccacaaactggagctattccgcttaaacctggatcagcaacaaaacctttttatggaattaaaccggtgcttgtagataaagacggtaaagaaataaaaggtgaaggtgaaggaaggctttgtatagctcaatcttggcctggtcaaatgagaaccgtatatggtgatcatcaaagatttatcgatacatatttttcacagtttgatggaaaatatttcacaggagatggatgtaaaagagataaagatggctactattggataactggtagagttgatgatgtgattattgtctctggtcataaccttggtactgctgaaattgaaagtgcctttgttgcccatcctaaagtag

SEQ ID NO: 309160 - DNA, 916 bp, Unknown
  Bacterial polypeptide expressing nucleotide sequence isolated from the Sargasso Sea
gtactacatacaactggtggatacatggtttatgcatcaatgactcaccaatatatttttaattataaacctaaagatatttactggtgcacagctgatataggttgggttacaggacacagttatattatttatggtccactagctaatggtgcaactacaattatgtttgaaggaatacctacttatcctaacacatctaggtggtggcaaatagttgataaatataaagtgaatattttctacacagctccaacagcaatcagagctttgatgagagaaggtgataaacctgtaaaaaaaacatctagaaaaactctaaaacttttaggcactgttggtgaaccgattaatcctgaagcttgggagtggtattacaaaactgttggtgatagcagatgcccaatcgttgatacatggtggcaaacagaaacaggtgggattttgatcagtcctcaaactggagcaatagatttaaaacctggttctgcaacaaaaccattttatggaattaaaccagaaatcctagataaagatggcaaggttttaaaaggagaagcacaaggcagactttgtatttctcaatcgtggcctggacaaatgagaagtgtctatggtgatcatcaaagatttatagatacttatttttcacaatttgatgggaaatattttacaggagatggctgcagaagagataaggatggatactattggattacaggaagagtagatgatgtaattattgtttctggacataatttaggtactgcagaaattgagagtgcgtttgtagctcatccaaaagtggctgaagcagcagtagttggatatccacatgacataaaaggaaatgggctttactgttatattactttaaatgcaggagaaaaaagcactcttgatttagaaagagatt

SEQ ID NO: 309161 - DNA, 758 bp, Unknown
  Bacterial polypeptide expressing nucleotide sequence isolated from the Sargasso Sea
gatggtccaggttaaaaaaacatctagaaaatctctcaaattacttgggacagttggagaaccaattaatccagaagcttggatgtggtattataaaactgttggtaattctagatgtccaattgtggatacttggtggcaaacagaaactggtggaataatgatttctcctcaaacaggagctattcctttaaagcctggctcagcaacaaaaccattctatggaattaagcctgtaatagtagataaaaatggtaaagagattaagggagcaggtgaaggaagactttgtatttctcattcttggcctggacaaatgagaacagtttatggagatcatgatagatttataaatacatatttttctcagttcgatagaaaatattttactggtgatggctgtaaaagagataaagatggatattactggataacaggaagagttgatgatgttataattgtatcaggtcataatctaggaactgctgaaattgaaagtgcatttgtggcccatccaaaagtagctgaagcagctgtggttggttatcctcatgatattaaaggaaatggtttatattgctatgtaactttaaatgctggagaaaaagactcaggtgaacttgaaagagacttaaagctctgggttagaaaacaaattggtccattagcaacccctgacttaattcattttactcccgggttaccaaaaacaagatctggaaaaattatgagaagaattttaagaaaaattgcagcaa

SEQ ID NO: 309162 - DNA, 881 bp, Unknown
  Bacterial polypeptide expressing nucleotide sequence isolated from the Sargasso Sea
aagctttctattaaagaaaacgaaaaaattttgggcgaaagaaggtaaaagaataacatggatcaaaaaatatacaaaaattaaagatgtcaaatatagtaaagaagaagttaaaattaaatggtactatgacggtacattaaatgcttctgcaaattgcattgatcgtcatttaaagaaaaacccaaaaaaaacagctatcatctgggtgggtgatgatccttctgactcgaaaaaaatttcttacaaagaactgcaccaaaacgtttgtaaagctgcaaatgggttaaaaagtattggtgttcaaaaaggtgacagagtaacgatttatcttacaatgatacctgagctggcttatatgatgctggcttgcgcaagaattggggctgtacattcaattatttttggtggtttttctcctgactctatagccacaagaataaatgattgtgagtctgattatttaataacagcagatgaaggtgttagaggaggtaaaattattccactaaaaaaaatagctgatgaagctttaacacaatgtccagatgttaaaaaatgtgtgattattcaaagaactggcaatcaagtagattggaataatgaaagagatatttcttataaagaaatgatttcttctgtatcaaataaatgtgatcccgaagagatgaatgctgaagacccattgtttatactttacacttcaggttctactggaaaacctaaaggagttttacatacaacaggtggttatatggtttatgcatcaatgactcatcaatatatttttgattataagagtaacgacatttattggtgtacggcagacattggctgggtaacagggcacagttatataatttatggccctctagctaatg

SEQ ID NO: 309163 - DNA, 900 bp, Unknown
  Bacterial polypeptide expressing nucleotide sequence isolated from the Sargasso Sea
acgaaaaaagtttcaaataaatgtgaacccgaagaaatgaatgcagaagatcctttgtttattttatatacttcaggatcaacaggtaaaccaaaaggtgtaatgcatacaactggtggatatatggtttacgcatctatgacccatcaatatatattcaattataaacctaaagatatttattggtgtacagctgacattggttgggtgactggtcatagctatattatttatggaccattatctaatggagcaacaacgattatgtttgagggaattccaacttatccagatagttcaagatggtggcaaatcgttgataaatataaagtgaatattttttatactgctccgacagcaataagagctttaatgagagaaggtgataagcctgttaaaaaaacatcaagaaaatcgctgaaattactaggaacagtaggtgaaccaatcaatccagaagcttgggagtggtattataaaactgtcggagactcaaattgtccgattgttgatacttggtggcaaactgaaacgggtgggatattaattagtccacaaacaggtgctataaatttaaaaccaggttcagcaactaaaccattttatggaattaaaccagtaatagtaaataaagatgggaaagttttgaaaggagaagctgaaggtcgtttgtgtatcgcgcaatcttggccagggcagatgcgaacagtttacggtgatcatcaaagatttattgatacttatttctctcaatttgatggcaagtattttacaggtgacgggtgcaggagagataaagatggatattactggatcactggaagagttgatgatgtaatcattgtttatggacacaaccttggaactgctgaaattgaaagtgcgtttttgcccatccaa

SEQ ID NO: 309164 - DNA, 803 bp, Unknown
  Bacterial polypeptide expressing nucleotide sequence isolated from the Sargasso Sea
tatggtttatgcctcaatgactcttttttatattttcaattataaaccaaaagatatatattggtgtactgcagatattggttgggtcacaggtcacagttatattatttatggacctctttcaaatggagcaacaacaattatgtctgaaggtattccaaattatccggattggtctaggtggtggcaaatagtagataaatataaagttaacattttttatacagcaccaactgcaataagagccatgatgagagaaggagatgggcctgtaaaaaaaacatcaagaaaaagtctaaaactacttggaactgttggcgaaccaataaatcctgaagcgtggcaatggtattttaaaactgtaggtgattctagatgcccaatagttgatacttggtggcagacagaaactgggggaattttaattagtcctcaaactggagcaatagacttaaagcctggatctgcaactaaaccattttatggaattaaacctgaaatacttgataaggatggtaaggttctaaaaggagaagctcaaggaagattatgtatagctcaatcttggccaggtcaaatgagatctgtttatggagaccatgatagatttatagaaacatacttttctcagtttgatggaaagtattttactggagatgggtgtaaaagagataaagacggatactattggataacaggaagagttgatgatgttattattgtatctggacataatttgggaaccgccgaaatagagagtgcctttgttgcacatccaaaagttgctgaagctgcagtggttg

SEQ ID NO: 309165 - DNA, 1014 bp, Unknown
  Bacterial polypeptide expressing nucleotide sequence isolated from the Sargasso Sea
agcagtacattcaattatatttggtggtttttctccagacagtatagctggtagaattaacgactgtaaatcagattatgtagtaacagcagatgaaggtttaagaggaggaaaaactattccattaaaatctattactgatgaagcattagttaattgttcaaatgttaagaaatgtattgttataaaaaaaactggtaatagaattaattgggacgaaagcagagatgtttggtatcacgatattgttaaaaaagcctcacctatttgtgaacctgaggaaatgaatgcagaagatccattatttatactttacacctcaggatcaactggaaaaccaaaaggtgttttacatactactggtggatacatggtttacgcatcaatgacacaccaatatatttttaattataggcctaaagatatttattggtgtactgctgacattggatggattacaggtcatagctatataatatatggacctttagcaaatggagctactacaattatgtttgaaggaatacctacatatccagatacttcaagatggtggcagatagttgacaaatacaaagtaaatattttttacactgcaccaacagcaattagagctttaatgagagagggtgatggtcctgttaaaaaaacttcaagaaaatctttaaaattacttgggactgtaggtgaacctataaatcctgaagcatggcaatggtattttaaaaccgtgggagactctaaatgccctatagtagatacatggtggcaaactgaaactggtggaatattaataagcccacaaactggagcaatagatttaaaaccaggatcagctactaaacctttttacggtataaaaccagttatcgttgaccaggaaggaaaagtcttaaaaggtgaagccagaggaagattatgtatagctcaatcctggcctggacaaatgagaaactgttatgggcgatcacataggtttatagaaacttatttttcacatttgatggtaatatt

SEQ ID NO: 309166 - DNA, 682 bp, Unknown
  Bacterial polypeptide expressing nucleotide sequence isolated from the Sargasso Sea
attaaacgcttcggctaattgtattgatagacacctaaaagataaaaaagataaaacggccattatttgggttggggacgatccaaaagatactcaaaaaatcacatataaacaattacatcaaaaagtttctaaagcagcaaatggtcttaaaaagctgggtataaagaaaggtgatcgtgtaacaatttatcttactatgatacctgaactagcaatacttatgttggcttgcgctagaataggggctattcattcaattatttttggtggattttcagcagaatctatttctggaagagtaaatgattgtgagtctgaatacataataacagcagatgaaggtgtaagaggcggaaaaacaattcctcttaaaaccactacagatgaagcactacttaattgtcctaatgttaaaaaatgtatagtggtaaaaagaactggtaattatgtattttgggataatgatagagatgtttggtaccatgaactgataaaagatgtttcaaataattgtgagccagaggagatgagtgcagaagatcctctatttattctttatacttcgggtttcactggaaaaccaaaaggtgttttacatacaacgggaggatacatggtctatgcatcgatgactcatcagtatatttttaattataagcctaaagatatatattggtgt

SEQ ID NO: 309167 - DNA, 895 bp, Unknown
  Bacterial polypeptide expressing nucleotide sequence isolated from the Sargasso Sea
atgtctagaagaaaaaagagaaaatctagaaaaagaaaaaagagaaaatctagaaaaagaaaaaagataaaaatcagaaaattaagaagaaaaaaaagtagaaaaaaaattaaaaaaacaaaaatctcaactccgaatgaattaatttttaaagttccaaaaaagtggtcaaatacagcatatgtggacaaagctgaatatgaaaaaaaatataagttatcaattaaagacaatgaaagattttgggaaaaagaaggaaaacgaattgactggataaaacgctataaaaaaataaaggatgtcaaatacagcaaaactgaggtcagaattaaatggtattatgatggaacattaaatgcttcagcaaattgcatagacagacatctgccaaataaaaaaaacaaaacagcaattatttgggttggtgataatccaaaagattcgaaacaaattacctatgcagagcttcacaaaaatgtttgcaaaactgcaaatggattaaaggaactcggtataaaaaagggtgacagagtaactatttatttaaccatgattccggagctagcatacgcaatgttagcttgtgcaagaattggtgcaattcactcgataatatttggtggtttttctccagattcaatttctggaagaattaatgattgccagtcagattatattattactgcagatgagggagtaagaggaggaaaaattattccactgaaaaaaattacagatgaagctttaataaattgccctaacgtaaaaaaatgtatcgttgtaaaaagaactggaaatgaaattaattgggttgatggtagagatgtttggtatgacgaaattacaaaaatggcctcaagtagttgtgaaccagaagaaagaacgcagaagatcc

SEQ ID NO: 309168 - DNA, 486 bp, Unknown
  Bacterial polypeptide expressing nucleotide sequence isolated from the Sargasso Sea
atttttcacagtttgatggaaaatattttactggtgatggatgtaaaagagataaagacggatactattggataactggaagagtcgatgatgttattattgtatctggacataatttaggaactgctgaaatagaaagcgcctttgtagcacattcaaaagtcgcagaagctgcagtagttggatacccacatgatataaaaggaaatggattatattgctatgtaactttaaatgctggtgaagaaccaaacggagatttagaaagagaattaaaactttgggttagaaaacaaattgggcctattgctactccagattttattcaattttcacctggactaccaaaaacaagatctggaaaaataatgagaagaattttgagaaagattgcagctaatgaacatgagcaacttggagacacaacaactttagctgatcagagcgttgttaaaagtctagttgagaatagaaaaaatatttaaa

SEQ ID NO: 309169 - DNA, 760 bp, Unknown
  Bacterial polypeptide expressing nucleotide sequence isolated from the Sargasso Sea
tggtattatgaagttccaggaaattctaaatgtcctattgttgacacgtggtggcaaactgaaactggaggaatattaatttctcctcaaagtggggctattgatttaaaaccaggttcagcatctaaacctttttatggaattgagccatgtatagtaaataaagatggagaagagcaaagtggtgaagcagagggaatgttatgtcttcaaaattcttggccgggtcaaatgcgcagtgtttatggtgatcataaaagatttatatcaacttatttttcacaatttaatggaaagtattttactggagatggatgtaggagagacaaagatgggtattattggattactggaagagttgatgatgtaataattgtatcaggtcataaccttggaactgcagaaattgaaagtgcttttgtttctcacccaaaagtatctgaggctgctgttgttggttatcctcatgatataaaaggaaatggtttatattgttatgtctctcttatagttggaacagaaagtaatgaaagtttaaagaaagaattgattcaaactattaggtcaaaaattggtcctattgctactcctgattttatacattttactgatggcctgcctaaaactcgttcaggaaaaattatgagaagaattttaagaaaaattgcggcaaatgaagaggatcaactaggagacattacaaccttagcagacccgagtgttgttgaaaagttaattaaaaataaactaaataattaac

SEQ ID NO: 309170 - DNA, 685 bp, Unknown
  Bacterial polypeptide expressing nucleotide sequence isolated from the Sargasso Sea
atggacgattctttaattgagagcttagatcaatacagaggtaaatatcaaaaatcaattgaaaatcctgaggaattttggggtgatatagccaaaaattttacttggtttgatcaatgggataaaacacttgaacaagatatgttgtctgctgaatttcaatggtttaaaggaggtaagacaaatatttcatttaactgcatagatagacatcttgagaataatgctgaaaaaactgccattattttcgaacccaacaatccaaatgaagaatctcaacatatttcatataaagaactccactctagagtttgtcaaatgtcaaatgttcttttgaaaaatggtgtaaaaaaaggggatcgcgtttgtatttacttgccaatgattcccgaattggcaataagtgtgcttgcctgtgcaagaattggtgcaattcattcagtggtttttgcaggattttcatctgttgctctatcaactcgtatcaatgattgctcatgtagtatggtgattacttctgatggaagttatagaggtggaaaatcattaaatcttaagtcgattgttgatgaggctcttaattcatgtagcactgtaaacaaagtaattgttgccaaaagaaccaatgagtcaatcaatatgaataaggatcgtgatgtttggctaactgatgaattatcaaaag

SEQ ID NO: 309171 - DNA, 325 bp, Unknown
  Bacterial polypeptide expressing nucleotide sequence isolated from the Sargasso Sea
agttgctgaggcagcagttgtaggttttgaccaccctattaagggtcaaggtatatatgcttttgttactcttatgatagaagaatcattttctgatgatcttaataatgaattaaaacaatttgttgcaaaagaaatcggggcaattgcaaaaccagatttaatccaaaatgcgccagggctaccaaaaaccagatcaggaaaaatcatgagaagaattttaagaaaaattgctgaaaatgatttatctaatttaggcgatacaactacccttgcggatccctcagttgttaagtccttaattaataataaaataagtttatga

SEQ ID NO: 309172 - DNA, 589 bp, Unknown
  Bacterial polypeptide expressing nucleotide sequence isolated from the Sargasso Sea
aattgtagataagaatggagataaggttaaggagaacgagggtggatatttaattattaagaaaccttggccaggaatgatgagaacaattcacggaaactcagaaagatatttggagagttattgggaatatatttcctttaaaggagaaaaaaatgtttattctgctggagatggagcacgcattgatgaagatggatatatatggattatgggaagagttgatgatgtcattagtgtttcaggtcatcggttaggaacaatggaaatagaatctgctttggtaagtcataaatcagttgcagagtctgcagtcgttggcaaaaaagatgatttaaaaggtgaagttatagttgcttttgtatctctagagaaagatgtgaacggttcttcagaattagtagaggatctaaagaaacatgttgttaatgaaattggaattatcgcaaagcctgaaaagattataatttctgactctcttcctaaaacacgtagtggaaaaattatgaggcgaattttaagatctttggctgctggcgaaaaaatatgcggtgatataagcactcttgaagatagttctgttttggaa

SEQ ID NO: 309173 - DNA, 454 bp, Unknown
  Bacterial polypeptide expressing nucleotide sequence isolated from the Sargasso Sea
ggcgatggatgtcgaagagataaagatggatattactggatcactggtcgagtagatgatgtaattattgtttcgggacataatcttggaacagctgaaattgaaagtgcgtttgttgctcatccaaaagtagctgaagctgctgtagttggttaccctcatgatattaaaggtaatggtttgtattgttatgtaaccttgaatgcaggagaaagcgaaactggtgaactagaaagagatctaaaactttgggttagaaaacaaattggtcctttagcaactccagatctaattcattttactccaggtcttcctaaaacaagatcaggaaaaataatgagaaggattttaagaaaaattgctgctaatgagcacggtcaattaggagacacaactactctagcagatccaagtgttgttgatagtttagtagataatagaaaaaatatttaaa

SEQ ID NO: 309174 - DNA, 451 bp, Unknown
  Bacterial polypeptide expressing nucleotide sequence isolated from the Sargasso Sea
agagatgaggacggatatttctggattactggccgagtatacgatgtgttgaatgtttccggacacaggctaggcacagctgaaatcgagagcgctttagttttgcacgaaaaagttgctgaagcagccatagtcggttttgagcaccctataaaaggtcaaggaatatatgcatacgtcaccctaatgatcggagaggaagaaagcgaaaatttaataaaagacttacaaaattttgttgctaaagaaattagcccaattgcaaaacccgatcttattcagtgggcaccaggactaccaaaaacaaggtcaggaaagatcatgagaagaattttacgaaaagttgcatctggagaatttgataatcttggagatacctccaccctagctgatccaggtgtggtagatgatttaataaaaaataagcgtaatttaaaaaaaactaactaat

SEQ ID NO: 309175 - DNA, 796 bp, Unknown
  Bacterial polypeptide expressing nucleotide sequence isolated from the Sargasso Sea
ttctaactctattgagtctgttcttcaggagcagagagtttttcctccttctgaagactttgccagtaaaagtagaatctcatctttttctaagtatttggaaatgtcgcagatggctaaatcagatccaaataaattttggggtgatgcagctagagaagaattaaaatggtttaaagcttttgataaggtactggattggtccaatccaccattagctaaatggtttgatggaggtaaaataaatatttcttttaattgtttagatcgccacttaaatactcaagcagctgacaaacttgcgttgatttgggaaggagagccaggtgatcaaaaaaaatatacttataaacaattacacaaagaagtctgcaaagcagccaatgcactcaaatctcttggtattgagaaaggagatcttgtcgctttgtatatgcctatggtgcctgaagccgcaattgcgatgcttgcttgtgcaagaatcggagcaccacattcagtcgtgtttggaggcttttcatctgaggcgctaagagatcgattgattaatggtgaagcgaaagcaataattacggcagatggtggctttagaaaggataaagtaattcctctcaaagatgctgttgactcagcattagaaggtggtgcttgtccaaaggtcgaatcagtattagtcgttcagaggactaaaaaaactattgccatggatgatggtagagattattggtggcatgaaattgtagatagtcaatctgaagaatgtttgcctgaacaaatggatagtgaggattgctta

SEQ ID NO: 309176 - DNA, 265 bp, Unknown
  Bacterial polypeptide expressing nucleotide sequence isolated from the Sargasso Sea
aatcacggcgaagagccgtcccctgagctgtacgccgaagtgcgcaactgggtacgtaaagagattggcccgctggcgacgccagacgtgctgcactggaccgactcactgccgaaaacccgctccggcaaaatcatgcgccgcatattgcgcaagatcgcggcgggcgataccagcaatctgggcgatacctcgaccctcgccgatcctggcgtggtagagaaactgctcgaagagaagcaggccatcgcgatgccatcataac

SEQ ID NO: 309177 - DNA, 973 bp, Unknown
  Bacterial polypeptide expressing nucleotide sequence isolated from the Sargasso Sea
tactgatgaggctttaacaaattgtccaaatgttaaaaaatgtattatcgtaaaacggacaggtaattacgtcttttggaatgatgaaagggatgtttggtatcatgatttaatcaaagatgtaccagctcattgtgagcctgaggaaatgagtgctgaggacccactatttattctttacacatctggatcaacgggaaaacctaaaggagtattgcatactactggtggatatattgtttatgcttccatgacccatcaatatatttttaattataaaccaaaagatatttattggtgcacggctgatattggctgggtaacaggacatagttatataatttatggtccactttcaaatggagcaacaactataatgttcgaaggagttccaaattatcctgatagttcaagatggtggcaaattgtagataaatttaaagttaatactttttatacagcaccgactgcaataagggccttgatgagagagggagatcaaccagtaaaaaaaacatctagaaagtctttaaaattactagggactgtaggcgaacctataaacccagaagcttggatgtggtattataaaactgttggtaattctaaatgtcctattgttgacacatggtggcaaacagagacaggaggaattttaatttccccacaaactggtgctattccacttaaaccaggttcagcaacaaaacctttctatggaattaaaccggttattgttaataaagacggaaaagaaattaaaggagcgggcgaaggtagactttgtattgctcaatcttggcctggacaaatgagaacagtttatggagatcatcaaagatttatagatacatacttttcacagtttgatggaaaatattttacaggagatggatgtaaaagagacaaagatggatattattggattacaggaagagtagatgatgtaataattgtatctggtcataatctt

SEQ ID NO: 309178 - DNA, 890 bp, Unknown
  Bacterial polypeptide expressing nucleotide sequence isolated from the Sargasso Sea
tatataatttatggtccgctatctaacggtgctactactataatgtttgaaggaattcctacctatccagacaattctagatggtggcaaattgttgataaatataaagttaatattttttatacagcaccaacagctatacgtgcattgatgagagaaggtgataaaccggttaagaaaacatctagaaaaacactgaaattattgggaacagtaggagaacctataaatccagaagcttggcagtggtattataaaactgttggagattctagatgtccaatagtagatacttggtggcaaacagaaactgggggtattttaattagtcctcaaactggagcaataaatctaaaaccaggttcagcaacaaaaccattttatggaattaaaccagtaatagttgataagacaggtaaagtactaaaaggagaagcacaaggtagactttgtatagctcaatcatggcccggacagatgagaaccgtttatggagatcatcaaaggtttatagatacatatttttcacaatttgaaggaaagtattttacaggagatggatgtcgtagagataaagatggttactattggataactggaagagttgatgatgtaattattgtttctggtcataatttaggaactgcagaaatcgaaagtgcatttgtagctcatccaaaagtagctgaagctgcagttgtaggttttcctcatgatataaaaggaaatggattgtactgctatgtgaccttaaatgcaggtgaaaaacactccctagatttagaaagagaattaaaactttgggtaagaaagcagattggagctatagctactcccgatctaattcaattctcaccaggtctacctaaaaccagatcagggaaaattat

SEQ ID NO: 309179 - DNA, 738 bp, Unknown
  Bacterial polypeptide expressing nucleotide sequence isolated from the Sargasso Sea
gatgtacctgttaaaaaaactagtcgtaaatcacttaaacttttaggtacagttggtgaaccaattaatcctgaggcctggatgtggtattacaaaacggttggagaaaaaaaatgcccgatagttgacacttggtggcaaactgaaacaggaggtattctgatttccccccaacctggagctataaatttaaaaccgggttctgcaacaaaaccattttatgggatcaaacctgtaattgttgacgaagcagggaaaattttaaagggtgcctgtaaaggaagactttgcatggctcagtcttggccaggtcaaatgagaactgtttacggggatcatgaaagatttatagacacatatttttctcaatttgatggaaaatattttactggagatggatgtaggcgagacaaagatggatattattggataactggaagagtagatgatgtaataattgtttctggacataatttgggaacagccgagattgaaagtgcatttgtagctcatacaaaggtggcagaagcagccgtagttggttttcctcatgacataaaaggtaatggtctttattgttatgtaactctcaatgcgggcgaaaaagctgatggagatttagaaagagagttaaaactttgggtaagaaaacaaataggtcctattgcaactccagatcatattcagtttgctcctgggttaccaaaaactagatctggaaagattatgagacgtatt

SEQ ID NO: 309180 - DNA, 902 bp, Unknown
  Bacterial polypeptide expressing nucleotide sequence isolated from the Sargasso Sea
ggaaaagaggaaaagaattaattggatcaaaccttatacaaaaattaaagatgtaaaatatagtagttcggatgttagaataaaatggttttatgatggaactttaaatgcttctgctaattgtgttgatagacatctaaaaaaaaataaagataaaacagcaatcatatgggttggcgatgatccaaaagttcaaaaaaaaatatcttataaggaacttcacaaagaagtatctaaagcagccaatggattaaaagaaattggtattaaaaaaggtgatagggttacaatttatctaacaatgatacctgaattagcatatacaatgcttgcttgtgctagaattggggcaattcattcaattatatttgggggattttctccagatagtatttctggaagaattaatgattgtaaatctgattatgtaataaccgcagatgaaggtttaagaggtggaaaaacaatacatcttaaatctattatggatgaagctttagtagattgtccaaaagtaaagaaatgtgttgtagtaaaaagaacgggtaacagaattaattgggatcctagtagagatgtttggtatcatgaaatgatcaaaaatgtttctggtaaatgtgagccagaagaaatgaatgcagaagatccattatttattctttatacttctggatcaacaggaaaaccaaaaggagttttgcatactactggtggttatatggtttatgcatcgatgactcatcaatacatatttaattataaacccaaagatatttattggtgtacagctgatattggttgggtaacaggccatagttatataatttatggtccactatctaatggagcaactactataatgtttgagggaatcccaacttatcctgataattctagatggt

SEQ ID NO: 309181 - DNA, 616 bp, Unknown
  Bacterial polypeptide expressing nucleotide sequence isolated from the Sargasso Sea
aatgaaatttgatatcgatagttttgttaaccccaatttaaaagattttttagaataccaatctttatataatgattccgtaaaggatcctagcaatttttttcttaaacaggctttaaaagaaattgattggattaaggaaccaacgaaaggctcaacaggttctttatcttctccaaaatggtttgaagatggcatgttaaatatttcctataactgtattgatagacatgcagagaatcatccagaaaaaactgcaattatttggcaaggagatgaaagagaaaaaaatgaaaatatttcatacatacaattacaaaaacaggtatgcaaactagcaaatggtttgaaatcaataggtgtttcaaaaggagacagagtctgcatttatatgccaatggtgcctcaagcagcatatgcaatgtttgcttgcatgcgtattggcgcaattcattctgttgtatttggaggattttctcctgaagctattaaatctagaattctagatgcagattgcaattatgtgataacagcaaatgaagggataagaggtggaaaaaatattcctctcaaagatagtgtagatgaagcattgaaagattgccctaatggttaa

SEQ ID NO: 309182 - DNA, 865 bp, Unknown
  Bacterial polypeptide expressing nucleotide sequence isolated from the Sargasso Sea
gattgtagttctgagtatattattactgctgatgaagggattagagggggtaaaataattccacttaaaaacactgtagataaagctcttgaaacatgcccggatgtaaaaaaatgccttattgtaaaaagaacgggaaataaaataaatttaaaacaaggtagagatttatactttgatgaattaattaaaaatgttgatgattattgttctccagaaattgtaaatgcagaagacccactttttattttatatacatctgggtcaaccggtaaacctaaaggtgtgatgcatacatctggcggatatattgtgtatgcatcaattacacatgagtttatttttaattataacaaaggcgatatatattggtgtactgctgatataggttggataactggtcacagctacattatttatggacccttatcaaatggagcaactacattgatgtttgaaggtgttccaaattatcctgactattctagattttggcaaattgtagataagcatcaagtgaatattttttatactgctccaactgctattcgcgcattaatgcgagagggagatgggccagtaaaaaaaacaaagagaacttctcttaaattactaggcactgttggtgagccaataaatccagaggcttggaaatggtattttgagataccaggtaattcacgttgtccaattgtagatacttggtggcaaacagaaacaggggggatattaattgctccacaaacgggagcaattgaacttaaacctggatctgcatctaaaccattttttggaattgagccttgtattgttaataaagatggtgaagagctcaaaggtgagtgtgaaggaatgttatgttaaa

SEQ ID NO: 309183 - DNA, 660 bp, Unknown
  Bacterial polypeptide expressing nucleotide sequence isolated from the Sargasso Sea
atatatattggtgcacagctgatattggttgggtaactggacatagttatataatttatggacctttaagtaatggggctacaacattaatgtttgaaggtgttccaaactatcctgacttttcaagattttggcaaattattgataagcataaagtaaatattttttatacagcacccactgctattagatctttaatgcgagaaggaaatgattacgtaaataaaacaaatagatcttcattaaggcttttaggtacagtaggagaaccaattaatcctgaggcctggaaatggtattttgaagttccaggaaattcacaatgtccaatagttgatacttggtggcaaacagaaactggagggatattaatttctccacaaactggggcgataaaattaaaacctggttcagctactaaacctttttatggtattgaaccatgcatagttgataaagaaggaaatgaacttgaaggtgagtgtgaggggatgctgtgcatgaaaagatcatggccggggcaaatgagaactgtttatggggatcataatagatttgttgaaacatatttttctcaatttgatggtaaatattttacaggagatggttgtaaaagagactcagacggttactattggataactagggcgtgtagatgat

SEQ ID NO: 309184 - DNA, 262 bp, Unknown
  Bacterial polypeptide expressing nucleotide sequence isolated from the Sargasso Sea
tggattaaaaaatttacgaaaattaaagatataaaatattccaaagatgatgttagtattaagtggtttgaagatggcagtctaaatgtatcttataattgtatagataggcatgctgaaaataatcctgataaagttgctattatttgggaaggtgatgatccaaatgaaacaaagaaaataacctacagagaacttcttattaatgtatcgaaagcagcaaatgttctaaaaaaaattggagtaaaaaaaggtgatggag

SEQ ID NO: 309185 - DNA, 877 bp, Unknown
  Bacterial polypeptide expressing nucleotide sequence isolated from the Sargasso Sea
taaaactgcgattatttgggttggagatgaccctaaagatactcaaaaaatttcttataaacaattacatcaaaaagtttcaaaagcagcaaatggtctaaaaaaattaggaatacaaaaaggtgatcgtgtcactatttatttgacgatgataccagaattagcaattctgatgttggcttgtgcaagaataggggcaattcattcaataatttttggtggtttctctgcagagtcgatttcaggaagagtaaatgattgtaaatcagaatatataattactgctgatgaaggagtgagaggtggcaagactattcctttaaaagcaacaactgatgaagctttatcaaattgcccagatgttaaaaaatgtattgtggttaagagaaccggtaattatgtctattgggaacaaggtcgagatgtttggtatcacgacttaattaaagatgtcccaagttattgtgagcctgaagagatgaatgcagaggatccactatttatactttatacatcgggatcaactggaaaacccaaaggagttttacatactactggtgggtatatggtttatgcttccatgactcatcaatatatttttaattataaaccaaatgatatttattggtgtacagcagatataggatgggtaactggtcatagctatataatctatggaccgttagctaatggtgcaactactattatgtttgagggcgttccaaattatccagacagctcgagatggtggcagatagtagacaaatataaagtcaatacgttttatacagcaccaacagctataagagctttgatgagagaaggtgatggtccagttaataaaacctctagaaaatccctaaaactattaggaact

SEQ ID NO: 309186 - DNA, 853 bp, Unknown
  Bacterial polypeptide expressing nucleotide sequence isolated from the Sargasso Sea
ggagctatacattccatcatttttggaggtttttctgctgattctatagctggtagaattaaagattgtaaatcagaatatgtagtaaccgcagatgaaggaattagaggtggaaaatctattcccttgaaattaacaacagataaagcactagaaacatgtcctgatgtaaaaaaatgtttagttgttaaaagaactaataaagatataaaattaaaaaaagaaagagatttattttatgatgatctaataaaagaagttgatagcatttgtgaaccagaaattttaaatgccgaagatccattgtttattttgtatacctcaggatcaactggtaaaccaaaaggtgttatgcatacatctggtggttatatagtttatgcatcaatgacacatgaatatatttttaattataatgctggagatatatattggtgtactgcagatataggttggattactggtcacagttatatagtttacggaccacttgctaatggtgcaacaactttaatgtttgaaggtgtcccaaattatcctgacttttctagattttggaaaatagttgataaacataaagtaaatatattttacacagctccaactgcaataagagcattaatgagagaaggtgatgattttgttacaaaaactgacagatcatcattaaaacttttgggaacggttggagagcctataaacccagaagcatggaagtggtactatgaaattccaggtaattcaaaatgtccaattgtagatacttggtggcaaactgaaacaggaggaattttaatttcacctcaaactggtgctataaaattgaaaccaaggatctgcctcaaggcctttc

SEQ ID NO: 309187 - DNA, 748 bp, Unknown
  Bacterial polypeptide expressing nucleotide sequence isolated from the Sargasso Sea
atggattttgacttaaaagatgatgatatttactggtgtactgctgatgttggttggattacaggtcatagttatatagtttatgggcctttatctaatggtgctacaacattaatgtatgagggagtgccaagaccttcaaatttaggtgctttttgggaaattgttcaaaaatataaggtttctattttttatactgcaccaactgcaataagagcatttatgaagtctgggcgtgaaatacctgataaatataatttggagagtcttagacttttgggcacagttggagaaccaattaatcctgaagcatggatgtggtacagggatgttattggtaaagataaatgccctattgttgatacttggtggcaaactgagactggtggtgtgatgataagtcccttgcctggagtcgttgctacaaagccaggttcagctactttccctctgccaggaatcgaagttgaaatcgtcgataagaatggagataaggttaaggaaaacgagggtggctatttaattattaagaaaccatggccaggaatgatgagaacaattcacggaaactcagaaagatatttggagagttattgggaatatatttcctttaaaggagaaaaaaatgtttattttgctggagatggagcacgcattgatgaagatggatatatatggattatgggaagagttgatgatgtcataagtgtttcaggacatcggttaggaacaatggaaatagaatctg

SEQ ID NO: 309188 - DNA, 724 bp, Unknown
  Bacterial polypeptide expressing nucleotide sequence isolated from the Sargasso Sea
attgtcgacacctgggtggcaaacagaaaccggagcaatgatgataactggcctagcagctttaacatctcagaaacctggcagtgcttctaagccatttcttggagtaaatcctgtgcttctggatgaaaatggcaaagaaatatctggagtaggttcaggtaatttagccatcaaagatccatggccctctcaaatcagatcagtgtatggagatcatcaaagatgcattgatacatattttaaaacttaccctggatattattttactggggatggggctaaaagagatgaagatggatatttttggataacaggaagggttgatgatgttttaaatgtctcaggacataggcttggcaccgctgaaatagaaagtgcattagtcttgcatgagcaggtcgcagaagctgctgttgttggttatgaacatgaaatcaaagggcaaggaatttactgttacgttaccctaatgataggttacttgggtgaagactctctaaagaaagaattagtggatttgatagctaaagagattggtgccatcgctaaaccagatattattcaattttctcctgacttgcctaaaacgaggtcaggaaaaattatgcgaagaattttgagaaaaattgctgcaaatgagatctatgatcttggagatacgacaacccttgctgatcctagtgtagttgaccatttgatcaacaatcgattaaataaatag

SEQ ID NO: 309189 - DNA, 552 bp, Unknown
  Bacterial polypeptide expressing nucleotide sequence isolated from the Sargasso Sea
tagccgactcttggcctggacaaatgcgatcagtttatggtgatcatgaaagatttatagctacttatttttctcagtttgtaggtaaatattttacaggcgatggttgtcgacgtgatgaagacggttattactggatcactggtagagttgatgatgtgataaatgtatccggacaccgaatgggcactgcggaagtagagtcagctttagttgctcatccaaaagttagtgaggctgcggttgttggctatccacatgacattaaaggacagggtatttatgcttatgttactctgaatgctggtgaacaaacttctgatgaactttacaaagaattgattacatgggttaggaaagaaattggaccaatcgcatcaccagatctgatccaatgggcccctggtcttcctaaaacaagatcaggaaaaattatgagaagaattttaagaaagatagctgaaaatgattatggtaatctaggtgatacatcaacacttgccgatcctacggtggtagatgatctaattaataatcgtatgaataaatagt

SEQ ID NO: 309190 - DNA, 414 bp, Unknown
  Bacterial polypeptide expressing nucleotide sequence isolated from the Sargasso Sea
cgggccgggtagatgatgttataaatgtgtcgggtcatagaatggggacggcagaggttgagagtgcgcttgttgctcaccctaaagtttcggaagccgcagtggttggtttcccacataatatcaagggacaggggatttactgctatgtgacactgatgtctggagaaactcctactgaagaacttcggttggaactaagaaattgggttcgcaccgaaattggaccgattgcttctccggatctcattcagtgggcacctggtttaccaaaaacgcgatctggcaaaattatgagacgcatattgagaaaaatcgctgaaaatgactacggttctttaggagatacatctacattggcagagcctgctgttgtagatgatcttataataaatagaatgaatgacgcttaat

SEQ ID NO: 309191 - DNA, 928 bp, Unknown
  Bacterial polypeptide expressing nucleotide sequence isolated from the Sargasso Sea
acagcttcaccaaaaagtttctaaagctgcaaatggtttaaaaaaattaggaattaaaaaaggagatcgagtaacaatttatttaacgatgataccagagttagcgattttaatgctggcctgtgttagaattggtgcagttcattcgattatttttggaggtttttcagcagattctatttcgggaagagtgaatgattgcgaatctgaatatataatcactgctgatgaaggagtgcgtggtggaaaaactataccactgaaatatacagttgatgaagctctaatgagttgtccaaatgttaaaaaatgtattgttgttaaacgaacaggtaattatattaactgggatcaaaatagagatgtttggtatcatgatttgatcaaagatgttcctaatcattgtgaacctgaagaaatgaatgctgaggatccgttatttattttatatacttctggttcgacaggtaagcctaaaggagttcttcatactactggtggttatatggtttatgcatcaatgactcatcaatatatttttaactacaaaccaaaagatatttattggtgtactgctgatattggctgggtaactggacatagttacattatttatggaccactttcgaatggtgcaacaactataatgtttgagggaattccaaattatcctgatagttcaaggtggtggcaaatagttgacaaatataaagtgaatactttttatacggcaccaactgcaattagagctttaatgcgtgagggagataaaccggttaaaaaaacatctagaaaatcacttaaacttttaggaactgtaggagagccaataaatccagaagcttggatgtggtattataaaactgtgggtaattctaaatgcccaattgtagatacatggtggcagacagaaactggaggtataatg

SEQ ID NO: 309192 - DNA, 661 bp, Unknown
  Bacterial polypeptide expressing nucleotide sequence isolated from the Sargasso Sea
gatagatttaaaacctggttctgcaacaaaaccatttttcggaattaaaccagagatcctagataaagatggcaaggttttaaaaggagaagcgcaaggtagactttgtatttcacaatcgtggcctggacaaatgagaagtgtctatggagatcatcaaagatttatagatacttatttttcacaatttgatgggaaatattttacaggcgatggctgcagaagagataaggatggatactattggattacaggaagagtagatgatgtaataattgtttctggtcataatttatgtactgcagaaattgaaagtgcgtttgtagctcatccaaaagtggctgaagcagcggtagttggttacccacacgacataaaaggaaacggtctatactgttatgtaactttaaatgctggagaaaaaagtactcttgatttagagagagatttaaaactttgggttagaaaacaaattggtccaatagcaactcctgacttaattcaatttgctccagggctaccaaaaacaagatcgggtaaaataatgagaagaattctaagaaaaattgctgccaatgaacatggtcaattaggagatacaaccactttagctgatccctctgttgttgaaagcttggtcgataatagaaaaaatatttag

SEQ ID NO: 309193 - DNA, 847 bp, Unknown
  Bacterial polypeptide expressing nucleotide sequence isolated from the Sargasso Sea
tgtgagtctgaatatataattacagcagatgaaggtgttaggggcggaaaaactattccattaaaagaaacaaccgatgaagcattagagagttgtcctaatgtaaaaaaatgcattgttgttaaacgtacaggtaattcaattagttggaattatgatagagatgtttggtatcatgatttaattaaagatgttccttctcagtgtgagccagaagaaatgaacgctgaagatcctttatttattttatacacatcaggttcaactggaaaaccaaagggagttttacacacaacaggtggatacatggtgtatgcatcaatgactcatcaatatatttttaattacaaaccaaaagatatttattggtgtactgctgatattggttgggtaacaggtcacagttatattatctatggtcctctttcgaacggtgcaacaactataatgtttgaggggataccaaactatcctgatagttctaggtggtggcaaatagtagataaatacaaagtaaatattttttatactgcccccactgcaatcagagctctaatgagagaaggtgataagcctgtaaagaaaacatcaagaaaatctttaaaattacttggaactgttggtgaaccaataaatccagaagcttggatgtggtattacaaaacagttggaaattctaagtgcccaattgtagatacatggtggcagacagaaacaggagggatattaattgctcctcaaacaggtgctattcctttgaaacctggctctgcaacaaaacctttctatggaataaaacctgtacttgtcgataaagagggtaaagaaataaaaggacctgagaagg

SEQ ID NO: 309194 - DNA, 792 bp, Unknown
  Bacterial polypeptide expressing nucleotide sequence isolated from the Sargasso Sea
tttggctaaaaaatataaggaaatttacgattcttcgataaataatagggaagaattttggaaaaaaatctctgaagatatattttggtacaaaaaacctactaaaatattaaacggaaataatccacctttttacaaatggttcgaggacgggataactaacacttgttacaatgctttagattatcatatcgataaaggcagaggagataagctggctataatttatgatagtccaattacaggtgtccaaaaaaaaatttcatataaagaattaagggaaagagttgctttgttcgctggagctctaaaaaaacaaggaattaaaaaaggagatagagttataatttatatgccaatgataccggaagctgttattgccatgttagcctgtggaagaattggcgcagtacattctgttgtttttggtggctttgcggccaatgaacttgccagcaggattgatgattcaaaagcaaaattaattgtttcagcatcttgtggttatgaacctggaagaacagttcattataaacctttagttaacaaagctttagaacttgcaaatcataaacctgacaaatgtattatttttcaaagagagaaagataaagctgaactaaattcaagcatggatatttcatgggaagactcccttaaagatgttaagccagctgaatgtgaaaaaatgaactctaatgactacgcatacattctttacacctcaggaacaactggtttgcctaaaggcatcgttagagatattggggggcacattgtagctcttaaatg

SEQ ID NO: 309195 - DNA, 877 bp, Unknown
  Bacterial polypeptide expressing nucleotide sequence isolated from the Sargasso Sea
attaatagtggtgcagataaagttgttgaaaaagtagttgttgttcaaagaactaaaaaaaatatttccatggttgatgatagagatttttggtggcacgaattattaaaagatcaaaaagaatggtgtgaacccgaaatcatgaatagcgaagatagactttttgttctttatacttcgggctctacgggaaaaccaaaaggtgtagttcatactacgggtggttataatctttggtcccatttgacatttaaatggatttttgatgtaaaagataatgatatttactggtgcactgctgatgttggttggatcacaggtcatagttatatagtttatgggcctttatccaatggcgctacaacgttaatgtttgagggagtgccaaggccttctaatctaggagctttttgggaaattgttcagaaatataaggtctcgattttttatactgctccaacagcaataagagcatttatgaagtctggacgtgaaattcctgataaatataatctagagagtcttagacttttgggcacagttggagaaccaattaatcctgaagcatggatgtggtacaaagatgttattggtaaaaataaatgtcctatagttgatacttggtggcaaactgaaactggtggtgtgatgataagccctttgcctggagttgttgccacaaagccaggttcagctacttaccccttgcctggaattgaagttgaagtcgttgataagaatggagataaggtaatggagaatgaaggaggttatttaattattaagaagccttggccaggaatgatgagaacaattcatggaaactcgaagaggtatttggagaattattgggaatatatttccttaaaggagaaaa

SEQ ID NO: 309196 - DNA, 879 bp, Unknown
  Bacterial polypeptide expressing nucleotide sequence isolated from the Sargasso Sea
catgcctaagaaaaaaaaagtaatctctaaaaaacctaaagagacaatttataaaactaagaaagaatggataagtaaagctaccgttaataaatctcaatatataaagaaatataacgagtctattaaagataacgaaggattttggaaaaaagaaggaaaaagaattaattggattaaaccttataaaaaaattaaagacgtcaaatacagcaaagatgatgtccacatcaaatggttctatgatggtactttaaatgcttcagcgaattgtattgatagacatcttaaaaaaaacgcaaacaaaactgctattgtttgggtgggagacgatccgaaagttcaaaaaaaaattacatataaagaacttcataaagaggtttcaaaagcagcaaatggattaaaaaatctaggagttcaaaagggcgacagagtaacaatttatcttaccatgataccagaacttgcctacacaatgcttgcatgtgctagaataggggcagttcactccattatatttggaggtttttcaccagatagtatttcaggtagaattaatgattgtgaatctgattatgtaataactgcggatgaaggtgtaagaggtggtaaaacaatccctttaaagtctattacagatgaagctttacaaagctgtcccaacgtaaagaaatgtatcgttgtcaagagaacaggttccaaaaaaattgattggtacaatgatcgtgatgtttggtatcacaaaatgataagtaaagtctcagcaaaatgtgagcctgaggaaatgaatgctgaagatccattattcattctttatacatctggttcaactggtaaaccaaaaggtgtgttacatacaactggcggatacatggttta

SEQ ID NO: 309197 - DNA, 951 bp, Unknown
  Bacterial polypeptide expressing nucleotide sequence isolated from the Sargasso Sea
gatgagggagttagaggtggaaaaataattccgcttaaaaaaatcgctgacgaagctttagatcaatgccctagagttaaaaaatgtgtagtagttgaaaggactggtaatcaggttgattggaataacgaaagagacgtttcttataaagaattaatttcatccgtgcctgccaaatgtgaacccgaagaaatgaatgcagaagatccactatttattctttatacatctggttctactggcaaaccaaaaggtgttcttcatacaacaggtggttatatggtttatgcatcaatgactcaccaatatatttttgattataaggcaaatgatatttattggtgcactgcagacattgggtgggttacagggcacagttatattatttatggcccgctttcaaacggggccactactataatgtttgaaggaattcccaattatcccgacagttcaagatggtggcaaattgtagataaatataaagtaaatattttttatactgctccaacagcaataagggctttgatgcgagagggagataagcctgtaaaaaaaacaagcagaaaaacactaaaattattaggaactgttggagagcccataaatccagaggcttggatgtggtattacaaaacggttggggactctagatgtccaatagttgatacatggtggcaaacagaaactggaggaattttaattgcacctcaacctggcgccatagatttaaagccaggctcagcaactaaacctttttacggcatcaaaccagttttagttgataaagatggtaaaactgtaaagggggaaggtaagggaagactttgtatggctacttcttggccaggtcaaatgagaacagtttatggagatcatcaaagatttatagatacatatttttctcaatttgatggaaatattttactggggacggatgcagaagagata

SEQ ID NO: 309198 - DNA, 899 bp, Unknown
  Bacterial polypeptide expressing nucleotide sequence isolated from the Sargasso Sea
aagggatatatcttatgatgaaatgattaaaaatgtttctgacaaatgtcctccagaagaaatgaatgctgaagatccaatgtttattctttatacctctggttcaactggaaagccaaaaggagttttacatactacgggcggttacatggtctatgcatccatgactcatcaatacatatttgattataaaccaaaagatatttatttttgtagtgcggatattgggtgggtaactggtcatagttatattgtttatggtccactctcgaatggtgcaacgactattatgtttgaaggggttcctacttatcctgacagttcaagatggtggcaaataatagataaatataaagttaatattttttatactgctccaacagcaattcgggcactgatgcgagaaggcaatgatcctgtaaaaaaaacaagcagaaaatcattaaaattgcttggtactgttggtgaaccgataaatccagaagcttggatgtggtactacaaagtcgttggggattctaaatgcccaatcgttgacacatggtggcaaactgaaaccggtggaatattaatttcaccgcagcctggagcaatcaatttaaaaccggggtctgctacaaaacctttttatgggattaaaccggctattgtcgacgaaaatggaaaagtaataaaaggagcaggcaaaggcagactttgtatgcttcaatcctggcctggtcagatgagaacagtttatggagaccatgaaagatttataaaaacatatttttcacaatttgatggaaagtactttactggtgatgggtgtagacgtgataaagatggatattattggataacaggaagagttgatgatgtcattatagtttcaggtcataatttaggacccgcagaaa

SEQ ID NO: 309199 - DNA, 364 bp, Unknown
  Bacterial polypeptide expressing nucleotide sequence isolated from the Sargasso Sea
tttaaatggatttttgacttaaaagatgatgatatttactggtgtactgctgatgttggttggattacaggtcatagttatatagtttatgggcctttatctaatggtgctacaacattaatgtatgagggagtgccaagaccttcaaatttaggtgctttttgggaaattgttcaaaaatataaggtttctattttttatactgcaccaactgcaataagagcatttatgaagtgcgggcgtgaaatccgtgataaatataatttggagagtcttagacttttgggcacagttggagaaccaattaatcctgaagcatggatgtggtacagggatgttattggtaaagataaatgccctattg

SEQ ID NO: 309200 - DNA, 477 bp, Unknown
  Bacterial polypeptide expressing nucleotide sequence isolated from the Sargasso Sea
aatttgatgggaaatattttactggtgatggatgcaaaagagacaaagacggatattattggattacaggaagagtagatgatgtaattattgtgtctggacataatttaggtacagctgaaatagaaagtgcttttgtgtctcataaagatgtttctgaagctgcagtagttggataccctcatgatgttaaaggtaatggtttatactgttatgtttctctaaaggttggagtagatccatcagaagatttagttgtagatttaaaaaaaactatcagagaaaaaattggtcctattgctacaccagacttcatacatattgcaactggcttaccaaagacaaggtctggaaaaatcatgaggaggattttaagaaaaattgcttctaatgattttgaaaatttaggagacacttcaaccttagcagatccttctgttgtaaataatttaattgaaaatagaaaaaataaataaa

SEQ ID NO: 309201 - DNA, 496 bp, Unknown
  Bacterial polypeptide expressing nucleotide sequence isolated from the Sargasso Sea
aaccgtttatggggatcataaaaggtttattgaaacttattttagtcaatatgatggttactatttcactggagatggatgtaaaagagatgaagacggctattattggataactggaagagtagatgatgttataaatgtttctggtcatagaatggggacagctgaagtagaaagcgccctagtttcacatgaaaaagtatctgaagccgctgttgtaggctttcctcatgaaattaaaggtcaaggaatttatgcatatgtaacccttaatgctggagaaaaaggtaacgaagaaattagaaaaaagttaataaaatgggttagaaaagaaattggtccaatagctagcccagatttaattcaatttgcaccaaatttacctaaaacaagatcaggaaaaatcatgcgtcgtatcttaagaaaaatcgctgaaaatgactattcagaattaggtgatacatcaacgctagcagaaaccgatggtagtcgatga

SEQ ID NO: 309202 - DNA, 817 bp, Unknown
  Bacterial polypeptide expressing nucleotide sequence isolated from the Sargasso Sea
aatctacgatagtcctattacaggtaacaaaagtcagttcacttatgaggaattaaggtcaaaggtctctaggtttgcaggggcattgaaagctcaaggtgctaataaaggggatcgggtgattatttacatgccaatgatacctgaagctgtagttgctatgcttgcttgtgctagaattggcgcaattcactctgttgtttttggaggatttgcttctaatgagcttgccagcagaatagatgacagtaaagcaaagttattagtaactgcttcatgtggttttgagccaggaagaactgttgagtataagccactagtagatgaagctataaaaatagctcatcataaaattgagaagatgattttgttccaaagacctggaaatgaggtcaaactaaatgcacctaacgaggtcagttgggaagaagttgtctctaatgctaaagatgcagactgtgttgagatgaactcaaatgagtttgcctatattttatatacatcagggacaactggtactccaaaagggatagttagagatattggaggtcacattgttgctctaaagtggactatgaaaaatatatacaacatagatacagatgatatttggtggtctgcaagtgacattggttggattgttgggcactcttatattgtttacgctccattattcaaaggatgcactacagttttgtttgaaggtaagccagtaggaacacccgatgccggtgctttctggaaaatcatttctgattataaagtaaaatctctttttacagcccccacagcttttagagctattaaaaaagaggat

SEQ ID NO: 309203 - DNA, 886 bp, Unknown
  Bacterial polypeptide expressing nucleotide sequence isolated from the Sargasso Sea
tggattactggacattcatacattatctatggacccatggcgaacagagctatcacaatgatgtttgagggtgttcctaattatcctgattttggaagattctgggagataatagaaaaacataaagtcaacaaattttacactgcacctactgctttacgcgctctaatgaaagagggagacgaatggcctaacaaatataatttgaacagtttgaaaatacttggaaccgttggtgaacccataaaagaacctgaatggttatggtatcataatgtaatagggaaacaaaaatgtcctattgtagatacttggtggcaaactgaaactggaggtgttatgattactccacttccgggagttacttcaacaaaacctggttctgccacacttcctttctttggggtagttcctgaactattagatgatgaaggaaatgtcctagaaggaaataatgttgaaggaaatttagccatccaaagaccctggcctagcataatgagaactgtatatggcgatcatcaacgctttttcgaaacatatttcgagaaattccctgggaaatatttttcaggtgatggttgtaagagagatgaagatgggtactattggataactggaagagttgatgatgttattattgtctccggacataaccttggtactgcagaaatagaaggatcaatcggtgggcacccttcagttgctgaagcggcagtagtgggttatcctcatgaaataaaaggaaatgcaatctatgcctttgtaacattaagaactggacatggagtaacagacaatactagaagcgaaattatcaagagagtaagggctgatattggacctcatgcatcccctgaaaagattcaattcacggaaggatgcc

SEQ ID NO: 309204 - DNA, 781 bp, Unknown
  Bacterial polypeptide expressing nucleotide sequence isolated from the Sargasso Sea
catgcctaaaaaaaaagtaaaaaaaagaaaaaaaaaaataatcacaaaaaaaaaaactaaggcaaagtctttagctccacagcaagaaaaagaacttatatatagaacaaagaaagactggattagcaaagctctagtaaataaatctcagtacgaaaaaaaatataaagcttctataaaagataatgatggattttggaaaaaagaaggaaaaagaattaattggataaaaccatatacaaaaattaaagatgttaaatatagtaaatcggatgttaagataaaatggttttacgacggtactcttaatgcatcagcaaattgtattgatagacacttaaaaaaaaataaagacaaaactgcaattatatgggttggagatgatccaaaagttcaaaagaaaatttcctacaaagaattacacaaagaagtttctaaagctgcaaatggtcttaaagaattaggggttaaaaaaggcgatagagttacaatttatttaactatgataccagaacttgcatatactatgttagcttgtgcaagaataggagcaattcattcaataatttttggaggcttttctcccgatagtatttctggacgaataaacgattgcgagtctgattatctaattacagctgacgaaggtgtaagaggtggaaagataattccattaaagtcaatagctgatgaggctttagtaaattgcccaaatgtaaaaaaatgtgttgttgttaaaagaacgggcaatagaataaattgggatgagcgaagagatgtt

SEQ ID NO: 309205 - DNA, 513 bp, Unknown
  Bacterial polypeptide expressing nucleotide sequence isolated from the Sargasso Sea
tatgagtgagcagaaaatatttgaaattcctgcgtctgctaaagaaagagcattgatagacaatgacacctatttaaagatgtatcaggaatctgttgaagatccggaggttttttgggaaaaacaagccgatagattggactggttcaaaaaatgggaccgaacttttgattgggattacagtaaggcttatatacgatggtatgaaggaggcaaacttaacgtttcttataattgtttggacaggcacttggaagaacgtggagaacaaaaggcactgatttgggaatcagatgatccaaacctcgatcgaagctttacttacaagcaacttcattcagaagtgagtaaatttgctaatgtaatgaaggcgttcggagtggtaaaaggtgatagggttatgatatatatgcccatgatacccgaactggcaatagcatgtctggcatgtgccagaattggcgcagtacattcagttgtatttggcgggttcagctcagaggcacttaaaac

SEQ ID NO: 309206 - DNA, 775 bp, Unknown
  Bacterial polypeptide expressing nucleotide sequence isolated from the Sargasso Sea
gaagcgtggatgtggtatcacgaaaatattggaaatgagcaatgcgctattgttgatacatggtggcagacagagacaggttctattatgatttcacctctgcctgggataaccagtacaaagccagggtcagcatgtggaccattacctggagttgactctgtcattattgatgaaaaaggcaatgaagttggaaaaggtgaaggaggttatcttgcaattaagtctccttggccatccatgttaagaactgtatatggagacgataaaagatatattgatacatattggtctcaacacgaaggcctgtactttgctggtgatggcgctaaatatgacgatgatggttatgtttggcttcttggaagagtagatgatgtaatgaatatctctggtcatagaatctctaccgctgaagtagagagcgcactagtctctcatgaatctgttgctgaggctgccgtaattggcagatccgatgagataagtggagaagcaattgctgcatttgtttcattgattggaacagatgcaggagatgaaaaattaatatcagaattaaggcaacatgtaagcgacaagattggacctatagcaaaaccaaagagcattgtaattacagctgatcttccaaaaacaagaagtggaaaaatcatgagaaggttattaaaagatatttcagaagaaagaaaattgggtgatgtaactacacttgcaaatgctgatattgtctctgaattgcaacagaggtcatcagaaagtgatgaagattaat

SEQ ID NO: 309207 - DNA, 751 bp, Unknown
  Bacterial polypeptide expressing nucleotide sequence isolated from the Sargasso Sea
ttttggaaaaaagagggaaaaagaattaattggattaaaaattataaaaaaatcaaagatgttaaatatagtaaagatgatgttcatatcaaatggttctatgatggtactttaaatgcctcagcgaattgcattgataggcatcttaaaaagaatgctaataagactgcgattatatgggtaggagacgatcctaaaattcaaaaaaaaattacatataaagaacttcatagagaggtttcaaaagcagcaaatggattaaaaaatctaggagttcaaaaaggtgatagagtaacaatttatcttaccatgataccagagcttgcctacacaatgcttgcatgtgctagaataggtgcagttcactcaataatatttggtggtttttcaccagatagtatttcaggcagaattaatgattgcgaatctgattatgtcataactgcagatgaaggagtaagaggtggcaaaacaatccctttaaaatctattacagatgaagctttagaaagctgtcccaatgtaaagaaatgtatcgttgtaaagagaacgggtactaaaaagattgattggtacaatgatcgtgatgtttggtatcacaaaataacaagtaaagtttcaacaaaatgtgagcctgaagaaatgaatgctgaagatccattattcattctttatacatctggttcaactgggaaaccaaaaggtgtactacatacaactggaggatacatggtttatgcatctaatgact

SEQ ID NO: 309208 - DNA, 816 bp, Unknown
  Bacterial polypeptide expressing nucleotide sequence isolated from the Sargasso Sea
cagcaaatgctcttaaaaaaattggagtaaaaaagggggatagagtaactatttatcttactatgattcctgagctagcttatgtaatgttagcatgtgcaagaattggtgctgttcactcaataatatttggaggtttttcatcagaatcaattgctggaagaattgctgattgcaattcaaaatatttaatcacagcagatgaaggcttaagaggagggaaaaaaattcaactcaaaaatattgcagataaagctcttgaaaactgtcctgatgttaaaaagtgtttggttgttagatatacaaatggctcaataaatttagttaaggatagggatatttatctagatgatattttatctaaggttgacgataattgtccagcagaagagatgaatgctgaagatcccttatttattttatacacctcaggatcaacaggaaagccaaaaggtgttctacacactactgggggatatcttgtatatgcatcaatgacacatgagtatgtttttaactataacaaagatgacatttattggtgcacggctgatataggttggataacaggtcacagttatataatttacggacctttatcaaatggagctactacattaatgtttgaaggggtaccaaactatccaagcttttctaggttttgggaaatcatagataagcataaagttaatattttttatacagcaccaacagcaatcagagcattgatgagagagggtgataaatttgttaaaaatacagatagatcatcattaaaaatattaggtactgttggagaacgcaataaatcctgag

SEQ ID NO: 309209 - DNA, 360 bp, Unknown
  Bacterial polypeptide expressing nucleotide sequence isolated from the Sargasso Sea
ggttagggacaatggaaatagaatctgctttggtaagtcataaatcagttgcagaggctgcagtcgttggcaaaaaagatgatttaaaaggtgaagttatagttgcttttgtatctctagagaaatacgttaacagttcttcagaattagtagagagtttaaagaaacatgttgttaatgaaatcggaattatcgcaaagcctgaaaaaattataatttctgactctcttccaaaaacacgtagtggaaaaattatgaggcgaattttaagatcattggctgctggagaaaaaattagcggtgatataagcactcttgaagatagttctgttttggaaaagttgaaagaattatcttaac

SEQ ID NO: 309210 - DNA, 679 bp, Unknown
  Bacterial polypeptide expressing nucleotide sequence isolated from the Sargasso Sea
ttgaagacttttttatgcctaataagtattgattttacttactttttaaaattaaatgcaacctattacataaaatcattaaaaaatggcaaatcaaaacaaatcacaatgaataaaagtttaaaagaaatttattcagaatcaattaataatcctgaaaaattttggcaagaagtttcagaagatattttttggtataagaaaccaacaaagattttaaataaatctaatcctcctttttataaatggtatgaagacggtataactaatacttgctataatgctcttgatttacacattgaccaaggaaagagcgataaggttgcgcttatttatgatagtccaattactggaaataaagcaaagtttacttttaaagaattaaaagacaaagtttcactatttgcaggagcattagataatcaaggcattaaaaaaggtgatcgtgtagttatatacatgccaatgattcctgaggcagtggtagctatgttagcatgtgggagaattggagcaatacattcagttgtttttggagggtttgcatcaaatgaacttgcaagtcgtattgatgatagtaaagcaaaaatattaattactgcatcatgtggttttgaacctggaagaacagttgaataccgtcccttagttgatggagcaattaaactggcaaagcata

SEQ ID NO: 309211 - DNA, 457 bp, Unknown
  Bacterial polypeptide expressing nucleotide sequence isolated from the Sargasso Sea
tgtgatggttgtcgaagagacaaagacggttactactggattacagggagagttgatgatgtaattatagtttcaggccataacttaggcactgctgaaattgaaagtgcttttgttgcacatcctaaagttgctgaagcggcggtggttggctttccccatagcattaaaggaaatggtttatactgttatgttactttgaacgctggagaaagtcctacgggagatttagaaagagatttaaaacaatgggtgagaaaacaaatcggccctatttgctatcccgatgttattcaatttgcgccaggtctaccaaaaacaaggtctggaaaaattatgagaagaattttaagaaaaattgctgctaatgaacctgataatcttggagacactacaaccttagctgacccaagtgttgtaacttcgttagttgaaaataggcaaaatagagattaat

SEQ ID NO: 309212 - DNA, 739 bp, Unknown
  Bacterial polypeptide expressing nucleotide sequence isolated from the Sargasso Sea
atttataatcctaatcccggattttcaaatccgcatataaaagattttgatgaatacttaagtctatataaagagtcaattgagaatcctgaaaaattctttggcgatctggcaaaagaaaatatttcatggattgaagattttaaagaggtacataactctgaattccaggaaactaaatggtttgttggaggaaaaacaaacataacgctcaactgtattgatagacaccttgaaaaagatggcgataaggttgccttaatttgggaaggtgatgagccaggaaactctaaagagataactttcaaagaattacactctgaggtttgcaggtttgcaaatatccttaaaacacttcaaattaaaaaaggctccagagtttgtatttatatgccgatgattcctgaagctgcatttgcaatgtttgcatgtgcaagaattggtgcgatccattcagttgttttcggtggattttctccagaatctttaaaggataggattctggatgctgactgcagaattgtaattactgctgatgagggtgttcgaggcggtaaaaaggttcctttaaaagataatgttgatgaagccctaataaattgtcctgatgttaagaatgtaatcgttgttaatcgaaccggcggaaaaattaattggtttgaggatagagatctttggtttcatgaactaaaagataaagttgatgatgtttgcgagcctgagccgatggattctgaag

SEQ ID NO: 309213 - DNA, 439 bp, Unknown
  Bacterial polypeptide expressing nucleotide sequence isolated from the Sargasso Sea
atgttcgagatcacccgtcaccccgtggcagacgcggtgcgccagcgtgcacacctagataacgacgcctatctgcgcctttaccagcagtccgtcgagcagcccgataccttctgggccgagcaggccaaggccttcctcacctggttcaagccctgggaccaggtccacagcagcgacctgaaacagggccgcgccgagtggttcaagggcggccagctcaacgtcgcctacaactgcatcgaccgccatctgcaacagcgcggcgagcaggtcgccatcatctgggaaggcgacaacccggccgagtcggcgcacatcacctacaacaagctgcaccacaacgtcaatcgcctggccaacgtgctcaagcgccgcggcgtgaagaagggcgaccgagtgtgcatctacatgccgatggtgccggaggcggcctacg

SEQ ID NO: 309214 - DNA, 845 bp, Unknown
  Bacterial polypeptide expressing nucleotide sequence isolated from the Sargasso Sea
gcagggcgagagagatgccgaggagacacccacaatgaccgcacacagcacctacgccgacttctaccgccagtccatcgaccaccgcgacaccttctggagcgagcaggcgaagctgatcgactggaagacgccgccccagcaggtgtgcgactacagcaacccgccgtttgccaaatggtttgtgggcggcaccaccaacctgtgccacaacgcggttgaccggcacctgaccacgcgcgccagccaggcggcgctggtggcaatatcgacagaaaccgacaccgagcgcagctacagctttgccgagctgcacgccgaggtgcagcgcatggcggccgtgctgctgtcgctgggcgtgaagaagggcgaccgcgtgctcatctacatgcccatgattgccgaggccgcgtttgccatgctggcctgcgtgcgcattggcgcgctgcattcggtggtgtttggcggctttgcctcgggctcgctggcctcgcgcatcgaagacgccgagcccgtggcggtggtcagtgccgatgccggatcgcgtggcggcaaggtggtgccctacaagccgttgctggacgaggccattgcgttgtccaaacacaagcccgccgcggtgttgatggtcaaccggggcctggcccccatgcacctgcaggccgggcgcgaccacgaatgggcccccttgcgcgagcagcatctgaacaccgtggtgccctgcgcatgggtcgaatccacccaccccagctacacgctgtacaccagcggcaccacgggcaagcccaagggcgtgcagcgggacacgggtggctatgcggtggcgctggcggcgagcatgaagc

SEQ ID NO: 309215 - DNA, 435 bp, Unknown
  Bacterial polypeptide expressing nucleotide sequence isolated from the Sargasso Sea
aagatggatattattggataactggtagagttgatgatgttattattgtatctggtcataatctgggaacagcagaattagagagcgcttttgttgctcatccaaaagttgctgaagctgcagttgtaggctacccgcatgatattaagggaaatggactttattgttatgtaactctaaatgcaggagaaaagccatctggagatcttgaaagagatttaaagctttgggttagaaaacaaattggaccgatagcaacacctgatttaatacaattttcccccggtttaccaaaaacaagatctggaaaaataatgagaaggatactgagaaaaattgcagcaaacgagcatgatcaattgggtgatacaacgactcttgctgatccatctgttgttgaaagtttagtatctaatagaaaaaacgcaaaataag

SEQ ID NO: 309216 - DNA, 796 bp, Unknown
  Bacterial polypeptide expressing nucleotide sequence isolated from the Sargasso Sea
tattttaagactgtaggagattctagatgtcctatagttgatacttggtggcagacggaaactggaggaattttaattagtcctcaaactggagcaatagacttaaagcctggatctgcaacaaaaccattttatggaattaaacctgaaatagttgataaggatggcaaagtcttaaaaggagaggcacaaggaagactatgcatagctcaatcttggccaggtcaaatgagatctgtatatggtgaccatgatagatttatagaaacatacttttctcagtttgatggaaaatattttactggggatggctgcagaagagataaagatggatactattggataactggaagagttgatgatgttattattgtatcaggacataatttgggaactgctgaaatagagagtgcctttgtagcacatccaaaagttgcagaagctgcagtagttggatgtcctcatgatataaaaggaaatggattatattgttatgtaactttgaatgttggagaagagcctaatggagatttagaaagagaattgaaactatgggtaagaaaacaaattggagtaattgctaccccagattttatccagttttcacctggactaccaaaaacaaggtctgggaaaataatgagaagaattttaagaaagattgctgctaacgaacatgaacaacttggagacacaacaactttagctgatcctagcgttgttaaaagtctggttgataatagaaaaaatatttacaactttattctctcaattaaattcttttttaacaatatcc

SEQ ID NO: 309217 - DNA, 364 bp, Unknown
  Bacterial polypeptide expressing nucleotide sequence isolated from the Sargasso Sea
cactgctgaaatcgaatcggcactggtacttcacgaatccgttgctgaggctgccgtggtgggatttcctcatgaaatcaagggacagggaatttacacctatgtgaccctcaacagtggagttgaggaatctgaggatttgaagaaagaactggttcagcaggtcagaaaggaaattggaccgattgccaccatcgacgtgcttcaatgggctccaggcttgccaaaaacacgttccggaaaaatcatgcggaggattctacggaagattgcagaaaatgacattgaacatgtcggtgacacttcgacccttgctgacccatcggtggtggacgatttgatcaaaaaccggccttctcaataa

SEQ ID NO: 309218 - DNA, 637 bp, Unknown
  Bacterial polypeptide expressing nucleotide sequence isolated from the Sargasso Sea
aacaaaacctttttatggaataaaaccagtattagttaataaggatggcaaagaaataaaaggtgaaggtgaaggtagactttgtatagctcaatcttggcctggtcaaatgagaacagtatacggtgatcatcaaagatttattgatacatatttttctcaatttgatggaaaatatttcactggagatggatgtaaaagagataaagatggttactattggataactggtagagttgatgatgtgattattgtttctggtcataatcttggtactgctgaaattgaaagcgcatttgtagcacatcccaaagtagccgaagcggcagtggttggatatcctcatgatatcaaaggaaatgggttgtactgttatgttactttaaatgctggagagagcgagacaggcgatttggatagagaactaaaactttgggtaagaaaacaaataggacctttagcaacaccagatctaattcattttaccccaggacttccaaaaacaagatctggaaaaattatgagaagaattttaagaaagatcgcagcaaacgagcatggtcaactaggtgatacaactactcttgctgatccaggtgtagtcgatagcttagttgaaaatagaaaaaatatctaa

SEQ ID NO: 309219 - DNA, 571 bp, Unknown
  Bacterial polypeptide expressing nucleotide sequence isolated from the Sargasso Sea
cttgtgaggatcttgtgtcttgcagattcatggcctggacaaatgagaaccgtgtacggcgatcacaaacgatttattgaaacttatttttctcaatttgatggaaagtatttcacaggtgatgggtgcaagcgtgatgaagatggttactattggatcacgggacgtgttgatgatgtgattaatgtatctggtcaccgcatgggaaccgcagaagttgaatcggctttagttgcgcatccaaaagtcagtgaagctgctgttgttggttatcctcatgacatcaaaggtcagggaatttatgcttacgtaaccttaaacgcgggtgaagaaacatctgacgaattatataaagagttggttgcttgggttcgaaaagaaattggacctattgcatctcctgatcttattcaatgggcacccggtcttccaaaaacgcgttcaggaaaaatcatgcgaagaattttgagaaagattgctgaaaatgaatatagcaatctaggcgatacatctactttagccgaaccagcggtagtcgatgatctgatcgacaatcgaatgaacaaatagg

SEQ ID NO: 309220 - DNA, 767 bp, Unknown
  Bacterial polypeptide expressing nucleotide sequence isolated from the Sargasso Sea
gatgtttgagggtgttccaaattatcctgatttcggacggttttgggatgtttgtgacaagcacaaggtgaacatcttttatactgctccgaccgcgattcgtgccattgccaaggaaggtgatgaactggtccagaaaagggacctcagttctctaagactgctgggtaccgtgggtgagccgatcaacccggaagcctggatgtggtatcaccgagtcgtagggcaggaacgttgtccgattgtcgatacctggtggcagactgagacgggagggattctcatcactcctttacctggagcgaccaaaaccaaaccaggttccgcaacacgaccgtttttcggaattcagccaatattgatggatgccgatggaaatgaagtcgaaggagcagtttctggaaatctctgcattaagcatccctggccggggcagatgcgcaccgttttcggagatcatcaaaggttcaaggaaacctacttcagcacctatccaggatactattttactggtgatggctgccgcagagatgaggatggatactactggatcaccggaagggttgatgatgtcctgaatgtttccggccatcggatgggcactgctgaaatcgaatcggcactggtacttcacgaatctgttgctgaggctgccgtggtgggatttcctcatgaaatcaaggggcagggaatttacacctatgtgacccttaacagcggagttgaggaatctgaggatttgaaaaaagaactggttcagcaggtca

SEQ ID NO: 309221 - DNA, 644 bp, Unknown
  Bacterial polypeptide expressing nucleotide sequence isolated from the Sargasso Sea
tttggagaacaatggaatgaatgcaaagccaaacaatctggacgctctgttagacgaaaaacgacagtttggagcttccgctgagttcaggaagaaggcagtagtgcgagatagagggatttatgacaaagctaaagacgatcgcttgaatttttgggaatcttgggctgaaacattaaaatggaatgaaaaatggcacaccgttcttgaatggactcctccctatgcgaaatggtttttagggggaaggataaatgtttcggaaaattgcttggatagacatctggacgagggcaggtgcgacaaaacagctttgatttgggaaggggaaaacggagagtcccgacactatagctaccaggatttgctagaggaagtatccaggcttgcaaattctctgaagtcattaggggtgaaaaaaggagacagggtagcaatctatcttccaatgatacctgaggctgcgatagctatgctggcctgtgctagaattggagcggtgcattccgtggtgtttggtgggttcagtccacagtcactagctgacagaattaatgacctgagagccacatgtttaattacagcagacggtggttataggagaggtggagttgtcccattgaagattaacgctgataaggcat

SEQ ID NO: 309222 - DNA, 675 bp, Unknown
  Bacterial polypeptide expressing nucleotide sequence isolated from the Sargasso Sea
catgtccgagccgaccattgaggactactacgtagaggaccgcaccttcccaccgtccgatgcgtttcaaaagaacgcgctcatcgcagacaggagcctttacgaagaagcacaagaaaacagacttggcttttgggcgcgtcaggccagagaactagtcacctggtttgaagacttcgagaccgttcttgaatgggaccttccgttcgccaagtggtttgttgaaggcaagctgaatatctcctacaactgcttagatcgacacgttgaggcaggtcaaggagacaaggtcgcttttcactgggaaggtgaaccgggagatatccgaacgatcacctacaacggtttacttgaggaagtatccaaatttgcgaatgttctgaaatcgctcggtgtcacaaaaggcgaccgggtgtgtatctatatgccaatgatccccgaacttccggttgcgatgttggcgtgcgcgagaattggtgccccacattcgatcgtcttcggtggattctcggctgactcactgtcggatcgaattgacgatgcggacgcaaaacttcttataaccgcagatggtggatatagacgaggtgaaccattcccgctcaaagagacagctgacgcttcagttgccgcgacatcaaccattgaaaacgttgttgttgtgcagcggactgg

SEQ ID NO: 309223 - DNA, 891 bp, Unknown
  Bacterial polypeptide expressing nucleotide sequence isolated from the Sargasso Sea
gctccaaagcaagaaaaagaacttatatatagaacaaagaaagactggattagcaaagctctagttaataaatctcagtatgaaaaaaaatataaagcatcaataaaagataatgatggattctggaaaaaagaaggaaaaagaattaattggataaaaccatatacaaaaattaaagatgttaaatatagtaaatcggatgttaagataaaatggttttacgatggtactcttaatgcatcggcaaattgtattgatagacacttaaaaaagaataaagacaaaactgcaattatatgggttggagatgatccaaaaattcaaaagaaaatttcctacaaagaattacacaaagaagtttctaaagctgcaaatggtcttaaagaattaggtgttaaaaaaggcgatagagtaacaatttatttaactatgataccagaacttgcatatactatgttagcttgtgcaagaataggggcggtgcattcaataatttttggaggattttctcccgatagtatttctggacgaataaacgattgcgagtctgattatctaattacagctgatgaaggtctaagaggtggaaaaataatacctttaaaatcaatagctgacgaagctttagtaaattgcccaaatgtaaaaaaatgtgttgttgttaaaagaacaggcaatagaataaattgggatgaacgaagagatgtttggtaccacgagttaacaaaaaaagtttcaaataaatgtgaacccgaggaaatgaatgcagaagatcccttatttattttatatacttcaggatcaacaggaaaaccgaaaggggtgatgcatacaactggggggtatatggtttacgcatcgatgacacatcaatatatattcaattataaa

SEQ ID NO: 309224 - DNA, 744 bp, Unknown
  Bacterial polypeptide expressing nucleotide sequence isolated from the Sargasso Sea
taggaaattttaaatgtccaatagttgatacttggtggcaaactgagacaggtggaatattaattgcaccacaaacagcagctatacctcttaagcctggttcagctacaaaacctttttatggaattaaaccttgcctagtcgataaagatgggaaagaaattaaaggtgcaggtgaaggaagactatgtatctcacaatcatggccaggtcagatgagaacagtttatggtgaccatcaaagatttattgatacttatttttctcaatttgatgggaaatattttactggtgatggatgtaaaagagataaagatggctattattggataactggaagagtagatgatgtaatcatagtttcagggcataatttaggaactgcggaaatcgaaagtgcttttgttgcacaccctaaagtagcagaggctgccgttgttggatatccacatgatattaaaggtaatggattatattgttatgttacattaaacgctggtgaaacaggatctggtgatcttgagagagaattaaaactttgggtaagaaaacaaataggacccttggcgactcctgatttaattcattttactccaggattgcctaaaactagatcaggtaaaatcatgagaagaattttaagaaaaattgctgctaatgagcatggtcaattaggtgacacaacaactcttgctgatccaggtgttgtaaagagcttagtcgaaaatagaaaaaatatttaaa

SEQ ID NO: 309225 - DNA, 481 bp, Unknown
  Bacterial polypeptide expressing nucleotide sequence isolated from the Sargasso Sea
agcagctttccgggctactacaccaccggcgacggggcgcgccgggacgaggacggctactactggattaccggccgggtggacgatgtgctgaacgtgtccggccaccgcatgggcaccgcagaagtggaaagcgctctggtggcccacccgcgggtatgcgaagccgccgtggtgggctacccccacgacatcaagggccagggcatctatgtctatgtgacgctgaatgacggtgaagccgccagcgaggaactgctgcaggagttgcgtcagtgggtacgccgggaaatcggccccatcgccaccccggatctgatccactttaccgccgggctgccgaaaacccgttccggcaaaatcatgcgacgcatcctgagaaaggtggccgccaacgagcatgacagcctgggcgatatttccaccctggctgaccccgcggtagtagccagcctggtggagacccgggtgaaccggtgat

SEQ ID NO: 309226 - DNA, 838 bp, Unknown
  Bacterial polypeptide expressing nucleotide sequence isolated from the Sargasso Sea
gccgatgagggggttcgtggtggacgtccaatcccgcttaaagcaaatacggatgccgctgttaaaaactgcccagactgcaaaacggtgattgttgtaagacgaactgggggtgacataaattgggttgaagggcgcgacatttggtatcacgatgccatgaacactgcgtccccagattgcccagtcgaggagataaacgccgaagacccaatgttcattctctacacatccgggtcaactggcaagccgaagggtgttttgcataccacgggtggttacatggtgtacgcctcgatgacgcatcaatatgtctttgactatcatgatggcgacatctattggtgttctgctgatattggttggatcaccgggcatagctatattatctatgggccgctcgccaatggtgcgattacactgatgtttgagggtgtaccaacctaccctgatagttcgaggttttggcatgttgtagaaaaacacaaagtgaatatgttctacacggcaccaactgccatccgggcactaatgcgtgagggagaaacgccggttgcccgttgtgataaatcttccttgcgcttgctaggcagcgttggtgagccgattaaccccgaagcttggatgtggtaccatagagttgttggtgaagaacgctgttcaattgtcgacacttggtttcagacagaaaccggtggaattatgatcacaccgcttcctggtgccacagctaccaaaccaggatcagcgacaaaaccatttttcggtgttaagccaatcctggtcgatggtgaaaataaggtactcgacggagccacagacggcaatttatgcatag

SEQ ID NO: 309227 - DNA, 883 bp, Unknown
  Bacterial polypeptide expressing nucleotide sequence isolated from the Sargasso Sea
actgcgccaactgctattagagcactgatggcccaaggtaatgatcctgtaacaaggacaaaaagagatagcttaagaattctgggtacagtcggtgaaccaataaatccagaagcatgggattggtattttaatgttgttggagaatctaaatgtgaagtaatagacacttggtggcagaccgaaactggttctgtactgatatcaccaattgcaggagtaactccaacaaaaccaggctcagcaactctacctttctttgggataaagccagctctctacgatgaaaatgggactgcacttgatggtgcaaattcagggaatcttgtaattgaaagttcttggccaagtcaaatcagaagtgtttatggtgatcatcaaagaatgatagatacctattttagtacgtatgaagatatctatttcactggagacggtgctagaagagatgaggatggttactattggataacaggaagagttgacgatgtactcaatgtttctggacacaggttaggtactgcagaaattgaaagcgctctcgtactgcatccaaaagttgctgaggcagcagttgtaggctttgaccaccctattaagggacaaggtatatatgcttttgttactcttatgattgaagaatcattttctgatgatcttaataatgaattgaaacaatttgttgcaaaagaaattggttcaattgcaaaaccagatttaatccaaaatgcaccaggacttccaaaaaccagatcaggaaaaatcatgagaagaattttaagaaaaattgctgaaaatgatttatctaatttaggtgataccacaacgcttgcagatccatcagttgtagaatctttaattagcaataaaataagcttatgaa

SEQ ID NO: 309228 - DNA, 730 bp, Unknown
  Bacterial polypeptide expressing nucleotide sequence isolated from the Sargasso Sea
cccaatagtagatacttggtggcaaacagaaacaggtggaattctaatcgcaccacagcctggagcaatagatttaaaacctggatcggccacaaaacctttttatggcattaaaccggtgttagtagataaagatggtaaaataattaaaggtgagggtaagggaagactttgtatggctacgtcatggcctggacaaatgagaactgtatatggcgatcatcaaagatttattgatacatatttttctcaatatgatggtaaatatttcacgggtgatggatgtcgaagagataaagatggatattattggattaccggtagggttgatgacgttataattgtatcaggccataatcttggcacagcagagatagaaagtgcttttgtagctcatccgaaagtagcggaggcagctgtagttggttttccacacagtataaaaggaaacggattgtattgttacgttacattaaatgcgggtgaaaatccctctggtgacttagaaagagatcttaaactttgggtaagaaagcaaattggtccaattgcgacacctgatgttatacagtttgcacctggactacccaaaactagatcaggtaaaataatgagaagaattttgagaaaaattgcagcaaatgagccagataatttaggcgatacaacgactctggcagatccaagtgtagttacatcgctcgtagaaaacagacagaataaaggttaa

SEQ ID NO: 309229 - DNA, 871 bp, Unknown
  Bacterial polypeptide expressing nucleotide sequence isolated from the Sargasso Sea
ataaagtggtatgaagacggtacgctgaacctcgccgctaactgcctcgatcgccatctggcggagcgcggcgaccagacggccatcatctgggaaggcgacgatgccagccagagcaaaaacatcacttatcgcgagctacatcgcgatgtctgccgctttgccaacgtcctgctcgatctgggcattaaaaagggcgatgtcgtggctatctatatgccgatggtgccggaagcggcggtggccatgctggcctgcgcgcgtatcggcgctatccattcggtcattttcggcggcttctcgccggaggcggtcgccggccgtatcatcgattccaactctcgcctggtgatcacctcggatgaagggctgcgcgccggccgcgctatcccgctgaaaaagaacgtcgacgacgcgctaaaaaatccgaacgtgaagagcatcgaaaacgtggtggtgttcaaacgtaccggcggcaaaatcgactggcaggaaggccgcgacctgtggtggagcgatctgatcgagaaagccagcgcggaacaccagcccgaagagatgaacgccgaagatccgctgtttatcctttatacctccggttcgaccggtaagccaaaaggcgtgctgcacaccaccggcggctacctggtctatgcggcgtcaacctttaaatacgtgttcgactatcatccgggcgacatctactggtgcaccgccgacgtcggttgggtcaccggccatagctacctgctctacggcccgctggcctgcggcgcgacgacgctgatgttcgaaggcgtaccgaactggccgaccccggcgcgtatgtgccaggtggtcgataagcatcaggtcaacattctttataccg

SEQ ID NO: 309230 - DNA, 886 bp, Unknown
  Bacterial polypeptide expressing nucleotide sequence isolated from the Sargasso Sea
cttgggagttcaaaagggtgatagagtaacaatttatcttaccatgataccagaacttgcctataccatgcttgcatgtgctagaataggtgcagttcactcaataatatttggtggtttttcaccagatagtatttcaggcagaattaatgattgtgaatctgattatgttataactgcagatgaaggtgtaagaggtggcaaaacaatccctttaaaatctattacagatgaagctttagaaagctgtcccaatgtaaagaaatgtatcgtagtaaagagaacaggtaccaaaaagattgattggtttaatgatcgggatgtttggtatcacaagatgacaagtaaagtctcagcaaaatgtgaacctgaagaaatgaatgctgaagatcctttattcattctttacacatctggctcaactggaaaaccaaaaggtgtgctgcatacaactggtggatacatggtttatgcatcaatgactcaccaatatatttttaattataagcctaaagatatttactggtgcacagctgatataggatgggttacaggacacagctatattatttatggtccacttgctaatggtgcaacaacaattatgtttgagggaatacctacttatcctgatacttcaaggtggtggcaaatagttgataaatataaagttaatatcttctacacagctccaacagcaatcagagctttaatgagagaaggtgacaaaccagtaaagaaaacatctagaaaaactctaaaacttttaggcactgtaggtgaaccaattaaccctgaagcttgggagtggtattacaaaactgttggtgatagcagatgcccaatcgttgatacatggtggcaaacagaactggaggaatattaa

SEQ ID NO: 309231 - DNA, 719 bp, Unknown
  Bacterial polypeptide expressing nucleotide sequence isolated from the Sargasso Sea
cgcggcgctcgaacaggcggcgaccatttccggcatgccggcctatcgcgcgctcgccgccgaagccgaaaacgattacgaaggattctgggcgcgtctcgcgcgcgagggtctggcgtggcacaagccgttcacgaaagtgctcgacgagtccaacgcgccgttctacaagtggttcgacgacggcgagctgaacgcgtcgtacaactgcctcgaccgtcacgtcgaagccggcaacggcgagcgcgtcgcggtgatcttcgaggccgacgacggcaccgtcacgcgcgtcacctatgcggatctcctcgcccgcgtgtcgcgtttcgcgaatgcactgaagaagcgcggaatcggcaagggcgaccgcgtcgtcatctatatcccgatgtcgatcgaaggcatcgtcgcgatgcaggcctgcgcgcgcatcggcgcgacgcactcggtcgtgttcggcggcttctccgcgaagtcgctgaacgagcggctcgtcgacgtcggcgcaaccgcgctcgtcacggccgacgagcaggcgcgcggcggcaagacgctgccgctgaagagcatcgcggacgaagcgatcgcgctgggcggctgcgaggccgtgaagagcgtgatcgtctatcgccgcaccggcggcaagatcgactggcacgccgggcgcgacctgtggatgcacgaactgacggccggcgaatccgaccagtgcgagccgg

SEQ ID NO: 309232 - DNA, 844 bp, Unknown
  Bacterial polypeptide expressing nucleotide sequence isolated from the Sargasso Sea
aatgatccttctgaagaagctttacatataacgtataacgaattatacgaaagagtatcaaaaatggcaaacgttcttcgcgagcaaggagttcgcaaaggagatagagtttgtatttatttaccaatgattccagaattagcagtttctgttttagcttgtgctagaattggtgctatacattctgttatttttgctggattttctgcatcagcggtttcagctagaattaatgactgcgaatgcaaaatggtaatcacatcagacggcggttatagaggaaacaaaacaattgatttaaaaggaattgttgatgaagctcttgaaacttgtccatctgtaacaaaagtattagttgctaaaagaactaatactgatgtaaaaatgaaagaaggtcgtgatgtttggttacagccacttttagatgttgctttagataatagtgttgcagaaattatggacgccgaagatcctttatttattttatatacttcaggatcaacaggaaaaccaaaaggtatggttcataccactgctggatatatggtttacacggcatacacttttaaaaatgttttcagttatgaagaaaatgatattttctggtgtacagcagatatcggatggattactggtcactcatatatattatacggaccattattaaatggagctacaactgtaatttttgaaggagttccttcttatccagattttagccgtttttgggatattatcgaaaaacataaaatcacacaattttatacagcgccaactgcaatccgttcgttagcaaaagaaagtttagattatattcaaaaaatatcctctaaaatctcttaaa

SEQ ID NO: 309233 - DNA, 892 bp, Unknown
  Bacterial polypeptide expressing nucleotide sequence isolated from the Sargasso Sea
gtttttggtggattttcaccggatgccttggctggacgtatccaagattgcgatagcagtttaattataacagcagatgagggcattcgcggcggcaaaccaattccattaaaagctaacacagatgaagcgttgaactcatgcccgatgtgtaaaactgttgtagtagtgaagagaactggcggaaagatagactgggtcgaaggtagggattattggtatcatgatattacttcagcgcaatcagtggaatgtcagccagaagaaatgaacgctgaggaccctctcttcatcttatacacgtcgggctcgacagggaaacccaaaggtgtaatgcatacatcgggtggctatatagtttacgcgtcaatgacccatgagtatgttttcgattataaagatggtgaagtttattggtgtacagctgatgtagggtgggtgaccggtcattcatacattctgtacggaccactagcaaatggtgcgacaactttgatgtttgagggcgttccaaattatccgaactcaagtcgtttttgggatgtatgcgataagcataatgtatctattttttatactgcacccactgctttaagagcattgatgagagagggtgagggccctgtaaaagccacaagtcgcaaatcccttaggcttcttgggtccgttggggagccaataaaccctgaagcttggctttggtattataatgtggtgggggacggcagatgtccaattgtcgacacttggtggcaaaccgaaacaggcggcatcctcataacccccctccctggggcaacggatctaaagccagggtcagccacgaggccattttttggaataaaaccaataatcgttgatgcggacggaaatgtactagatggtgctacta

SEQ ID NO: 309234 - DNA, 868 bp, Unknown
  Bacterial polypeptide expressing nucleotide sequence isolated from the Sargasso Sea
acattcaattatatttggtggcttctctcctgactcaatagcgacaagaataaatgattgtgaatctgattatttaattacagcagatgaaggaattagaggaggtaagattattccactaaaaaaaatagcagatgatgctttgacacaatgtccagaagttaagaaatgtgtcgtggttcaaagaaccggtaaccaagtagattggaacaacgaaagagatatttcttataaagaaatgatttcctctgcttctagcaaatgtgatcctgaagagatgagtgcggaagatccattatttatactttatacttcaggctcaactggaaaacccaaaggagttctacatactacaggcggttatatggtttatgcatcaatgactcatcaatacatttttgattataaaagtaatgatgtttactggtgcactgctgacattggttgggtaactggacacagttatattatctatggacctctatccaatggagcaactactattatgtttgaaggaatcccaaattacccagatagttctcgttggtggcaaattgtagataaatataaagtcaacattttttacactgcaccaactgcaattagagctttgatgagagaaggggataaaccagttaaaaaaacaagtagaaaatcattaaaattattgggcactgtgggggaacctataaatcctgaggcctggatgtggtattacaaaactgttggggactcaagatgtccaatagtagatacttggtggcaaactgaaactggaggtatattaatttctcctcaacctggagctatagatctaaaaccaggctctgcaactaaaccattttacggaataaaacctgtaatagtg

SEQ ID NO: 309235 - DNA, 817 bp, Unknown
  Bacterial polypeptide expressing nucleotide sequence isolated from the Sargasso Sea
ctacgatagtcctattacaggtaacaaaagtcagttctcttatgaggaattaagatcaaaggtctctaaatttgcaggggcattgaaagctcaaggtacaaataaaggtgaccgagtgatcatttacatgccaatgatccctgaagcagtagttgctatgcttgcttgtgcaagaattggtgcgattcactctgttgtttttggtggatttgcctcaaatgagcttgcaagtagaattgatgacagtaaagcaaagttattagttactgcctcatgtggttttgaaccaggtagaacagttgagtacaaacctttagtcgatgaagctataaaaatagccaatcacaaaattgataagatgattttatttcaaagaccaggaaatgaggtcaaactaaatgcacctaacgaggtcagttgggaagaagttgtctataatgctaaagatgctgactgtgttgaaatgaattcaaatgagtttgcctatattttatatacatcaggaactactggaactccaaaaggtatagtaagagacattggaggtcacattgttgctctcaaatggactatgaaaaatatctacaacattgatgcagatgacatttggtggtctgcaagtgatataggttggattgtgggacactcttatattgtttatgctccattatttaaaggatgcgctacagttttgtttgaaggtaaacctgtgggaactccagatgcaggagccttttggaaaataatctctgattataaagtaaaatctctttttactgctccaacagcttttagagcaattaagaaagaggatccc

SEQ ID NO: 309236 - DNA, 853 bp, Unknown
  Bacterial polypeptide expressing nucleotide sequence isolated from the Sargasso Sea
catgcctaagaaaaaaaaagtaaaaaaaaaagtaatctctaaaaaacctaaagagacagtttataaaactaagaaagaatggataagtaaagctactgtaaataaatctcaatatataaagaaatataacgagtcgattaaagacaacgacggattttggaaaaaagagggaaaaagaattaattggattaaaccttataaaaaaattaaagacgttaaatatagtaaagatgatgttcatatcaaatggttctatgatggtactttaaatgcctcagcgaattgcattgataggcatcttaaaaataatgctaataagactgcaattatatgggtaggagacgatcctaaagttcaaaaaaaaattacgtataaagaacttcataaagaggtttcaaaagcagcaaatggattaaaaaatttgggagttcaaaagggtgatagagttacaatttatcttaccatgataccagagcttgcctacacaatgctcgcatgtgctagaataggtgcagttcactccataatatttggaggtttttcaccagatagtatttcaggcagaattaatgattgcgaatctgactatgtaataactgcagatgagggtgtaagaggcggcaaaacaatccctttaaaatctataacagatgaagcgttacagagctgtcctaatgtaaagaaatgtatcgttgtaaagagaacaggtaccaaaaagattgattggtacaatgatcgtgatgtttggtatcataaaatgataggtaaagtctcagcaaaatgtgaacctgaagaaatgaatgctgaagatccattatttattctttacacatctggttcaactggaaaccca

SEQ ID NO: 309237 - DNA, 817 bp, Unknown
  Bacterial polypeptide expressing nucleotide sequence isolated from the Sargasso Sea
gagtcttagacttttgggcacagttggtgaaccaattaatcctgaagcatggatgtggtacaagaatgttattggtaaagataaatgccctattgttgatacttggtggcaaaccgagactggtggtgtgatgataagtcctttgcctggagtcgttgctacaaagccaggttcagctactttacctctgccaggaatcgaagttgaaattgtcgataagaatggagataaggttaaggagaacgagggtggctatttaattattaagaaaccttggccaggaatgatgagaacaattcacggcaactcagagagatatttggagggttactgggaatatatttcttttaaaggagaaaaaaatgtttattttgctggagatggagcacgtattgatgaagatggatatatatggattatgggaagagttgatgatgtcataagtgtttcgggacatcgtttaggaacaatggaaatagaatctgctttggtaagtcataaatcagttgcagagtctgcagtcgttggcaaaaaagatgatttaaaaggtgaagttattgttgcttttgtatctctagaaaaagacgtgaacgattcatcagaattagtagaggatctaaagaaacatgttgtcaatgaaattggaattattgcaaagcctgaaaagattataatttctgactctcttcctaaaacacgtagtggaaaaattatgaggcgaattttaagatctttggctgctggagaaaaaattagcggtgatataagcactcttgaagatagttctgttttggaaaagcttaaagaattatcctaa

SEQ ID NO: 309238 - DNA, 904 bp, Unknown
  Bacterial polypeptide expressing nucleotide sequence isolated from the Sargasso Sea
cttaaaaaaaaacaaagataaaactgcaattatttgggttggagatgatccaaaaattcaaaaaaaaattacatacaaacaattacatcatgaagtttctaaagcagcaaatggacttaaaagtattggtgtaaaaaaaggtgatagagtgaccatttatcttaccatgattccagaattggcttacacaatgttagcttgcgcaaggattggggctgttcactctataatttttggtggcttttcaccagatagcatatccggaagaattaatgattgtgaatctgactatgttataacagcagacgaaggagtgaggggaggaaaaataattcatcttaaatcaattacagacgaagctttggttaattgtccaaacgtaaaaaaatgtgttgtagtaaagagaactggtaatagagttaattgggataaatctagagatgtttggtatcatgaaattacaaaaaaagtatcctcacattgtgatccagaggaaatgaatgctgaagatcccttgttcattctttatacgtcaggttctactggaaaacccaaaggagtattacatacatctggggggtatattgtttacgcttctatgacacatcaatatatttttaattataagcctaaagatatctattggtgtactgctgatataggatggattactggtcatagttatataatttatggtccactagcaaatggtgcaacaactatcatgtttgaaggcattccaacatatcctgatacctctagatggtggcaaatagtagataaatataaagtaaatattttttatacagcaccaaccgcaataagagctctaatgagagagggtgaaggaccagtaaaaaaaacctcaagaaaatctcttaaattattaggaactgtggagaac

SEQ ID NO: 309239 - DNA, 538 bp, Unknown
  Bacterial polypeptide expressing nucleotide sequence isolated from the Sargasso Sea
atgagtgagcagaaaatatttgaaattcctgcacatgctaaagaaaaagcatggatcgataatgacacatatttaaagatgtatcaggaatctgttgaagatacggtgggcttttgggataaacaagccaatcgactggactggttcaaaaaatgggaccgaactcttgattgggattataataaggcttatatccgctggtatgaaggaggaaaacttaacgtttctcataattgtctggacaggcacttggaagcgcgaggagaccaaaaggcgttgatttgggagtcagatgatccaaaagtcgatcgaagctttacttacaaacaacttcacacagaagtgagcaaatttgctaatgtaatgaaggcactaggtgtggtaaaaggtgacagggttatgatatatatgcccatgatccccgaactggcaatagcatgcctggcatgtgccagaattggcgcagtacattcagttgtatttggcgggttcagctcagaggcacttaaaaaccgtattactgattgtgaggcaaaat

SEQ ID NO: 309240 - DNA, 1012 bp, Unknown
  Bacterial polypeptide expressing nucleotide sequence isolated from the Sargasso Sea
caatattttcatcctagcgatgaatttgtagcgcaagctaacatgacagacgagggtatctatgatcgtttcggtctggataattttcctgaatgttttcatgaatatgccgatttattaagttggcacaaaagatgggatataacatttgatgctagtgatgctccttgttggaaatggtttgttggaggaaaaattaatgctagctacaattgtatagatcgtcacctagtttcaaatcgcaacaaagcggccattgtgtttgtacctgaacttgagcaggagccacatgaggttgtgacgtaccaagagctttatgtgcgagtaaatgagactgctgctcttttgcgcgattttgcgggacttaaaacaggtgatcgtgtaacaattcatatgccaatgtctactgaccttcctgttgtaatgcttgcctgtgctcgtctgggcgttattcactcggtagtttttggcgggtttagtggcaaggcttgtggtgaaaggattgctgattcaggtagttcaattctcattactactgacggctattatcgtaatggcaaaatgttggatcacaaagtgaaggcagatgaggcagttaaagttgcaagtgatgccggacaaattgtcgaaaaggtgttggtctggaggcgttatccggacgcataccaatccgaggttcctatgaagccgggccgcgattttttcatggatgaacatttgcctgagtttagtggtgtaagagttgaccctgtagagttagatgcggatgctccgctctttttgatgtacaccagcggtaccacaggcaagcctaagggatgtcaacatagcatcggtggttatcttacctatgtagctggcacttcaaaatatgtccaggatatacatcctgaagatgtgtactggtgtatggctgacattggttggattactgggcactcatatatagtgtatggtccattggcgctagctgctaccagtgtcatgtatgaaggtgtaccaacttttccag

SEQ ID NO: 309241 - DNA, 916 bp, Unknown
  Bacterial polypeptide expressing nucleotide sequence isolated from the Sargasso Sea
ccctcagaagataaaaaaatttcttataaagaattactagttgaagtttcaaagttctcaaatgttcttaaatccaaaaatgttttaaaaggcgatagagtatgtatttatatgcagatgatacctgaattagctattgctatgcttgcatgttcaaggattggagcaattcactctattgtttttggtgctttttcttctaattcattaaaagatagaataaatgattcaggatgtaagattgttattactcaagatacaggtgtgagaggtttgaaagtagatattccaatgaaagaaaatgttgataaagctcttttggattgccctacgattgaaaaagtatttgttgttaaaagaacttcaagtgatattaatatggataaaaatagagatttgtggtggcacgaagaaatgtcaaatatttcgaaagtttgtgaaccagaatggatggattcagaagatcctttatttattctatatacatctggttctacaggaataccaaagggtgttcttcacactactggtggatatttagtctatgcttcatatactcacgaagttatttttgattaccataaaaatgatatttattggtgcacagctgacataggttggataacaggtcactcttatattatttatgggccattatcaaataacgctactactttaatgtttgaaggtgttcctaattatccggattttagtaggttttggcaaattatagaaaaacacaaagttaatatattttatactgcaccaacagcattaagagctttaatgaaagaaggaaatgattttgtcaaaagtacggatagatcttcattgaagttattaggctctgttggcgaaacaattaaaaaacctgaatgggattggtattttgaaattgtggagagaaaaaatgtcc

SEQ ID NO: 309242 - DNA, 850 bp, Unknown
  Bacterial polypeptide expressing nucleotide sequence isolated from the Sargasso Sea
ttgagtcgaaaatatagggaaatttacgaaaattcgataaataacaaagagattttttggaaaaaagtctctgaagacatattttggtacaaaaaaccaaccaaaattttaaactctgataacccccctttttataagtggttcgaagatggaataactaatacatgttacaatgctttagatcatcatattgaccaaggtagaggggaaaaattagcaatcatttatgatagtccaataactggaaaacaaaaaaaaatttcatacaaagatttaagagataaagtggctttatttgcgggagcattaaaaaaccaaggtataaacaaaggtgatagagtaattatatacatgccaatgattcctgaagcggtaattgcaatgttggcttgcggaagaattggtgcggttcattctgttgtatttggtggttttgcagcaaatgaattagcaagtagaatagatgactctaaagcaaaattaattgtttctgcttcatgcggctatgaacctggaagaaccgtattttataaacctttagttaacaaagctcttgaacttgcaaagcataaaccaagcaaatgtataatttatcaaagagaaaaagataaggctgaattaaacccagatttagatattacttgggatgaagcccataatgaagtgaaaccagcagaatgtgaaaagatgaatgctaatgattatgcttatatactctatacatctggtactacgggattacccaaaggaatagtaagagatattggaggtcatatagttgctttaaaatggacaatgaaaaatatttataatattgatcaagatgatgtgtggtggtcagccaagtgat

SEQ ID NO: 309243 - DNA, 856 bp, Unknown
  Bacterial polypeptide expressing nucleotide sequence isolated from the Sargasso Sea
ggacatagctacatattgtatgggccacttgccaatggagcgacaacattgatgtttgaaggtgtgcctacctatcctgatagcggtagattctggcaagttgttgaaaaacacaaagtatctattttttatacggccccaaccgccataagagcgttgatgcgtgatggggatgctcctgttaaaagacacgaccgctcttccttgcggttgctgggtagtgtcggtgagccaataaatccagaggcttggatgtggtaccatagagtagttggagatgctagatgtcccattgtagacacatggtggcaaactgagactggtgggattctcattacaccgttacctggcgcaatagctacaaagcctggttctgcaacgaaacctttttttggaattcagcctgtcatcgttgatacagaaaacaaagagcttgagggtgtggctgagggaaatttgtgcattaaccaaagttggcctgggcaaatgagaacagtttatggcaatcacaaacgattcgttgaaacttatttttcgaccttcaaagggcgttattttagcggtgatggtgctaggcgagatagagacggatatttctggataacgggccgtgttgacgatgtactgaatgtatcaggacatcgcatgggaactgccgaggtggaatctgcactggtgtcccataacagcgtggcggagtctgcggttgttggctatccacataatgtcaagggacaaggtatatacgcttatgtaacgttagtagctgggctcgaagctgatattgaacttgaaaaatcacttaagctctgggtgagaaaagaaattggtgctattgctgcccctgatcttatcc

SEQ ID NO: 309244 - DNA, 766 bp, Unknown
  Bacterial polypeptide expressing nucleotide sequence isolated from the Sargasso Sea
caaagatcaaggtatcaacaaaggagatcgagttataatttatatgccaatgataccagaagctgttgtagcaatgcttgcttgtgcaagaattggcgcaatacactcagtagtatttggtggatttgcttcaaacgaacttgcaagtaggattgatgatagtaaagccaaacttttagtcactgcttcatgtggttttgagccaggaagaacagttgaatacaagccactagtagatgaagcagttaaacaagctacacataagattagtaagatgatcttattccaaagaaaaggtcatgaagtgaaattaaatgctccaatagagattagttgggacgaagcacatgctaatgctaaagatactgattgtgttgaaatgaattcaaatgaatttgcttacatactttacacatcaggcactacaggaactccaaaaggtattgtaagagacattgggggtcacatagttgcattgaaatggacaatgaaaaatatttataacattgatgaggatgatatttggtggtcagctagtgatattggttggatagttggtcattcatacatcgtttacgctccgttattcaaaggatgcacaactgtattatttgagggaaaacctgttggcacacctgatgctggtgccttttggaaaattatttctgactataaagtaaaatctttattcacagcaccaacagcttttagagcaattaaaaaagaggatccagaaggaaagtttttctcaaaatatgatttaagt

SEQ ID NO: 309245 - DNA, 643 bp, Unknown
  Bacterial polypeptide expressing nucleotide sequence isolated from the Sargasso Sea
gaagcagtagttgctatgcttgcttgtgcaagaataggcgcaatacactctgtcgtctttggtggttttgcctcaaacgagcttgcaagcagaatagatgatagtaaagcaaaaatattagtgaccgcctcatgtgggtttgaaccaggaagaacagttgagtataaaccactagttgatgaagcaattagaatagccggtcacaaaattgaaaagatgattttatttcaaagacctggtcatgaagttaaattaaatgctccaaatgaggtcagctggaaggaagttgtctctaatgctaaagatgctgactgtgttgaaatgaactcaaatgaatttgcctatattttatatacatcaggtactactggaactccaaaagggatagtcagagatattggggggcacatcgtggctctcaaatggactatgaaaaatatctacaacgttgatacagatgacatttggtggtctgcaagtgacattggttggattgtcggacattcttatattgtctatgctccgttgtttaaaggatgcaccactgttttgtttgaaggtaagcctgttggaactccagatgcaggtgcattttggaaaataatctctgattacaaagtaaaatctctttttacagctccaa

SEQ ID NO: 309246 - DNA, 637 bp, Unknown
  Bacterial polypeptide expressing nucleotide sequence isolated from the Sargasso Sea
atgaaagacagttttaataaaatttatcaagaatctttaaaaaatcctgagaaattttggcaaaatgtatctgaagatattttttggtttaagaaaccatcaaaaattttaaacaaaacaaaccccccattttacaagtggttcgaagatggagtgacaaatacctgttacaatgcaattgatactcacattgatcagggcaagggagataagacagctttaatatatgacagtcctattacaaacaataaagcaaagtttacatacaacgaattaaaagaaaaaatttcaaaatttgctggcgcattagataatctaggtattaagaaaggtgacagggttattatttatatgccgatgataccagaagctgttatagcaatgcttgcatgtgggagaattggggcaatacactcagttgtatttggtggatttgcatcaaatgaacttgcaagtcggatagatgacagtaaagcaaagattttaattactgcctcttgtggatttgagccaggtagaacagttgagtatcgacccttagttgacggagcacttaaacttgcaaaacataaagttgaaaaagttattttctttaaaagaaagggtaacgaggtggaacttaattctcccacttgag

SEQ ID NO: 309247 - DNA, 409 bp, Unknown
  Bacterial polypeptide expressing nucleotide sequence isolated from the Sargasso Sea
ggtagagtagatgatgttattatagtttctggtcataatttaggaactgctgaaattgaaagtgcttttgttgcacatccaaaagtggctgaagccgccgtagttggctatccacatgacatcaaaggaaatggtttatattgctatgtaactttaaatgcaggagagcaagaaaatggagagctagaaagagacttaaaactttgggtaagaaaacaaattggacctctagccactccagatattattcatttttcacctggcttacctaaaacaagatcagggaaaatcatgagaagaattttaagaaaaatagctgccaacgatcatggccaacttggggacactacaacactcgctgatccaagtgtggttgacagtttagttgagaatagaaaaaatatttaaa

SEQ ID NO: 309248 - DNA, 740 bp, Unknown
  Bacterial polypeptide expressing nucleotide sequence isolated from the Sargasso Sea
ctactacatagaggaccgcaccttcccaccgtcagaaacgtttcgaaacgatgcgctcatcgcagatagaagcctttacgaagaggcacaagaagacagactcggcttttgggcgcgacaagccagagaattagtcacctggtttgaagactttgagacggttctcgaatgggatcttccattcgcgaaatggtttgttgaaggcaagctaaatatctcctacaactgcctggatcgacatgtagaggcgggaggagggaacaaggtcgctttttactgggaaggtgaacctggtgacaccaggaccatcacgtacagcgaactacttgaggaagtatccaaattcgcgaatgtcttgaagtcgctcggtgttacaaaaggtgaccgggtttgcatctacatgccaatgatccctgaacttccagtcgcaatgttggcatgcgcgaggatcggcgccccacactcgatcgtgttcggcggattctcagctgactcattgtcggatcgaatcgatgatgcggacgcgaaacttctcataacggcagacggtggatatcgacgaggcgatccattcccgctaaaggagacggcggacgcctcagttgcggcaacttcaaccatcgaaaatgtgatcattgtgcagcggaccggtcaagaagttgaatggaaccaaacgaccgaccactggtatcacgaactaatggagtcggcgtcaccagactgcccaccagaacatctga

SEQ ID NO: 309249 - DNA, 700 bp, Unknown
  Bacterial polypeptide expressing nucleotide sequence isolated from the Sargasso Sea
ggagatatttattggtgcactgcagatataggttggattacaggacatagttatattatatatggtcctttatgtaatggcgcaactacacttatgttcgagggcgttccaaactatccagatttttctagattttgggaaattgttgataaacataaagttaatattttttatacagcaccaacagcaatacgagccttaatgcgagaaggaaatgaaccagttaaaaaaacaagtcgttcatcattaaaattattaggcactgttggcgaacccataaatcctgaagcttggaaatggtatttcgaagttcctggcaattctaattgtccaatagtagatacatggtggcaaactgaaacgggtggaattttaatttctcctcaaacaggagctatagaacttaagcctggatcagcatcaaaacctttttttggaatcgaaccatgtattgttgataaaaatggaaatgagcttgacggtgagtgtgagggaatgttgtgtttaaaaagatcatggcctggacaaatgagaagtgtttatggtgatcatgatagatttataaacacatacttttctcaatttgatggtaaatattttactggggatgggtgcaaaagggacaaggatggatattattggattacaggacgagttgacgatgttataattgtttcaggacataatcttggtaccgcta

SEQ ID NO: 309250 - DNA, 415 bp, Unknown
  Bacterial polypeptide expressing nucleotide sequence isolated from the Sargasso Sea
attactggaagagttgatgatgtaattatagtatctggtcataacttaggtacagcagaattagaaagtgcttttgttgcccacccaaaagttgctgaagcagctgttgtgggttacccacacgatattaaaggaaatggactttactgctacgtaacactaaacgcaggtgaaaaatctactggtgaattagaaagagacttaaaactttgggttagaaaacaaatcggtccaatcgcaactccagatttaatacaatttgcaccaggtctaccaaaaacgagatctggtaaaataatgcgaagaatacttagaaaaattgcagcaaatgaacatgatcaattaggagatacaacgactctagctgacccaactgttgttgaaagtttggtggaaaataggaaaaataaatagt

SEQ ID NO: 309251 - DNA, 583 bp, Unknown
  Bacterial polypeptide expressing nucleotide sequence isolated from the Sargasso Sea
tatggaaattaaaaaagaatggcttgaacatgcaaaggttaatgaagaaaaatattcttcaatgtatgatcaatctcttaaaaaaaatgatgaattttgggcagatcaagcacaaagaattgattggattaaaaaatttacaaaaatcaaagatataaaatattctaaagatgatgttagtattaaatggtttgaggatggaaatcttaatgtttcttataattgtatagatagacatgctaaaaataatccagataaaattgctataatttgggagggagatgacccaaatgaaataaaaaaaattacatacaaagatctattaacaaatgtatcaaaagctgcaaatgtacttaaagaaatcggagtaaaaaaaggtgatcgagtaacaatatacttaacgatgatacctgagttggcttacatgatgttagcatgcgcaagaattggagcggtccattcaataatatttggaggcttttctgcagagtcgatagcaggtaggataaaagactgtaaatcagaatatgtagtgacagcagacgaaggagtcaggggtggaaaaactattcctttgaaataa

SEQ ID NO: 309252 - DNA, 829 bp, Unknown
  Bacterial polypeptide expressing nucleotide sequence isolated from the Sargasso Sea
atgtcattagataaaaaaaattcaatcaataacatacttgaagaaaagaggattttccatccatcaaaaaaatttgcagaaaactcgaatattagtactcaaaaagaattactaattctaaaaaaacaagcatcagataatccgattaatttttggggatcttttgcaaaatctgaattagattggtttgaaccatttcaaactgtattagataacgaaaatgcgcccttttttaaatggtttaaagaagggaaactcaatattacatataactgcttagatagacatattaagagagggcttggaggaaagaccgcacttatatgggaaggcgaaccaggagatagcaaaaaatatacttacgaagaacttctaaaagaggtttgtaaggcagctaatgcattaaaagcaattggtgtaaaaaaaggagatttggtatgtatttatatgccgatgattcctgaagcaatgtttgcgatgttagcttgtgcaagaattggcgcgcctcattcagttgtcttcggaggattttcttcagaagctttaaaagataggttgattgatggaaacgccagatttgttattactgctgatggtggttttagaaaagataaggtaattgaacttaagaaagcggttgatgcggccattgaaagtggagcagataaagttgtagaaaaagtaattgttgttcaacgatccaaaaaaaatattgcgatggttgatgatagagatttctggtggcacgaattagtaaaagatcaaaaagattattgtgaaccagaaataatgaatagcgaagatagactttttattctttatacttcag

SEQ ID NO: 309253 - DNA, 583 bp, Unknown
  Bacterial polypeptide expressing nucleotide sequence isolated from the Sargasso Sea
tatgtcagataaattcagcaaaatttacgatcattcaataaaaaatcctgaaaaattttggcaagaagcagctgaagatatcttttggtttaaaaaacccacaaaaattttaaataaatcaaatcctcccttctataaatggttcgaagatggagtaaccaacacctgttacaacgccttagacattcatatcgatcaaggtagaggaaaaaacattgctcttatctatgatagccccattacaggtaacaaaagtaaatttacctacgaggaacttagatctaaagttgcaaaatttgctggagcattaaaaaatcagggagtaaataaaggtgaccgagtaattatttacatgccaatgatcccagaggctgtgatcgcaatgcttgggtgtgcaagaattggtgcaatacactctgtagtctttggtggatttgcatctactgaacttgctagcagaattgatgatagtaaagcaaaactattagtgactgcttcatgtggttttgaacctggaagaacagttgagtataaacctttagttgatgaagcaatcaaaatagcaaatcataaaatagagaag

SEQ ID NO: 309254 - DNA, 937 bp, Unknown
  Bacterial polypeptide expressing nucleotide sequence isolated from the Sargasso Sea
tcagcagattctatttcgggaagagttaatgattgtgaatctgaatacataattactgcagatgaaggagtgcggggtggaaaaactattccactaaaatatacagtcgacgaagctttaatgagttgcccaaatgtaaagaaatgtattgttgtaaaacgaacaggtaactacatcaactgggatcaaaatagagatgtttggtatcatgacttaattaaagatgttcctaatcattgtgaaccagaggaaatgaatgcagaggatccattatttattttgtatacttctggttcaactggcaaacctaaaggagttcttcatactaccggtggttatatggtttatgcatcaatgacacatcaatatattttcaactataaaccaaaagatatttattggtgtactgctgatattggttgggtaactggacacagttatattatttatgggccactttcaaatggtgcaacaactataatgtttgaaggaattccaaattatcctgatagttcaaggtggtggcaaatagttgataaatataaagtaaatactttttacacagctccgactgcaattagagcattaatgcgagagggagataaaccagttaaaaaaacctctagaaaatcccttaaacttttgggaacggtaggagaaccaataaatccagaggcttggatgtggtactataaaactgtaggtaattctaaatgcccaattgtagatacttggtggcaaacagaaaccggaggtataatgattgctcctcaaacaggtgcaattcctcttaaacctggatctgcaacaaaacctttctatggaattaagccagtgcttgtagataaaaacggtaaagaaattaaaggagctggagaaggaagattatgtatagctcaatcatggcctggacaaatgagaactgtttatggtgatc

SEQ ID NO: 309255 - DNA, 442 bp, Unknown
  Bacterial polypeptide expressing nucleotide sequence isolated from the Sargasso Sea
atgagctcatctgatgtgtataaatctaaagattggattactgaaaaagcatttataaaaaaagatgattataaagctatgtatgaacaatctatctcgaaacctgatgagttttggtttgaacaaggacaaagattagattggtttactccatatacaaaggttagagattactcatatgaaaaaaatgatctttatattaaatggtatgaagatggtgaactcaacgcatcatataattgccttgaccgtcatatagaaaaaaatggtgataaaattgcagttatctgggagggagatgattcctctaattcaagaaaaattacatatcaagagctactcactgaagtatgtaaattttctaacgggctaaaatctttaggtataaaaaaaggtgacagagttactatttatatgcctatgattcctgaagctgccatcg

SEQ ID NO: 309256 - DNA, 622 bp, Unknown
  Bacterial polypeptide expressing nucleotide sequence isolated from the Sargasso Sea
attaaacctgttttggttgataaagatggcaaggtaattaaaaaagagggaaaaggacgactttgtatggcctcttcatggcctggtcagatgagaacagtttacggagatcatcaaagatttatagatacttatttttctcaatttgacggaaaatattttactggtgacggttgcaggcgtgacaaagatggatactactggataactggaagagtagatgatgtaattatagtttcaggccataaccttggaacggctgaaattgaaagtgcatttgttgcccatccaaaagttgcggaagcagctgtggtaggttttccacatagcattaaaggaaatggattatattgttatgtaacactaaatgcaggagaaaacccaacgggtgaccttgaaagagatcttaaactttgggttagaaaacaaatcggtccaatagcaacaccagatgttattcaatttgcaccaggattaccaaaaacaagatctggaaaaattatgagaagaattttaagaaaaattgctgccaacgagccagataatttaggagatactacaacattggcggatcctagtgttgtaacgtctcttgtggagaatagacaaaataaaggttaat

SEQ ID NO: 309257 - DNA, 754 bp, Unknown
  Bacterial polypeptide expressing nucleotide sequence isolated from the Sargasso Sea
gaccagattgcttatatttacgattcgccggttacagatacaaaccagaaaatttccttcaaagaattgcaagaaaatgtttcaaaatttgcaggaggtttgcaatctcttggactaaaaaaaggagataccgcagttatttacatgcctatgattcctcaggctgcttatgctatgcttgcttgcgcaagacttgggataacacattctgtagtttttggaggttttgctccacacgaattagctataagaatagacgattgtaaccctaaagtaatcatcacggcaagtgctggtgtagaagttaaaaaaagagttccttatcttccgtttgtaaaagaagcttatgaaatgtcttctcataaacccgaaaatattgtggttttcgacagacaactttggggtaataaagtagattgggaaaacgaacctcaacttaccaattttcaagaattgttagaaaaatcagaatctgtagattgcgttcctgtagcttctacgcatcctttgtacattctatacacttctggcactacgggcaaaccgaaaggagtaattcgtgatactggtggatacgctactgctcttaaattttctatgaaaaatatatatggtctcaatgaaggcgaagttttttgggccgcttcagatattggttgggtagttggtcatagttttatcatttatggtccacttttcaatagaaatacttctatcatttacgaaggaaaaccaattatgactccagatgcga

SEQ ID NO: 309258 - DNA, 938 bp, Unknown
  Bacterial polypeptide expressing nucleotide sequence isolated from the Sargasso Sea
ctgatttctctagattttggcaaatagttgataaacatgaagtaaacatattttacacggctcctactgctattagagctttaatgagagaaggtgataattatgttacaaaaactagtagatcatccttaaaacttttaggaacagtgggtgagcctatcaatcctgaagcatggaagtggtattacgagataccaggtaactcaaaatgtccaattgttgatacctggtggcaaacagaaacaggtggcatattaatttctcctcaaactggtgcgatcaaattaaaacctggctcggcttcaaaacctttttttggaattgaaccatgtattgttgataaagatggaaatgaattagaaggtgaatgtgaaggtatgttatgtatgaaaagatcatggcctggacaaatgcgaactgtgtatggtgatcacaaaagattcatagatacttatttttctcaatttgatgggaaatattttactggtgatggatgtagaagagataaagatggatattattggattacaggcagagtagatgatgtaattattgtatcaggacacaacttaggcactgctgaaatagaaagtgcatttgtatcacataaagatgtttctgaagcggcagttgttggatatcctcacgatgttaagggtaatggattatattgttatgtttctcttaaagttggtattgatacttcaaaagaattggtttcagatttaaaaaaaactattagagaaaaaattggtccaattgctacaccagactttatacatgttactgctggcttaccaaaaactagatcaggaaaaataatgagaagaattttaagaaagatagcctcaaatgattttggtaatttaggggatacttcaactatagcagacccatcggttgtcaatgatttaattgaaaatagaaaaaataaataa

SEQ ID NO: 309259 - DNA, 355 bp, Unknown
  Bacterial polypeptide expressing nucleotide sequence isolated from the Sargasso Sea
gatagagcatctctgcgcttgctgggcagcgttggtgagccgattaatcccgaagcttggatgtggtaccacaatattgttggcgaagcacgctgttcgattgttgatacctggtttcaaacagaaaccggtggaattatgattacaccgcttcccggtgccacagccaccaaaccagggtcagcgactaagccatttttcggtgtaaaaccaatccttgtcgacagtgaaaataacgtactcggcggagccaccgacggtaatttatgcattgaccattcatggcccgggcaaatgcgcaccgtttacggcgatcatcagcgctttatagaaacttatttcgtcgcgtttccgg

SEQ ID NO: 309260 - DNA, 499 bp, Unknown
  Bacterial polypeptide expressing nucleotide sequence isolated from the Sargasso Sea
atttattgatacttatttttctcaatttaatgggaaatattttactggtgatggatgtcgaagagataaagatggttattactggatcactggtcgtgtagatgatgtaataattgtttcaggtcataacctggggacagctgaaattgaaagtgcttttgttgctcacccaaaagtagcagaagctgctgtggttggttatcctcatgatattaaaggtaatggtttgtattgttatgtaaccttaaatgcaggagaaacagaaacaggcgaacttgagagagatttaaagctttgggttagaaaacagataggacccctagcaacaccagatctaattcattttactccaggacttccaaaaacgagatctggaaaaataatgagaagaattttaagaaaaattgctgctaatgagcatggtcaattaggagatacaactactttagcggatccgagtgtagttgatagtttagttgagaatagaaaaaatatttaa

SEQ ID NO: 309261 - DNA, 601 bp, Unknown
  Bacterial polypeptide expressing nucleotide sequence isolated from the Sargasso Sea
atgtcaactaatctattttctccgaacaaagaattttcagctgatgcagatattaattcaatagatcaatacaaggatttatataaaaaatcaatattagatccagaagctttttgggcaaaaactgcagatcgaatcacttggtataaaaaatgggaccaagttagagagtatgattttgaaaatggatcaattaaatggtttgatggtgcaaaacttaatgttagttataattgtttagatcgccatattgaaaatggctttggtgaacaaactgctattatatgggagggaaataatccagaagaagaccaaacttttacttataatgatttactttttgaggtgaaaaaatttgctaatgttttgaagggcattggagtgaaaaaaggtgatcgcgtatgtctttatatgcaaatggttcctcaattgcctattgcaatgcttgcatgtgcaaggataggtgcagtgcattcggttgtgtttggtgcatttagccctggatctttaagagatcgtattaatgattcatcttgtaaagtactaataacccaagatactggagttcgaggaaccaagcagaatattccaagaaaataaa

SEQ ID NO: 309262 - DNA, 569 bp, Unknown
  Bacterial polypeptide expressing nucleotide sequence isolated from the Sargasso Sea
tatgagtgaaaatgaaaagtttgaagtaagcagtgaatggtctgcagaagctcaggttaattccgctaaatataatgagtggtatgaaaattcgctcaataacaatgaagaattttggaatgagcacggtaaaagaattgattggattaaaccgtatacaaaagtaaaagacgtttcttacaacaaagataatttctcaatcaagtggtactatgacggtacgcttaatgcatcaagtaactgtattgacagacatttaaaagataaagctgatcaaaccgcaatcatttgggaaggcgatgatccagctgactcaaaacacattacttataaagaattacacagtgaggtatcaaaacttgctaatggtatgaaatctcttggagtaagaaaaggtgaccgtgtaactatttatatgccgatgattccagaagcggcgtatgcaatgctagcgtgtacaagaattggcgcaattcactcagttgtatttggaggtttctctccagactcgttagctggaagaataagtgattgtaaatcagatattgtgatcactgcggatgagggcg

SEQ ID NO: 309263 - DNA, 342 bp, Unknown
  Bacterial polypeptide expressing nucleotide sequence isolated from the Sargasso Sea
ttgtagcacatccaaaagttgcagaagctgcggtggttgggtacccacatgatataaaaggaaatggattgtattgttatgttactttaaacgtaggacaagagcctagtggagacctagaaagagaattaaaactatgggtaagaaaacaaattggtgcaattgctactccagattttattcagttttcacctggactaccaaaaacaaggtctggaaaaataatgagaagaattttaagaaagatagctgctaatgaacatgaacaacttggagatacgacaactttagctgatccaagcgtagttaaaagtctagttggaaatagaaaaaatacttaga

SEQ ID NO: 309264 - DNA, 928 bp, Unknown
  Bacterial polypeptide expressing nucleotide sequence isolated from the Sargasso Sea
ctcaggtggtgtaagacactgcattgttgtgaagcgaacaggtggtgagactggttgggaagaaggcagagatgtttggtaccatgaattaactaaaagtgcctcagacgattgtcctccagaagaaatgagtgccgaagatcctttatttattctttatacatcaggctctacaggaaaaccaaaaggtgtcatgcatacaactggcggctatatggtttacgcatcaataacacatcaatatgtttttgattataaacctggcgatatttattggtgtactgctgatgtcggttgggtaactggtcatagttatattgtctatggaccactagctaatggcgctgtcacagtaatgtttgaaggtgtcccaaattatcctaacgcttcaagattttgggaagtagtagacaaacacaaagttaatattttctatactgcacccactgctattcgtgcattaatgcgagagggcgaagacccagttaaaaaaacaagtcgatcgagtttaaaacttttgggaaccgttggtgaaccaattaatcctgaagcatggatgtggtattataatgttgtaggtgatggtaaatgtccaattgttgatacatggtggcaaacggaaacaggcggtattttaattacaccgttaccaggagcaattgctcaaaaaccaggctcagcgactaaacctttctttggaattcaaccagagattctcgatgctgaaggaaatattttagaaggtgcatgtgaaggatctttatgtctcgcagattcatggcctggacaaatgagaactgtatatggtgatcatcaaagatttattgaaacttatttctcacaatttgaaggaaaatattttactggagatggatgtaaacgagatgatgatggttactattggattacaggacgtgttgatgatgta

SEQ ID NO: 309265 - DNA, 794 bp, Unknown
  Bacterial polypeptide expressing nucleotide sequence isolated from the Sargasso Sea
aaaaaaaattacatataaagaacttcataaagaagtttcaaaagcagcaaatggattaaaaaatttgggagttcaaaagggagatagagtaactatttatcttactatgataccagaacttgcctacacaatgcttgcatgtgctagaataggtgcagttcactccataatatttggaggtttttcaccagatagtatttcaggtagaattaatgattgcgaatctgactatgtgataactgcagatgaaggtgtaagaggtggcaaaataatccctttaaaatctattacagatgaagctttacaaagctgtccaaacgtaaagaaatgtattgttgtaaagagaacaggtagcaaaaaaattgattggtacaatgatcgtgatgtttggtatcacaaaatgattagtaaagtttcagcaaaatgtgagcctgaggaaatgaatgctgaagatccattattcattctttacacatctggttcaaccggaaaaccaaaaggtgttctacatactactggcggatacatggtttatgcatcaatgactcaccaatatatttttaattataggccaaaagatatttattggtgcacagctgatataggttgggttacgggacatagttatattatttacggtccacttgctaatggagcaaccacaataatgtttgaagggatacctacatatcctgatacatctagatggtggcaaatagttgataaatataaagtaaatattttctatacagctccgacagcaattagagctttgatgagagagaggggataaa

SEQ ID NO: 309266 - DNA, 487 bp, Unknown
  Bacterial polypeptide expressing nucleotide sequence isolated from the Sargasso Sea
aaaaccttccgtggcatgtactttaccggtgacggcgcgcgccgcgatgaagacggttactactggatcaccggccgtgtggacgatgtgattaacgtctccggccacagattaggcacagcagaagtagaaagtgcactagtgtcacacgaactggtcgctgaagccgccgttgtgggctatccccatgatattaaaggtcaaggtatttatgcctatgtcaccttaacccgcggcacagaagagagtgaagagcttcgccaagagctgcgccaatgggttcgtaaagaaattggcgctctggccacaccggatcttatccagtgggcgacaggattacctaagacacgttctggcaaaatcatgcgccgtttcctgcgtaagattgccgctaacgaagtgaccaacttaggtgacgcatcaacactggccgacccagccgtgattgagaccttgattgaaactcgcttgaatcgtaacgagtaat

SEQ ID NO: 309267 - DNA, 760 bp, Unknown
  Bacterial polypeptide expressing nucleotide sequence isolated from the Sargasso Sea
atgtcacatccatcagtttatccggtacccgccagtgcagcaaaacgctcacttctgaccaacgagcagtatatgcagatgtatcagcagtctgtcagctcaccagatacgttctgggcggaacatggtaaacgtctgcactggtttaccgcttttagcaaagttaaaagcaccagcttcgaaagcggcaaagttggtatcaactggtttagcgacggcgtattgaacgccagctacaactgcctggaccgccacttgccggagcgagcagatcaggtcgcttactactgggaaggcgactctccagatgtgcaaaaaactgtcacttacgctcaactgcaccagcaggtctgccagctggccaatggtatgaagtcgctgggcattaaaaaaggtgaccgggtaacaatatacttgccgatgatcccggaagcgactgtggcactgctggcgtgcgcccgcataggtgccgtgcactcggtcgtgtttgccggcttttcaccggacgcgcttggcagccgtattgtagattgtgattcaaaactggtgattacagcagatcaggcgctgcgcggtagtcgcgttacaaacctaaaagacaataccgacatggcgctggcacaccttggcgctgattcgccggtgcagaatgtcatcgttgttaagcatgttggcaagaatgttgacatggatgccggtaaagacggccgggatgtctggtatcacgaattactgggcaagcaaagcagcgactgcccgg

SEQ ID NO: 309268 - DNA, 823 bp, Unknown
  Bacterial polypeptide expressing nucleotide sequence isolated from the Sargasso Sea
aaaaagggtgatcgtataataatttatatgcctatgattcctgaggcaatcatggcaatgttagcatgcggtaggattggagctgttcactcagttgtatttggcggatttgcatctaatgaattagcaagccgaatagatgattctaaagcaaggatgattttatcagcatcgtgtggattagaacctggtagaactgttgattataaacctcttctagatgaagcaaagaaaattgcaaaacacaaagttgaaaagactgtaatttttcaaagagaacaacatgaatataaacttgaaaaggacgatgttaattggaatgagtttattgaggatgcaattaaagtagaatgtgttgaatgtgactctaatgatccagcttatattttatatacatctggaactaccggtgttcctaaaggtatattaagagatataggtggtcacatagtcggattaaaatggaccatgaaaaatatatacgacattgatccaactgatgtatggtggtccgcgagtgatatagggtggattgtgggtcattcttatattgtgtatggccctttgtttcatggttgcacaactttaatttttgagggaaaaccagttggcactcctgaccccggctctttttggagagttatttcagaatataatgtaaagacactattcactgcacccacagcttttagagctattaaaaaagaagaccctgaaggtaaattttttaaaaaatatgatttgtcaaaatttgaagctttatatttagcaggtgagcgcgccgatccagatacaattcattgggctgaaggattgttaaaaa

SEQ ID NO: 309269 - DNA, 854 bp, Unknown
  Bacterial polypeptide expressing nucleotide sequence isolated from the Sargasso Sea
gtcgctttatttagctggagctttaaaaaaacaaggcgttaagaaaggagatagagtaattatttatatgccgatgattcctgaagctgctattgcaatgttagcttgcggaagaataggagcaatacattctgtggtatttggtggttttgctgctaacgaacttgctagtagaattgatgactctaaagcaaaattaattgtttctgcatcctgtggttacgagcctggtcgaactgttaattataaacctttggtaaacaaagcgctagaactcgcaagtcataagcctaacaaatgtataatttttcaaagagagaaagataaagcagaattaaatccagctatggacattacttgggaagattcactaaaagatgtcaaaccagctgattgtgaaaaaatgaatgctaatgattatgcgtacatactttatacctctggtacaactggattacctaaaggaatagtaagagacattggtggacacatagttgcgcttaagtggaccatgaaaaatatttataacattaatcaagatgatatttggtggtcagcaagtgatattggctggattgtaggtcactcttatattgtttatgctccgttattttatggatgcacaacaattttatttgaaggaaaacctgtaggaacacctgatgcaggtgttttttggagagttatttcggaacataaagttaaatctctttttaccgcacctacagctataagagcaattaaaaaagaggatccaaatggagaattttttaaaaaatataatctaagcaaatttgaaaaactgtttcttgctggtgaaagagctgatccagatactattaaatggtttgaaa

SEQ ID NO: 309270 - DNA, 898 bp, Unknown
  Bacterial polypeptide expressing nucleotide sequence isolated from the Sargasso Sea
tgtgagcctgaagaaatgaatgctgaagatcctttatttattttatacacatcaggttcaactggaaaaccaaaaggagttcttcatacaacaggtggatacatggtgtatgcatcaatgactcatcaatatatttttaattacaaaccaaaagatatttattggtgtacagccgatattggttgggtaacaggtcacagttatattatctatggtccactttcaaacggcgcaacaactataatgtttgaaggaataccaaactatcctgatagttctagatggtggcagatagtagataaatacaaagtaaatactttttatactgcacctactgcaatcagagcactgatgagagaaggtgataagcctgtcaaaaaaacttctagaaaatctttaaagttacttggaactgttggtgaaccaatcaaccctgaagcttggatgtggtattacaaaatagttggaaattctaagtgcccaattgtagatacatggtggcagacagaaacaggagggatattaattgctcctcaaacaggagctattccactaaaacctggttctgcaacaaagccattttatggaataaaacctatgttagttgataaatcaggtaaagaaattaaaggacccggagaaggaagactttgtatagcgcaatcatggcctggacaaatgagaacagtatacggtgatcatcaaagatttattgatacttatttttctcagtttgaaggaaaatattttactggtgacggatgtcgaagagataaggatggatattactggattacaggtagggtagatgatgtaattattgtatcaggacacaatttaggtactgcagaaattgaaagtgcatttgtagctcatccaaaggtagcagaagcagcag

SEQ ID NO: 309271 - DNA, 836 bp, Unknown
  Bacterial polypeptide expressing nucleotide sequence isolated from the Sargasso Sea
tcaaataaatgtgaacccgaagaaatgaatgcagaagatcctttatttattttatatacttcgggatcaacaggaaaaccgaaaggggtgatgcatacaacaggagggtatatggtttacgcatcaatgactcatcagtatatattcaattataaacctaaagatatttattggtgtacagctgacattggttgggtaactggtcatagctatattatttatggaccattatcaaatggagcaacaacaataatgtttgagggaattccaacttatcctgatagttcaagatggtggcagatcgttgataaatataaagtgaatattttttatacagcaccaacagcaataagagctttaatgagagaaggtgataagcctgttaaaaaaacatcaagaaaatcactgaaattattaggaaccgtgggcgaaccaatcaatccagaagcatgggagtggtattataaaactgttggagattcgaactgcccaattgttgatacttggtggcaaacggaaacgggtggaatattaatcagtcctcaaacaggtgctataaatttaaaaccaggttcagcaacaaaaccattttatggaattaaaccagtaatagttagtaaagatggaaaagttttaaaaggagaagctgaaggtcgattatgtattgcacaatcttggcccggtcagatgcggacagtttacggtgatcatcaaagatttattgatacttatttttctcaatttgacggaaaatattttacaggagatggatgcagaagagataaagatggatattactggattacaggaagagttgatgatgtgataatagtatc

SEQ ID NO: 309272 - DNA, 888 bp, Unknown
  Bacterial polypeptide expressing nucleotide sequence isolated from the Sargasso Sea
atggcataggagataaaacagcacttatttacgatagtccaattacaggtaacaaattaaagctcacatataaagaattgaaggataaagtatctaaatttgctggggctttaataaatcaaggagtaaaaaaaggagatagagttataatatacatgccaatgataccagaggcagtggtagctatgcttgcttgtggaagaattggagcaattcattcggttgtttttggcggatttgcatcaaatgaacttgccagcagaattgatgacagtaaagctaaaatattactaacagcatcttgtggttttgaaccttcacgaacagtagaatacaaaccgttagtagatggagcattaaaattggcaaatcataaagttgaaaaagtaatttttttccaaagaaaaggaaatgaagtcaaattaaatgctcctttagaaattagttgggacgaagctttatctaattcaaaagacacagattgtgttgaaatgaattcaaatgaatatgcatatattctttacacctctggtactacaggtataccaaaaggtattgttagagacatagggggacacatagttgcattaaaatggactatgaaaaatatatataacattaataaagaagatgtttggtggtcagccagtgatataggatggatagttggtcactcatacatagtttatgcacctttgtttaaaggatgtacaacggtattattcgagggtaaacctgtagggacacctgacgctggtgctttttggaagattatttcagattataaagttaaatcacttttcacagctccgactgcttttagagcaattaaaaaagaagacccggatggaaaatttttttccaaaatacaacctgagttcatttaaa

SEQ ID NO: 309273 - DNA, 736 bp, Unknown
  Bacterial polypeptide expressing nucleotide sequence isolated from the Sargasso Sea
aatggaaataaaagaaagttggataaaagaagctaaggttaattcacagacctatgaaactaaatataataattcaataaaagataatgatagtttttggagagaagaaggcaaaagaattgattggataaaagattattccaaaattaaacatgtgaaatattcaaaaaaagaagttgatattaagtggtattatgatggttctcttaatgttgcttataactgtatagatcgacatgcaaaaaataatcctgacaggatagcaataatatgggagggtgacgatcctaacgaagttaaaaatataagttataaagagttattaactaatgtttctaaagcttcaaatgtgcttaaaaagcttggtgtcaaaaaaggagatagagttacaatctatttaacaatgatccctgagcttgcatatatgatgcttgcttgtgctagaattggtgcgattcattcaattatttttggaggtttttcagcagactctatatctggaagaattttagactgtaaatcagagtttgttataactgcagatgaaggtgtaagaggtgggaaaaaaatacccttaaaaaatattactaacactgctctagaaagctgtcctgatgttaaaaaatgtctagttgtaaaaagaactggagaaaacattgatatggttcaagggcgtgatgttttttataatgatttaattaaagatgttgaaagaacttgtgaaccagaaataatg

SEQ ID NO: 309274 - DNA, 897 bp, Unknown
  Bacterial polypeptide expressing nucleotide sequence isolated from the Sargasso Sea
agataaaacagcaattatttgggtgggagatgacccaaaagatactcaaaaaatttcatataaacaactccaccaaaaagtttctaaagctgcaaatggtttaaaaaaactaggtattaaaaagggcgatagagtaacaatttatcttactatgattccagaattggcaatacttatgcttgcttgtgtaagaataggtgcggtgcattcaataatttttggaggtttttctgcagactcaatttcgggaagagtaaatgattgtgagtctgaatatattattacggctgatgaaggtgtaagaggaggaaaaactattccactcaaatcaataacggatgaggctttacttaactgtcctaatgttaaaaattgcatagtagtaaagagaactggaaattatattaattgggatgatagtagagatgtatggtttcatgatttaattaaagatgtatcaagtcaatgtgaaccagaagaaatgtcagcagaggatccactttttattctatatacatctggatcaactggtaaaccgaaaggggttcttcacacaactggaggctacatggtttatgcatcaatgacacaccaatatatttttaattataaaccgaaggatatttattggtgtacagctgatattggttgggttacaggtcatagctacattatttatggtccactttctaatggagctacaactatcatgtttgaaggtgttccaacctatccagatagctcaagatggtggcaaataattgataaatacaaagtaaatattttttacactgctccaactgctattagagcacttatgagagaaggagaagatccagttaaaaaaacatcgagaaaatctctaaaattattaggaactgtaggggaaccaataaa

SEQ ID NO: 309275 - DNA, 776 bp, Unknown
  Bacterial polypeptide expressing nucleotide sequence isolated from the Sargasso Sea
ggtgttaggggtggaaaaacaattcccctaaaagctactacggatgaagctttagttaattgcccaaatgtaaaaaaatgtattgttgttaaaagaactggaaattttataaactggaatcccgagagagatgtttggtatcatgaaataacaaaaaaagtctcttctaattgtgaaccagaagaaatgagcgctgaagatcctctgtttatcttatatacatctggatcaacaggaaaaccaaaaggtgttttacatacaactgggggctatatggtttatgcatcaatgacacatcaatatatttttaattataaacaaaaagatatttatttttgtactgcagatattggatggattactggacatagttatattatttatggacctctctcaaatgcagcaacgaccataatgtttgaagggataccaacttatcctgacttttctagatggtggcaaatagttgataaatacaaagtaaatattttttatactgctccaactgctataagagctttaatgagagagggtgatggtccagtaaaaaaaacatcaagaaaatctctaaaaatattaggaactgttggagagccaattaacccagaagcttggcaatggtactataaaactgtcggtgactctaaatgtcctattgtggatacttggtggcaaacagaaacaggaggtatattaattagtccacaaacaggggccattgatttaaaacctgggtctgcaactaaaccattttatggaataaaaccagttatagt

SEQ ID NO: 309276 - DNA, 623 bp, Unknown
  Bacterial polypeptide expressing nucleotide sequence isolated from the Sargasso Sea
aatgtcaaaaaaatttcaaaatatttatgaaaattctataaaaaaccctgaaaaattttggcaagaagcaagtgaagatatcttttggtttaaaaaacctacaaaaattttaaataaatctaatccccctttctataaatggttcgaagatggagtcaccaacacttgttataatgctctagacactcacattgaccaaggaagaggtcaaaaaactgctttaatctacgatagtcctattacaggcaataaatctaagttcacttatgaagaacttagagcaaaagtatcaaaatttgcaggagccttaaaacaacaaggtgtaaataaaggagatagagtaatcatttacatgccaatgatccctgaggcggtaattgctatgcttgcttgtgcaagaattggggccattcactcagtagtctttggtggatttgcctcaaatgaacttgcaagcagaatagatgacagtaaagcaaagttattagtaacggcttcatgtggttttgagcctggaaggacagttgaatacaagcctctagtagatgaggctataaaaatagccaatcataaaattgaaaagatgattttgtttcaaagaccaggaaatgaagtcaaattaa

SEQ ID NO: 309277 - DNA, 472 bp, Unknown
  Bacterial polypeptide expressing nucleotide sequence isolated from the Sargasso Sea
tatgtcggataatttcagggaaatttatagaaaatcaattgaagatcctgaaaatttttggaaagaggcttctgacgatatattttggtttaaaaaaccctcaaaaattttaaacaaatcaaaccctccattctacaaatggtttgaggatggggttacaaacacttgctacaacgcattagatgttcatattgacaaaggtcaaggtaataaaactgcactaatttatgatagtcccatcacaggtaacaaaagtaagctaacatatgaggaactaagatcaaaagtttctaaatttgctggtgctttaaaaaatcaagacgttggtaaaggtgatagagtaataatttatatgccaatgatccctgaagcagtcattgcaatgcttgcttgtggaagaattggagcagttcactctgttgtttttggtggatttgcatctaatgaacttgcaagcagaatagatgacagc

SEQ ID NO: 309278 - DNA, 871 bp, Unknown
  Bacterial polypeptide expressing nucleotide sequence isolated from the Sargasso Sea
atgatccctgagttagcatatgttatgttagcttgcgcaagaattggagcagttcactcaattatatttggaggattttcacctgactcgatagctacaagaattaacgattgtgagtcaaattatcttattacggctgatgagggcgtaaggggaggtaaaattattccacttaaaaaaattgcagatgaagcattaagtcaatgtcctgatgtaaaaaaatgtgtggtagttcaaagaactggtaatcaagtagattgggatgatgaaagagacatttcttataaagatatgatttcatctgcttcaaacaaatgtgagcctgaggaaatgaatgctgaagatcctttatttattttgtatacctcaggttctacaggaaaacctaaaggagttttgcataccactggtggctatatggtgtatgcatcaatgacacatcaatatatttttgattataaaagtaacgatgtttattggtgtacagctgatattggttgggtaacaggacatagttatataatttatggcccgttagctaatggagcaacaacgataatgtttgagggcgtacctaattatccggatagctctcgttggtggcagatagtagataaatataaagtaaatattttctatacagctccaaccgcaattagagccttaatgagcgaaggtgaaaaaccagtaaagaaaacaagcagaaaatcacttaaattacttggaactgtcggtgaaccaataaaccctgaagcatggatgtggtactacaagactgtaggagactcgaggtgtccaatcgttgatacttggtggcaaactgaaacgggaggtatattaattgctcctcaaccaggtgctatagatttaa

SEQ ID NO: 309279 - DNA, 957 bp, Unknown
  Bacterial polypeptide expressing nucleotide sequence isolated from the Sargasso Sea
taaacctgaatgggtaaaaaggagtttagcaaataaagcccaatatcaaaaaaaatattctgattctattaaaaataataattcattttggaaaaaagaaggaaagagaattacttggataaaaccttacaaaaaaattaaagatgtcaaatatagtaaagacgaagtaagaattaaatggtttgaagatggtactttaaacgcatctgcaaattgtattgatcgtcatctaaaagataaaaaagataaaactgcaattatatgggtaggggatgatcctaaagatactcaaaaaatttcttataagcaattacatcaaaaagtttcaaaagctgctaatggtctaaaaaaactagggatacaaaaaggcgaccgtgtcactatttatttaacgatgatacctgaattagcaatactgatgttggcttgcgcaagaataggtgccgtccactcaataatttttggtggtttctctgcagagtcaatttcaggaagagtaaatgattgtaaatcagaatatataattactgctgatgagggagtaagaggaggtaaaactattcctttaaaagcaacgacagatgaagctttatctaattgtccagatgttaaaaaatgtattgtagtaaagagaactggtaattatgtatattgggatcaagatcgagatgtctggtatcacgacctaattaaggatgtaccaaatcattgtgagcctgaggaaatgagtgcagaggatcctttatttattctctatacatcaggatcaaccggaaagcctaaaggagtattacatactactggaggatatatggtttatgcttctatgactcatcaatatattttcaattataaaccgaatgacatttattggtgtacagcagatattggatgggtaactggtcatagctatataatttatggaccattagctaatgggtgcacaaccattatgtt

SEQ ID NO: 309280 - DNA, 527 bp, Unknown
  Bacterial polypeptide expressing nucleotide sequence isolated from the Sargasso Sea
cgtttatggcgaccatgaacgcttcgtgctgacctatttcaaaaccttccgtggcatgtactttaccggtgacggcgcgcgccgcgatgaagacggttactactggatcaccggccgtgtggacgatgtgattaacgtctccggccacagattaggcacagcagaagtagaaagtgcactagtgtcacacgaactggtcgctgaagccgccgttgtgggctatccccatgatattaaaggtcaaggtatttatgcctatgtcaccttaacccgcggcacagaagagagtgaagagcttcgccaagagctgcgccaatgggttcgtaaagaaattggcgctctggccacaccggatcttatccagtgggcgacaggattacctaagacacgttctggcaaaatcatgcgccgtttcctgcgtaagattgccgctaacgaagtgaccaacttaggtgacgcatcaacactggccgacccagccgtgattgagaccttgattgaaactcgcttgaatcgtaacgagtaat

SEQ ID NO: 309281 - DNA, 805 bp, Unknown
  Bacterial polypeptide expressing nucleotide sequence isolated from the Sargasso Sea
tgtacagcagacatttggttgggtaactggacatagttatattatttatggaccattatcaaatggtgcaacaacaataatgtttgagggaattccaacatatcctgatagctcaagatggtggcaaatcgtcgataagtataaagtaaatattttttacactgctccaacagcaattagagctttaatgagagaaggtgaaaagcctgttaaaaaaacatcaaggaaaacattaaaattattaggaactgtaggagaaccaatcaatccagaagcatgggaatggtactataaaactgttggggattctaattgtccgattgttgatacttggtggcaaacggaaacgggtggaatattaattagtccacaaacaggtgctataaatttaaaaccaggatcagcgacgaaaccgttttatggaataagacctgtaatagtaaataaagaaggaaaagtattaaaaggagaagctgaaggtcgattatgtattgcacaatcttggcctggtcagatgaggacggtttatggtgatcatcaaagatttattgatacttatttttctcaatttgacggaaaatattttacaggagatggatgtagaagagataaagatggatactattggataacaggaagggtagatgatgtgataatagtatcgggacataatcttggaactgcggagatagaaagtgcattcgttgctcatccaaaagttgctgaggctgcggttgttggatatcctcatgatattaaaggtaatggtttgtattgttacgtaactttaaatgtgggtgaaaaa

SEQ ID NO: 309282 - DNA, 847 bp, Unknown
  Bacterial polypeptide expressing nucleotide sequence isolated from the Sargasso Sea
aagataaaacagcaattatctgggttggagataatccaaaagatagtcaaaaaatttcatataaagaattacatcgaaaaagtatcaagagctgctaatggacttaaaaaattagggataaaaaaaggtgatcgagttacaatctatttaacaatgattcctgagttagcaattttgatgctagcatgtgttagaattggagcagtacattctattatttttggaggattttctgctgagtcaatttcgggcagagttaatgattgtaaatcagaatacattattacagctgatgagggtgttagaggtggaaaaactattcctttaaaagatacaactgatgaagcgttaatgagttgtccaaaagttaaaaaatgtatagttgttcagcgaacaggaaattatattaattgggataataaaagagatgtttggtatcatgaattaattaaagatgtttcgaacaattgcgagccagaagaaatgaacgctgaagatcctttgttcattttatatacttctggttctactggaaaaccaaaaggtgttttacatactacaggtgggtatatggtttacgcttcaatgactcatcaatatatttttaattataaacctaaagatatctattggtgcacagctgacattggttgggttacaggacatagttatattatttacggtccacttgctaacggtgcaaccacaataatgtttgagggtattccaaattatcctgatacctcaaggtggtggcaaataatagataaatttaaagttaatactttttacacaccaccaactgctatcagagctttaatgagagaaggagataaaccagttaaga

SEQ ID NO: 309283 - DNA, 476 bp, Unknown
  Bacterial polypeptide expressing nucleotide sequence isolated from the Sargasso Sea
atataaggggttatattttacaggtgatggctgtcggcgtgatgaagatgggtattactggattactggacgtgttgatgatgttttgaatgtttcaggacatcgaatgggtacagccgaattagaatcagcactggtgcttcatgaaaatgtggctgaagctgcagttgtcgggttcccccatgaaatcaagggccaggggatttatgcctttgtaacattaaacacaggagttgagccgactgctgaattgcaaaaagaattagtacaactcgttcgaaaagagatcggcccgatagcttcttttgatgtagttcaatgggcaccgggacttccaaagacgcgttccggaaaaataatgcgtcgtatattgcgtaaaattgctgaaaatgagatggaaagcatcggcgatacttccacacttgctgatccgtctgtagtagatgatttaatttccaatcgtcctgcaaattaag

SEQ ID NO: 309284 - DNA, 326 bp, Unknown
  Bacterial polypeptide expressing nucleotide sequence isolated from the Sargasso Sea
agctgaagcagctgtggttggatttccgcatagtataaaaggtaatggtttatattgttatgtaactttaaacgctggtgaaaaccctactggagatttagaaagagatcttaaactttgggttagaaaacaaatcggcccaatagctacacctgatgtcattcaatttgcacctgggttaccaaaaacaagatccgggaaaattatgagaagaattttaagaaaaattgctgccaatgagcctgataatttaggtgatacaacaactttggcagatcctagtgtagtaacatctcttgtagagaatagacaaaataaaggttaat

SEQ ID NO: 309285 - DNA, 708 bp, Unknown
  Bacterial polypeptide expressing nucleotide sequence isolated from the Sargasso Sea
ttaaaagataaaaaagataagactgctataatttgggtaggagatgatccaaaagatagtcaaaaaatttcttataaacaacttcaccaaaaagtatcgaaagctgcaaatggtttaaaaaaattgggaattaaaaaaggtgatcgtgtaacgatttatttaacaatgattccagagttagcaattttgatgttagcttgtgtaagaattggtgcagtccattcaattatttttggtggtttttcagcagactctatttcgggaagagtaaatgattgcgaatctgaatacatcattactgctgatgaaggagtgcgtggtggaaaaactataccactgaaatatacagtcgatgaagctttaatgagttgtccaaatgttaagaaatgtattgttgttaaacgaacaggtaattatatcaactgggatcaaaatagagatgtttggtatcatgatttaattaaagatgttcctaatcattgtgaacctgaagaaatgaatgctgaggatcctttgtttattttatatacttcgggttcaacagggaaacctaaaggagttcttcatactactggtggttatatggtttatgcatcaatgactcatcaatatattttcaactacaaaccaaaagacatttattggtgtactgctgatattggctgggtaactggacatagttacattatttatggaccactttcgaat

SEQ ID NO: 309286 - DNA, 809 bp, Unknown
  Bacterial polypeptide expressing nucleotide sequence isolated from the Sargasso Sea
atcagctaattgtattgatagacatttaaaaagaaataaagacaaaactgcaataatatgggttggtgatgatccaaaagttcacaaaaaaattagctataaacaattacatcaagaagtttcaaaagcagcaaatggattaaaagaaataggtgtaaaaaaaggagatagagttacaatttatttaacaatgatacctgagttagcatacacaatgctagcatgtgcaagaataggggctgttcattcaattatctttggaggtttttctgcagacagtattactggcagaattaatgattgtaagtctgactacgttattactgctgatgaaggtgttagaggtggaaaaattatacatttaaaagaaacggttgatgaagcccttttgaattgcccaaatgttaaaaagtgtgttgtagtaaaaagaactggaaacagaattaattgggatgaaagtagagatgtttggtatcacgatataactaaaaaagcttcaaagaattgtgaacctgaagaaatgaatgctgaagatccattatttattttatatacatctggttccacaggaaaaccaaaaggagttttacacacaactggtggttatatggtttatgcctcaatgacccatcagtatatttttaattataaaccaaaagatatatactggtgtacagctgatattggctgggttacaggtcacagctatattatttatggaccactttcaaatggagcaacaacaattatgtctgaaggtattccaaattatcctgattggtccagaatggtggcaaatagtagataaa

SEQ ID NO: 309287 - DNA, 280 bp, Unknown
  Bacterial polypeptide expressing nucleotide sequence isolated from the Sargasso Sea
taatggtttgtattgttatgtttccttaaaggttggtgtagattcatcagatgatttggtactagatttaaaaaaaactattagagaaaaaattggtccaattgcaacacctgattttatacacatcactgctggtttaccaaaaactaggtccgggaaaataatgagaagaattttaagaaaaattgcttctaatgattttgataatttaggagatacttcaacactggcagacccatcagttgtaaataatttaattaaaaatagaaaaaataaataa

SEQ ID NO: 309288 - DNA, 749 bp, Unknown
  Bacterial polypeptide expressing nucleotide sequence isolated from the Sargasso Sea
attgtcaggaaattacaaaaaaatctatgattcgtctataaaaaatagagaaaatttttggaaaaatgtatccgaagatattttttggtacaaaaaaccttcaaaaatacttaattcctcaaatccacctttttataaatggtttgaagatggcgttacaaacacttgttacaacgctttagattttcatgttgataaaggaaggggaaataaaatagcaattatttatgatagtccaattacaaatacaaagtgtgaattaacatacagtgaacttaaagaaaaagtatcaatttttgctggggctttaaaaaatcaaggaattacaaaaggggatagagtaataatttatatgccaatgataccggaggcagtagttgctatgctagcttgtggacgaattggagctattcattcagtagtattcggtggctttgcagcaaacgaacttgcaagcagaatagatgactcaaaggccaaattaataatttcagcttcgtgtggttatgaaccaggacgtactgtacactataaaccacttttaaataaagctattgaaatatcaaatcataaacctgagaaatgtattatttggcaaagggagaaagataaagctgagttagactcaaaattagatatcgactggatggaagctttgaaaaaggcaaaaccaacagaatgtgaaaaaatgaactctaacgattatgcttacatactttatacatctgggacaacaggaacaccaaaag

SEQ ID NO: 309289 - DNA, 825 bp, Unknown
  Bacterial polypeptide expressing nucleotide sequence isolated from the Sargasso Sea
cgaagcaagattgttattacagcagatggtgcttggagaaggggagacatagttcctctaaaacagaatgtggatgactccctaaagcttactgatcatatagagagcgtaatagttgtaaagagaactgagaatgaagtaacaatggttgatggcagagactattggtatagcgaacttgtagataagcaggaagctgattgtgaacctgaagtaatgaacgcagaggacatgttatatatcctctatacatcaggaacaacagctaagccaaaaggaatcgtccacacacaggctggatatcttactggtgttactacaacacattcggcagtatttgatgtaaaggaagatgacatctattggtgtgccgcagactgtggttgggtaacaggtcatagttatattgtgtacggacctttagcaaacaaaacaacaagcgttatgtatgagggtgcaccaaacgcaccagatgaaaaaagactttggagcatagttgaaaaatataaagtaaatatattttacactgccccaactgcaattagagctttcatgaagtggggagtcgaacatccccaagcacatgacttaacgtcactcagattgttgggtactgttggggagccaattaacccagaagcctggatgtggtaccacgaaaacataggaaatgaatcctgtgcaattgtagatacatggtggcagacagagactggttcaataatgattacacccctgccagggataaatagtactaaaccagggtcagcatgtggtccaatgccaggcatagatgcagttgttgttgatgaaaatgggaacgaa

SEQ ID NO: 309290 - DNA, 988 bp, Unknown
  Bacterial polypeptide expressing nucleotide sequence isolated from the Sargasso Sea
aaaaaattaaaaattatggctaaaagatcaaaaaaaaaaataaaaaaaaagaaaaaaattagtaaaaaattaagatcctctgaaaaaaatcaagaactaacaataaaaattagatctgattgggtaaaaaaagctctaataaataaaaaacaatatgaaaaaaaatatagtcactctttaaaaaataacgatgatttttggaaaaaagaaggtaagcgtattacctggatcaaaccttataaaaaaataaagaatgtaaaatatagtaaatcagatgttaatattaagtggtattatgatggtacccttaatgcatctgcaaactgcattgatagacatttaaaaaagaataaagataaaacagctattatttgggttggagatgatccaaaagttcaaaaaaaaattacctacaaacaacttcatcaagaagtttctaaaacagcgaatgctttaaaagaattgggtattaaaaaaggtgacagagttacaatttatctaactatgatacctgaactagcatacacaatgttagcctgtgcaagaattggagcagtgcattcaattatatttggtggtttctcaccagacagtatagctggtagaattaatgactgtaaatctgattacgttgtaacagcagatgaaggcttaagaggaggaaagactattccattaaaatctattactgacgaagcattagttaattgttctaatgtaaagaaatgtattgtgataaaaaaaactggtaatagaattaattgggacgaaagtagagatgtttggtatcacgatattgtaaaaaaagcttcacctatttgtgaacctgaagaaatgaatgccgaagatccattgtttatactttatacctcaggatcaactggtaaaccaaaaggtgttttacatactacaggtggatacatggtttacgcatcaatgacgcatcaatatattttcaattataaacctaaagatatttattggtgca

SEQ ID NO: 309291 - DNA, 712 bp, Unknown
  Bacterial polypeptide expressing nucleotide sequence isolated from the Sargasso Sea
tttgagtcgaaaatatagcgaaatttacgaaaaatctattataaacagagaaagtttctggaaagaagtttcagaaaatattttttggtacaaaaaaccctcaaaaatattaaattccgataaccctcctttctataaatggtttgaagatggaattacaaacacttgttataacgctttagatcttcatatcgaaagtggtaaaggcgagaaacttgccatcatctacgatagccctataacaggaacaaaaaaaaaaattacttacaatgaattaaaagagaaagtgtctttatttgctggtgctttaaaaaaccaaggaattaataaaggtgatagggtaataatttatatgccgatgattcctgaggctgttgtagcaatgttagcgtgtgggaggattggtgcagtccactctgttgtatttggtggctttgctgcgaatgaactagcaagcagaattgatgactccaaagcaaaaattttagtaactgcatcttgtggttatgaacctggtagaactgttcactataaacctcttgtaaataaagctttcgaattagcgaaccataaacctgaaaaatgtattatctttcaaagagagagcgataaagcggaacttaatccaaaaatcgatataacctgggaagacgcgcacaaaggcgcgaagccagcagagtgtgaaaaaatgaactctaacgattatgcgtac

SEQ ID NO: 309292 - DNA, 475 bp, Unknown
  Bacterial polypeptide expressing nucleotide sequence isolated from the Sargasso Sea
tttgatggaaaatattttactggagatggatgtaaaagggataaagatgggtattactggattactggtagagttgatgatgtgattatcgtttcagggcacaacctcggcaccgctgaaattgaaagtgcctttgtagcacatccaaaagtggctgaagctgccgtagtaggatatccgcacgatatcaaaggaaacggattgtactgttatgttactttaaatgctggtgaaagtgaaactggagatttagatagagaattaaaactttgggttagaaaacaaatagggcctttggcaactccagacctaattcattttacacctggacttccaaaaactagatctggaaaaattatgagaagaattttacgaaagattgcagcaaacgaacatggacaactaggtgatacaactactcttgctgatcccagtgtagtcgatagcttagttgacaatagaaaaaatatttaaa

SEQ ID NO: 309293 - DNA, 586 bp, Unknown
  Bacterial polypeptide expressing nucleotide sequence isolated from the Sargasso Sea
aatgggcaaaaatttaaacgaaatttacaggaattctataaaaaatccagagtcattttggcaagaaatttccgatgatatattttggtttaaaaaacctaagaaaattttaaataaatctaatcctccattttataaatggtttgaggatggtgtaactaacacttgttataatgctcttgatatacacattgaccaaggaagaggagaaaaaactgcattaatttatgatagtccaattactggcgctaaggctcaatttacctataatcagttaaaagacaaagtttccaagtttgcaggtgcactagttaatcaaaatgtaaaaaaaggcgatagagtaattatttatatgcctatgataccagaagcagtggtagcaatgctagcttgtggaagaattggagcaattcattctgtagtttttggtggatttgcatctaacgaacttgcaagcagaattgatgacagtagtgcaaaggtgcttattacagcctcttgtggttttgaacctggtagaactgttgaatatcgtccattagtcgatggagctattaagcttgcaaaacataaagttgaaaaagta

SEQ ID NO: 309294 - DNA, 499 bp, Unknown
  Bacterial polypeptide expressing nucleotide sequence isolated from the Sargasso Sea
aatgtcaggtaaattcaacaaaatctacgatcaatcaattaataatcctgagaaattttggagcgatgcttcaaatgacatattttggttcaaaaaacctagcaaaattttaaacaaatcaaatcctccttttttcaaatggttcgaggacgggataactaatacttgttacaatgctctggatattcacattgatcaaggtaatggaaaaagaacagcgctaatatatgacagtcccattacaggtaacaaaagtaaattttcttacgaagaattaaaagccaaagtttctaagtttgctggagctcttaaagatcaagacgttaataaaggtgatagagtgatcatctacatgcctatgataccagaagctgtcattgccatgctagcttgtgctagaataggtgcaattcattcagtggtgtttggaggggttgcgtctaatgagctcgcaagtagaattgatgatagtaaagcaaaaatattagttacagccctc

SEQ ID NO: 309295 - DNA, 571 bp, Unknown
  Bacterial polypeptide expressing nucleotide sequence isolated from the Sargasso Sea
atgaaaattaaagatgaatggataagcaatgctaaaattaataatgatgaatattcttcaatgtataaacaatctattgaagatggggatagtttttggaaaaagcatgctggtaggatagattggtttaaaaagtttacaaaaatcaaagatgtaaaatattcaagtgatgaagttaatattaagtggtttgaagatggcgaattaaacgtctcatataattgtatagatagacatgcaaaaataaatcctaataaggtagctataatttgggagggtgacgatcctaataatacaaagaaaattacttatgaagagttaaaaaaaaatgtatgtaaaacagcaaatgttttaaagaagattggtataaaaaagggtgatagagttacaatttatcttactatgataccagagcttgcatacgttatgttagcttgtgctagaataggtgctattcattcaattatttttggaggtttttcagcagagtcgatagctggaagagttcaagactgtgaatctgagtttgtaattaccgcagacgaaggagttaggggaggtaaaacaatac

SEQ ID NO: 309296 - DNA, 374 bp, Unknown
  Bacterial polypeptide expressing nucleotide sequence isolated from the Sargasso Sea
taatcttggtactgcagaattagaaagtgcttttgttgctcatccaaaagttgctgaagctgctgtcgttggttacccacatgatattaaaggaaatggtctctattgctatgtcactttaaatgctggagaaaagccttctggagaattagagagagacttaaaactctgggtaagaaaacaaattggcccaattgctactccagatctaatacaatttgcaccttcattaccaaaaactagatctggaaaaattatgagaagaatattacgaaaaatagctgcaaaagaacatgatcaattaggagacaccactacattagcagatccaacagttgtggaaagcttagtacaaaatagacaaaataaataat

SEQ ID NO: 309297 - DNA, 367 bp, Unknown
  Bacterial polypeptide expressing nucleotide sequence isolated from the Sargasso Sea
gggaaccgcagaagtagaatcagcacttgttgaacataaaatggttgctgaggctgctgtggttggttatccacatgaaattaaaggccagggaatttacgcttatgtaacattagttttaggtaatgaaccatctgaagaaatggaaacagaattaaagaaaattgtcagaaaaattattgggccaattgctacacctgatcaaattcaattttcaccatcactaccaaaaacaagatcagggaaaattatgagacgaattttaagaaaaattgcagcaaatgagcactctgaacttggtgacacatctacacttgctgagccagcagttgttgaaaatcttattgagaatagaaaaaatatttag

SEQ ID NO: 309298 - DNA, 408 bp, Unknown
  Bacterial polypeptide expressing nucleotide sequence isolated from the Sargasso Sea
gatgaaggtgtaagaggtggaaaaataattccattaaaatcaattgctgatgaagctttagtaaattgccccaatgtaaaaaaatgcgttgttgttaaaagaacgggcaatagaataaattgggatgaacgaagagatgtttggtaccacgagttaacaaaaaaagtttcaaataaatgtgaacctgaagaaatgaatgcagaagatcctttattcattttgtatacttcaggatcaacaggaaaaccaaaaggggttatgcatacaacgggtggatatatggtttatgcttcaatgacccatcaatatatattcaattataaacctaaagatatttattggtgcacagctgacattggttgggtaaccggacatagctatataatttatggaccattgtccaatgga

SEQ ID NO: 309299 - DNA, 246 bp, Unknown
  Bacterial polypeptide expressing nucleotide sequence isolated from the Sargasso Sea
tggtggcaaattgttgataaatttaaagtgaatacattttatactgcaccaacagctattagagcattaatgagagagggaaatgaacctgtcaataaaacgtcaagaaaatcacttaaattgttaggaacggttggtgaacccctaaaccctgaggcttggatgtggtattataagacagtaggaaactccaaatgtccaatagtggatacttggtggcaaactgaaacaggaggaattttaatt

SEQ ID NO: 309300 - DNA, 914 bp, Unknown
  Bacterial polypeptide expressing nucleotide sequence isolated from the Sargasso Sea
ccgaaactcggttcaaataatgaaattttttggagggacgaaggtaaaagaatagactggataaaagaatatacaaaaataaaaaaaattaaatatagtaaaaatgaagttgatattaagtggtattacgatggaacattaaatgcctcttataattgtatagatagacacgcaaaaatttctcctgataaaccagctataatttgggaatcagatgacccaaatttttctaaaacaataacatacaaagatcttttaagagaggtttctaaagcttcacatgttttgaaaaacttgggagtaaaaaggggtgatagagttacaatatatttaactatgatccctgaactggcatactttatgcttgcctgttctagaattggtgcagttcattcaattatatttggagggttttcttctgagtcaattaaaaacagaataatagattgtaaatctgaatttataataactgcagatgaaggtattagaggtgctaaaacaatcccactaaaacaaataactgatcaagcaataaaagatatttctataaaaaaatgcatagttgttaaaagaacaaatgctaaaattgaaatgaataaatctagagatgtttatgttgatgatgtagttaaagaatctgataattattttgaaccagttgaaatgaatgctgaagatcctctttttattttatatacttctggctcaaccggtaaacccaagggagttttacatacaacgggaggttacttggtttatgcctctatgactcatgaatatatttttaactacaacaaagatgatatttattggtgtactgcagatattggctggataactggacactcatacatagtttatggaccactcgctaatggggcaactactttaatgtttgaaggagttccaaacta

SEQ ID NO: 309301 - DNA, 868 bp, Unknown
  Bacterial polypeptide expressing nucleotide sequence isolated from the Sargasso Sea
aaagtttcaaaaatcttacgacaactcaatttccaatccgaatgatttctgggcgacacaagcgatggagtttctgacttggcaaaaaacctggtcccatgtttcaagatgcaacatggctcgaggtgagattgagtggtttcttgatggaaagctcaatgccagcgaaaactgtatcgatagacacttgactgataaagcgaaccaaacagcaattatttgggagggcgacgaacctggcgatagcagaaagatcagttatagggatttatttgaagaagtttgcaaactagccaatggactcaaatcactaggcgtcaaaaaaggagatcgagtgtgcatttatatgcctatgataccggaggcagccttcgctatgctctcgtgcgctagaattggagccatccatagcgttgttttcggcggtttttctccgcaagctcttgaagataggatacttgatgccgattgtaattttgtcatcactgccaacgaaggtgtcaggggcggcaagataatacctttgaaacagaacgtggataaggcacttgaaaactgcccaaaggtacagtctgtaattgtctcaaaaagaaccgaaaacgatgtcaattgggtaagtggacgagatttttggtaccaagaggttacggaggctcaaatgccatcctgccctcccgaaataatggattccgaggatccccttttcatactgtatacctctggatcaactggcaaacctaaaggtgttcaacactccaccgcaggctatcttttgcatgctgcaatcactcacaaatatgtcttcgattaccacgatggcgatatctattggtgcacagcagacgttggttggataactggtcactca

SEQ ID NO: 309302 - DNA, 953 bp, Unknown
  Bacterial polypeptide expressing nucleotide sequence isolated from the Sargasso Sea
tatgtctaagtttgatattaagaattttgtaaatccacatatcactaccctcgaagactttaattcacaatataaagaatcaattcaaaatccaagttccttctttctcaaaaaagctatttcttatctttcttggttccaggagccaacaattggacataatgaaagttttgaagaaccaaaatggtttgaagatggaacactaaatataagttataactgcattgatagacatgcaaaaaaaaatccagagaaaattgcaattatttggcaaggggatcaagagagcaactctaaaaaaatttcttatcaagaacttcttgaagaagtttcaaaactagcaaatggtttaaagtctttaggtgttaaaaagggcgacagagtatgcatttatatgcctatgattcctgaagcagcatattcaatgtttgcttgtatgagaataggggccattcattctgttgtttttgggggtttctcaccagaggcaatttcatcaagaattcttgatgccgattgcgaatatgtaattactgcagatgaaggaattagaggtggcaaaacaatcccacttaagttcagcgtagaaaaagcattagaaaaatgtccaaaaatcaaaaaagtgatagtttttcaatacacaaaaacagatgttaattggaataataaattggatattacttatgaggaattagttactaatcagccaatagaatgtgaatgtgctgagttaaaagctgaagacccttcatttattctttatacttctggctcaacaggaaaacctaaaggagtactacatacaaccggaggttaccttttaggtgcaaatctttcatttaaatatatttttggaattagagatgatgatatacattggtgcactgcagatgtaggctggataaacaggcatacttatatcctttatggacctctatcaaatggaataacaa

SEQ ID NO: 309303 - DNA, 874 bp, Unknown
  Bacterial polypeptide expressing nucleotide sequence isolated from the Sargasso Sea
tacacatctggttcaactgggaaaccaaaaggtgtactacatacaactggcgggtacatggtttatgcatcaatgactcaccaatatatttttaattataaacctaaagatatttactggtgcacagctgacataggctgggttacgggacacagttatattatttacggtccacttgcgaacggtgcaactacaattatgtttgaaggaatacccacttatccggatacatctaggtggtggcaaatagttgataaatataaagttaatattttctatacagctccaacagcaatcagagctttaatgagagaaggtgataaacctgtaaagaaaacatctagaaaaactttaaaacttttaggcactgttggtgaaccaattaatcctgaagcctgggaatggtattataaaactgttggtgatagtaggtgcccaatcgttgatacatggtggcaaacagaaacaggtgggattttgatcagccctcaaaccggtgccatagatttaaaacctggttctgcaacaaaaccattttatggaattaaaccagagatcctagataaagatggcaaggttttaaaaggagaagctcaaggtagactttgtatttcacaatcatggcctgggcaaatgagaagtgtctatggtgaccatcaaagatttatagacacttatttttcacaattcgacggaaaatattttactggtgatggctgtagaagagataaagacggttattattggattacaggaagagtggatgatgtaattatagtttctggccataatttaggtactgcagaaattgaaagtgcgtttgtagctcatccaaaagtagctgaagcagcagtagttggatatccaccatgac

SEQ ID NO: 309304 - DNA, 856 bp, Unknown
  Bacterial polypeptide expressing nucleotide sequence isolated from the Sargasso Sea
aaaagtatctatttttgctggtgcactaaaaaatttaggtatttctaaaggagatagggttataatttacatgccgatgataccacaagccgttgttgctatgttggcttgcggaagaataggtgcaattcattcggttgtttttggaggttttgctgcaaacgaattggcaagcagaattgatgattcgaaagcaaaaattattgtttcggcttcatgtggctatgaacctggaagaactgttcattacaaacctttgttaaacaaagctatagaaatcgcaaatcataaaccagaaaaatgtataattttccaaagagaaaaagacaaagcagagctcgatcctaaaagagatattgattgggttgaagctttgaagggagctaaactaactgaatgtgaaaaaatgaatgcaaatgattatgcgtatattctttatacatctggaactactggtactcctaaaggaatagttagagatattggcggacatatagtcgctttaaaatggacaatgaaaaatatttataacatcgatcaagatgatgtttggtggtctgctagcgatataggttggatagttggccattcatatattgtttatgctccactgttttatgggtgcactacagttttatttgaaggtaaaccggtgggcactcctgacgcaggtgccttttggaaaataatatcagaatataatgtaaaatctttgtttactgctcctacagctataagagcaattaaaaaagaagatcctaatggaaaattctttaaaaaatatgatttatctaaatttgatactttatttttagcaggtgaacgtgcagatccagatacaattaaaatggtttga

SEQ ID NO: 309305 - DNA, 769 bp, Unknown
  Bacterial polypeptide expressing nucleotide sequence isolated from the Sargasso Sea
aaaaacggttttaaaacaaatcaatatggaaaataaatataaaagtatttatgaacaatcgataaaaaatcctgaattgttttgggaaagtgtttctaaagatattttctggtttaaaaatccaactaaaatattaaataaatccaacccaccattttataaatggtttgaagatggaaagaccaatacttgctataatgcgttagacttccatattgatcaaggaaaaggtgataaaactgctttaatttatgatagtccaataaccggaaataaagcaaaattttcttacaaagaattaaaaaataaagtttcaaaatttgccggggctctcaaaaaccaaggaataaaaaaaggcgacagagttataatttacatgccaatgataccagagtctgttattgctatgctagcttgtggaaggataggggcaattcattcagtcgtattcggaggttttgcatcaaacgaactcgcaagtagaatagatgatagtaaagctaaaattttgattactgcatcttgcggttttgaacctggtcgaactgttgagtaccgtcctcttgtagatggtgcattaaaacttgcaaaacacaaagttgaaaaagttattttttatcaaagaaagggtcatgaagtaaaattaaattctccattagaaattaactgggaagaatcattagctaatgcaaaagatgttgattgtgtagaaatgggttcaaatgaatatgcttatatactttacacatctggaacaacccggagttcc

SEQ ID NO: 309306 - DNA, 859 bp, Unknown
  Bacterial polypeptide expressing nucleotide sequence isolated from the Sargasso Sea
aaagttcaaaaaaaaattacctacaaacaattgcatcatgaagtttcaaaaacagcaaatggtttaaaagaacttggtataaaaaagggtgatcgcgttactatttacctaactatgataccagagttagcatacacaatgttagcctgcgctagaataggtgcagtacattcaattatatttggtgggttttcacccgacagtatatctggaagaattaatgattgtaaatccgactatgttatcacagctgatgaaggtttaaggggtggaaaaacaatacctttaaaatcgataaccgatgaagcattggtaaactgtccaaatgttaaaaaatgtatagttgttaaaaggaccggtaacagaattaattgggatgaaacaagagacgtatggtatcacgaaatgatcaaaaaagtttcatctaattgtgaacctgaagaaatgaacgcagaagatccgctttttattctttacacatcaggatcaactggaaaaccaaaaggagttttacatacaactggcggctacatggtttatgcatcaatgacacatcaatacattttcaattataaacctaaagatatctattggtgtacagcagacattggatggataacgggacatagttatatcatttatggacctctagctaatggagctacaacaataatgttcgaaggtattccaactttccctgatacttcgcgttggtggcaaatagtagataaatacaaagtaaatattttttacactgcaccgacagcaataagggccttaatgcgggagggtgacggtccagttaaaaaaacttccagaaaatctttaaaactacttggtactgttggagaaccatata

SEQ ID NO: 309307 - DNA, 849 bp, Unknown
  Bacterial polypeptide expressing nucleotide sequence isolated from the Sargasso Sea
tttgatcgctgctggtgataaatatcttgaaagctcatcaagagagtcgttaaaggtattaggtacagtaggtgaaccaattaatcctgaagtttgggaatggtattatgataaagttggtaattctaaatgtgaggtagtagatacctggtggcagaccgaaacaggttcggtgcttattaccccaatagcaggaataacacctaaaaaacctggatctgcaacattgccttttcttggtgttattccatcaattgtaaattctgaaggagaacagctcgaagggaaaagcaaaggcaacttatgcattgatgtttcatggcctagtcaaattagaacagtatatggtgaccacgacagaatgatttcaacttacttctctcaatatgcaaacagatactttacaggggatggcgcatcaagagatgaggatggctattactgggtaacaggcagagtagatgatgtgctaaatgtttctggacatcgaattggcacagcagaagttgagagtgctctagtaagacacaatgctgtagctgaagcagcagtagttggaatagagcatgaaataaagggccaagctatatatgccttcgtcattctaaaagagacaacaaaaaatcataatgagttgattgcagaaatgataggtacagtttcaagtgaaattggaaaaattgctaaacctgaaacaattcaaataactagagatttgccaaaaaccagatctggcaaaattatgcgaaggattcttagaaaaatcgctaatgacgatgttgaaaatttaggagatacaaccacattggctgacccatctgtagttgaagatctaatcaagaacaaaga

SEQ ID NO: 309308 - DNA, 730 bp, Unknown
  Bacterial polypeptide expressing nucleotide sequence isolated from the Sargasso Sea
tatgcaaaaaaaatttcaagagatttacgagaattctataaaaaatcccgaaaaattttggcaaaaagcttcagaagatatcttttggtttaaaaaaccaacaaaaattttaaataaatcaaacccacctttctataaatggttcgaggatggggtcacaaacacttgctataatgctttagacattcacattgaccaaggaagaggtcaaaaaacagctttaatctatgatagtcctatcactggtaacaaaagtcagttcacttatgaagaattaagatcaaaagtttccaaatttgctggggcattgaaagctcaaggtgcaaataaaggtgatcgtgtgattatatacatgccaatgatacctgaagcagtagttgctatgctagcatgtgctagaattggagcaatacactcagtagtctttggaggatttgcctcaaatgagcttgcaagcagaatagatgacagtaaagcaaagatattggtgactgcttcatgtggtttcgaacctggaagaacagttgaatacaaacctcttgtcgatgaagcaataaaaatagctaatcataaaattgaaaaaatgattttattccaaagacctggtcacgaggttaaattgaatgctccaaatgaggtgagctgggaggaagtagtttcaaatgctaaagatgcagactgtgtagagatgaactcgaatgagtttgcctatattttatatacttcagga

SEQ ID NO: 309309 - DNA, 710 bp, Unknown
  Bacterial polypeptide expressing nucleotide sequence isolated from the Sargasso Sea
attgaaagaaaaagtttctcttttcgctggtgcattaaaaaatcaaggaattaataagggagaccgtataattatttatatgccaatgatacctgaagcagttatagctatgctagcgtgtggtagaattggtgctgttcactctgtagtgtttggaggttttgccgcaaatgaacttgcaagccgtattgatgattcaaaagcaaaattaattatttcagcatcatgcggttatgaaccaggaagaacagttcattataaaccgctaattaacaaagcgctggaattatctaaacacaaaccaaacaaatgtataatttttcaaagggaaaaggataaggctgagttaaatcctaagattgatattgattggaatgaatctattaaaggagcaaagccaactgaatgcgaaaaaatgaattctaatgattacgcttatattctttatacttcaggaacgactggactaccaaaaggaattgttagggatatcggaggacatatagttgctttaaaatggacgatgaaaaatatttacaacatagatcaagatgatgtttggtggtctgcgagcgacataggttggatagttggtcactcatatattgtttatgctccactattttatggctgtacaacaattttatttgagggaaaacctgtaggtactcctgacgcaggcgtattttggagagtaatttcagaacata

SEQ ID NO: 309310 - DNA, 568 bp, Unknown
  Bacterial polypeptide expressing nucleotide sequence isolated from the Sargasso Sea
tgaagggaatttgtgtatagctgatagttggcctggacaaatgcgaactgtttatggggatcataaaaggtttattgaaacttattttagtcaatatgatggttactatttcactggagatggatgtaaaagagacgaagacggctattattggataactggaagagtagatgatgttataaatgtttctggtcatagaatggggacagctgaagtagaaagcgccctagtttctcatgaaaaagtatctgaagccgctgttgtaggctttcctcatgaaattaaaggtcaaggaatttatgcatatgtaacccttaatgctggagaaaacggtaacgaagaaattagaaaagagttaataaaatgggttagaaaagaaattggtccaatagctagcccagatttaattcaatttgcaccaaatttacctaaaacaagatcagggaaaatcatgcgtcgtatcttaagaaaaatcgctgaaaatgactattcagaattaggtgatacatcaacgctagcagaaccgatggtagtcgatgaattaatagaaaatagacaaaataaataa

SEQ ID NO: 309311 - DNA, 841 bp, Unknown
  Bacterial polypeptide expressing nucleotide sequence isolated from the Sargasso Sea
accttaatgtatgagggagtgccaagaccttcaaatttaggggctttttgggaaattattcaaaaatataaggtttctattttttatactgcaccaacagcaataagagcatttatgaagtctgggcgtgaaatccctgataaatataatcttgagagtcttaggcttttgggtacagttggagaaccaattaatcctgaagcatggatgtggtacaaagatgttattggtaaaaataaatgccctattgttgatacttggtggcaaactgagactggtggtgtgatgataagtcccttgcctggagtcgttgctacaaagccaggttcagctactttccctctgccaggaatcgaagttgaaatcgtcgataagaatggagataaggttaaggagaacgagggtggctatttaattgttaagaaaccatggccaggaatgatgagaacaattcacggaaactcagagagatatttggagagttattgggaatatatttcctttaagggagaaaaaaatgtttattttgctggagatggagcacgcattgatgaagatggatatatatggattatgggaagagttgatgatgtcataagtgtttcaggacatcggttgggaacaatggaaatagaatctgctttggtaagtcataaatcagttgcggagtctgcagtagtgggcaaaaaagatgatttaaagggtgaagttatagttgcttttgtatctctagagaaagacgtgaacagttctgcagaattagtggagaatttgaagaaacatgttgttaatgagattggaattatagcaaagcctgaaaaaattataatttctgactctc

SEQ ID NO: 309312 - DNA, 424 bp, Unknown
  Bacterial polypeptide expressing nucleotide sequence isolated from the Sargasso Sea
ttactactgggtaactggaagagtcgatgacgtcttaaatgtttccggacatagaattggaactgcagaagttgaaagtgcaatcgtaaatcatgtagacgttgctgaggcagcagttgtagggatagagcatgatattaagggtcaagcaatttttgcttatgtcattctaagagaaaataataaagataaaaaaacaattaataatgaaattcttgaagaagtttctaaaataataggcaagtttgctaaaccggaagtaattcaatttactagagacttgcctaagacaagatcaggtaaaataatgagaagaatcttaagaaaaatagcaaataatgaatttgaaaatttaggtgacacaactactcttgcagatccttcaatagttgaagatctcattaagaataaacatgaaagataa

SEQ ID NO: 309313 - DNA, 751 bp, Unknown
  Bacterial polypeptide expressing nucleotide sequence isolated from the Sargasso Sea
caagttgttggagattcttcttgtcccatagttgatacttggtggcagactgaaactggagccatgatgattacccctgtagcaggatttacttcgatgaagccaggaagtgccacaaaaccttttcttggaattgagccagctctactggacgaaagtggaaaagaaattataggtgagggttccggaaatcttgtcattaaatctagctggccctcacaaatcagaacggtttatggagaccatcaaagatgtatagatacttactactcaatgtatcccgggtactacacaactggggatggggctagaagagattcagatggatattattggataactggaagagtagatgatgtattaaatgtatctggccatagattagggacagcagaagtagaaagcgctttagttcttcataaagatgttgctgaggcggcagtagttggttatgaacatgagattaaaggacaaggaatctattgctatgtaactctgatgtctggtatcttgccagaagaagacctcaaatctgatttagttaaactagttgcaaaagaaataggacctattgccaaaccagatatcattcagtgggctcctggattaccaaagacaagatctggtaaaattatgagaagaatattgagaaaaattgccaccaacgaaattgacaaccttggtgacactacaactttagcagatccgtctgtagttgatgaactcatagcaaatagagagaataaataat

SEQ ID NO: 309314 - DNA, 800 bp, Unknown
  Bacterial polypeptide expressing nucleotide sequence isolated from the Sargasso Sea
aagaaattacttgggattaaaaaatatttcgaaaattaaagatgtaaaatacagcaaagacgaagtaaaaattaaatggttttatgatggaacattaaacgcttcagccaattgtatcgatagacacttaaaaaaaaatccaagcaaaactgcaattatatgggtaggtgacgacccagcggacaccaaaaaaatttcttacagagaattgcatcaaaatgtttgtaaagctgcgaatggtttaaaaagtttaggtgttcaaaaaggggatagagtaacaatttatttaacaatgatacctgaacttgcttacgtaatgcttgcttgtgctagaataggcgctgttcactcaataatatttggaggtttttcaccagactcaattgcaacaaggattactgattgtgaatcggaatacttaattacagcagatgagggagttagaggaggaaaaataattcctttaaaaaaaattgcagacgaagctttagatcaatgtccaaacgtgaagaaatgcgtagttgttgaaagaacaggtaaccaagtcaattggaataacgaaagagatgtttcatataaaaaattaatttcatctgcaccatcaaagtgtgatcctgaagaaatgggtgctgaagatcctttgtttatcctttatacttcgggttccactggaaagccgaaaggtgtacttcatacaacaggcggttatatggtttatgcttcaatgactcatcaatatatttttgattataaacctaatgatatttattggtgcactgcggatattggctgggtaactg

SEQ ID NO: 309315 - DNA, 922 bp, Unknown
  Bacterial polypeptide expressing nucleotide sequence isolated from the Sargasso Sea
ggaagaggagataaaatagcattaatatatgatagccctattacaggaaacaaaaaacagttcacatataatctgctgaaggaaaaagtttcaaagtttgcttgtgcactcaagaaccaaggcattaacaaaggggatagagttataatatatatgcccatgataccagaggcagtgatcgctatgcttgcttgtggaagaattggagctattcattcagtagtttttggtggttttgcgtctaatgaacttgcaagccggatagatgatagtaaagctaaattactagtaactgcttcatgtggatttgagcctggtagaacggtggaatataaacctctagtagatgaagctttaaggttagcttctcataaacttgaaaaaattattctttatcaaagatcaggtcatgaagtgaagcttaatgcaccaaaagagatcagctgggaagagtcgttggttaatgctcaaactactgactgtgtagagatgaatgcaaatgattatgcatacattctttatacttctggtactacaggaatacctaaaggcatagttagagatataggtgggcatatagttgctctcaagtggactatgaaaaatatttataacattgatagtgatgatatatggtggtcagcaagtgatattggttggatagttggtcattcctatattgtttatgctccattatttaaaggctgcaccactgttttatttgaaggtaaaccggtaggtactcctgatgctggagctttctggaaaataatttcggattataaggttaaatcattatttactgctccaacagcatttagagcaataaagaaagaggatccggaaggaaaatttttttcaaagtataatttaagttcatttgaatctttgtttcttgcgggtgaaagggctgatccagata

SEQ ID NO: 309316 - DNA, 826 bp, Unknown
  Bacterial polypeptide expressing nucleotide sequence isolated from the Sargasso Sea
caggttttttggaaaaaagaaggtaaaaggatcacttgtgataaaaccttatacaaaagtaaaagattttaaatatagcaaagaggatgtccatattaagtggtattatgatggaactttaaatgcttcagcaaattgtattgatagacatttaaaaagaaataaagataagactgcaataatatgggttggggatgatccaaaggtccaaaaaaaaatttcatataaacaactacatcaagaagtatctaaagctgcaaatgcattaagagaattaggagtcaagaaaggtgacagggtcacaatttatcttacaatgataccagaattagcatacacgatgctagcttgtgcaagaattggggcaatccactcaataatatttggtggtttttcaccagacagtatttctggcagaattaatgattgtgagtcagattatgttgttacagctgacgaaggactgagggggggaaaaacaatacctcttaaatcaataactgacgaagctctagttaactgcccaaacgtaaaaaaatgtatagttattaaaagaacaggaaacagaattaattgggatgaaaacagagatgtttggtaccatgagataacaaaaaaagcttcttcaaattgtgagccggaggaaatgaatgctgaagatccactatttattttatatacctcaggatcaactggtaaacctaaaggtgttctgcataccactggtggttatatggtctatgcatcaatgacacatcaatatatatttaattacaaacctaaagatatttattggtgcactgctgatataggatgggtaactggt

SEQ ID NO: 309317 - DNA, 970 bp, Unknown
  Bacterial polypeptide expressing nucleotide sequence isolated from the Sargasso Sea
tatgtatgagggagtgccaagaccctcaaatttaggagctttttgggaaattgttcaaaaatataaggtttctattttttatactgcaccaactgcaataagagcatttatgaagtctggtcgtgaaatccctgataaatataatttggaaagtcttagacttttgggcacagtaggagaaccaattaatcctgaggcatggatgtggtacaaggatgttattggtaaagataaatgccctattgttgatacttggtggcaaactgagactggtggtgtgatgataagccccttgcctggagtcgttgctacaaagccaggttcagctactttccctctaccaggaatcgaagttgaaattgttgataagaatggagataaggttaaggagaacgagggtggctatttaattattaagaaaccttggccaggaatgatgagaacaattcacggaaactcagaaagatatttggagagttattgggaatatatttcctttaaaggagaaaaaaatgtttattttgctggagatggagcacgcattgatgaagatggatatatttggattatgggaagggttgatgatgtcataagtgtttcagggcatcggttaggaacaatggaaatagaatctgctttggtaagtcataaatcagttgcagagtctgcagttgttggcaaaaaagatgatttaaaaggtgaagttatagttgcttttgtttctctagagaaagatgtgagcggttctccagaattagtagaggatctaaagaaacatgttgttaatgaaattggaataatcgcaaagcctaaaaagattataatttctgactctcttccgaaaacacgtagtggaaaaattatgaggcgaattttaagatctttggctgctggagaaaaaattagcggtgatataagcactcttgaagatagttctgtttttggaaaagctgaaagaattatcttaatc

SEQ ID NO: 309318 - DNA, 322 bp, Unknown
  Bacterial polypeptide expressing nucleotide sequence isolated from the Sargasso Sea
agctgaagcagcagtggttggatatccccatgatattaagggtaatggtttatattgttatgttacattaaatgctggagaaattgaaacgggagatttggaaagagaattaaagctatgggtaagaaaacaaataggtcctttagcaactcccgatctaatccattttacccctggattaccaaaaacaaggtcaggaaaaattatgagaagaattttgagaaaaattgctgctaatgagcatgatcaattaggtgatactactactttggctgacccaagtgttgtggacagtttagttgaaaatagaaaaaatacttaa

SEQ ID NO: 309319 - DNA, 322 bp, Unknown
  Bacterial polypeptide expressing nucleotide sequence isolated from the Sargasso Sea
ctggtcgctgaagccgccgttgtgggctttccccatgatattaaaggtcaaggtatttatgcctatgtccccttaacccgcggcacagaagagagtgaagagcttcgccaagagctgcgccaatgggttcgtaaagaaattggcgctctggccacaccggttcttatccagtgggcgacaggattacctaagacacgttctggcaaaatcatccgccgtttcctgcgtaagattgccgctaacgaagtgaccaacttgggtgacgcatcaacactggccgacccagccgtgattgagcccttgattgaaactcgcttgaatc

SEQ ID NO: 309320 - DNA, 604 bp, Unknown
  Bacterial polypeptide expressing nucleotide sequence isolated from the Sargasso Sea
aaatcaggatggtaaaataattaagggtgagggaaaaggacggttatgtatggccagctcatggccaggtcaaatgaggactgtttacggcgaccatcaaagatttattgatacatatttttctcaatttgatgggaaatattttacaggtgatggatgtagaagagataaagatgggtattattggataacaggtagagttgatgatgtaataattgtatcaggtcacaatcttggcaccgctgaaattgaaagtgcttttgttgcacatcctaaagtagctgaagcagctgtcgtaggttttcctcatagcattaaaggcaatggattatattgttacgtcactttaaatgttggagaacaagctacaggtgacttagaaagagatttaaaactttgggttcgaaaacaaattggtccaatcgcaacaccagatgttatacaatttgctcccggattacctaaaacgagatcagggaaaataatgcgaagaattcttagaaaaattgctgctaacgagccagataatttaggagacactactactttagctgatcctggagttgttgagtctttaattcaaaatagaaaaaatagagcttaa

SEQ ID NO: 309321 - DNA, 514 bp, Unknown
  Bacterial polypeptide expressing nucleotide sequence isolated from the Sargasso Sea
tttgaatcaaaattataaagaaatttacgataaatccataaaaaatagagagaaattttggagagaaatctctaataatattttttggtacaaaaaaccaacaaaaattcttaattctgataacccgccattttataaatggtttgaagacggtgtaacgaacacttgttacaatgctctagatttacatattgaagaaggcagaggtgataagctagcattaatatatgacagtccaattactggagtaaaaaaaaatattacatataaagaattaagaaatcgagtagccttatttgcaggcgttttaaaaaatcaagggataaataaaggcgacagagtgataatttatatgccaatgatacctgaagcagttatagccatacttgcttgtggtagaattggtgcagttcactctgttgtatttggtggtttcgctgcaaacgaacttgcaagtagaattgatgactctaaagcaaaattactagttacagcttcatgcggttatgaacca

SEQ ID NO: 309322 - DNA, 967 bp, Unknown
  Bacterial polypeptide expressing nucleotide sequence isolated from the Sargasso Sea
tatttatttgtgcactgcagacattgggtgggttacagggcacagttatattatttatggcccgctttcaaacggggccactactataatgtttgaaggaattcccaattatcccgacagttcaagatggtggcaaattgtagataaatataaagtaaatattttttatactgctccaacagcaataagggctttgatgcgagagggagataagcctgtaaaaaaaacaagcagaaaaacactaaaattattaggaactgttggagagcccataaatccagaggcttggatgtggtattacaaaacggttggggactctagatgtccaatagttgatacatggtggcaaacagaaactggaggaattttaattgcacctcaacctggcgccatagatttaaagccaggctcagcaactaaacctttttacggcatcaaaccagttttagttgataaagatggtaaaactgtaaagggggaaggtaagggaagactttgtatggctacttcttggccaggtcaaatgagaacagtttatggagatcatcaaagatttatagatacatatttttctcaatttgatggaaaatattttactggggacggatgcagaagagataaagacggttattattggattacaggaagagtggatgatgtaattattgtatcaggccataatcttggaacagctgaaattgaaagcgcattcgtggcacatcctaaagtggctgaggctgctgtggttggattcccgcatagcataaaaggcaacggattatattgttatgttactttaaacgctggtgaaaaccctactggagatttagaaagagatcttaaactttgggttagaaaacaaataggtccaattgcaactccagatgtcattcaattttcacctggattaccaaaaacaagatctggaaaaattatgagaagaattttaagaaaaattgctgccaat

SEQ ID NO: 309323 - DNA, 859 bp, Unknown
  Bacterial polypeptide expressing nucleotide sequence isolated from the Sargasso Sea
aaggttaatattttctatactgcaccaacagctatcagagctctaatggctcaaggagaagagccggtcaaaaaaacatcgagaaaatcattaaaattattaggaacagttggtgagcctatcaacccagaagcgtgggaatggtactataaaactgtaggagacaataagtgtccaattgttgatacatggtggcaaactgaaactggtggaatattaatatctcctcaaacaggagctattgatctgaagccgggatctgcaactaaacctttttacggaattaaacctgtaatagttgatcagagtggaaaagaaattaaaggagaaggtcaagggagactttgtatggctcaatcatggccaggtcaaatgagaacagtgtatggtgatcatcaaagatttattgatacttacttttcacaatttgatggtaaatattttacaggtgatggctgtagaagagacaaagatggttattactggataacaggaagagttgatgatgtaattattgtatcgggtcacaatctgggaaccgctgaaatagaaagtgcttttgttgctcatccaaaagtagctgaggcagcagtagtggggtatcctcatcaaataaaaggtaatgctttatattgttatgttacagttaacaatggagtgcaagccgatggtgatttagaaagagaattaaaaaatcatatagcaaaaactttagggccattttatagaccagaactaattcagttttcaacaggattaccaaaaactagatctggtaaaataatgagaagaattttaagaaaaattgcatcaaatgaacatgatcaaaataggagatactacaacgttagcggatcca

SEQ ID NO: 309324 - DNA, 629 bp, Unknown
  Bacterial polypeptide expressing nucleotide sequence isolated from the Sargasso Sea
tgttaatattaaatggttttatgatggaactttaaatgcttcggctaactgtattgatcgtcacttaaagaaaaataaagataaaactgcaataatttgggttggtgatgacccaaaagttcaaaaaaaaattagctacaaacaattacatcaagaggtttcaaagacggcaaatggattaaaagaaataggagtaaaaaaaggggatagagttacaatttatttaactatgatacctgagttggcatatacaatgctagcatgtgcaagaataggagcagttcattcaattatttttggaggtttttcagcagatagtattactggaaggattaatgattgcaaatctgactatgttattactgctgacgaaggtgttagaggaggaaaaattatacatttaaaagcaacagttgatgaagctcttttgaattgtccaaatgtaaaaaagtgtgttgtagtaaaacgaactggaaatagaattaattgggatgagagtagagatgtttggtatcacgatataactaaaaaagcttcaaagaattgtgagcctgaggaaatgaatgctgaagatccattatttattttatatacatctggatccacaggaaagcctaaaggagttttgc

SEQ ID NO: 309325 - DNA, 913 bp, Unknown
  Bacterial polypeptide expressing nucleotide sequence isolated from the Sargasso Sea
gacagagttataatttatatgccaatgatacctgaagctgtgattgctatgcttgcatgtggaagaattggagctattcattcagtagtttttggtggatttgcctctaatgagttagcaagtcgtatagacgacagtaaatcaaaactattagtcactgcttcttgtggatttgaaccaggtagaactgttgaatataaacctttagtggatgaagctttaaaacttgcttctcataagctagaaaaaattattctttatcaaagagaaggtcatcaagtaaagctcaatgctcctaaagagattagttgggaggagtcactagctaacgctcaagatgcagactgtgttgaaatgaattcgaatgaatttgcatacattttatatacatctggtaccacaggaatacctaagggaatagtaagagacataggtggtcacatagttgctcttaagtggactatgaaaaatatttataacattgataaagacgatatttggtggtctgcaagcgatataggctggatagttggtcactcatacatagtctatgccccattatttaaaggatgcacaactgttctatttgaaggtaaaccggtaggaactcctgacgcaggagctttttggaaaataatttcagactacaaagtcaaatcattatttactgcaccaacagcttttagagcaattaagaaagaagatcccaaaggaaaatttttttcaaaatacgatcttagctcatttgagtctttatttcttgcaggtgaaagagcagatcctgatactattaaatgggcagaaacactcttgaaagttccagttatagatcactggtggcagacagaaactagctgggcaataagttctaactgtacaggaatagagatgcaaaagacaaaatatggatcag

SEQ ID NO: 309326 - DNA, 869 bp, Unknown
  Bacterial polypeptide expressing nucleotide sequence isolated from the Sargasso Sea
attaactggccatacttatattctatatggacctttgtctaatggagccacaaccttgatgtttgagggcatacccacatatcctgatccttcaaggttttgggaaatatgtgataaacacgaaatttcaatcttttacactgcgcccacagctctaagggctttgatggctcagggagatgagcatgttttaaaaacaaagagggaaagcttacgaatattaggaactgttggtgaaccaattaatccggaagcatgggaatggtattttaaggtagttggaaatgaatcgtgtcaaattattgatacctggtggcaaacagagactggctctgtcttaatttcacctattgcgggagtcacgccagtcaaaccaggttcagcaaccttacctttttttggtgttaagccagagcttgtagacgaaaatggcgtaattttagagggagaacaatcaggtaatttaattattactcaatcttggccaagtcaaataagaagcgtatatggagatcatcagaggatgatggatacttatttctcaacatacaaaaatgcatattttacaggagatggggcgcgccgagacagcgatggatatttttggattactggaagagttgatgatgtgttaaatgtatcaggacatagacttggaacagctgaaatagagagtgctttagtgcttcatgaaaaagtcgctgaagcagctattgtaggttttgaacatccaatcaaaggtcaaggaatatacgcattcgtaactctaatggttggggaaaaagaagatgaagtattagtggcagaattacaaaattttgttgccaaggaaatcagtccaatagcaaagcctgatcttatccagtgag

SEQ ID NO: 309327 - DNA, 834 bp, Unknown
  Bacterial polypeptide expressing nucleotide sequence isolated from the Sargasso Sea
ttattttcggtggtttttcccggactcgattgctactagaatcactgattgtgagtctgaatatttaattactgccgatgagggtgtgaggggaggaaaaattattcctttaaaaaaaatagctgatgaagctctggatcaatgtccaaacgttaaaaaatgtgttgttgttgaaagaacaggtaatcaagttaattggaatgatgaaagagatgtttcttacaaaaaactaatctcctctgttccaacaaaatgtgatcctgaagagatgagtgcagaagatcctttgtttattctttatacatctgggtcaacaggaaaacctaaaggagttttgcatactacagggggatatatggtttacgcttcaatgactcaccaatatatttttgattataaacctaacgatatttattggtgtacagcagatattggttgggtgactggtcacagttacatcatttatggtccgctagctaatggtgctactacaataatgtttgaaggtgttccaaattatcctgataattcaagatggtggcaaatcgtagataaatataaagtaaatatattttatactgctcctactgctattagggccttgatgagagaaggagacggtcctgttaaaaaaacaagcagaaaatctttaaaactattaggcactgtcggtgaacctataaatcctgaggcttggatgtggtattataaaacagtaggcgactcaagatgtccaatagttgatacttggtggcaaactgagacaggaggaattttaattgctccacaaccaggagctattgatttaaaaccaggctcagcaacaaaaccatt

SEQ ID NO: 309328 - DNA, 688 bp, Unknown
  Bacterial polypeptide expressing nucleotide sequence isolated from the Sargasso Sea
gcattaatttatgatagcccaattaccggtaacaaaaaaaaattttcctacaaagaattaacagaaaaagtttcaaaatttgctggggcattacagaaccaaggagtaaaaaaaggagatagagttataatttatatgccaatgattcctgaggcagttattggtatgctcgcttgtggtagaattggagcaattcattcagtagtatttggtggttttgcttcaaatgaattagcaagtagaatagatgatagcaaagcaaaagttttgcttacagcttcttgtggttttgaacctggaagaacagttcaatataaacctcttgttgatgaagcactaaaattagcatctcataaaattgaaaaaataatattatttcaaagactagataacgaagtagaattaaattctcctaacgaaattagttgggatgaagcattatcgaacgcaaaaaatgtagattgcgttgaaatgaatgcaaatgaatttgcatatatattatatacctcaggaacaacaggtattccaaaagggattgtaagagatatcggaggtcatattgctgctcttaagtggacaatgaaaaatatttataacattgatcaagatgatgtttggtggtcagcaagtgacatcggatggattgttggtcattcttacattgtttacgcaccattatttaaaggat

SEQ ID NO: 309329 - DNA, 922 bp, Unknown
  Bacterial polypeptide expressing nucleotide sequence isolated from the Sargasso Sea
ttataccaaaaagtgaataacttttcatttgctttaaagtctataggcataaagaaaggatccagagtgataatttatatgcccaccatacctgagtctattgtagcaatgttgtcttgcgcaagactaggtttaattcattctgtggtttttgcaggattttcctcggaatctttaaaaaatagaataaatgattgtgaagctgaactgataataacggtagatagctttcaaagaaatggtaaaacaataatgtctaaagagacagttgataatgcattaaaacaagactgtccctccataaagaaggttattgtatttaaaaattctgataaagaggtatcttttgatccgaatattgatttatggtggcatgatatcctacctaattctgatcaagtggttttaccagagattatgtcttcagaggatatactctttatactttatacatctggctccacaggaaaaccaaaaggtattatacatagtagtgctggctatttattaaactgtatattaactaataaatgggtcttcgatctaaaaaaagatgatattttttggtgtactgcagatattggatggattacaggacatagttatgttgtgtatgggccattagcgactggttcaactatactaatatatgatggtgcaccaacatatccaaaacaagataggttttgggaaataattagtcaaaataaggttacaattttttacacagcacctactgccataaggacattaatgaaactaggtgaaaacaaacctgatgatcatgatctttcttcgttacgattacttggaactgttggagagccgataaatcctaaggcatggatttggtatcaaaaaaagattggtaaagaaaactgtcctatagtggatacctggtggcaaacagagacaggagcga

SEQ ID NO: 309330 - DNA, 364 bp, Unknown
  Bacterial polypeptide expressing nucleotide sequence isolated from the Sargasso Sea
gatttatgacagtccaataacaggtaataaaaaaaaattcacatataaagagctaaaagaaaaagtttcaaaatttgctggggctttaaaaaaccagggtattaataaaggtgatagagttatcatctacatgccaatgatacctgaagctgtggtcgcaatgctagcttgtggtagaattggagcaattcattcagtagtatttggtggatttgcttctaatgaattagcaagtagaatcgatgacagtaaagcaaagttattggtaactgcttcatgcggatttgaaccaggaagaactgttgaatataaacctttggtcgatgatgctataaaacttgcatctcataaacttgaaagaatg

SEQ ID NO: 309331 - DNA, 976 bp, Unknown
  Bacterial polypeptide expressing nucleotide sequence isolated from the Sargasso Sea
tatctatggtccactttcaaatggtgcaaccactataatgtttgaaggaattccaaattatccagacagctctaggtggtggcaaattgtagacaaatataaagttaatacattttatacggcaccaactgcaattcgagctcttatgagagaaggagatactccagttaaaaaaacatctagaaagtccttaaaattacttgggacagttggagaaccaattaatcctgaagcatggatgtggtattacaaagttgttggaaattctaaatgtccaatagttgatacgtggtggcaaactgaaacaggtggaataatgatttctccacaaacaggtgccatacctttaaaaccaggttcagcgacaaaaccattctatggaattaaaccagtacttgttgataaaaatggaaaagaaataaaaggagcaggtgagggtagactttgtatcaatcaatcctggcctggtcaaatgagaacagtatatggagatcatcaaagatttattgatacttacttttcacaatttgatggaaaatactttactggagatggatgtcgaagagataaagatggatactattggataacaggaagagttgatgatgtaattatagtgtcaggtcataatttaggaacagctgaaatagaaagtgcatttgtggctcacccaaaagtagctgaagcagccgtagtcggataccctcatgatctaaaaggaaatgcattatatgtttatgtcacattaaacttaggtgaaaaagaaaatggtgacttagagagagaattgaaaaatcatgtagctagaactttgggtccaatttatagacctgatataattcactttacacctggtcttcctaaaacaagatcaggtaaaataatgagaagaatactaagaaaaattgcagctaacgaacacggacagttgggagatacaacaactttagcagatccaagtgttgttgatagttta

SEQ ID NO: 309332 - DNA, 865 bp, Unknown
  Bacterial polypeptide expressing nucleotide sequence isolated from the Sargasso Sea
tatggcaaaaagaagtaaaaagaaaaaaagaaaatcaaaatctaggaaaaagaaaagttttaaaagaaaaaagaaaaaaattcttagaaaaaagaacaaaaaaatctcaacaaaaaagaagggctcaaaacaaacggaagactctgatggtaatattgtctttaaagtgcctcctagttgggaaaaacgggcttatgttaatcaatcccagtattcaaaaaaatataaattatcgttaaaggataacgaaggtttctgggctaaagaaggaaaaagaattacctggatgaaaccatatactaaaatcaaggatgtgagatacagcaaggaggacgttagcattaaatggtattacgatggtacattaaacgcatcagcgaactgtattgatagacatttagacaaaaaaggaaataaaactgcaattatatgggttggtgatgacccgagtgactccaaaaaaatatcttataaagaacttcataaaaatgtttgcaaagcagcaaatggattaaaaagcataggaattcaaaaaggagacagggtaactatttaccttactatgattcctgaacttgcttacactatgttagcatgtgctaggatcggtgctgttcactcaataatatttggtggattttctccagactcaattgcaacaagaattaatgattgcgagtcagattacgtaattacagcagatgaaggagtaagaggtggaaaaataattccactaaagaaaattgctgatgaggccatgatgcaatgtccaaatgtaaaaaaatgtgttgttgttaaaagaactggtaatgtagttgattggaatggcgatcgagatatttcttacgatgatattacaaaagat

SEQ ID NO: 309333 - DNA, 778 bp, Unknown
  Bacterial polypeptide expressing nucleotide sequence isolated from the Sargasso Sea
attattgaattctgaaaaatttcatattggcttaggaaataatgattcttctgtaagagagtctgccaaaaaagactatatttcattttggaacgaatgtgcaaaatcattgtcttggtttgaaccttggactgaaacattacaatggaatcctccttttgctagatggtttactggtggaaaaatcaatgcgtcatacaacgcccttgatgtacatcaagattcaaaatctgaaaaatctgcaattttatgggaaggtgaggatggaactgatagaaaaatcacatacaaagaaatgtttactcaggtacaaaaactggctaatgttctaaaatctttaggtgtcaaaaaaggtgatcgagtaacaatctacctacctatgattcctgaacttccaatttcgatgcttgcatgtgcacgaataggtgctgttcatactgttgtattttctggatttagcgctacatctctttctgacagggtagaggattcacaatctaaagtaatcattacggctgatggtggatatcgaaaaggaaaaatcattaatcttaaagaaattgttgatgaatcggcatcatcagttcaatttgtaaaaagtgtcattgtctatcagcgaacaggtcagaatattcaaatgaatgaaaaagacctattatggtctgatgtgatgtgttctgcctctcctgaatgtgatgctgaagttttagatagtactgattcattatacattttgtacacatctggcacaactggaaaacctaaaggggtcttacat

SEQ ID NO: 309334 - DNA, 592 bp, Unknown
  Bacterial polypeptide expressing nucleotide sequence isolated from the Sargasso Sea
aggcggcaaaccaattccattaaaaaagaatacagacgatgccatcaacatctcgggtggtgtgagacattgtattgttgtcaaacgaacaggtggggcgatcgattggcatgatgaccgtgatgtttggtatcacgaactattaagcgacgcatcagatgattgtccgccagaagaaatgagtgcggaagatccattatttattctctacacatcaggctccacaggaaaaccaaaaggagtaatgcataccactggtggttacatggtgtatgcctccatgacacatcaatatgtatttgattacaaaccaggtgatgtttattggtgcacggctgatgttggttgggtcacaggacatagttacattgtatatggaccactcgcaaacggtgctgttaccgtgatgttcgaaggggtgcctaactatccaagtgcatctagattttgggaagtggttgataaacataaagtaaatattttctatacagcgccaacagctattcgcgcactcatgcgcgaaggtgaagggccagtaacaaaaacaagtcggtcttctctaaaattactcggtactgtgggcgagccaatc

SEQ ID NO: 309335 - DNA, 566 bp, Unknown
  Bacterial polypeptide expressing nucleotide sequence isolated from the Sargasso Sea
gatgacacaagaaatttataatcctaatcccggattttcaaatccgcatataaaagattttgatgaatatttaagtctatataaagagtcaattgataatcctgaaaaattctttggcgatctggcaaaagaaaatatttcatggattgaggattttaaagaggtacataactctgagttccaagaaactaaatggtttgttggaggaaaaacaaacataacgctcaactgtattgatagacaccttgaaaaaaatggcgataagattgccttaatttgggaaggtgatgagccaggaaactctaaagagataactttcaaagaattgcactctgaggtttgcaggtttgcaaatatccttaaaacgcttcaaattaaaaaaggctccagagtttgtatttatatgccgatgattcctgaagctgcatttgcaatgtttgcatgtgcaagaattggtgcgatccactcagttgttttcggtggattttctccagaatctttaaaggataggattctggatgctgactgcagaattgtaattactgctgatgagggtgttcgaggcg

SEQ ID NO: 309336 - DNA, 700 bp, Unknown
  Bacterial polypeptide expressing nucleotide sequence isolated from the Sargasso Sea
gactggtggtgtaatgataagtcccttgcctggagtagtggctacaaagccaggttcagctacttttcctctgccaggaatcgaaattgaaattgtcgataagaatggagataaggttaaggagaatgagggtggctatttaattattaagaaaccttggccaggaatgatgagaacaattcacggaaactcagagagatatttggagagttattgggaatatatttcttttaaaggagaaaaaaatgtttattttgctggagatggggcacgcaaagatgaagatggatatatatggattatgggaagagtcgatgatgtaataagtgtttcaggacatcggttaggaacaatggaaatagaatctgctttggtgagtcataaatcagttgcagagtctgcagtcgttggcaaaaaagatgatttaaaaggtgaagttatagttgcttttgtatctttagagaaagatgtaaatagttcttcagaattagttgaggaattaaaaaaacatgttgtaagtgaaattggaattattgctaaaccagaaaaaattataatttctgactctcttccaaaaacacgtagcggaaaaattatgagaagaattttaagatctttggctgctggagaagaaattagcggtgatataagtactcttgaagatagttctgttttggaaaagttaaaagaaaaatcctaa

SEQ ID NO: 309337 - DNA, 722 bp, Unknown
  Bacterial polypeptide expressing nucleotide sequence isolated from the Sargasso Sea
agaccgacatttaaaaaagaataaagataaaacagcaattatctgggtaggtgatgacccaaaagtccaaaaaaaaattagctataaacaattacaccaagaagtatcaaaagctgcaaacggtcttaaagaaataggagttaaaaaaggcgaccgggtaacaatttatttaacaatgatacctgagttagcttacacaatgctcgcctgtgctagaattggtgctattcactcaattatttttgggggattttctccagacagtattgcaggaagaataaatgattgtaaatcagattatgttataactgctgatgaaggtctaagaggtggaaaaacaattcatttaaaatctattacagatgaagcattactaaattgtccaaatgtcaaaaaatgtattgttgtaaaaagaactggaaatagaattaattgggatgaaagtagagatgtctggtatcatgaaataactaaaaaagtatcttcaaattgtgaaccagaagaaatgaatgctgaagatcctttatttattttatatacatctggctcaacaggaaaacctaaaggtgttttacataccactggtggttatatggtttatgcttctatgacacaccagtatatttttaattataaatcaaaggatatttattggtgtactgctgatattggttggattaccggtcacagttatattatttatggtccactttctaatggtg

SEQ ID NO: 309338 - DNA, 930 bp, Unknown
  Bacterial polypeptide expressing nucleotide sequence isolated from the Sargasso Sea
taaacctgaatgggtaaaaaggagtttagcaaataaagcccaatatcaaaaaatatattctgattctattaaaaataataattcattttggaaaaaagaaggaaagagaattacttggataaaaccttacaaaaaaattaaagatgtcaaatatagtaaagacgaagtaagaattaaatggtttgaagatggtactttaaacgcatctgcaaattgtattgatcgtcatctaaaagataaaaaagataaaactgcaattatatgggtaggggatgatcctaaagatactcaaaaaatttcttataagcaattacatcaaaaagtttcaaaagctgctaatggtctaaaaaaactagggatacaaaaaggcgaccgtgtcactatttatttaacgatgatacctgaattagcaatactgatgttggcttgcgcaagaataggtgccgtccactcaataatttttggtggtttctctgcagagtcaatttcaggaagagtaaatgattgtaaatcagaatatataattactgctgatgagggagtaagaggaggtaaaactattcctttaaaagcaacgacagatgaagctttatctaattgtccagatgttaaaaaatgtattgtagtaaagagaactggtaattatgtatattgggatcaagatcgagatgtctggtatcacgacctaattaaggatgtaccaaatcattgtgagcctgaggaaatgagtgcagaggatcctttatttattctctatacatcaggatcaaccggaaagcctaaaggagtattacatactactggaggatatatggtttatgcttctatgactcatcaatatattttcaattataaaccgaatgacatttattggtgtacagcagatattggatgggtaactggtcatagctatataatttatggaccatt

SEQ ID NO: 309339 - DNA, 521 bp, Unknown
  Bacterial polypeptide expressing nucleotide sequence isolated from the Sargasso Sea
ttacggagatcataaaagatttattgatacgtatttttctcaattgatgggaaaatattttactggagatgggtgtagaagagataaagacggttattattggataaccggaagagttgatgatgtaataatagtttccggccataatttgggaacagctgaaatagaaagcgcttttgtagctcaccctaaagtagcagaggctgcagttgtaggttaccctcatgatataaaaggaaatggtttgtattgttatgttactttaaatgctggcgaacaacctgatggtgacttagaaagagagctaaagctttgggtaagaagacaaattggacctatagctaaaccagatttaattcagtttgctcctggtttaccaaaaacaagatcgggtaaaataatgagaagaattttaaggaagattgcagctaatgagcataatgaattaggtgacacaactacccttgcagacccgtctgttgtagagtctttagtagaaaataggcaaaacaaagattaat

SEQ ID NO: 309340 - DNA, 915 bp, Unknown
  Bacterial polypeptide expressing nucleotide sequence isolated from the Sargasso Sea
gttacaatttatctaacaatggtacctgaattggcttacacaatgctagcttgtgcaagaattggcgcggtacattcaataatttttggtggattttcaccagatagtattgctggaagaataaacgactgtaagtccgattatatagttacagcagatgaaggtttaagaggtggaaaaactatttcattaaaatcaataactgatgaggcattaattcattgtccaaatgtaaaaaaatgtattgttgttaaaagaactggaaacagaattaactgggacgagagcagagacgtttggtatgatgatatgattaaaggggttccatcacaatgtgaacctgaagaaatgggagcggaagaccctctttttattttatatacatctggatcaactggaaaaccaaaaggtgtattgcatactactggtggttatatggtctacacttctatgactcatcaatatatttttaattataaaccaaaggatatttattggtgtaccgctgatattggttggataacaggtcacagttacataatttatggaccactttcaaatggcgcaacaaccataatgtttgaaggtattccaacttatccagactcttcaagatggtggcaaattgtagataaatttaaagttaatattttttatactgctccaactgcaattagggctttaatggcgcaaggggaaggaccagttaaaaaaacatcaagaaaaacattaaaattattagggactgttggcgaacctataaatccagaggcgtgggagtggtattataaaactgtaggagaaagtaagtgtccgattgtagatacttggtggcaaactgaaacaggtggaattttaatagcacctccaactggagcaatagatcttaagccaggctcagctacaaaaacattt

SEQ ID NO: 309341 - DNA, 499 bp, Unknown
  Bacterial polypeptide expressing nucleotide sequence isolated from the Sargasso Sea
aatgaagaaagagttttcctatcctgttccgatcgatatttcaagagaagcttcaatcgatcaagaaaagtatgaagcgatgtaccgagattccttagaggacccaaaaaaattctggggagagcagggcaaaaaattcatatcttggataactccttgggaggtgattcatgagaacgaatttaataatggtaaaacagaatggttcatcggaggaaagcttaatgtgtctttcaattgcgttgatagacaccttgaggaacgaggaaattcggtagccattgtttgggaaggcgacgaacctggagactcaaggaatattacttacagggaacttcacaaagaagtatgcaagctagccaatgctttaaaaactaatggaataaaaaagggcgatagagtctgcatttatatgcctatgatacccgaagcagcttttgcaatgcttgcctgcgctagaataggtgcgattcattcagtggttttcggaggcttttca

SEQ ID NO: 309342 - DNA, 666 bp, Unknown
  Bacterial polypeptide expressing nucleotide sequence isolated from the Sargasso Sea
gttgcatcaatgtaaatcaggaaggaaaaacatgagctaccagaaagaatatcgtgaatccattgagaatcctgaagcattctggagccgccaggccgaattgataacatggtatgagaaaccgaagtcaatcctctcccaggatgaaaagggcttttatcactggttcaagggaggaaaactcaacacgagttacctggccctcgatttccatgtggaaaacgggagggccgagcaggcggctttaatttatgattccccggtcactgaaaccgttcgaagctacacgtatcgtgaattgctggatgaagttgcccgttttgccggggtgttacagaaccagggggttgaaaaaggagaccgggtcatcatctacatgccgatgattcctgaagcagtggtggcaatgttggcttgtgccagacttggagcgattcactctgtggtttttggaggtttcgccccgaatgagttgtcgatccgtattgatgatgcaaaaccaaaagccctggtgacggcttcctgcggtatagaatttaccaatatcattgaatacaaacctctggttgatgaagcacttcgcatctccagtcatgctcttgaaaccgtcatcctgcttcaacggtcgcaagcaaaggcttcgatgcaggcagggagggacttcga

SEQ ID NO: 309343 - DNA, 823 bp, Unknown
  Bacterial polypeptide expressing nucleotide sequence isolated from the Sargasso Sea
aaatgtgttccggaggagatgaatgctgaagaccctctttttattctttatacttctggatcaactggaaaaccaaagggtgttttacatacaacaggcggatacatggtatacgcgtctatgacacatcaatatatttttgattacaagaataaagatatttattggtgtactgcagatataggttgggtaactggacacagctatataatttatggtccattatctaatggtgccacaacaattatgtttgaaggtatacctaactatcctgatagttctagatggtggcaaatagttgataaatacaaagttaatattttttacacagccccaacagcaataagagcattaatgcgtgagggggaagggcctgtaaagaaaacaagtcgcaaatccttaaaacttttaggtacagttggtgaacccatcaatcctgaggcttggatgtggtattacaaaacagtaggggaaaaaaaatgtccaatagtagatacttggtggcaaactgaaacagggggtatattaatttctcctcaacccggagcaataaatttaaagcctggctctgccacaaaaccattttatggaatcaaacctgtaatagttgatgaagctgggaaaactctaaagggtgcatgtaaaggaagattgtgtatggctcaatcttggcctggtcaaatgagaactgtttatggagatcatcaaagatttatagatacttatttttcacaatttgatggaaaatattttactggggatgggtgtagaagagacaaggatggttactactggatcacaggaagagttgacgatgtaataa

SEQ ID NO: 309344 - DNA, 886 bp, Unknown
  Bacterial polypeptide expressing nucleotide sequence isolated from the Sargasso Sea
aaacaagttttagggggggaatctaatttgtctggaaaatacgaaaaagtctatgattcatccataaaagacagagaaaatttttggaaaaaaatatctgatgatattttttggtacaaaaaaccttcaaaaatactcaattcctctaaatctcctttttataagtggttcgaagatggtgtaacaaatacttgttacaacgcgttagattttcatattgataaaggtcgtggagataaaacggctataatctacgatagcccgataactggagcaaaaagtaaattttcttacaaagaattgagggacaaagcgtctgtttttgccggggcgcttaaaaatcaaggaataaataaaggagatagaattataatttatatgccgatgatacctgaagcggtaattgccatgttggcttgtggtagaattggtgcagttcattctgttgtttttggaggctttgctgccaacgagttggcgagtagaattgatgattcaaaagcaaaaattattgtttcggcttcttgcggatatgagcctggaagaactgttcactacaaacctttgttgaataaagctattgagattgcaaagcacaaaccgaacaaatgtataatttttcaaagagaaaaaaataaagcagagcttaatccaaaaacagatattacatgggaagaagttttaaaaggagctaaaccaactgagtgtgaaaaaatgaatgcgaacgactacgcttatattctttatacatcagggacaactggtttaccaaaaggaattgtaagagatataggtggtcacatcgttgctctaaaatggactatgaaaaatatttataaaatagatcctgatgatgtatggtggtcagctagtgaatataggttgg

SEQ ID NO: 309345 - DNA, 596 bp, Unknown
  Bacterial polypeptide expressing nucleotide sequence isolated from the Sargasso Sea
catgacaaaagaaactatatacgaaccttcagaagaaattattaacaacgccgttatttctaatgaagaattcgaagagctttataaagaatcaatcaacaaccctgatcaattttggaatcaacaagcacgtaattacctatcgtgggataaagaatgggatgttgtaaaagaatgtgatctagcaaaaagtgaaataaactggtttaaaggggctaaattaaacgcttctgtaaattgcgttgacaggcacctagagaataatggtgagaagatagcaataatctgggaaggagacgaccctcaagactctttaaaaattacctacaaacagttacacgaatctgtctgtagatttgctaatgccttgaagaaaagaggaataagcaaaggagatagggtttgtatttatatgcctatgattcctgaagcggcgtatgccatgttagcttgcgcaagaattggtgcaatacattcagtagtatttggaggattttctccagagtccctcaaggacagaattttagactcaaactgtgagagtgttattacagcagatgaaggactaagaggttctaaaaagatacctctaaaaa

SEQ ID NO: 309346 - DNA, 795 bp, Unknown
  Bacterial polypeptide expressing nucleotide sequence isolated from the Sargasso Sea
attatttattttatacacatctggttctacaggtaaaccaaagggggtattgcatactactggaggttatttaacctatgtatcactaactcatgagttaatttttgattaccatccagatgatatctattggtgtaccgcagatttaggatggatcacaggtcattcatatataatctatggccccctcagtaatagggctactactttgatgtttgaaggtgtgccaaattatcctgactttggtaggttttgggatgtagttgacaagcataaggtaaatcagttttacactgctcccactgcacttagagcgttaatgaaagagggagatgattgggttaagtcaaaagatctttcttccctaaaacttttaggaactgttggcgaacctattaaagagccagagtggaaatggtattttaacatagtaggaaatggtaattgtcctatagttgatacctggtggcagacagagacaggtggtatccttatctctccattgcctggagcaactccaaccaaaccgggttctgctacattacccttttttagtgtccaacctattctattgtcagaggagggtaaagaaattgatggaaacgacgtgtcaggacttttagctttgaaaacttcatggcctgggcagatgcggaccatttatggcgatcatgaaaggtttattgaagtatacttttctcaatttccaggatattattttaccggtgacggtgctaaaagggataaagatggctactactggatcactggaagggtcgatgatgtttttaacgt

SEQ ID NO: 309347 - DNA, 781 bp, Unknown
  Bacterial polypeptide expressing nucleotide sequence isolated from the Sargasso Sea
tattggtgtaccgccgactgtggctggatcactggtcattcgtacatcgtgtacggcatcatgcccaatcgggtcccaaccctgatgtacgaaggcgccccaaacgcgccggcggaagatcggttctgggacatctgtgctcgccattcggtaacccatttttacaccgctcccacggccattcgcgcatttatgaagtggggagatgaccaccccaatcggcacgatctgtcttcgctgcaagtgttgggaacggtgggcgaacccatcaacccggaagcatggatgtggtaccaccgcgtgattgggaacgagcgttgtcccatcgtggacacgtggtggcagactgagacgggaggtcacatgatcacaccgttgccttgtgccacgccaacggttcctggttcgtgcacgttgccggccattggggttgatgcggccatcgtggaccaggatggtcaagaggtcccgcacggaacggggggcttgttggccatccgaaaaccatggccgggcatgctgcgtggcatttacggcgaccgcgaacggtttatcgacacctattggtctcgattgccagggttgtactttgccggtgacggcgcccggcgcgatgagcgtggttacttctggatcatgggccgcgtcgatgatgtcatcaatgtttcaggtcaccgcatgggcacgatggaagtggaaagcgctttggtctcgcaccctgcagtggtggaggcagccgtggtgggcatgccccatgaaatcaagggcacgggcatcgctg

SEQ ID NO: 309348 - DNA, 757 bp, Unknown
  Bacterial polypeptide expressing nucleotide sequence isolated from the Sargasso Sea
aatgaatgcagaggatcctttatttattttgtatacatctggttctactggcaaacctaaaggagttcttcatactacaggtggttatatggtttatgcatcaatgacacatcaatatattttcaactataaaccaaaagatatttattggtgtactgctgatattggttgggtaactggacatagctatattgtttatgggccactttcgaatggtgcaacgactataatgtttgaaggaattccaaattatcctgatagctcaagatggtggcaaatagttgataaatataaagtgaataccttttatacagcaccaacggcaataagagctttaatgcgtgagggagataaaccagtaaaaaagacgtctaggaaatcactcaaacttttaggaacggtaggagaacctataaatccagaggcatggatgtggtattataaaactgtaggcaactctgaatgcccaattgtagatacttggtggcaaacagagactgggggtattatgattgctcctcaaacaggtgctattcctctcaaacctggatctgcaacaaaacctttctatggaattaaaccagtattagttgataaaaatggaaaggaaattaaaggagctggtgaaggaagattgtgtatagctcaatcatggcctggacaaatgagaaccgtttatggtgatcatcaaagatttatcgatacatacttttctcaatttaacggaaaatattttactggtgatggatgtagaaga

SEQ ID NO: 309349 - DNA, 751 bp, Unknown
  Bacterial polypeptide expressing nucleotide sequence isolated from the Sargasso Sea
aatgagagaaggtgataagcctgttaaaaaaacatcaagaaagtcattaaaattattaggaaccgtaggtgaaccaatcaatcctgaagcatgggaatggtattataaaactgttggagattcaaattgtccgattgttgatacttggtggcaaacagaaacgggtggaatattaataagtcctcaaactggtgctataaatttaaaaccaggttcagcaacaaaacctttttacggaataagacctgtaatagtaaataaagaaggaaaagttttaaaaggagaagctgaaggtcgtttatgtatagctcaatcatggcctggccaaatgcggacagtttatggggatcatcaaaggttcattgatacatatttttctcaatttgatggtaaatattttacgggagatggttgcaggagggataaagatggatattactggatcacaggaagggttgatgatgtaattattgtttcaggacacaaccttggaactgctgaaatagaaagtgctttcgttgctcatccaaaagtagcagaagctgccgtagttggatatccacatgatattaaaggtaatggcttgtattgttacgttactttaaatatgggagaaaaatccactttagatttagaaagagatttaaaactttgggttagaaaacaaattggtccaatagctacaccagatctaatccaattttcacctggacttccaaaaactagatcaggaaaaattatgagacgaatt

SEQ ID NO: 309350 - DNA, 530 bp, Unknown
  Bacterial polypeptide expressing nucleotide sequence isolated from the Sargasso Sea
gatgtcctcagattttaagcagatttatgaagcttcaattaagaaacctgaggaattttggcaaaatgtatccgaggatgttttttggttcaaaaaaccaactaaaatattgaacaaagataagccaccattttataaatggttctgtgatggtgtcacaaatacttgctataatgcgcttgatattcatattgatcaaggaagaggagaaagaattgcacttatatatgacagccctatcactgggaacaaaaaaaaattcacatataacgatttaaaggggaaagtttccagatttgcaggggctctaaagaaacaaggcgtcaaaaaaggagatagggttataatttatatgccgatgatacctgaagcagtaattgctatgcttgcttgtggaaggattggggctattcattcagtagtttttggtggatttgcctctaatgagctggcaagtcgtatagatgacagtaaatcaaaaattctagtcacagcctcttgcgggtttgaaccaggtagaactgtcgaat

SEQ ID NO: 309351 - DNA, 718 bp, Unknown
  Bacterial polypeptide expressing nucleotide sequence isolated from the Sargasso Sea
gatgtctgctgaagatccactttttatattgtatacttctggatctactggaaaacctaaaggagtacagcattcgaatggtggttacattgtgtatgcctctctaactcatgagtatattttcgattatcatcaggaagatatttactggtgtactgctgatgttggttggattaccgggcatagttatattgtttatggacctttatcgaatggagcaacaactctaatgtttgaaggtgttcctacatatcctgattgttctaggttttggcaagtttgtgaaaaacataatgtaaatcaattttatactgctccgacagcaatcagggcattgatgggacaaggggatgattttgtgaataattgtgatttgtcaagtttacgaattttaggtacagtaggagagcctatcaacccagaagcatgggagtggtataataaggttgtaggtaaagggaagtgcccaatagttgatacatggtggcaaactgaaactggaggaatactaatcacgcctttacctggtgcaacagctaccaaacctggatcagctacaactcctttttttggaataaagcctgtaattatagatcctaaaactggccaagagttaataggtaataatgttgaaggtgttttagcttttaaagatagttggcccagccaaatgagaacagtttatggtgatcatgacaggtttataaaaacttatttt

SEQ ID NO: 309352 - DNA, 604 bp, Unknown
  Bacterial polypeptide expressing nucleotide sequence isolated from the Sargasso Sea
atgtctggtgagttcgatagtacatatacacgggcgttgacagatagagtttctttttggggggaagccgcagacggcattcactgggatcggaaatgggatgtggttttggatgattccaatccgccgttctatcgctggttctcaggcgggattttgaatacttgctacaacgcgttggatcgtcatgttgaggccgggcgcgctgaacagtgcgctataatctatgacagccccatgacagaacaggttgtaaaatttacatatcgtgagctgcgggatcgtgtggcactgtttgccggcgttctggcaagcgagggtgttactaaaggagatcgtgtcgtcatttacatgcccatgatccccgaagcagtcattgctatgcttgcctgtgctcgtctcggcgcagtgcattcagttgtttttggtggtttcgcgtctaatgaactcgcgattcgcattgatgatgctaaaccaaagattgttgtttcagcttcatgcggattagagccaggccgcatcgttgaatataagccgctgctcgacagagcacttagttcggccagtcatcagcctgatcgttcgatcatcctgcaacgtgagg

SEQ ID NO: 309353 - DNA, 1555 bp, Unknown
  Bacterial polypeptide expressing nucleotide sequence isolated from the Sargasso Sea
atgtcatcagattttagacaaatatacgataattcaattaagaaacctgaggacttttggaaagaggtttctgaggacattttttggtttagaaaaccaactcaaatattgaataaagagaatccgcccttttataaatggttttgtgatggagttacaaacacttgctataatgctttagatatacatattgaccaaggcagaggagataagactgccctaatatatgatagtccaatcacaggaaacaaaaaaaagtttacttataatgaattaaaaagcaaagtttcaaagtttgctggcgtcttaaaaaatcaaggggtggttaagggtgatagagtaataatttatatgccaatgataccagagtcagtcattgctatgctggcttgtggaagaattggagctatacattctgtagtgtttgggggatttgcttcaaacgaattagcaagtcgtattgatgacagtaaagcaaaattattagtaactgcatcatgtggatttgaacccggtaggactgttgagtataagcccttagttgacgaagcattgaagttagcatctcacaaaattgaaaaaatgatactttatcaaagatcaggccatgaggttaaactaaacccgaaaaatgaagtaaattgggaagaggcattagtaaatgcgaaagagactgactgtgttgaaatgaactcaaatgattttgcttacattctatatacttctggaactactggtatacctaaaggaatagttagagatattggaggacatatagtggcactcaaatggacaatgaagaatatttacaacattgatgctgatgatatttggtggtctgccagcgatattggttggatagtgggccattcttatattgtttatgcaccattgtttaaaggatgtacaactgtcttgtttgagggaaaaccagtgggcactcctgacgcaggtgctttttggaaaataattgcagactataaagtaaaatctctttttacagcacctactgcttttagagctataaaaaaagaagatcctgatggaaaattcttttcaaagtacgatctaagctcatttgaatctctattcctagcaggtgagcgtgcagatcctgatactattaaatgggctgaaaaacttttaaaagttccggtaatagatcactggtggcaaactgagactagttgggcaataagttctaattgcacaggaatagaaatgcagaaaacaaaatatggttctgcctgtagagcagtgccgggatatgatgtcaaaattttaaaaagtgataattcaattgcaaaaccaaatgaaatgggagacatagttgtaaaacttccactgcctccaggaacgtttcctactttatggaatgctgacgagcgatatcagaaaacttatatgagtaactacgaaggatattatcagacatatgatgcaggtcatattgatgaagatggatatatatggataatgtctagaacagatgacattataaatgtagctggtcacaggttatctactggagctattgaagaagttttatctgaac

SEQ ID NO: 309354 - DNA, 1607 bp, Unknown
  Bacterial polypeptide expressing nucleotide sequence isolated from the Sargasso Sea
catgcctaagaaaaaaaaagttaaacaaaaagtaatctctaaaaaacctaaagagacaatttataaaaccaagaaagaatggataagtaaagctacagttaataaatctcaatatataaaaaaatataacgagtcgattaaagacaacgatggattttggaaaaaagaaggaaaaagaattaattggattaaaccttataaaaaaattaaagacgttaaatatagtaaagatgatgttcatattaaatggttctatgatggtactttaaatgcctcagcgaattgcattgatagacatcttaaaaagaatgctaataagactgcaattatatgggtaggagacgatccaaaaattcaaaaaaaaattacatataaagaacttcataaggaggtttcaaaagctgcaaatggattgaaaaatttgggagtccaaaaaggtgatagagtaacaatttatcttaccatgataccagagcttgcctacacaatgcttgcatgtgctcgaataggtgcagtacactccataatatttggaggtttttcgccagatagtatttcaggtagaattaatgattgcgaatctgattatgttataactgcagatgagggtgtaagaggaggcaaaacaatccctttaaaatctattacagatgaagctttgcagagctgtcccaacgtaaagaaatgtgttgttgtaaagagaacaggtaccaaaaagattgattggtactctgatcgtgatgtttggtatcacaaaatgacaagtaaagtttcagcaaaatgtgagcctgaggaaatgaatgctgaagatccattattcattctttacacatccggttcaactggaaaaccaaaaggtgtgttacatacaactggtggatatatggtttatgcatcgatgactcaccaatatatatttaattataaacctaaggatatttactggtgcacggctgatataggttgggttacaggacacagttatattatttatggtccacttgctaatggcgcaactacaattatgtttgaaggaatacctacttatcctgatacatctaggtggtggcaaatagttgataaatataaagttaatattttttatacagctcctacagcaattagagctttgatgagagaaggtgataaacctgtaaagaaaacatcaagaaaaactttaaaacttttaggtactgttggtgaaccaattaaccctgaagcttgggaatggtattacaaaactgttggcgatagcagatgcccaatcgttgatacatggtggcaaacagaaacaggtgggattttgatcagccctcaaactggtgccatagatttaaaacctggttctgcaacaaaaccgttttatggaattaaaccagaaatcctagataaagatggaaaggtattaaaaggagaagcacaaggtagactttgtatttcacaatcatggcctggacaaatgagaagtgtgtatggtgaccatcaaagatttatagacacttatttttcacaatttgacggaaaatattttacgggtgatggctgcagaagagataaagatggttatttttggattacaggaagagtagatgatgtaattattgttt

SEQ ID NO: 309355 - DNA, 1093 bp, Unknown
  Bacterial polypeptide expressing nucleotide sequence isolated from the Sargasso Sea
atgaaagaatttaaattatctaatccacttttatcaaaagaacaatatgaagagatgtatgcagagtcttttagtaataaagagcaattctggtctaaagtagcaaaatctcaagtaacgtggtctaaagatttcactaaagttaaaaacaccaactacgatggtgacgtatctatcaaatggtttgaggatggtgaattaaacgtttgttataactgtgtagatagacatgctgaaacacgaccaaatgaagtagcaattatttgggagggagatgatactagtaaaaataaaacctacacttataaagaactaaagtcagaagtaagtaaatttgcaaatgttcttaaaaaacttggtgtaggaaaaggtgatgtagtaacaatttatttaactatgatacctgaagttgcatttgctatgttggcttgtgcaagaataggtgcaatacactcagtaatatttggaggcttcgcaccagagtcaatagcaggacgaattaaagattgcaaatctcaatttgtaattactgctgacgaaggtgttcgaggaggaaaaataatcccactaaaaaaatatattaatacagctttggaaagttgtgatagttccataaagactcttgtaattcgatatacaaatactcaagacgaattacataaagataataatttttattatgatgaattaattaaagaagtagatgatcaatgtgaatgtgtatcaatgaatgcagaagatcctcttttcattttatatacatctggttctacaggtaagccaaaaggtgttcttcatactacaggaggatatttagtttatgcctcatttacgcataagtactcttttgactatcatccaggtgatgtttattggtgcacagctgatgctggatggattacaggacactcttattccgtttacggcccgctcgcaaacggaggtaaaacattattgttcgaaggcgttcctaactatccagacttttctcgcttttgggaggtttgtgataaatacaaagttaatattttttacacagcacctactgttttaagatctttgatgaaagagggtaattcatatattggaaaat

SEQ ID NO: 309356 - DNA, 586 bp, Unknown
  Bacterial polypeptide expressing nucleotide sequence isolated from the Sargasso Sea
atgaaatctgaatttgagagaatttatagagaatctatcgataatcctgagaaattctggcaagaggtatcaaatgacattttttggtttaagaaaccttccaaaatattaaacaaatctaaccctcctttttataagtggtttgaagatggaactactaatacttgttataacgctttagatctacacatagaaaatggcaaagggggtaaaactgctttaatttacgatagtccaatcactggaaataaaaaaaaatttacttacttagaattaaaagacaaagtttcgaaatttgcgggatcattagataatcttgggataaaaaaaggtgatagagttataatttatatgccaatgatacctgaggcggtaattgctatgttggcttgtggtagaattggagcagtgcactcagtagtttttggcggctttgcctctaacgagcttgctagtaggattgacgacagtaaagcaaagctacttataactgcttcttgtggatttgaaccaggcagaaccgttcattatagacctttggttgatggagctttaaaattagcaaaacataaagtgaaaaagtaat

SEQ ID NO: 309357 - DNA, 604 bp, Unknown
  Bacterial polypeptide expressing nucleotide sequence isolated from the Sargasso Sea
ctatccagaaatagtggatgctgccggaacacctgtcgagcaaggagaaggtggatggctcgtcatgactcgaccatggcccgggatgttgcgtggtatttggggagatgaggaacgatttgttgaaacctattgggaaaaagtgccaggcaagtatcttgcgggagataacgcgcgtcaggactcggatggttactattggatcatgggacgtatcgatgatgtgctcaacgtggcaggccatcgactctcaacaatagaaatcgagagtgcgttggtcagtcatcccgttgttgcagaagcagctgcagtcgggcgtcctcatgatgtcaagggagaggccgttgcagtgtttgttacccttcgagaggaggagccatcagacactctgaaagacacattgagaaaacatgttcgtcagcaaattggtgcgattgcatcgccagatgacatccattttaccaatgcgctcccaaagactcggagtggcaagattatgcgtcggttactacgagacattgcagctggtagggaggcggttggcgatacgacaacactcgaagactattcggtgttagcaaaattgcgaggcgatcaggaatag

SEQ ID NO: 309358 - DNA, 1777 bp, Unknown
  Bacterial polypeptide expressing nucleotide sequence isolated from the Sargasso Sea
atgaaaaatagttttaacaaaatttatcaagaatctattcaaaatcctgaagaattttggaaaaatgtgtctgatgatgtcttctggtttaaaaaacctagtaagattttgaacaaatctaatcctccattttataaatggtttgaagatggcgtcacaaacacctgctacaacgctattgatgttcatattgacaatggtaatggggataagactgctttaatctatgatagccccataactaacagtaaagcaaaatttacatacagtgaattaaaagaaaaaatttcaaaatttgctggagcgttagatcatcaaggcgtcaaaaaaggcgacagagtgattatctacatgccgatgatacctgaggcagttatagcgatgcttgcttgtggaagaattggtgcaatacactcagttgtctttggtggatttgcttcaaatgaactagcaagtagaattgatgatagtaaagcaaaaattttaatcactgcatcttgtgggtttgaacctggtcgtactgttgaatatagacctttagttgatggagcattaaaacttgcaaaacataaagttgagagagtaattctttttcaaaggaaagatcacgaagtaaaactcaactctccacttgaaatcagttgggaggaagcactaattaatgcaaaaaataaagattgtgttgagattggatcaaatgagtttgcctacattttatatacgtcaggtactacaggaataccaaaaggaatagttagagatgtaggaggtcatatagttgctcttaaatggactatgaaaaatatttataacgttgacgagaatgatgtgtggtggtcggcaagtgatatcggttggatagtaggacactcgtatattgtttacgctccattgttcaaaggatgtacaacagtcttatttgaaggaaaacctgtcggtactcctgatgcaggagtattttggagaataatttctgagtataaaattaaatctttattcactgctccaacagcatttagagctattaaaaaagaagacccagacggaaagtttttttcaaagtatgatttgagttcattcgagtctttatttttagctggagaaagagctgatcctgacacaataaaatgggctgaaaatcttttaaatgttcccgttatagatcattggtggcaaacagaaactagctgggcaataagctcaaactgtactgggatagaaatgcaaaaaacaaagtatggttcagcatgtaaagcagttccaggttatgatgtaaaaataattaaaccagatcattctatcgcagaaccaaatgagatgggtgatatagttgttaaattacctttgccaccaggtacttttcctacactttggaatgctgataaaagatatgaagaaaattatatgactaactataagggttactatcaaacttatgatgcaggacacattgatgaggatggatacatttggattatgtcacgaacagatgacataattaatgtcgctggtcatagattatcaacgggtgcaattgaagaggtattatctgaacatcaatcagttgctgagtgtgctgttcttggaattgcggataagttaaaaggacaattacctattggtttagttgttttaaaatccggtgttgaaaaagacaatgaaactatctcaaaggaatgtattaaaatggtaagagataaaattggacctgttgctgcgttcaaagttgttattgttattaagagattaccaaaaacaagatcaggaaaaatatgag

SEQ ID NO: 309359 - DNA, 1093 bp, Unknown
  Bacterial polypeptide expressing nucleotide sequence isolated from the Sargasso Sea
aaaaaagctttagttaatagaaaacagtacgaaaaaaaatataacgactctgtaaaacataacgaagatttttggaaaaaagaaggaaaaagaatcaattggatcaaaccatatacaaaaataaaagatgttaaatatagtaagacagatgttaatataaagtggtattatgatggaacacttaatgcttcggcaaattgtatagaccgacatttaaaaaaaaataaagacaagactgctataatttgggtaggtgatgatcctaaagtacaaaaaaaaattacttacaaacaattgcatcaggaagtttctaaaacagctaacgctttaaaagatttaggtattaagaaaggtgatagagttactatttatttaactatgatacctgaattggcttacacgatgttagcctgtgcacgtataggtgctatacattcaattatttttggtggtttttctcctgacagcattgcaggtagaattaacgattgtaaatcagattatgttattacagctgatgaaggtttaagaggtggcaaaattatacccttgaaatcaataacagatgaagcccttattcattgtccaaatgtaaagaaatgtattgttgttaaaagaactggaaataggattaattgggatgagagtagagacgtttggtatcatgaaataattaaaaaagcatctgcaatatgtgatccagaggaaatgaatgctgaggatcctttatttattttatatacgtctggctcaaccggtaaaccaaaaggtgtacttcacaccacgggtggatacatggtttatgcttcaatgacacatcaatatatttttaattataaaccaaaagatatttactggtgtactgctgatataggttggataactggtcatagctatataatttacggtccgctcgcgaacggtgctacaacaattatgtttgaaggaataccaacatatcctgatacatcaagatggtggcaaatagttgacaaatataaagtaaacatattttacactgctccaaccgcaatcagagctttgatgagagagggtgatggaccagttaaaaaaacgtctagaaaatctctca

SEQ ID NO: 309360 - DNA, 1558 bp, Unknown
  Bacterial polypeptide expressing nucleotide sequence isolated from the Sargasso Sea
atggcaaaaagaagtaaaaagagaaaaagaaaatcaaaatctaggaaaaagaaaagttttaaaagaaaaaagaaaaaaattcttagaaaaaagaaaaagaaaatttcatcgaaaaagaagggctcaaagcaagtagaagattctgatgggaacatagtctttaaagtacctcctaactgggaaagacaggcgtatgttaatcaatcccaatattcgaaaaaatataaattgtcgttaaaagataacgaaggtttctgggcaaaagagggaaaaagaattacctggatgaaaccatatactaaaattaaagatgtaaaatacagcaaagaggatgttagtattaaatggtattacgatggtacattaaacgcatcagcgaattgcattgatagacatttagaaaaaaaaggaaataaaactgcaattatatgggttggtgatgacccaagtgattccaaaaaaatatcttacaaagaacttcataaaaatgtttgtaaagcagcaaatggattaaaaagtatagggatacaaaaaggacacagggtaactatttaccttactatgattcctgaacttgcttacacaatgttagcatgtgctaggattggtgctgttcactcaattatatttggtggattttctccagactcaattgctacaagaattaatgattgcgagtcagattacgtaattacagcagatgaaggagtaagaggaggaaaaataattccactaaagaaaattgctgatgaagccatgatgcaatgtccaaatgtaaaaaaatgtgtagttgttaaaaggactggtaatacagttgattggaatgacgatcgagatatttcttacgatgatattataaaagatgttcctgataaatgtgtggcagaagagatgaacgcagaggatccactatttattctttatacttcaggatcgaccggcaaaccaaaaggtgttttacatactactggcggatatatggtttatgcttcgatgacacatcagtatatttttgattacaagaataaagatatatattggtgtactgcggacatcggttgggtaaccgggcacagctatattatttatggacctctagctaacggtgctaccactattatgtttgagggtattcctaattaccctgataattcaagatggtggcaaatagttgataaatacaaagttaatattttttatacagctccaacagcaattcgtgcactgatgcgtgaaggagatggcccagtcaaaaaaacaagtcgaaaatcacttaaacttcttggaacagttggagagcctataaatcctgaggcatggatgtggtattacaaaacagtcggtgaaaaaaaatgtccaattgtagatacttggtggcaaactgaaactggtggaattttaattgctccgcagcctggtgctataaatttaaaacctgggtcagcaacgaagcctttttatggtatcaaacctgcaatagtagatgagtcaggtaaagttttaaaaggagcttgtaaaggtagactttgcatgactcagtcttggccaggacaaatga

SEQ ID NO: 309361 - DNA, 1234 bp, Unknown
  Bacterial polypeptide expressing nucleotide sequence isolated from the Sargasso Sea
catgaaaaatagttttaacaaaatttatcaagaatctatacaaaatcccgaggaattttggaaaaatgtgtctgatgatgtcttctggtttaaaaaacccaataagattttaaataagtctaaccctccattttataaatggtttgaagatggggttacaaacacttgttacaacgcaattgatgttcatgttgatagaggtaacggtgataagacagctttaatctatgacagccccataactaacagtaaagcaaaatttacatatagtgaattaaaagaaaaaatttcaaaatttgctggagcactagaaaatcaaggtatcaagaaaggagacagagttattatttacatgccaatgatacctgaggcagttatagcgatgctggcttgtggaagaattggtgcaatacactcagttgtctttggtggatttgcttcaaatgaattagcaagcagaattgatgatagtaaagcaaaaattttaattactgcatcctgtggatttgaacctggacgaactgttgaatatagacctttagttgatggagcattaaaacttgcaaaacataaagttgaaagagtaattttctttcaaaggaaagatcacgaagtaaaactgaactctccacttgaaatcagttgggaagaagcactagctaatgccaaaaataaagattgtgttgaaattggagcaaatgattttgcttacattttgtatacgtcgggaactacaggtataccaaaaggtatagtaagagatgttggaggtcatatcgttgctcttaaatggacaatgaaaaatatttataatgttgatgaaaatgatgtgtggtggtcggcaagtgatattggttggatagtaggacattcatatattgtttatgctccattattcaaaggatgtacaacagttttatttgaggggaagccagttggaactcctgatgcgggggtattttggagaataatttcagagtataaaattaaatctttgtttacagctccgacagcatttagagctattaaaaaagaagaccctgatggaaaatttttctcaaagtatgacttaagttcatttgaatctttattcctcgcaggagaaagagctgatccagatacaataaaatgggctgaaaatcttttaaatgttccagtcatagaccactggtggcaaactgaaactagttgggcaataagttcaaattgtactgggatagaaatgcaaaaaact

SEQ ID NO: 309362 - DNA, 859 bp, Unknown
  Bacterial polypeptide expressing nucleotide sequence isolated from the Sargasso Sea
attgatgagagaaggagatgaactagtaaaaaggtctagtagaaaatctataagacttttaggcactgttggtgaacctataaacccagaagcatggttatggtattataaaattgttggggactcaaagtgcccaatcgtggatacttggtggcaaactgaaactggtggtattttaatatcaccacaacctggagcaatagatttgaaaccaggttcagcaacaaaaccattttatggaattaaacccgcaatagtggatgagtcaggcaaagaacttaaaggagcatgcaaaggtagattatgtatgtctgactcatggcctggtcaaatgagaacagtatacggtgatcatcaaagatttattgatacatatttttcaactgtcgacgggaaatactttacaggtgatggatgcagaagagacaaagatggatactattggataaccggaagagtggacgatgtgataatagtatcaggtcataatcttggcactgcagaaattgaaagtgcattcgttgcacacaaaaaagtggctgaagctgctgttgtcggatatccccacgaaattaaaggaaatggattgtattgctatgtgacgcttaaagcaggcgaggaaggcacagaagaattaaaatcagagcttattcaattagtaagaaaaatgattgggccagtcgcaaaaccagatttgatccatttcactcctggtctaccaaaaactagatcaggtaaaataatgagaagaattttgagaaaagtagcagaaaatgattatggaaacttgggggatacatcaacattagcagaccctacggttgttcaaagtttaattgataatagattaaacaaatag

SEQ ID NO: 309363 - DNA, 1504 bp, Unknown
  Bacterial polypeptide expressing nucleotide sequence isolated from the Sargasso Sea
tacactatgttagcatgtgctaggatcggtgctgttcactcaattatatttggtggattttctccagactcaattgctacaagaattaatgactgcgagtcagattacgtaattactgcagacgaaggtgtaaggggtggaaaaataataccactaaaaaaaattgctgacgaagctatgatgcaatgtccaaatgttaaaaaatgtgtagttgtaaaaagaacaggaaattctgttgattggaacgatgatcgagatatttcttatgatgatattacaaaagatgtatctgataaatgtgcagcagaagagatgaatgcagaggatccgttatttattctttatacctcgggatctactggaaaaccaaaaggtgttttacatacaactggtggatacatggtttatgcttccatgacgcatcagtatatttttgattataaaaataaagatatctattggtgtacagctgacatcggttgggtgactggacatagttacatcatttatggacctttagctaacggtgctaccacaataatgtttgaaggagtccctaattaccctgatagttcgagatggtggcaaatagttgataaatacaaagttaatattttttataccgcgccaacagcaattcgtgcattaatgcgcgaaggagacggtccagtcaaaaaaacaagtcgaaagtcattgaaacttttaggtacagttggtgaaccaataaatcctgaggcgtggatgtggtactacaaaacagttggtgaaaaaaaatgcccaatagttgatacatggtggcaaactgaaacgggagggattttaatttctccacaaccgggagcgattaatttaaaacctggatcagccacaaaacctttttatggtattaaaccagcgatagttgatgaatctggaaaagttttaaagggagcttgcaagggcagactttgtatgactcaatcttggccgggacaaatgaggacagtttatggagatcacaaaagatttatagatacttatttttcacaatttgatggaaaatattttacaggcgatggatgcagaagagataaagacggctactactggattacaggtagagttgatgatgtaataatagtttctggtcataatttaggtacggctgagatagaaagtgcttttgttgctcataataaagttgccgaagctgcagttgtaggatttccacatgaaattaaaggtaatggactttattgttatataactttaaacgcaggtgaaaatcctagtggtgaattagaaagagaacttaaactttgggtacgtaggcaaataggtccaatcgcaacaccagactatattcagtttgcacctggattaccaaaaacaaggtcaggaaaaatcatgagacgtattctaagaaaaattgccgcaaacgaacaccatgatcttggtgacacaaccactcttgctgatccatctgtagtagagtctttaattgaaaatagaaaagaaaaatagt

SEQ ID NO: 309364 - DNA, 1372 bp, Unknown
  Bacterial polypeptide expressing nucleotide sequence isolated from the Sargasso Sea
aaaaaaaattacttataaagaacttcataaagaggtttcaaaagcagcaaatggattaaaaaaattgggagttcaaaagggtgatagagtaactatttatcttacaatgataccagaacttgcctacacaatgcttgcatgtgctagaataggtgcagttcactccataatatttggaggtttttcaccagatagtatttcaggcagaattaatgattgcgaatctgattatgtgataactgcagatgagggtgtaagaggaggcaaaacaatccctttaaaatctattacagatgaagctttgcaaagctgtcccaatgtaaagaaatgtatcgtagtaaagagaacaggtaccaaaaaaattgattggtttaatgatcgtgatgtttggtatcacaaaatgacaagtaaagtgtcaacaaaatgtgaacctgaagaaatgaatgctgaagatccattattcattctttacacatctggatcaactggaaaaccaaaaggtgtgctacatacaactggtggatatatagtttatgcatcaatgactcatcaatatatttttaattataaacctaaagatatttactggtgcacagctgatataggttgggttacaggacacagttatattatttacggcccacttgctaacggcgcaactacaattatgtttgaaggaatacccacttatcctgatacatcaagatggtggcagatagttgataaatataaagtaaatattttctacacggctccaacggcaatcagagctttgatgagagaaggcgacaaacctgtaaagaaaacatctagaaaaaccctaaaacttttaggtactgttggtgaaccaattaaccctgaggcttgggaatggtattacaaaactgttggtgatagcagatgcccgatcgttgatacttggtggcaaacagaaacaggtgggattttgatcagtccacaaactggagcgatagatttaaaacctggttctgcaacaaagcctttttatggaattaaaccagagatcttggataaagatggtaaggttttaaaaggagaagcacaaggtagactttgtatttcacaatcatggcctggacaaatgagaagtgtgtatggtgaccatcaaagatttatagatacgtatttttcacaatttgatgggaaatattttacaggtgatggctgcagaagagacagggatggatattattggatcacgggaagagtagatgatgtaattattgtttctggacataatttaggtactgcggaaattgaaagtgcgtttgtagctcatccaaaagttgctgaagctgcagtagttggatatccacatgacataaaaggaaatgggctttactgctatgta

SEQ ID NO: 309365 - DNA, 808 bp, Unknown
  Bacterial polypeptide expressing nucleotide sequence isolated from the Sargasso Sea
atgtcccaagtacatattcaccctgttcccgccgactataaaaagcaaacactgatggatcgcgagacttacgatcgctggtacagccaatccattaatgatccgggcaccttctgggccgagcgcgcagaacagcttctggactggaaaactccgtgggacacggtaagcgaatgggactttaacgaaggccgggccgcttggttcaaaggcgccaccctcaacgcctgttacaattgtgtcgaccgccacctgccagaacgggccaaccagaccgccattatctgggagggcgacgagccagatcaggacaaacacataagctatcaacagctgttcgaggaagtgagcaagttcggcaatgtgctcaagaatcgaggtgttaagaaaggcgatcgcgttgtcatctatatgccgatgattccggaagcggcctacgccatgctggcctgcgctcgcattggcgccatccactctgttgtctttggcggtttctcgccggaagctctgaaagaccgcattctcaatgctgaggcttgcgctctgattaccgccgacgaaggggtacgcggtggcaaaaccatcccgctgaaagcaaatgcagacaaggccctagacggtatcgactgtgttcacacctgcctgaccgtaaagcgcaccggcggagatgtggattggcaagcaccgcgagatgtctggtaccacgaggccatggcggatgcgtccagcgattgcgaaccggagtgggtcgaggctgaagacccattattcaccctctacacctctggctccaccggcaaacccaaag

SEQ ID NO: 309366 - DNA, 814 bp, Unknown
  Bacterial polypeptide expressing nucleotide sequence isolated from the Sargasso Sea
tatgaataaaaaaatcgaaaatttacttaaagaagaacgaaaattccctccttcgaaagaactcacagaaaacgcaaacgcaacatcttcatggtacgaagatgcagacaaaaatcgcttagaattttggcagaagcaagctttaacaagaatctcttggtataaagaaccaacagaagttttagatgattcaaaccctcctttttttaaatggtttaaagatggagagcttaatttatcttataactgtttagaccgtcatctagaaactgattcagatagagtagctttttattgggaaggtgaacctggagatacgcaagaaataacttatcaagatctttatgaaagagtctgtaagttatctaatgcattaaaacaacttggagttcaaaaaggtgatagggtagcaatttatttaggtatgactccagagattgttgtttcaatgttggcatgtgcaagaattggcgcagttcattcagttgtgtttggaggtttttcttcggaagcacttgctgacagaattaatgacgcaaaggcaaagactgttattacagctgatggagcatggagaagaggggatatagttccacttaaaaacaatgtcgatggctcacttgatttaacagactatgttgaaaatgtaatagttgtaagacgaacagaacaagaaataaatatggctgatggtagggatcactggtatcacgaaataacagaaaaacaatcttctgaatgtgagcctgaagtcatgaatgctgaagatttgttatacattttatatacatcaggaacaacagctaaaacctaa

SEQ ID NO: 309367 - DNA, 928 bp, Unknown
  Bacterial polypeptide expressing nucleotide sequence isolated from the Sargasso Sea
atgataccagaattagcttatactatgctagcatgtgcgagaattggagctattcactcaattatttttggtggtttctctccagactcaatagctggaagaattgatgattgtgagtctgattatgtaatcactgcagatgaaggtgttaggggtggaaaacttatttcacttaaagatattacagatcaagctctatcaaaatgtagagatataaaaaaatgtatcgttgttaaaagaactggaaattatattaactggaatagcgaaagagatgtttggtacgatgatatgattaaaaatgtttcgacaaattgtgaaccagaggaaatgaatgctgaagatcctctatttatactttacacttcaggatcaactggaaaacctaagggggttttacatacaacgggtggatatatggtctacgcgtccatgacacatcagtatatatttaattataaacctaaagatatttattggtgtactgcagatattggatggataactggacatagttatataatttatggacctctttctaatggtgcaacaactataatgtttgagggtatacctacttatccagacagttcaagatggtggcaaattgtagataaatttaaggttaatatattttacacagcaccaactgcgattagagctcttatgagagaaggaagtgcaccagttaaaaaaacctcaagaaaatcattaaaattattaggaaccgttggagaaccaattaatccagaagcttggatgtggtattttaaaaccattggaaattcaaaatgtccaatagttgatacttggtggcaaactgaaactggaggaatattaataagtcctcaaactggtgctataaatttaaaacctggatctgcgactaagcctttttatggaattaaaccgtattattgtaaatgaa

SEQ ID NO: 309368 - DNA, 1524 bp, Unknown
  Bacterial polypeptide expressing nucleotide sequence isolated from the Sargasso Sea
atatgggtaggagacgatcccaaagttcaaaaaaaaatttcatataaggaacttcataaagaagtttcaaaagcagctaatggattaaaaaatttaggagttcaaaagggtgatagagtaacaatttatcttaccatgataccagaactagcctacacaatgcttgcatgtgctagaataggtgctgttcactccataatatttggaggtttttcaccagatagtatttcaggcagaattaatgattgcgaatctgattatgtcataactgcagatgaaggtgtaagaggtggtaaaacaatccctttaaaatctattacagatgaagcgttacaaagctgtcccaacgtaaagaaatgtattgttgtaaagagaacaggtaccaaaaaaattgattggtataatgatcgtgatgtttggtatcataagattacaagtaaagtctctgcaaaatgtgagccagaagaaatgaatgctgaagatccattattcattctttatacatctggttcaactgggaaacccaaaggggtactacatacaactggcggatacatggtttatgcatcaatgactcaccaatatatttttaattataaacctaaagatatttactggtgcacagctgatataggctgggttacaggacacagttatattatttatggtccacttgctaatggtgcaactacaattatgtttgaaggaatacctacttatcctgatacatccaggtggtggcaaatagttgataaatataaagtaaatattttttacacggctccgacagcaatcagagctttgatgagagaaggtgataaacctgtaaagaaaacatctagaaaaactctaaaacttttaggtactgttggtgaaccaattaatcctgaagcctgggagtggtactataaaattgttggtgatagtagatgcccaatcgttgatacatggtggcaaacagaaacaggtggaattttgatcagtcctcaaactggagcaatagatttaaaacctggttctgcaaccaaaccattttatggaattaaaccagagatcctagataaagatggcaaggttttaaagggagaagcacaaggtagactttgtatttcacaatcatggcctggacaaatgagaagtgtctatggtgaccatcaaagatttatagatacttatttttcacagtttgatgggaagtactttacgggtgatggctgcagaagagataaggatggatactattggattactggaagagtagatgatgtaattattgtttctggacataatttaggtactgcagaaatagaaagtgcgtttgtagctcatccaaaagtggctgaagcagcagtagttggttacccacatgatataaaaggaaacgggctttactgttatgtaactttaaatgttggagaaaaaagtactctagatttagaaagagatttaaaactttgggtaagaaaacagattggtccaatagcaactccagacttaattcagttgctccaggactccaaaaac

SEQ ID NO: 309369 - DNA, 576 bp, Unknown
  Bacterial polypeptide expressing nucleotide sequence isolated from the Sargasso Sea
gagaagcacaaggtagactttgtatatcacaatcgtggcctggacaaatgagaagtgtctatggcgaccatcaaagatttatagatacttatttttcacaatttgatgggaaatattttacaggtgatggctgcagaagagataaagatggatactattggattacaggaagagtagatgatgtaattattgtttctggacataatttaggtactgcagaaattgaaagtgcgtttgtagctcatccaaaagtggctgaagcagcagtagttggttacccacacgatataaaaggaaatgggctgtactgttatgtaactttaaatgctggagaaaaaagtactcttgatttagagagagatttaaaactttgggtaaggaaacaaattggtccaatagcaactcccgacttaattcaatttgctccaggactaccaaaaacaagatcgggtaaaataatgagaagaattctaagaaagattgctgccaatgaacatggtcaattaggagatacaaccactttggctgatccatcggttgttgaaagtttggtcgataatagaaaaaatatctaga

SEQ ID NO: 309370 - DNA, 1135 bp, Unknown
  Bacterial polypeptide expressing nucleotide sequence isolated from the Sargasso Sea
agggagttttacatactactgggtggttatatggtttatgcatcaataacacatcaatatatatttaattataaaccaaaagatatttattggtgcactgcagatatcggttggataactggtcacagttatataatttatggtccattatctaatggagcaactacgataatgtttgaaggaattccaacttatcctgacaattctagatggtggcaaattgtagataaatataaagtaaatattttttatactgctccaacagcaataagagcacttatgagagaaggtgataaaccggttaaaaaaacatcaagaaaaacgctaaaattattaggaactgtgggagagcctataaatcctgaagcgtggcagtggtattataaaacagtgggtgactcaagatgtccaattgttgatacttggtggcaaacagaaactggcgggattttaattagtcctcaaacaggagcgataaatttaaaaccaggttctgctacaaaacctttctatggaattaaaccagtaattgttgataaagaaggtaaaattttaaaaggtgaggctcaaggtagactttgtatagctcaatcatggcctgggcagatgagaacagtttatggagatcataaaagatttatagatacatatttttcacaattcgatggaaaatactttactggtgatggatgtagaagggataaggacggatactattggattacaggaagagttgatgatgtaataattgtatctggacacaatttaggaactgcagaaatagaaagtgcatttgtggctcatccaaaagttgctgaagcggcagttgttggttacccgcatgatataaaaggaaatggattatactgttatgtaactttaaatgcaggagagaatgactctttagatttagaaagagaattgaagctttgggtaagaaaacaaattggagcaatcgctactcctgatttaattcaattttctccaggactaccaaaaactagatctggtaaaataatgagaagaattttaagaaaaattgctgcgaatgaacatgatcaacttggcgacacaacaaccttagcagacccaggagttgtcagaagtttagtagataatcgaaaaaatatttaaa

SEQ ID NO: 309371 - DNA, 1226 bp, Unknown
  Bacterial polypeptide expressing nucleotide sequence isolated from the Sargasso Sea
cttcgaagtgacgccggtgagcgcggagcacccgctgttcatcctctacacctcaggttcgaccggcaagccaaagggcgtgcagcacagcacgggcggctacctgctgtgggcattgctcaccatgcagtggacgttcgacctgaaacctgacgacatcttttggtgcacggccgacatcggctgggtgacggggcacagctacattgcgtacggcccgctcgcggccggcgccacgcaggtcgtcttcgaaggtgtgccgacgtatcccaatgccggccgcttctgggacatgatccagcgccacaaggtcaacactttctacaccgcaccgaccgcgatccgctcgttgatcaaggccgccgaagcggacgagaaggtccaccccaagcagtacgacctctccagcctgcgcctgctcggcaccgtgggcgagccgatcaacccggaagcctggatgtggtaccacacgaatattggcgggggccgttgcccgatcgtcgacaccttctggcagaccgagaccggcggtcacatgatgacgccgctgccgggtgccacgccgctggtgccgggctcgtgcacgctgccgctgccgggcatcatggctgccgtcgtcgatgaaaccgggcacgacgtgccgaacgggcagggcggcatcctggtcgtcaagcgtccgtggccgtcgatgatccgcacgatctggggtgacccggagcgcttcaagaagagctacttcccggaagagctgggcggcaagctgtatctggcgggcgatggctccatccgcgacaaggacaccggctacttcaccatcatgggccgcatcgatgacgtgctgaacgtctcggggcaccgcatgggcacgatggagatcgagtcggcgctggtggcgaacccgatcgtggccgaagccgccgtggtgggccgccccgacgacatgacgggcgaagccatctgcgcgttcgtggtgctcaagcgctcgcgccccgatggcgacgaagccaagcagatcgccaacgagctgcgcaactgggtcggcaaggagatcgggccgatcgccaagccgaaggacatccgctttggcgacaacctgcccaagacgcgctcgggcaagatcatgcgccgcctgttgcgctcgctggccaagggcgaggacatcacgcaggacacgtccacgcttgagaacccggccatcctcgatcaactgaaggaaacgcgctaac

SEQ ID NO: 309372 - DNA, 678 bp, Unknown
  Bacterial polypeptide expressing nucleotide sequence isolated from the Sargasso Sea
caccgcagcccggagcgatcaatttaaaaccagggtctgctacaaaacctttttatgggattaaaccagcaattgtcgatgaaaatggaaaggtaataaaagggccgggcaaaggtagactttgtatgcttcaatcctggcctggtcagatgagaacagtttatggagatcatgaaagatttataaaaacatatttttcgcagtttgatggaaagtactttactggtgatgggtgtagacgtgataaagatggatattattggataacaggtagagttgatgatgtcattatagtttcaggtcataatttaggaaccgcagaaatcgaaagtgcgtttgttgctcacacaaaagttgctgaagctgcagttgttggatttccccatgacattaaaggaaacgggctttattgttatgttactcttaacgctggagaaaacccagatggagatttagagagagaactgaaattgtgggtccgaaaacaaatcggtccaatagctacaccagatcatattcaattttcaccaggactaccaaaaacaaggtcaggaaaaattatgagaagaattttaagaaaaattgctgctaacgaacatcatgatttaggagacacaacaacactggcagatccttctgtggtggactcattagttgaaaatagaaagaataaataat

SEQ ID NO: 309373 - DNA, 1639 bp, Unknown
  Bacterial polypeptide expressing nucleotide sequence isolated from the Sargasso Sea
gtccatccacctttttacaaatggtttgaggatggagttactaatccttgttataatgctctcgattatcatgttgaaaatggtaagggtgataaaactgcattaatttatgatagccccataactaataataaagcaaagtttagttataaagaattaaaagaaaaggtttcaaaatttgcaggagcgcttgacaatcaaggcataaaaaaaggagatcgagttataatttatatgcctatgataccagaagctattgttgcaatgctggcatgtggtaggctcggagctattcattctgtagtttttggtggttttgcatctaatgagcttgcaagccgtattgatgatagtaaagctaaaattttaattacagcctcatgtgggtttgaacctggaagaactgttgaatacagaccgttagttgatggagctttaaaattggttaaacataaaattgaaaaagttattttttatcaaagaaaaggtcatgaagtaaaattaaattctccattagaaattagttgggatgaggctttgtctaactctaaagatattgattgtatagaaatgagtgctaatgaattttcatacattttatatacatcaggtacaacaggtgtacccaaaggtatagtcagagatattggtggccacattgtagctctaaaatggactatgaaaaatatttataatgtggatgacgatgatatctggtggtcggccagtgatataggatggatagttggccactcttatattgtttacgctccattatttaaaggttgtacaactgtattgtttgaaggaaagccagttggtacgccagatgctggtgttttttggagaataatttcagactataaagtaaagtcattatttactgctcctacagctttcagagctataaaaaaagaagatcctgagggtaaattttttaccaaatacgatttaagctcttttaaatctctttttcttgccggagagagagctgatccagatacaatcaaatgggctgaaaacttgttaaaagttccagtgatagatcattggtggcaaactgaaacgagttgggcaataagttcaaattgtacaggaatagagatgcaaaaaactaaatatggttcagcctgcaaagctgtcccgggttataatgttaaagttttgaaaagtgacaaatctattgcaaaaccaaatgaaatgggagacatagttgtaaaacttccattgcctccaggaacttttccaactttatggaatgctaatgaaagatataaaaaaacttatatgtctaattatgaaggttattatcaaacttatgatgctggtcacattgatgaagatggatacatttggattatgtctagaactgatgacataataaatgttgcaggtcataggttgtctacaggagctatagaagaagttctttcagaacatcaatcagtcgcagaatgtgcggtattaggtattgcagataaattaaaaggacaattaccgataggattgattgttcttaagactggagtaaaaaaagaaaatgaaacaatctcgaaagaatgtattcaaatggtaagagataaaattggcccagtcgctgcttttaaagtggtaattgttattaaaaggctaccctaaa

SEQ ID NO: 309374 - DNA, 1498 bp, Unknown
  Bacterial polypeptide expressing nucleotide sequence isolated from the Sargasso Sea
aatgctagcatgtgcaagaataggtgctgttcattcgattatatttggaggtttctcagcagacagtattactggaagaattaatgattgtaaatccgactacgttattactgctgatgaaggtataagaggtggaaaaattatagatttaaaagcaacagttgatgaagctttattaaattgtccaaacgttaaaaagtgtgttgtagtaaaaagaactggaaacagaattaattgggatgaaagtagagatgtttggtatcatgatataattaaaaaagcctcaaaaaattgtgaacctgaggaaatggatgcagaagatccattatttattttatacacttctggttccacaggaaaacctaagggagttatgcacacgacaggtggttatatggtttatacctcaatgacccatcaatatatttttaattataagccaaaagatatatattggtgtactgctgacattggctgggtaacaggccacagctatatcatctatggacctctttcaaatggagcaacaacaattatgtccgaaggtattcctaattatccagactggtccagatggtggcaaatagttgataaatataaagtaaatattttttatacggctccaacagctataagggctatgatgagagaaggagacggacctgtaaaaaaaacatcaagaaaaactctaaaactgcttggaacagttggcgaaccaataaatccagaagcgtggcagtggtattataaagtagtaggcgattcaaggtgtcctatagttgatacatggtggcagacagaaactggaggaatattaataagtcctcaaagtggggccatagacttaaaaccagggtctgcaacaaaaccattttatggaattaagcctgaaattgttgataaagacggaaaagttttaaaaggagaggcacagggaagattatgtatttctcattcttggcctggacaaatgagaactgtatatggtgaccataatagatttatagaaacatacttttctcaatttaacggaaaatatttcactggagatggttgtagaagagacaaagatggatactattggataacaggaagagttgatgatgtgattattgtttctggacacaatttaggtactgcagaaatagaaagtgcgtttgtagcacattcaaaagttgcggaagctgcagtggttgggtaccctcatgatataaaaggaaatggattatattgttatgtaactttaaatgtaggagaggagcctaatggagaccttgaaagggaattaaaactatgggtaagaaaacaaattggtgcaattgctactccagattttattcagtttgcacctggattgccaaaaacaagatctggaaaaatcatgagaagaattttaagaaagatagctgctaatgaacatgaacaacttggagatacaacaactttagctgatccaagtgttgttaaaagtctagttgataacagaaaaaatacttag

SEQ ID NO: 309375 - DNA, 456 bp, Unknown
  Bacterial polypeptide expressing nucleotide sequence isolated from the Sargasso Sea
caggagatggatgtagaagagataaagatggttattattggatcactggtagggtggatgacgtcataatagtgtccggacataacctaggtactgcagagatagaaagtgcatttgtagctcatcctaaagttgcagaagcagcagtggttggctacccacacgatattaaagggaatggactttattgttatgtaaccttaaatgcgggagaaaaaagtactcttgatttggaaagagatttaaaactttgggttagaaaacaaattggtccaattgctacacctgacttaattcagtttgctccaggacttccaaaaactagatctggaaaaataatgcgaagaattttgagaaaaatagctgcaaatgaacatggtcaattaggagatacaacgaccttagcggatccttcagttgttgacagtttggtagacaatagaaaaaatatttaga

SEQ ID NO: 309376 - DNA, 985 bp, Unknown
  Bacterial polypeptide expressing nucleotide sequence isolated from the Sargasso Sea
cacaatttatcttcctatgatacctgaattgcctatttccatgttagcctgtgctcgaattggagcaattcatactgtagtattttcgggattcagttcaaaatccctttctgaccgagtagaagattctcaatcaaaaataattatcactgctgatggtgggtatagaaaaggcaagataatcaatctcaaagaaattgtagatgattctgcatcttctgtacaatttgtgaaaaatgttatagtctatcagagaaccggccaaaaaatccaattgaatgaaaaagatttgctttggcatgaggtgatgcaaaattcatctgaggaatgtgatgctgagatattagatagttctgattcattatacattttgtacacttctggtactactggaaaacctaaaggagtgttacatgggattggcggttatctaactcatctttattctacatacaaatgggcatttgacataaaagattctgatgtctacttttgtactgcagatataggttgggttacaggtcatagctacgttgtctatggtcctttactgcatggtgcaacacaagtaatgtatgaaggtgcacctgatcatcctgattcatctagaatgtgggatataattcagaaatacggtgttacaattttctatactactccaactgcactaagaatgttaatgaaatttggagatgatattccaaattcatttaatctttcaactttacgtttacttggaactgtcggtgaaccaattaatcctgaagtttggaaatggtatttcaatacaattggaaaaaagaaatgtccgataattgacacgtggtggcaaactgaaactggtggaatgctaatcagtcctttacctggcattgaaacaattcctttgaaacctggttctgcaacattgcctgtacctggattagatattgaagtcgttgatgaaactggtaatgaagtagaactgaaacaaaaggttcactga

SEQ ID NO: 309377 - DNA, 531 bp, Unknown
  Bacterial polypeptide expressing nucleotide sequence isolated from the Sargasso Sea
aatgaatagaaattacaaagaaatttacgacgaatctctaaaaaatcctgaggaattttggcagaaagtttctgaagatgtgttttggttcaaaaaaccaactaagattttaaaaaaagacaaccctcctttctataaatggtttgaagatggtgttacaaatacatgctacaacgccttagaccttcacattgatcaaggaaggggtgataaaacagctttaatctatgacagtcccataacaggtaataaagcaaagttcactttcaaagaattaaaagaaaaagtttcaaaatttgcaggcgctttagataagcaaggagttaaaaaaggagatcgaataataatttatatgccgatgataccagaagcggtagttgcgatgcttgcatgtgggagaattggagcaattcactctgttgtattcggtggttttgcttcaaatgaattagctagcagaattgatgatagtaaagctaaaattttaatcacagcatcatgtggttttgaacctggaagaacagttgagta

SEQ ID NO: 309378 - DNA, 1188 bp, Unknown
  Bacterial polypeptide expressing nucleotide sequence isolated from the Sargasso Sea
gagtctgttgaagatccggaaggtttttgggaaaaacaagccgatcggttggactggttcaaaaaatgggaccgaacccttgattgggattacgataaggcttatatccgatggtatgaaggaggcaaacttaacgttgctcataattgtttggataggcacttggaaacacgtggagaacaaaaggcactgatttgggaatcagatgatccaaaccttgatcgaagctttacttacaagcaacttcattcagaagtgagcaagtttgctaacgtaatgaaggcgttcggtgtggtaaaaggggatagggttatgatatatatgcccatgatccccgaactggcgatagcatgtctggcatgcgccagaattggcgcggtacattcagtagtatttggtggattcagctcagaggcacttaaaaaccgtattattgattgtgacggaaaaatgcttattaccgccaacgcaggagtccgcggtggcaaaagtgttccactgaagcaaaatgcagatgtagcgatggaagagaccagcatagaatgttgcatggttgtgaagcatacagaagacgcatgtgaaatgcaatctggacgtgactatttctggcacgaagaaatggcaaaagtttcttctgattgtcctgcagaagaaatggatgcggaagatccgcttttcattttgtacacttcaggttcaaccggtaaacccaaaggcgttttgcacacaacggcaggatatcttgtttatacttctttgactcatcaatatgtgtttgattatcatgatggagacatatactggtgtacagctgatattgggtgggttacaggacacagctatatactttacggaccacttgctaatggagcaactactttgatgtttgaaggggttccaaattttcctgattttgggcgattttgggatatttgcgacaaacataaagtgaacattttttatacagctcccactgcaattcgagcaattgcaaaagaaggtgatgaattggtcaataaaagagatttaagttccttgcggttgttaggtactgttggagaacctatcaatccagaagcatggctctggtatcacagagtcgttgggcaaggtaattgtccaatcgtagatacctggtggcagacagaaacaggaggtattttgattacgccgcttccaggagcaaca

SEQ ID NO: 309379 - DNA, 582 bp, Unknown
  Bacterial polypeptide expressing nucleotide sequence isolated from the Sargasso Sea
taaaaggagaagctcaaggtagactttgtatagctcagtcatgccccggacagatgaggactgtttatggagatcataaaagatttatagatacatatttttcacaattcgatggaaaatattttactggtgatggatgtcgtagagataaagatggatactattggataacaggaagagttgatgatgtaattattgtttctggtcacaatttaggaacagcagagatagaaagtgcttttgtagctcatcctaaagttgctgaagccgcagttgttggatatccacatgatataaagggtaatggattatactgctatgtaactctaaatgcaggtgaaatgcattccttagatttagaaagagaattaaagctttgggtaagaaaacaaattggaccaatcgctacgcctgatttaattcaattctctcctggattacctaaaacaagatctggaaaaataatgagaagaattctaagaaagattgcagcaaatgaacatgatcaacttggtgatacaactactttggcagacccaggagttgtaaaaagcttagttgataacagaaaaaatatttaaa

SEQ ID NO: 309380 - DNA, 1234 bp, Unknown
  Bacterial polypeptide expressing nucleotide sequence isolated from the Sargasso Sea
atgaatgaaaaaattgaaaacctacttaaagaagatagaaagtttccaccttctgaacagttagttaaaaaggcaaatgctccatcttcttggtatgacgaagcaaatgagaatagattaaaattttggcaaaaacaagccttaacaagaatttcttggttcaaagaaccaacagagatactagatgattctaaccctccttttttcaaatggtttaaagatggtgagctgaacttatcttataattgcttagatagacaccttgagtctgatggggatagagttgcattttactgggaaggtgagccgggagatacacaggaaattacataccaagatttatatgagcgagtttgcaaactttcaaatgcattgaaaaaacttggtgtaggtaaaggtgacagagtagcaatttatttaggcatgactccagaaatagtagtttccatgttggcatgtgcaaggattggggcagtgcactcagttgtatttggtggattttcatcagaagcccttgcagacagaattaatgacgcaaaagcaaaaatagttattactgctgatggtgcatggagaaggggagatatagttcctctaaaaaataatgttgatggctcactagagcttactgaatatgtagaaaatgtaattgttgttaaacgaactgagcaggaaattaatatggctaatggtcgagatcattggtatcacgaaataactgataatgaatcttctgaatgtgaacctgaaataatgaattctgaagacatgttatacatcctttacacatctggtacaactgcaaagccaaaaggcattgtgcatactcaaggaggatacctaacaggtgtgacaacaactcaccatgaagtttttgatataaaagaagaagatatttactggtgtgctgcagattgtggctgggttacaggtcatagctatattgtttatggtccattagctaataaagctacaagcgttatgtatgagggtgcaccaaatgcacctgacgaaaaaagactttggagtattattgaaaagtataaagtcaatattttttatacagccccaactgcaataagggcatttatgaaatggggggtggagcatccccaagctcatgatttaagttcactaagaattttaggaacagttggtgagcctataaaccccgaagcatggatgtggtatcacgaaaatatcggtggcgagaattgtgcatttgttgatacat

SEQ ID NO: 309381 - DNA, 1330 bp, Unknown
  Bacterial polypeptide expressing nucleotide sequence isolated from the Sargasso Sea
aatgataattttttggaaaaaagaaggtaaaagaattacctggattaagccatatacaaaaattaaagattataagtacagcaaaagtgatgttaatattaaatggttttatgatggaactctaaacgcttcagcaaattgtattgatcgacatttaaaaaaaaataaagataaaactgcaataatatgggttggagatgatccaaaagtacaaaaaaaaattagctacaaacaattacatcaagaagtttcaaaagcagcaaatggattgaaagaaataggagtaaaaaaaggagatagagttactatttatttaacaatgatacctgagttagcatatacaatgctagcatgtgcaagaataggagctgtccactcaattatttttgggggcttttcagcagatagtatttctgggagaattaatgattgtaaatctgactacgttattactgctgacgaaggtgttagaggaggaaaaattatagatttaaaaacaacagttgatgaagctcttctaaattgtccaaatgtcaaaaaatgcgttgtagtaaaacgaactggaaatagaattaattgggatgaaagtagggatgtttggtatcacgatataacaaaaaaagcctcaaagagttgtgaacctgaggaaatgaatgctgaagatccattatttattttatatacatctggttcaacaggaaaacctaaaggagttttgcacacaactggtggatacatggtttacgcatcaatgacccatcagtatatttttaattataaaccaaaagatatatattggtgcactgctgatattggttgggtcacaggtcacagctatattatttatggacctctttcaaatggggctacaacaataatgtctgaaggtatacctaattatccagactggtctagatggtggcaaatagttgataaatttaaagtaaatattttttataccgcacctacagcaataagagctatgatgagagaaggagatagtcctgtaaaaaaaacctcaagaaaaacacttaaattacttggaactgttggtgaaccaataaatcctgaagcctggcaatggtattttaaaactgtgggcgactctagatgtccaatagttgatacttggtggcagactgaaactgggggtattttaattagtcctcaaactggagcaatagacttaaaacctggatctgcaacaaaaccattttatggaattaaaccagaaatagttgataagaatggcaaggttctaaaaggagaagcacaaggtagattatgtatagctcaatcttggccaggtcaaatgagatcagtatatgga

SEQ ID NO: 309382 - DNA, 964 bp, Unknown
  Bacterial polypeptide expressing nucleotide sequence isolated from the Sargasso Sea
catgtccgaaggtattcctaactatcctgattggtccagatggtggcaaatagtagataagtataaagtaaatattttttataccgctccaactgcaataagagccatgatgagagagggagatggtccggtaaaaaaaacatcgagaaaaactctaaaattacttggaactgttggagaaccaataaatccagaagcttggcaatggtattttaaaactgtaggggattctagatgtcctattgtagatacttggtggcaaactgagacaggtggaatattaattagtccgcaaactggagcaatagatttaaagcctggatctgcaacaaaaccgttttacggaattaagccagaaatagttgataaagatggtaaagttctaaaaggagaggcacaaggaaggttatgtatagctcaatcttggccgggtcagatgaggtcagtgtatggagaccataatagatttatagaaacatacttttctcagttcgatggaaaatattttactggggacggatgtagaagagataaagatggatactattggataactggaagagtagacgatgttattattgtatcaggtcataacttaggaactgcagaagtagagagtgcctttgtagcgcattcaaaagttgcggaggctgcagtagttggatgtcctcatgatataaaaggaaacggattatattgctatgtaactttaaatgtaggagaacaacctagtggtgaccttgaaagagaattaaagttatgggtaagaaaacaaattggtgcaattgctaccccagattttattcagtttacacctggactacccaaaacaaggtctgggaaaattatgagaagaattttaagaaagattgcagctaatgaacacgagcaacttggagatacaacaactttagccgatcctagcgttgttaaaagtttggttaataatagaaaaaatatttag

SEQ ID NO: 309383 - DNA, 1132 bp, Unknown
  Bacterial polypeptide expressing nucleotide sequence isolated from the Sargasso Sea
cagattcctataaaagatgatgatggaaacttagtttttcaagtttcagaaaaacgggcaaagcaatctttagtaaataaagcaaaatataaaaagaaatataatctatcaattaaagaaaatgataagttttggaaaaaagaaggaaagagaatttcttggataaaaccttatactaaaattaaagatataaaatacagcaaagaagacgtaaaaataaaatggttttacgatggaactttaaatgcttctgcaaattgtatagatagacatctaaagaaaaatgcaaaaaagagtgctattatatgggttggggatgatccttctgtatctaaaaaaatttcttataaagaattacataaaaatgtttgcaaaactgcaaatgctttaaaaagtattggcgtacaaaaaggagatagagtcacaatttatttaacaatgatacctgagctagcttacactatgttagcttgtgcaagaataggagctattcattcaataatttttggtggtttttctcctgactctatagcaacaagaataaatgactgtgagtctgattacttaattactgcagatgaaggtttacgaggaggaaaaattattccactgaaaaaaattgctgatgaagcacttttacaatgtcctaatgtaaaaaaatgtgtagttgtaaaaagaactggaaatcaagtcaattgggatcatgagagagacgtgtcttatgaagagttaattgctaatgcttcagcaaagtgtgaacctgaggaaatgagtgcagaagatccattatttattctttatacttctggatcaactggtaaaccaaaaggagtcttacatactaccggtggatatatggtctatgcttcaatgactcaccaatatatttttgattataaacctaaagatatttatttttgtagtgctgatattggttgggttacaggacatagttacataatttatggacccttatcaaatgcggcaacaacaataatgttcgaaggaattcctacatatccagattcttctagatggtggcaaattgtagataaatataaagtaaatactttttatacagctcccactgcaatacgtgcgctgatgaaagaaggaaatgatccagtaaaaa

SEQ ID NO: 309384 - DNA, 1084 bp, Unknown
  Bacterial polypeptide expressing nucleotide sequence isolated from the Sargasso Sea
ttatacttctggcacaaccggaaaacctaagggagctttacatagacatcaatcaattatccaacaatatgctactggtaaatgggctttggatatgaaaaaagatgatgtatattggtgtactgctgatcctggttgggtaaccggcacttcatatggaatgtttgctccatggagcaatggtttaactcaagtaatatttgaaggagggtattctgcctcaaaatggtattcaattattcaagattataatgttactgtctggtatacagccccaacggcaatcaggatgctcatgaaagccggggcagaacctatttcaaaacacaatatttcaactttgagatttattgctagtgttggtgagcctcttaatccagaagctgtagtatggggcaatgaaaattacggtatgccaattcatgataactggtggcaaactgaaacaggagcaataatgtgcgccaattattcttttatggaaatcaggccagggagtatgggcatacctataccaggcgttgaattagcaattttagacaaagattttaaaagattggaacctaataaacccggaattttagctgttaagccagggtggccttctcaattttttgcttattggaaaaatgatgagaggtacaattctagattcaaaaaaggttggtatataactggtgacgaagcatttatggataaggacggcttcttttggtttcaaggaaggtcagatgatgtcataaataccgcagggcacttagttagcccatttgaagttgaaagtacattaattgaacatgaagcagttgctgaagcaggagttattggtatacctgataaaatagctatggaagttgtaaaagcttttgtttcgctaaacaatggcttttcttggagtaaagaattaaggctagaattaatgcaatttgctaaaagtaaactatcttctggcgttgcaccaagagacattgaatatgtagaaactatgccaaaaacaagaagtggtaaaataatgcgcaggcttctcaaagctagggaattaggtctgcctgaaggggacacatctacacttgaagatgattaa

SEQ ID NO: 309385 - DNA, 1236 bp, Unknown
  Bacterial polypeptide expressing nucleotide sequence isolated from the Sargasso Sea
aatgtacattccaaaaaaagaaacttcaaaaaactctcatatttcttccttggatcagtataaaaaactttacgaagattctgtaaaaactccagaaaaattttggcaaaaaatatctcagagactggattggatcgaatcttgtgaacaaattttacactatgatttcaaagctggtgaaataaagtggttctctggtggaaaattgaatgcttcttataattgtattgatcggcacatcaatgctggatttggtgatgatattgctatcatatgggaaggtaacgaccctaaacaatcaagaaaattcacctattcacaattattgaaagaggtttcactttttgcaaattctttaaaatctttaggggtaaaaaaaggagatcgagtttgcttatacatgcagatggtcccagaattggcaatcgctgtacttgcatgcgctcgaataggtgctgtccactctgttgtatttggagcattttctagcgattcactgagagatagaatcaatgattcaaaatgtaaaatattagtcactcaagatacaggagtaagaggtgccaaacaaaatatccctatgaaagaaaatgcagacaaagctgttatggaaactccatctattcaacaggtcatagttgttaaaagaaccggtgaaaaagtatcgatggactctcaattagatatatggtggcacgaggccatatcaggagagagtccaatttgcaatccagaaataatggattcagaggatcccttatttatactctacacttcaggttctactggaaaaccaaaaggagtcttgcacacaactggtggctatttggtctatgcttctttcacacatgaaatggtatttaactacaagcccggagatatttattggtgcacagctgacctaggatggataactgggcattcatatattgtctacggtccactttctaacagagcaacaactgtaatgttcgagggtgttccaaactatccagattttggacggttctgggatgtcgtagataaacacaaagttaatcaattttacactgctcctacagcacttagagcattgatgaaagaaggcgatagttgggttaattctagagatctatcttcactttgtttgcttggtactgtgggtgaaccaattaaggaacctgaatggaaatggtattttgaggtggtaggaaagactaaatgcccaattgttgatacttggtggcaaacagagac

SEQ ID NO: 309386 - DNA, 762 bp, Unknown
  Bacterial polypeptide expressing nucleotide sequence isolated from the Sargasso Sea
aatggtattacagagtcattggagatggtcgttgccctatcgttgacacctggtggcagacagaaacgggatccataatgatcacaccattgccaggtgttacagatttaaaaccaggttcagcaactttaccgttttttggagtaaatccagctcttcttgatagtaatggagatgaaataactggggttgcaactggaaatcttgtaataaaggagtcctggccaagtcaaatccggacagtttttggcgaccataagcgttgtatagatacttatttttcaacttatcctgggtattacttcacaggcgacagtgctcgaagagatgaagacggtttttactgggtaactggtagagtagatgatgttatcaatgtttctggacatcgtttaggtacagctgaaattgagagttcgttggttcttcacattgatgtcgctgaggctgctgttgttgggtacccgcatgatatcaaaggtcagggaatatatgcttacgtgactcttatgtctggagtagaagccaatgaaactctgcgtaaagaattgatcgcctttgtgggaaaagatatcggtgcatttgccaaacctgaaattatacaatttgctccaggcctaccaaaaactagatctgggaaaattatgagacgaattctccgcaaggtagcggctaatgaacttgaaaatcttggtgataccacgacgctcgcagacccaacagttgttgagcagcttattgagaatcgagtgaataaataat

SEQ ID NO: 309387 - DNA, 1669 bp, Unknown
  Bacterial polypeptide expressing nucleotide sequence isolated from the Sargasso Sea
tagacatttaaaaaataaaaaagataaaactgcaataatatgggttggtgatgatcctaaagtacagaaaaaaataacatacaaacaactacatcaagaagtttctaaaacggcgaatggattaaaagaactaggtgttaaaaaaggtgatagaattacaatatatttaacaatgataccagaactagcattcacaatgttggcttgtgcgagaatcggtgctgttcattcaataatttttggtggattttcttctgatagtatcgctggaaggattaatgattgtaaatctgattatgttgttacggccgatcaaggtatcagagggggaaaaactatagaacttaagacaactgtcgatgaagccttgataaattgtccaaatgtaaaaaaatgtatcgtagtaaagagaactggtaattttataaattgggataatgagagagatgtttggtaccatgatataacaaaaaaagcttcatctcattgtgaacctgaagaaatgaatgcagaagaccccttattcatactttatacttctggctcaactggcaaaccaaaaggtgttttacatacaactggtggatatatggtttatgcatcaatgactcaccaatatatttttaattataaacctaaagatatttatttttgttcagcagatattggatggattactggtcatagttacataatttacggaccattagctaatggagcaacaacggtaatgtttgaaggagtccctacttacccagatagttcaagatggtggcaaattgtagacaagtttaaagtaaatatattttatactgccccaactgcaattagagcattaatgagagaaggtgatggtccagttaaaaaaacttcaagaaaatcattaaaacttttaggaactgttggagagcccataaatcctgaagcttggatgtggtattacaaaactgttggagactcaaaatgcccaattgtggatacctggtggcaaacagaaacaggtggaattttaattagcccacaaacaggagctatagatttaaaacctggatctgcaacaaaaccattttatggaatcaaaccagtaattgtaaataaagaaggaaaaatacttaaaggtgagtgccaaggaagcttgtgtatagcgcaatcgtggccgggacaaatgagaacagtttatggtgatcatcaaagatttattgatacttatttttcacagtttgatggaaaatattttactggtgatggctgcaaaagagataaagatggatatcactggataacaggacgtgttgatgatgttataatagtttcaggacacaacttaggaacagcagaaattgaaagtgcatttgtagctcatccaaaagttgctgaggcagctgtagtaggatacccacatgaaataaaaggtaatggactttattgttatgtaactttaaatgtaggagaaaaagctgatggagatttagatagagaattaaaaaattgggtaaaaaaacatattggagcacatgctcgccctgattttatacatttcacgcctggacttccaaaaacccgatctggaaaaattatgagaagaattctccgaaaaattgcagctaatgaacatgatcaattaggagataccactactttggcagatccaagcgtagtgaaagtttag

SEQ ID NO: 309388 - DNA, 1544 bp, Unknown
  Bacterial polypeptide expressing nucleotide sequence isolated from the Sargasso Sea
tgaagatggtacgacaaatacttgttacaatgctttagatattcacgttcaaaatggattgggaaataaaacagctctaatttacgatagcccaataactggaaaaaaatctaaatttactttttcaattttaaaagaaaaagtagcaaaatttgcatgggcacttcaaaatcaaggggtagagaaaggagatcgtgtaataatttatatgccaatgataccagaagcagttatggctatgttggcatgtggaagaataggagcaattcattcagtagtctttggagggtttgctgctaatgagctagcaagcaggattgatgactctaaagcaaaaatattagtaactgcttcttgtggatttgagccgggaagaaccgttgaatataaaccacttgtggataaggctttagagatcgcaaaacataaacctgaaaaattaattctttatcaaagagaaggtcacgaagttgatttaaataataaaaatgaaataagttggaatgatgcgcttaaaggtgctcaagaagtagattgtgctgaaatgaatgcaaatgattttgcatatatactttatacatcaggaacaacaggcgttcctaagggaattgtaagagatataggcggtcatatagttgctcttaaatggactatgaaaaatatttataatattaatcaaaatgatgtttggtggtctgcaagtgatataggttggattgtaggtcactcttatattgtttatgctccattattcaagggatgtacaactgtattatttgaaggaaagccagttggaacacctgatgcaggtgttttttggagagtaatttctgagcataaaataaaatcattattcactgctccaaccgcttttagggcaattaaaaaagaagatcccgagggaaaatttttttcaaaatatgatttaagttgttttgaatctttatttttagcaggagaaagagctgaccctgatactcttaagtgggcagagtcattgttaaaagttccagttatagatcattggtggcaaacagaaacgagttgggcaattagttctaattgtactggcatagaaatgcaaaagacaaaatatggatctgcatgtatgcctgtaccaggatataatgtaaaagttttaaaaactgacaagaccgaagcaaaagcaaatgaaatgggagatattgttgttaaacttccacttcctccaggtacatttccaaccttatggaatgcggatgaaagatataaaaaaacttatatgtcaaattatgaaggttactatcaaacttatgatgctggtcacatagatgaggatggctatgtttggataatgtctagaacagatgatattattaatgttgcaggtcatagattgtcaactggtgcaatagaagaagtattatctgaacataaatcagtagcagaatgtgccgttgtaggaatatcagataaattaaaaggacaattgccaataggttttctagctttaaaaataggagtaaagcaaagtaatgaagaaattattaaagaatgtattcaaa

SEQ ID NO: 309389 - DNA, 1097 bp, Unknown
  Bacterial polypeptide expressing nucleotide sequence isolated from the Sargasso Sea
tgcttcgatgacacatcaatatatttttaactacaaaccaaaagatatttattggtgcactgctgatattggttgggtaactggacatagttatattatttatggaccactttcgaatggtgcaacaactataatgtttgaaggaattccaaattatcctgatagttcaaggtggtggcaaatagttgataaatataaagtaaatactttttatacagcaccaactgcaattagagcattgatgcgagagggagataaacctgttaaaaaaacctctagaaaatcccttaaacttttgggaacggtaggagaaccaataaatccagaggcttggatgtggtactataaaactgtgggtaattctaaatgcccaattgtagatacttggtggcaaacagaaacaggaggaataatgattgctcctcaaacaggtgcaattcctcttaaacccggatctgcaacaaaacctttctatggaattaagccagtgcttgtagataaaaacggtaaagaaattaaaggagctggagaaggaagattatgtatagctcaatcatggcctggacaaatgagaactgtttatggtgatcatcaaagatttatagatacatacttttctcaatttaatggaaaatatttcacaggcgatggatgtcgaagagataaagatggatattactggatcactggtcgagtagatgatgtaattattgtttcgggacataatcttggaacagctgaaattgaaagtgcgtttgttgctcatccaaaagtagctgaagctgctgtagttggttaccctcatgatattaaaggtaatggtttgtattgttatgtaaccttgaatgcaggagaaagcgaaactggtgaactagaaagagatctaaaactttgggttagaaaacaaattggtcctttagcaactccagatctaattcattttactccgggtcttcctaaaacaagatcaggaaaaataatgagaaggattttaagaaaaattgctgctaatgagcacggtcaattaggagataccactactctagctgatccaagtgttgttgatagtttagtagataatagaaaaaatatttaaa

SEQ ID NO: 309390 - DNA, 1489 bp, Unknown
  Bacterial polypeptide expressing nucleotide sequence isolated from the Sargasso Sea
ggtaagcgtattacctggatcaagccttataaaaaaataaaaaatgtaaaatatagtaaatccgatgtaagtattaaatggtattatgatggtactcttaacgcttctgcaaactgcattgacagacatttaaagaaaaataaagataaaactgctataatttgggtaggtgacgacccgaaagttcaaaaaaaaattacttacaaacaacttcatcaagaagtttcgaagacagcaaatgctttaaaagaattaggtattaaaaaaggtgatagagttacaatttacctaactatgatacctgagttagcatatacaatgctagcctgtgcaagaattggtgcggttcattcaattatatttggaggtttttctccagacagtatagctggcagaattaatgactgtaaatctgattacgtagtaacagcagatgaaggtttaagaggaggcaaaactattccattaaaatctattactgacgaagcattagttaattgttcaaatgtcaagaaatgtatcgtggtaaaaaaaactggtaatagaattaattgggacgaaagtagagatgtttggtatcacgatattgtaaaaaaagcttcacctgtttgtgaacctgaagaaatgaatgccgaagatccgttgtttatactttatacctcgggatctactggtaaaccaaaaggtgttttacatactactggtggatatatggtttatgcatcaatgacacatcaatatgtatttaattataaaccaaaagatatttattggtgtactgcagatattggctgggtaacaggtcatagttatataatttatggaccattatcaaatggtgctaccactataatgtttgaaggaatacctacctacccagataattctaggtggtggcaaattgtcgataaatataaagtaaatatcttttatacagctcccacagcaatacgagctctgatgagagaaggtgataagccagtaaaaaaaacttccagaaaaacccttaaattattaggaactgtaggagagcctataaatccagaagcttggcagtggtattataaaactgttggagattcaagatgccctatagttgatacatggtggcaaacggaaactggaggtattttaattagtcctcagacaggagcaataaacttaaaacctggttcagcaacaaaaccattttatggaattaaaccagtaatagttgataaaacaggtaaagttttaaaaggagaagcacaaggtagactttgtatagcgcaatcgtggccagggcaaatgagaacagtttatggagaccaccaaagatttatagatacatatttttcacaatttgatggaaaatattttactggcgatggttgtcgaagagataaagatggatattactggattactggaagagtagatgatgttattattgtttctggtcataatttaggaactgcagaaattgaaagtgcatttgtagctcatccaa

SEQ ID NO: 309391 - DNA, 2077 bp, Unknown
  Bacterial polypeptide expressing nucleotide sequence isolated from the Sargasso Sea
atgcctaaaaaaaaaaaatctaaatcaagaaaaaaaacctcaaaaagaaagagggttaaaaaaaggaaaaaaattcttaaaagaaaaaaaaagataagaagtaagaataaaaaagttaagattaataacgaaggctcaacacaagaaataatttttaaaacaaatccagagtgggttaaaagcggtttaattaataaatctcagtatcaaaataagtatactgactctatcaaaaataataatactttttggaaaaaagagggaaaaagaattacatggataaaaccatataaaaaaattaaagatgtcaagtatagtagaaatgaagttaaaataaaatggtttgaagacggaactcttaatgcgtctgctaattgtattgatcgacatttaaaagataaaaaagataaaacagctattatttgggtaggtgatgatcctaaggatactcagaaaatttcttataagcaacttcatcaaaaagtttcaaaagcagctaatggtctaaaaaaattaggaatacaaaaaggagacagagtaacaatatacttgacaatgatacccgagttggctgttttgatgttagcttgtgcaagaattggagccatacattctataatatttgggggcttttcagcagagtctatttctggaagagtgaatgattgtaaatcagaatacattataacagctgatgaaggtgttagaggtggaaaaataattccattaaaagcaacaaccgatgaagcattaagtaattgtccagatgtaaaaaaatgtattgttgttaaaagaacaggaaactatgtttattgggatgacggtagagatgtttggtatcatgatctaattaaagatgtcccaaatcattgtgaacctgaggaaatgagtgcggaagatcctttgtttatcctttatacatctggatctacaggtaaaccgaaaggtgtgctacatacaacgggtggatacatggtttatgcatccatgactcatcaatacatatttaattacaagcctaaagatatttattggtgtactgcagatataggttgggtaacaggtcatagttatataatttatggtcctttatctaatggagctactacaataatgtttgagggagtaccaaattacccagacagctcaagatggtggcagattgttgataaatttaaagtaaatactttttatactgctccaacagctatcagagctcttatgcgagagggtgatgatccagtaaataaaacatctcgaaaatctctaaaattattaggtacagtaggagaacctataaatccagaggcctggatgtggtactataaaacagttggaaactcaaaatgtccaatcgtagatacttggtggcaaactgagactggcggaattttaattgcgcctcaaacaggagctatacctttaaaacctggatcagcaactaaacctttttatggaattaaacctgttcttgtcgataaagatggaaaagaaattaaaggcgcaggtgaaggaagactttgtatagctcagtcttggccaggccaaatgcgaactgtctatggggatcatcaaagatttattgatacttacttttctcaatttgatggaaaatattttactggggatgggtgcagacgagacaaagatgggtattactggatcactggacgagtagatgatgtaattattgtatcaggacacaacttgggtaccgctgaaattgaaagtgcttttgttgctcatcctaaggttgctgaggctgctgtagttggttatccacacgatattaaagggaatggattgtattgctacgtaactcttaatgcaggcgagactgaaacaggtgaccttgaaagagaactaaaattatgggttagaaaacaaataggtccattagcaactcctgacttaatacactttactccagggcttccaaaaacaagatctggaaaaataatgagaagaattcttagaaaaattgcagcaaatgaacatggtcaattaggtgatactactactttagctgatccaagtgttgttgaaagtttagttgacaatagaaaaaatacttaga

SEQ ID NO: 309392 - DNA, 1354 bp, Unknown
  Bacterial polypeptide expressing nucleotide sequence isolated from the Sargasso Sea
ttccttaaagatattactgaccaagcattatccaaatgcagagatataaaaaaatgtatcgtagttaaaagaactggaaattatatcaattggaatagtgtaagagatgtttggtacgaagatatgataaaaaatgtttcaaccaattgtgaaccagaagaaatgaatgcagaggaccctttgtttatattatatacatcaggctcaactggaaagcctaagggagttttgcatactacaggtggttacatggtttatgcttctatgacacatcaatatatttttaattataaaccaaaagatatttactggtgtactgctgacatcggctggataactggtcatagctatataatctatgggcctcttgctaatggagcaacaactataatgtttgaaggaataccaacatatccagatagctctagatggtggcaaattgttgataaacataaagtaaatattttttatacagcacctacagcaataagggctcttatgagagaaggaaattcacctgtaaaaaaaacttcaaggaaatctctaaaactattaggaactgttggagaaccgattaatccagaagcatggatgtggtattttaaaacagttggaaattcaaaatgtcctattgttgatacatggtggcaaactgaaacgggaggaatattaattagccctcaaactggtgcaataaatttaaagcccggatctgcaacaaaaccattttatggaattaaaccagttattgttgatgaaaagggacaaactttacatggtgaatgccaaggtagattatgtatagctcaatcatggcctgggcaaatgagaactgtttatggcgatcaccaaagatttatagatacttacttttcacaatttgatggaaaatattttactggtgatggatgtaggagagataaggatggatattattggattacaggtagagtagatgatgttattatcgtatcaggacataatttaggcactgcagaaattgagagcgcttttgtagcccataaaaaagttgctgaagcagctgtggttggtttcccacatgaaataaaaggaaatggactttattgttacgtaactttaaatgcaggagagactcctagtggagacttagaaagagaattaaaactttgggttagaaaacaaattggccctattgcaactccagaccatgttcaattttcatctggattaccaaaaactagatcaggaaaaatcatgagacgtatcttgcgaaaaattgcagcaaacgaacatcatgatcttggtgataccacaaccttagctgatccatcggttgtggagtccttggtagacaatagaaaagttaaataaa

SEQ ID NO: 309393 - DNA, 1331 bp, Unknown
  Bacterial polypeptide expressing nucleotide sequence isolated from the Sargasso Sea
aatggcagaagagaaagtatacagagtacctaataatcataatcgcgcatttattgatactaataaatatcaggagatgtatacacgctcgattaatgaatcaaatattttttgggaggagcaagcagaaaagtttctaacttggttttcaaagtgggatagtgttcaacaatgggactatgacaatcttgatattaagtggtttcacaatgccaaattaaatgtaagctataattgtcttgatcgtcatctcaaagaacgtggagatcaaattgcaattatttgggaaggcgacgaacccgatcttgataaatatattacctataaagaattgcatgcagaggtttgtaagtttgccaatgttctaaaatcacgtggtgccaaaaaaggtgattgtatttctatttatatgccaatggtgccggaagcagcagttgcaatgcttgcttgtactcgtattggggcaatacattcagtggtatttggaggtttttcaccagagtccttaaaagaccgaatcttagattctgattgtaagtttgtaatcacagcagatgagggtattcgtggcggacggactgttccattaaaagaaaatgttgatgacgctttaagtaaatgcccaaatgttcacactgtcatagtaatacagcgaactggtaaagatattgtttggaataatgaacgagatatttggtatcaagatgcgatggctgaagcatcgacacattgtccagcaattgaaatggatgctgaagatccattatttatcttatatacgtccggttccacgggtaaaccaaagggtgtattgcatacaacagctggctaccttttgtatgcagcaataactcataaatacgtatttgattatcatgagaatgatatttattggtgtacggctgatgtcggttgggtcaccggacattcctacattatttatggcccgctttgtaatggcgcaaaaactcttatgtttgaaggtgtgcccacttatccagatgcaagtcgtttttggcaagttgtcgaaaaacataaagtaagtattttttatactgcaccaactgctattcgtgcgttaatgtgtaagggcgaagaatttgttaagaagacaaatagaaaaagccttagaattttaggcacggttggcgaaccaataaatccagaggcttgggagtggtattaccatgtggttggggatggacgttgccctattatagatacttggtggcaaacagaaacaggaggccatttaataacgcctttgccgggcgcaactgatttgaaaccgggttcaaaaacattaccgtttttcggaattgagccttgtt

SEQ ID NO: 309394 - DNA, 1204 bp, Unknown
  Bacterial polypeptide expressing nucleotide sequence isolated from the Sargasso Sea
atgcgtaagaaaaaaaaatctaagaaaaaaataagaaagaagagtagaaaaatttctaaaaagaaaaattctaattcttcaagcaatgaacttatttataaaacaaaaaaagagtggatacgtcaatcactagttactaagaaagaatatgaaaaaaaatataatcaatcaataaaggacaacgaaggattttggaaaaaagaaggaaaaagaattagctggattaaaccatatacaaaaataaaagatgttaaatatagcaaaacagatgttcatattaaatggtattatgatggaaccttgaatgcttcttcaaattgtattgatagacatcttaaaaaaaataaaaacaaaactgcaataatttggattggtgatgacccgaaggttcaaaaaaaaatttcttatcaacaattgcataatgaagtttgtaaaatatctaacggtttaaaatctcttggaattaaaaaaggagatagggtaactatttatttaacaatgattccagagcttgcttatacaatgttagcttgtgcaaggattggtgcaattcattcaattatttttggtggattttctccagatagtattgctggtagaattaatgattgtaaatcagattatatagtaacagctgatgagggagttagaggtggaaaaactataccattaaaatcaattacagatgaagctttagtaaattgtccaaatgttaaaaaatgcataattgtcaaaagaacaggaaatagaattaactgggatgaagaaagagatgtttggtatcacgatataacaaaaaaggtacctaatacatgtgaaccagaggaaatgaacgctgaagaccctttatttatattatatacttcaggatcgactggtaaaccaaaaggcgtcttacatacaactggtggctacatggtttatgcttctatgacgcatcagtatatatttaattataaacctaaggacatttattggtgcacagcggacattgggtggataactggacatagctatataatatatggaccactatcaaatggcgcaacaaccataatgtttgaaggtatacctacatatccagacacatctagatggtggcaaatagtagataaatttaaagtcaatattttttatacagctccaactgcaataagagccttgatgagagaaggagatattccagttaaaaaaacttctagaa

SEQ ID NO: 309395 - DNA, 1351 bp, Unknown
  Bacterial polypeptide expressing nucleotide sequence isolated from the Sargasso Sea
tcttaagtcgatcacagatgaagcgttaatacattgtccgaatgtaaaaaaatgttttgttgttaaaagaacaggaaacagaattaattgggacgaaaatagagatgtttggtatcatgaaatgatagctggtgttccttcccaatgccagcctgaagagatgaatgcagaagatcctttatttattttgtatacatcaggatcaactggaaaaccaaaaggagttcttcatactacaggtgggtatatggtctacgcatctatgacacatcaatatatttttaactacaagccaaaagatatttatttttgtactgccgatatcggctggataaccggtcatagttatataatttatggaccacttgcaaatgcagcaacaactgtaatgtttgaaggtgtaccaacttatccggactcatcaagatggtggcaaatagtagataagtttaaagttaatattttttatacagctcctactgctatcagagcgctaatggctcaaggagatgacccagtgaagaaaacatctagaaaatctctgaaattgctgggaacagttggagaaccaattaatcccgaggcttgggagtggtactatagaactgttggagataatagatgtccgattgtagacacttggtggcaaaccgaaactggtggtattttaatctcaccacaaacaggagcgatagatttaaaaccaggttctgcaacaaaaccattttatggaattagacctgttatagttgatcagaatggaaaagaaattagaggagagggacaaggaaggctttgcatgtcacaatcatggcctggccaaatgagaacagtatatggtgatcatcaaagatttattgatacttacttctctcaatttgatggaaaatattttacaggtgacggatgtagacgagataaagacggttattattggattactggtagagttgatgatgtgataattgtatctggccacaatcttggaactgcagaaattgaaagtgcttttgttgctcacccaaaagtggctgaagcagctgttgtgggatatcctcatcagatcaaaggaaatgctttgtactgttatataacagtcaataatggagtaattgcggatggtgatttggaaagagaactaaaaaatcatatagcaaaaacgcttgggccattttacagaccagaattgattcagttttcaccaggattaccaaaaactaggtcaggaaagattatgagaaggatactgagaaaaattgctgctaatgaacatgaccaacttggagatacaactacactagctgatccaagtgttgttgatagtttaattaataatagaaaaaatatttaa

SEQ ID NO: 309396 - DNA, 1072 bp, Unknown
  Bacterial polypeptide expressing nucleotide sequence isolated from the Sargasso Sea
tatggaaattaaaaaagattggcttgagcatgcaaaggttaatgaagaaaaatattctttaatgtatgataattctcttcaaaacaatgatgagttttgggcagatcaagcagaaagagtcgattggattaaaaaatttacaaaaatcaaagatataaaatattctaaagatgatgttagtattaaatggtttgaggacggcaatcttaatgtatcttataattgtatagataggcatgctaaaaataatcctgataaagttgctataatttgggaaggtgatgacccaaatgaaacaaaaaaaataacatacaaagaactattaataaatgtatcaaaggcagcaaacgttcttaaaaaaattggtgtaaaaaaaggtgatcgagtaacaatatacttaacaatgatacctgagctagcttatattatgttagcttgtgcaagaattggtgctgtacactcaatcatttttggtggtttttctgcagagtcgatagcaggtagaataaaagattgtaaatcagaatatgtagtgacggcagatgaaggagttaggggtggtaaaactattcctttgaaattaactacggataaagcactggaaacatgtcctgacgttaaaaagtgtttagttgttaaaagaacaaataaagaaatagaattaataaaagatagagatttattttatgatgatgtcataaaagaagttgatagcatttgtaaaccagaagtcttaaatgcagaagatcctttattcattttgtatacttcaggatcaactggtaaaccaaaaggtgttatgcatacatcaggtggatatatagtttatgcttcaatgacacatgaatatatctttaattacaatgatggggatatatactggtgtactgcagacataggctggattactggtcacagttacataatatatggaccacttgctaatggtgctacaaccttaatgtttgaaggtgtccctaattatcctgacttctccagattttggaaaattgtagataaacataaagtaaatatattttacactgcacctactgccattagagctttatga

SEQ ID NO: 309397 - DNA, 1741 bp, Unknown
  Bacterial polypeptide expressing nucleotide sequence isolated from the Sargasso Sea
ttgtctggaaattataaaaaaatctatgattcgtctataaaagacagagaaaatttttggaaaactctttctgaagatatattttggtataaaaaaccaactaaaatacttaattcctcaaaaccgcctttttataaatggtatgaagatggcataaccaacacttgttacaacgctgttgatgttcatatcgataacggtcgtggcgataatattgctataatttatgatagccccataactggttcaaaatacaaattgtcatacaaagagcttaaagaaaaagtttcaatctttgctggagcattaaaaaatcaaggaattgtaaaaggtgatagagttataatctacatgccaatgatacctcaagctgttgtggcaatgcttgcatgcggaagaattggagcaatacattcagttgtatttggtggctttgctgctaatgaactagcaagcagaattgatgactctaaagcaaagattattatttctgcttcttgtgggtatgaacctggaagaactgttcactataaaccattattaaatagagctattgagatagcaaatcacaaaccaaaaaaatgtattatttggcaaagagaaaaagataaagccgagcttgatcctgagagagatattgattggttagaagttttaaagggagctgaacctgcggaatgtgaaaaaatgaatgcaaacgattatgcttacatactttacacgtctggaacaacaggaactcctaaaggaatagtcagagacattggaggacacatagtggctttaaaatggactatgaaaaatatttataacatagatcaagatgatgtttggtggtctgcgagcgacataggctggatagttggtcactcttatattgtttacgcacctttattttatggttgcactactattttatttgaaggtaaaccagttggaactcctgatgcaggtgttttttggagaataatttcagaatataaagtaaaatctcttttcactgccccaacagcaataagagcaattaaaaaagaagatcctgatggaaagttttttaaaaaatacgatttatctaaatttgacactttgtttttagctggcgaacgtgctgacccagatacaattaagtggtttgaagaactttcaaatgctccagtcatagatcactggtggcaaactgaaacaagctgggcaataagtgctaattgtgcaggaatagaaaagtttccaattaaatatggatccgcatttaaaccagtcccgggttatgatttaaaagttctcaataacgagggaaaagagaacaagtcagggcagatgggagacatagttgtaaaattacctttgccacctggtactttcccaactttgtggaatgcagatgatagatataaaaaagtttatatgtcaacttatgaaggttattatcaaacttatgatgcgggccatattgatgaggacggttatgtttggattatgtcaagaacagacgatattataaatgtggctggtcatagattgtctacaggagcaattgaagaagttttggctgaacataaaaatgtagcagaatgtgcggtagtgggaattgcagataaattaaaaggtcaacttcccattggattgattgctttgaaggccggagtaaaacgggataacaaagaaataacaaaagaatgtgtagccttagttagggaaaaagtcgggcctgttgcagctttcaaattagcaattgtgtaaa

SEQ ID NO: 309398 - DNA, 805 bp, Unknown
  Bacterial polypeptide expressing nucleotide sequence isolated from the Sargasso Sea
atggctaaaagaagtaagaaaaaaaaaagaaaatcaaaatctaaaagaaagaaaagattcaaaagaaaaaaaataaaaactcttaaaaagaaaaaactttcttctaaaataaataactctaaacaaacagaggacgctgatggaaatatagtttttaaagtgccgccagcttgggaaaaaagagcttatgctaatcaatcccaatatgcaaagaaatataaattgtcaattaaggataatgaaagtttttgggcgaaagaagggaaaagaattacctggatgaaaccttatactaaaattaaagatgtaaaatatagtaaagaggacgttagtatcaagtggtactacgatggtacactaaacgcatcagcaaattgtattgatagacatttagataaaaaaggaaataagactgcaattatttgggttggggatgaccctagtgattctaaaaaaatatcttataaagaactgcataaaaatgtttgtaaagcagctaatggattaaaaagtttaggaatccaaaaaggagaccgggtaacaatttatctcaccatgatacctgagcttgcctacacaatgttagcttgtgcaagaattggtgctgttcactcaataatatttggaggattttcaccagactcaatcgccacaaggataaatgattgcgagtctgattatgttattactgcagatgaaggggttagaggtggcaaaataataccactaaaaaaaattgctgatgaagccatgatgcaatgtccaaatgtaaagaaatgtgtagtagttacaagaactggaaata

SEQ ID NO: 309399 - DNA, 1085 bp, Unknown
  Bacterial polypeptide expressing nucleotide sequence isolated from the Sargasso Sea
tttgggcgagaaatataaggaaatttacgattcgtcgataaataataaggaaaaattttggaaagaagtttctgaggacatattttggtacgaaaaaccaaaaaaaatattgaattctagcagtcctcctttttacaaatggtttgaagatggtgtaacaaacacttgttacaatgcattagatatacatatagataaaggtagaggtgaaaagactgccattatctatgatagcccaattactggaacgaaaaaaaatttttcttataaagagttaagagaaaaggtctctctttttgctggtgctttaaaaaatcaaggagttaacaaaggagatagagtcattatctatatgccgatgattccggaggcggtaatcgctatgcttgcttgtggtaggattggtgcaattcactctgttgtctttggaggatttgcagcaaatgaacttgcaagtagaatagatgactcaaaagcaaagcttattgtttctgcatcatgtggttatgagccaggaagaacagttcattataaaccgctagttaataaagctttagaactttctaagcataaacctagcaaatgtataatatttcaacgagaaaaagataaagcagaattagattctaaaatagatattacatgggatgaagctcttaagggggcaaaagagacagattgtgaaaaaatgaagtccaatgattatgcttatattctttatacatctggaactactggaacgccgaaaggaatagtgagagatataggcgggcatatcgtagctttaaaatggacaatgaaaaatatttataacattaatcaagatgatgtctggtggtctgcaagtgacataggttggatagtaggtcactcatatattgtttacgctcccttgttttatggttgtacaacaattttatttgagggaaaacctgtaggaactcctgatgcaggtgttttttggagaataatttcagaacataaagtaaaatctttatttactgcaccaactgctataagagcaatcaaaaaagaggatcctgaaggaaaattttttaagaaatatgacttatctaaatttgata

SEQ ID NO: 309400 - DNA, 814 bp, Unknown
  Bacterial polypeptide expressing nucleotide sequence isolated from the Sargasso Sea
aatgtcattagataaaaaaaattcaatcaataacatacttgaagaaaagagaattttctctccatcaaaaaaatttgcagaaaactcaaatattagtactcaagaagaattacttaatctaaaagaacaagcatcagataatcctattcaattttgggaatcttttgcaaaatctgaattagattggtttgagccatttcaaaccgtattagataacgaaaatgcgcccttttttaaatggttcaaagaagggaaactcaatattacatacaactgcttagatagacatattaagagaggacttggagaaaagactgcacttatatgggaaggcgaacccggagatagtaaaaaatatacctacgaagaacttctgaaagaggtatgtaaagcagctaatgcattaaaagcaattggtgtaaaaaaaggagatttggtatgtatttatatgccgatgattcctgaagcaatgttcgcgatgttagcttgtgcaagaattggcgcgcctcattcagttgtctttggaggattttcttcagaagctctaaaagataggttaattgatgggaacgccagatttgttgttactgctgatggtggctttagaaaagataaggttattgaacttaagaaagcagttgatgcggctattgaaagtggggcagataaagttgttgaaaaagtagttgttgttcaacgatcccaaaaaaatattttgatggttgatgatagagatttttggtggcacgaattgttaaaagatcaaaaagatcattgtgaaccagaaataagaatagcgaagatagacttttta

SEQ ID NO: 309401 - DNA, 1897 bp, Unknown
  Bacterial polypeptide expressing nucleotide sequence isolated from the Sargasso Sea
aatgaacagaaattacaaagaaatttacgacgaatctctaaaaaaacctgaggaattttggcagaaagtttctgaagatgtgttttggttcaaaaaaccaactaagattttaaaaaaagacaacccacctttctataaatggtttgaagatggtgtaacaaatacatgctacaacgccttagaccttcacattgatcaaggaagaggtgataaaactgctttaatctatgacagtcctataacagaaagtaaagcaaagttcactttcaaagaattaaaaaaaaaagtttcaaaatttgcaggcgctttagataagcaaggagttaaaaaaggagatcgagtaataatttatatgccgatgataccagaagcggtagttgcgatgcttgcatgtgggagaattggagcaattcactctgttgtattcggtggttttgcctcaaatgaattggctagcagaattgatgatagtaaagctaaaattttaattacagcatcatgtggatttgagcctggaagaacagttgaatatagaccacttgtagatggggctttaagattagcaaaacaccaagttgaaaaagtaatattatttcaaagaaaaggacacgaggtaaaattaaataaaccattagaaataagttgggatgaagcactatctggagcagatgataaagattgcgttgagatgggtgccaatgaatatgcttacatcctttatacttcaggaaccactggtattccaaaggggattgttcgagatattggtggtcacatagttgctcttaaatggacaatgaaaaatatttataacattgatcaagatgatgtatggtggtcagcaagtgatattggttggatagtaggacattcctatattgtctacgctccattattcaaaggttgtgcaactcttttatttgagggcaaacctgttggtactcctgatgctggagtattttggagaataatctcagaatataaaattaaatctttattcacagcgccaactgcatttagagcaataaaaaaagaagacccagaaggtaagtttttttctaaatatgatttaagttcatttgagtcattatttttagcaggtgaaagagctgaccctgatactattaaatgggctgagaatttacttaaagttcctgtaattgaccattggtggcaaactgaaacgagttgggcgataagttcaaattgtactggaatagaaatgcaagaaacaaaatatggatccgcttgcaaagcagtcccaggttatgatgtaaaaataattaaacccgatcaaacaatagctaaaccaaatgagatgggagatattgtggttaaacttccattaccgccaggtacgttcccaactttgtggaatgcagatgagagatataaagaaaattatatgtcaaattataatggctactaccaaacttacgatgcagggcatattgatgatgacggatatatttggattatgtcgagaacagatgacataataaatgttgcaggtcatagactttcaactggtgcaatagaggaagttttgtctgaacatcaatctgttgctgaatgtgcagtgataggaataaaagatcagctgaaaggacaattaccaattggtttaattgctctaaaagcaggagtatctaaggataatgagactatttcaaaagagtgtgtgcaaatggttagagataaggttggacctgttgcagcctttaaaatagcaattgtcgttaaaagattacctaaaaccagatctggaaaagttcttagaggaacaattagaaagattgctgataaagaagaatataaaatgcctgcaacaattgatgatcccactatccttgatgagataaaaggagacttaattaatagcgatattttaaaataa

SEQ ID NO: 309402 - DNA, 1170 bp, Unknown
  Bacterial polypeptide expressing nucleotide sequence isolated from the Sargasso Sea
tatgacagatgttggacaacaattacatcagacatctattgcgaataaacaggcattttggcaacaagccgccaaggccttagattgggttacgccgagcaaacaaatattagatgaaagcgaggcaccgttttatcactggtttagcgatggcgagttaaacacttgctacaacgcggtcgatagacacgtgttggcggggcgtggcgagcaaattgccatccattacgtgagccctgtgacggaaaccgaatacagcattacttatcgtgagttgcaggctcaggtcgcaaggcttgcgggttacttacaaagtgtgggtgtgactaagggagaccgtgtggtcatctacatgcccatggtgcccgagactgcctatgccatgcttgcctgcgcgcgcattggcgctatccattcggtggtcttcggcggctttgcggctaatgagctggcgacccggatcaatgatgctaagccaaagttggtgatgtccgcctcctgcgggattgaaccttcgggcgtggtgccctataaacccttactggacaaagcattaaatgaagccgtgcacaaggttgaacactgcttgattttaaatcgcccccaatatgaggcgcagatgcaagcggggcgcgataaggattggcaaactgctttatgcgctagcgacagtgccgattgtgtgacagtgaaagccaccgatcctttgtatgtgctttatacctcgggcaccacgggtcaacctaaaggggtggtacgggacaatggcggtcatgcggtggcattggcttggtccatggccaacatttacgatattgctcaaggagatgtgttttgggcagcatcggatgtgggctgggttgtagggcattcgtatattgtctatggcccgctgcttgtcggggcgacgaccttgttatatgaaggaaaacccgtaggcacacctgatcctggtgctttttggcgcacgattgctaaatatcgagtcaaaagcttttttacggcgcccacggcgatccgcgccattaagcgcgaggatcccgacggcgaatttattcaaggtgtcgatttaagctgtttgaaaaatgtctttttggctggggagcgctgcgatcccgataccttgcattgggccgaagctaaactgcataaaccccgttatcgaccatt

SEQ ID NO: 309403 - DNA, 1315 bp, Unknown
  Bacterial polypeptide expressing nucleotide sequence isolated from the Sargasso Sea
aatggccaaaaaaaagaaaagaaagatcaaaaaaaagaagaaaacaaagagaaaaaaaaacaaaagttttaaaaaatcaaaaaaaagaaactttaagagaaagaaaacatataacgcaaaagtatcaaaagaaactaaagatacagatgggaatctagtatttaaggtgcctgaaaattggtcaagacaagcctatgtaaataaatcgcgatatgaaaaaaaatataaaatatcgatcaaaaataatgaagacttttggagaaaagagggaaaaagaataaattggataaagccttatacaaaagttaaagatgtgaaatatagtaaaaacgaagtgaacattaaatggtattatgatggaactttgaatgcatcagcaaactgtattgacagacatttagaaaaaaaatcaaataaaactgcaattatatgggtgggggatgatccaagtgactccaaaaaaataacttataaagaacttcataaaaatgtatgtaaagcagcaaatgctttgaaaagtataggtattcaaaaaggagacagagtaacaatttatctcacaatgattccggaattagcttacacaatgttggcttgtgcaagaataggagcagttcattcaatcatatttggtggtttttctccggactctatagcaacaagaataaacgattgtgaatctgattatgtgattactgctgatgaaggattaagaggtggaaaaattattcctcttaaaaaaattgctgatgaagctatgtcacaatgtccaaatgttaaaaaatgcgttgttgttaaaagaacaggaaattctgttaactgggatgatgatcgagatgtttcttataatgagataattaaaaatgtatctgataaatgtgttcctgaggagatgaatgctgaggatccgctatttattctttatacctctggctcaactggaaaacctaaaggtgttctacatacgaccggtggctatatggtttatgcttcgatgacacatcaatatatatttgattataaaaataaagatatttattggtgtacagcagacattggttgggttactggacatagttatataatttatggacctttatcaaatggtgctacaacaattatgtttgagggtgttccaaattatcctgatagttcaagatggtggcaaatagttgataaatataaagttaacattttttatactgctccaacagccataagagctttgatgagagagggagatggtcctgtaaagaagacaagtcgtaaatcactaaaactattaggcacggttggtgagccaattaatccagag

SEQ ID NO: 309404 - DNA, 967 bp, Unknown
  Bacterial polypeptide expressing nucleotide sequence isolated from the Sargasso Sea
agggaattcccaacctaccctgatgcatcgcggttttgggcaagtttgtgaaaaacataaagtaaaccagttttatactgctccaacggccattcgtgccctgatgggccagggtaatgaatatgttgaaaaatgtaatttatcatccctaaaagttctcggaacagtcggcgagcccataaacccagaggcatggaattggtataatacagttgtgggaaaagggaattgcccaattgttgacacatggtggcaaactgaaactggcgggcacctgttaacaccaattcctggcgccacaaatacaaaacctgggtcagcaacaaatccattttttggagttaaaccagctattttagatccacagactggccaagaaatagatgatactgaagcagagggtgttttatgtataaaagacagttggccagggcaaatgcgcactgtttatggagatcatgatcgctttattaaaacctacttcagtgactacaaagggtattattttagtggagatggctgccgtcgcgatagcgacggatattactggattacgggccgggtggatgatgttataaacgtgtcaggtcatagaatgggaactgcagaggttgagagtgcacttgttgctcaccctaaagtttcggaagctgcagtggttggttttccacatgatatcaagggacagggtatttactgctatgtgactctaatgtctggggaaaccccctctgaagaacttcgtttggaactaaggaattgggtgcgcaccgaaattggaccaatcgcttctccagatctcattcagtgggcacctggtttgccaaaaacgcgttctggaaaaatcatgaggcggatattgagaaaaatcgctgaaaacgactatggttctttaggtgatacatctacattggcagaacctgccgttgtagatgaccttattataaatagaatgaatgatgcttaa

SEQ ID NO: 309405 - DNA, 817 bp, Unknown
  Bacterial polypeptide expressing nucleotide sequence isolated from the Sargasso Sea
tatgtcagataaattcaaggaaatttatagaaaatcaattgaagatccagagaatttctggagagaggcatctgacgatatattttggtttaaaaaacccacaaaaattttaaacaagtcaaacccccctttctacaaatggtttgaggacggggttacaaacacttgctacaatgcattagatattcacattgataagggtcaaggtaaaaaaactgcaataatttatgatagtcccatcacaggtaacaaaagtaagcttacatatgagaaattaagatcaaaagtttctaaatttgccggtgctttaaaaaatcaaggcgttggtaagggtgatagagttataatttatatgccaatgatccctgaagcagtcattgcaatgcttgcttgtggacgaattggagcaattcactcagttgtttttggaggatttgcatcaaatgagcttgctagcagaatagatgacagcaaagctaaaattctagtcacagcatcatgtggttttgagccaggtaggacggttgaatacaagccattagtagatgaagcagtaaaactagcaagtcataagataagtaagatgattttatttcaaagaaaaggtcatgaggctaaattaaacgaacctaatgaaattagttgggacgaggcactagctgatgcaaaagatactgaatgtgtagagatgaattcaaatgagtttgcttacatactttatacctcaggcacaacaggaacacccaaaggtattgtaagggatatagaaggtcacattgtagctttaaaatggacaatgaaaaatatctataacatt

SEQ ID NO: 309406 - DNA, 1870 bp, Unknown
  Bacterial polypeptide expressing nucleotide sequence isolated from the Sargasso Sea
gtatgaagagtcagtaaaacaaccagaaaaattttgggcagaacatggcaaacgcatcagctggtttacaccttttactaaagtgaaagataccagcttcgacttaggtaatgtgcatgtgaattggtttagtgatggcagcttaaatgccagctataactgcctggatcgtcatttaccagctaaagctaatcaggttgcctattattgggaaggagatgaacctggggtgcaaaaggctgtcacttatcaggaactctacgacgaagtctgccagttagcgaatgccatgcgtgcgctaggggtcggtaaaggcgatcgtgtcactatttatttacccatgatccccgcagccgtagtgtccttattagcctgtgcacggattggtgctatccactcggtcgtttttgcaggtttctcacctgatgccctcggcagtcgtattcaggattgtgattcaaaattagtgattacttccgaccaggctgcccgtggtagccgccttacctacctgaaagataataccgatcaagccttagcccacctgggtgacgccaaccctgctaagcatgtcatagtggtgaaacatgttggcgaaaatattgattttcatcagggtcgcgacctgtggtaccacgaactattagcaaaggagccaaaacattgtgaaccagaggtgatgaacgcggaagatccgctgtttattctttatacctcaggttccactggcaaacctaaaggtgtgttacataccactggcggctacatggtgtgggcgtccatgacacatcaatatgtatttgattacaaagacggagacatttactggtgtgccgcggacatcggctgggtcacaggtcatacctatatagtctatggtccattggcgaacggcgctagcagcatcttatttgaaggtgtccctacttatccgagcgttaagcgtattgctcaggtggttgataaatacaaagtcaacattttatacacagctccaactgcaattcgtgccttgatggcccatggcactgctgcggttgacggcgcagatttatcctcactgactttattaggcagtgtcggtgagcctattaatccggaagcatggagctggtaccacgcctcttatggtaaaaacaattgtcctatagtagatacatggtggcaaactgaaacaggtggaattctgatcacgcctttacctggtgctacagacttaaaaccaggttcagcgaccaggccattttttggtgtcaaacccgctatagtgaccaacgaaggcgaattagtcgagggtgtggctgaaggtaatctggttatactcgacagctggcctggccaaatgcgatcagtctatggtgatcacgagcgttttgagcaaacctatttcagcacttataaaggtatgtattttacaggggatggcgctaaacgtgatgaagacggttattactggctaacaggccgagtagatgacgtcctgaacatttcaggccaccgtttaggcactgcagaaatcgaaagttgtctggtcgctcatgacgccattgccgaagctgcagtcgtaggttatccgcatgacattaaaggtcagggcatttatgtctttgtagcgccacgggtaggcgtggagccaagtgatgaattgaccaaagcagtgcgtgattgggtgcgtcgtgaaatatcccctattgctgcgcctgatatcatacagtggacacctagtttaccaaaaacccgttcaggcaaaattatgcgccgtattctgcggaaaattgcggccaacgaatacgatcagttaggagatatctcgactttagcggacccatctgtagtggaacacttgatccagaacagattaaaccgctaa

SEQ ID NO: 309407 - DNA, 675 bp, Unknown
  Bacterial polypeptide expressing nucleotide sequence isolated from the Sargasso Sea
tatgaaatcagattttcaaagaatttataacgaatctataaaaaatcctgaagaattttggaaaaaaatcgccgaagagattttttggtttaaaaaaccaacaaaaatattaaataaatctaatgctccattttataaatggtacgaagatggtgttacaaacacttgttataatgctttggactttcatattgataatggcctgggcgaaaaatctgctttaatatacgatagtcctattacaggtaataaaaaaaaattttcatacaaagaattaaaagaaaaagtttcaaagtttgctggagcattacaaaatcaaggagtaaaaaaaggagatagagttataatttatatgccaatgattcctgaggcagttattggaatgcttgcctgtgcaaggattggtgcaattcactctgtagtgtttggtggttttgcttcaaatgaattagcaagcagaatagatgatagcaaagcaaaagttttacttacagcttcgtgtggttttgagcctggaaaaacagttcaatataaacctcttgttgatgaagcattaaaattagcatctcataaaatagataagctaatattatttcaaaggccagataacgaagtcaaattaaattctcttaatgaaataagttggaatgaagcattatcgaatgcaaaaaatgt

SEQ ID NO: 309408 - DNA, 1096 bp, Unknown
  Bacterial polypeptide expressing nucleotide sequence isolated from the Sargasso Sea
atgtcaaaggatcacaaaatttattcaccatctgctgattggactgttagtgctcatattaaatcactagataaatataacgagatgtacaacaaatctattgaagaccctgattctttttggagcgatatagcaaaaaggatcacatggtataaaccatgggaaaaagtaagagattttaactttcaaaatggtgagataaagtggtttgaaaatgggaagctaaacgtcagctataactgtcttgacagacacgttgaatcaggtaatggagaaaaaaccgcaatcatatgggagggtaatgatccatcagaggatatgcatttttcttataataaacttttagaaaaggtaaagaaattctctaatgttttaaaagatcttggaatagaaaaaggtgaccgcgtatgcatttatatgcaaatggttccagaattagcgattgccatgttagcatgtgctagaatcggagctgtacactcggttgtattcggtgcattcagcgctgattctcttcgtgatagaattaatgactcgcaatgtaaattgctaataactcaggacactggtgtaagaggtcagaaaaataatattccaatgaagctaaatgctgataaagctcttgccgatactccttctataaattctgtggttgttgtaaaacgcactggagttgatataaatatgattgatgggcgtgatgtttggtggcacgagcagatagaaaaagctgatgcaaattgtgatccagttcatatggattcagaagaccctctctttattttatacacgtctggtagtactggaaaaccgaaaggcgttttacatactactgggggttatcttgtgtatgcatcgtttacccactatactatctttgattacaaggataatgatgtttactggtgtacagctgatattggctggatcactgggcattcttacattgtttatggtcctctttcaaatcaggctacaactattattttcgaaggtgtgccaaattatccagatttcggacgtttctgggatgttgttgataagcatgaagtaaatcaattctacactgcacctacagctcttcgagcgctgatga

SEQ ID NO: 309409 - DNA, 973 bp, Unknown
  Bacterial polypeptide expressing nucleotide sequence isolated from the Sargasso Sea
tatgacagaaagtttaattagagcaaagtcattaaatccccatttagaaaactttgaggaatataagaagctctatgatcaatctattgataatccaaaggaatttttcaagaagatggcagttgaaaatctttcatggataagagatttcactgagatccacaatgatgaatttgcaaatgcgaaatggtttgccgatggaaaaataaatgtaagtgaaaattgtattgatagacatcttgaagataaatcagaaaaaaaagcacttatttgggaaggtgatgagccaggaaattcaaaatcatttacttataaagaagttcacaaagaaatatgtaaattttcaaatgtattaaaaagccttaaagtttcaaaaggttcaagagtttgcatatatatgcctatgattcctgaagctgcctttgcaatgcttgcttgcacaaggattggagcaatccattcggtggtttttggtggattctctccagaatctttgaaagatagaattcttgatgctaattgtgaaattgttattaccgcagatgagggtattcgagggggaaaaatagttcctcttaaatcaaatgtagataaagcattaaatgattgtccgaatgtaaagcatacaatcgttgttaaaagaacaggcaataaaataaattggaaagatgggagagatctttggtatgaagatcttattacagaagtatcatcttcatgcgatccagaaccaatggactcagaggatccgttgttcattctttatacttctggatctacaggaaaacctaagggtgttttacacacaacagccggttatttgctcggtgctcacatgagttttaaatatctatttggagcaagtcagtctgatatatattggtgtacagcagatgttggttggatcaccggacatacatatattctatatgggcctctctcaaatggaatgactactataatgtttgaagga

SEQ ID NO: 309410 - DNA, 1771 bp, Unknown
  Bacterial polypeptide expressing nucleotide sequence isolated from the Sargasso Sea
taaatatagcaaaaatgatgttcatattaaatggttctatgatggtactttaaatgcctcagcgaattgtattgataggcatcttaaaaaaaatgctaacaaaactgcaataatatgggtaggagacgatcctaaagtacaaaaaaaaattacatataaggaacttcataaagaggtttcaaaagcggcaaatggattaaaaaatttgggagttcaaaagggtgatagagtaacaatttatcttaccatgatacctgagcttgcctacacaatgcttgcatgtgctagaataggtgccgttcactccataatatttggaggtttttcaccagatagtatttcgggtagaataaatgattgcgagtctgattatgtaatcactgcagatgaaggagtaagaggaggaaaaacaataccattaaaatctattacagatgaagctttgcaaagctgtcccaatgtaaagaaatgtatcgtagtaaagagaactggtaccaaaaaaattgattggtttaatgatcgtgatgtttggtatcacaagatgacaagtaaagtctcagcaaaatgtgaacctgaggaaatgaatgctgaggatccactattcattctttacacatctggttcaactgggaaaccaaaaggtgtgctacatacaactggtggatatatggtttatgcatcaatgactcatcaatatatttttaactataaacctaaagatatttactggtgcacggctgatattggctgggttaccggacatagttatattatttatggtccacttgctaacggtgcaaccacaataatgtttgaaggtattccaaattatcctgacacctcaagatggtggcaaataatagataaatttaaagttaatactttttacacagctcctactgccatcagagctttaatgagagaaggagacaaaccagttaagaaaacatctcgaaaatctcttaaattattaggaacagttggagaaccaattaatcctgaggcctggatgtggtactacaaaacagttggaaattcaaaatgcccaattgttgatacttggtggcaaacagaaacaggtggaataatgatttctccacaaaccggcgcaattcctttaaagccaggttcggctacaaaaccattttatggaattaaaccagtgttagttgataaaaacggtaaagaaattaaaggtgcaggtgaaggaagactttgcattgctcaatcatggccaggtcaaatgagaaccgtatacggagaccatcaaagatttattgatacatatttttctcaatttgacggaaaatacttcacaggtgatggatgcagaagagataaagatggatactattggattactggaagggtagacgatgtaatcatagtttcaggacacaatttgggtactgctgaaattgagagtgcttttgttgctcatccaaaagtagctgaagctgctgtggttggatatccacacgatataaaaggaaacggtttatattgctatgtaactttaaatgctggagaaagagaaacaggtgatcttgaaagagaacttaaactttgggtcagaaaacaaattggacctttggctactcctgatttgattcattttacaacaggacttcctaaaactaggtcaggcaaaataatgagaagaattttaagaaaaatagctgcaaacgaacatgaacagttgggcgacacaacaactttagcagacccaagtgttgttgaaagtttggttgataatagaaaaaatatttag

SEQ ID NO: 309411 - DNA, 1306 bp, Unknown
  Bacterial polypeptide expressing nucleotide sequence isolated from the Sargasso Sea
atgcctaaaaaaaaaaagaataatacaaaaaagagaaaaaagatttctaaaaaattaaaaaataagtctaaaattaaaaaaaaatcttcaaaaaaaattaaaaaaaaaataaaagttcaaaatcaagaggcaaatcaagtctcagaggtaataataaaaacaaaacctgaatggataaaaagtagtttagcaaataaaagtaaataccaacaaaagtattctcaatctataaaaagcaatgatgaattctggagaaaagaaggaaaaagaattacatggattaaaccatataaaaaaatcaaagatgtaaaatacagtactaaagatgtaagaattaaatggtttgaagatggaactttaaatgcatctgcaaactgtatcgatagacatttaaaagataaaaaagacaaaactgcaatcatttgggttggagatgatccaaaagatagtcaaaaaataacttataaacaactccatcaaaaagtatctagagcagcaaatggtttaaaaaaattaggaattaaaaaaggtgatagagttactatttacttaacgatgatacctgagcttgcaattttaatgcttgcttgtgttagaattggtgcagttcattcaataatttttggtggtttttctgctgagtctatttctggaagagttaacgattgtcagtcagaatacattattactgcagatgaaggagttagaggaggaaaaactattcctcttaaatatacgactgatgaagcactattaaattgtccaaatgtaaaaaaatgcattgtagtaaaacgtacgggcaattatatcaattgggataaggaaagagatgtttggtaccatgatttaattaaagatgtttcaaatcaatgtgaaccagaagaaatgaatgcagaagatcctttattcattttatatacatcaggttcaactggtaaaccgaagggtgtacttcacacgactggtggatacatggtttatgcctcaatgacacaccaatatatatttaattataaaccaaaagatatttattggtgcactgctgacattgggtgggtaacaggccatagctatataatttatgggccactttctaatggagcaactacaattatgtttgagggaattccaaattaccctgatagttcaagatggtggcaaatagttgataagtataaagttaatactttttatactgcaccaactgcaatcagagctctcatgcgagaaggcgataaacccgttaaaaaaacatcacgtaaatcattaaaacttttaggcacagttggagaaccaatcatcctga

SEQ ID NO: 309412 - DNA, 427 bp, Unknown
  Bacterial polypeptide expressing nucleotide sequence isolated from the Sargasso Sea
tatgtctgacaaatttaatagaatttacaatgagtctattcaaaatcctgaagttttttggcaaaaagcagctgaagatatcttttggtttaaaaaacctttaaaaattttaaataaaacaaacccacctttttataaatggtacgaagatggagtaacaaatacatgttataatgctctagattttcatattgatcaaggtaaaggaaaaaaaacagctttaatttacgacagtccaatcacaggtaacaaaagtaaatttacttacgaagaattaaaatcaaaagtatcaaaatttgcaggtgccttgaaagaacaaggaacaagtaaaggcgacagggtaattatatatatgccaatgatacctgaagctgttatagcaatgctcgcatgcgcaagaattggagccattcactcagtagtcttt

SEQ ID NO: 309413 - DNA, 967 bp, Unknown
  Bacterial polypeptide expressing nucleotide sequence isolated from the Sargasso Sea
aatgtttgaaggtattcctacttatccagattcttcaagatggtggcaaattgtagataaatataaagttaatattttttatactgcgcccactgcaatacgtgcactaatgagagagggagatgggccggttaaaaagactagtagaaaatctctcaaactattaggtacagttggagaacctataaaccctgaggcatggatgtggtattacaaagtggttggcgattcaaaatgcccaatagtagacacatggtggcaaacagagactggcggtatactaatttcagcacaaccaggtgcgattgatcttaagcctggttcagccactaaaccattttatggaattaaacctgtcatagttgatgaaacaggtaaagttttaaaaggagcctgtaaaggaagactttgtatgagtgcttcatggccaggacaaatgagaacagtttatggcgatcataaaagatttatagatacttatttttctcaatacgatggaaaatatttttctggtgatggctgcaaaagagataaagatggttattactggataacaggaagagtggatgatgtaattattgtttctggtcataatctagggactgctgaaatagaaagcgcatttgtagcccacaatcgtgtagctgaggctgctgttgttgggtatccgcatgatattaaaggtaatggcttatattgttatgtgactttaaaagctggggagcaacctagtggagatttagaaagagaattaaaactttgggttagaaaacaaattggacctatagctactccagatataattcaatttgcacctgctttacctaaaacaagatcgggaaaaattatgagaaggattttgagaaaaattgcagctaacgaacataacgatttgggtgataccactactttagctgatccgaatgttgttgactccttaattgacaacagacaaaacaaaaactaa

SEQ ID NO: 309414 - DNA, 1114 bp, Unknown
  Bacterial polypeptide expressing nucleotide sequence isolated from the Sargasso Sea
catgtccaataatatttttcctccaagtgacgaatttaaagcaaacgctattattgacaaacaacgctatgaagaaatgtattctgaatcgataacggatccagatgctttttggtcgaaacatggtttgcgggtagactggattaaacccttcactaaaatcaaaaacgtatcatatcaacatccaaatatttcaataaagtggtttgaggacggcgagttaaatgtgtcggctaattgtatcgaccgacatcttgacagtcgtggtgagcagacagctattatatgggaaggcgacaacccttcagagagcaagcatgtaacttatagggaactgcatcaaaaagttagcaagcttgcaaatgtttataaaaacttaggtttatccaagggtgaccgggtcgttctttatatgcctatgatacctgaggcggcatatgccatgcttgcatgtgcaaggattggagcgatccactccattgtttttgcaggattttcaccggaagcgttagccgctcgagttgaaggctgtaaagcctcactcatagtcacagccgatgaagcacctaggggtggcaaaaatacaccgttgaaggcaaatgtagataaagcattagagatatgcggtgatgtacagacccttgtagttgaacgaaccggaagcaatgttccgatgacggaaggtcgtgacatatcttacaattcttcaatgaaggatgtatctgaccaatgtgagccaactgccatgaatgccgaagaccccttatttatcctttatacctcaggctcaactggtgcgcctaaaggggttcaacactgttcgggcggctatttggtttgggcttcaatgacacatgaatacgtatttgattatcaccaagatgatattttctggtgtactgcggacgtaggatgggtcactggccatagttacattgtctatggtccccttgctaacggagcaacaaccttaatgtttgagggaattccaacttatcccgatgcatcgcggttttggcaagtttgtgaaaaacataaagtaaaccagttctatactgcaccaactgctattcgtgcgctaatgggccaaggtaataaatatgtcgaaaaatgt

SEQ ID NO: 309415 - DNA, 847 bp, Unknown
  Bacterial polypeptide expressing nucleotide sequence isolated from the Sargasso Sea
tctgtcgagcctgcgcaccctgttcctcgccggcgaaccgctcgacgaaccgaccgcgagctggatcgccggtgcgctcggcaagcccgtgatcgacaactactggcaaaccgaaaccggctggccgatgctggcgattccgcgcggcgtcgaagccttgcccaccaagttcggctcgccgggcgtaccgtcggcgggtttcaatctgaccttgcgcaacgaactgacgggcgagccctgcccgcctggcgaaaaaggcgtgctcgcgctgggctacccgctgccgccgggctgcatgtccacggtatggggcgacgacaagcgatttatcagcacgtactggtcgagcgtgccgaaccagcaggtctactcgacctttgactggggtattcaggacggagacggctacgtcacgatcctcggccgcacggacgacgtgatcaatgttgccggccatcggctcggcacgcgcgagatcgaagaagcgttgtcgagccacgcggcggtcgcggaagtggccgtggtcggcgtgaacgacgcgctcaaaggtcaggcggcgatggccttcgtcgtactgcgcgacccgcaggcttacccggacgacaaggcgcgagccaagctggaaaccgaactcaccgcgaccgtcgaccgccatctcggcgcgattgcgcggccagcgcgcgtagtggtggtgtcgatgctgccgaagacgcgctccggcaagttgctacgccgtgcgattgcggcgctggcggaaggccgcgagccgggcgatctgccgacgatcgaggatccgtccgctttgcagcaggtgcgcgaggcactgggagattcaacgaagcactag

SEQ ID NO: 309416 - DNA, 940 bp, Unknown
  Bacterial polypeptide expressing nucleotide sequence isolated from the Sargasso Sea
aatgacagaaaagttgattgagtcgatattgaatgaatcaagaagctttgctccttcaaaaaagtttatcaagcaagccaatattaataacgaagaggcggaaagactaaaggaagaagtttcacacaatcacatcgaatattgggctaacttagctaggacacatttgcattggtttctcccatttaacaacatactggatgaatcaaacgcacctaattatgaatggttcaatgacggagagatcaacgcttcttttaattcactggatataaatgccaataaaaacccagaaaaaactgcgattatttttgaaacagaggatggaaactctgagcgcatcacatacaaagatcttcttttaagaacctctcaatttgccaatggcctaaagaagcttggcgtagtgccgatggatagggttgtgatatatatgcccatgtgcccagaggctgtgattgcgatgcaggcatgcgcaagaattggcgcaatacactctgttgtttttggtggtttttcatcaaatgcactcaaggacaggatagaggatgcccaatcaaagattgtgattactgctgacggagcatacagaggtggaagcgttattccgcttaagcaagcaacggatgaggcggtgacaaactcttcgcacaaagtaaaaaatgttgtggtttttgaaagaacaggagaaaaaatagaatttgatcaagaaagagacatttggtggacagacctgatctcagattgtccttctcactgtgatccagaaccccttaatgctgaacacccattgtttatactctacacctcaggttccacaggcaaacccaaaggaattcaacactccaccgcgggatatattttgcacgcaaaaacgactttttcttgggtatttgatatcaaggaagatgatgttttctggtgtactgcagatgtgggc

SEQ ID NO: 309417 - DNA, 1992 bp, Unknown
  Bacterial polypeptide expressing nucleotide sequence isolated from the Sargasso Sea
tcttgcaagtgcgtttcattacatctcaatttacttttacatttagtttacctatcttaatgaaaatgaaaaaatattctgttccaaaaaatttcaactcatccattgggcataataatctagataattatcaatctttaagaaagaatgctaagcaagattcaaactcttattgggagtctgttgcagagcgtattgattggtttgataagtggacaactatcaacaatacagattattctaaagcgcatattgagtggttttcaaatggaaaactaaatgcttcctataattgcatagataggcatattgaaaatggcttaggagaaaaaatagcccttatttggcaatcaaatgatccaactatctcaacaaatgtgtcgtataatgaattattgaaaaaagtttcattatttgccaatggattaaaacgaaccggaatcaataaaggagatcgagtatgcatttacatgcaaatgattccagaggcaattatagcgatgcttgcctgtgctagaattggagcagtacattcagtggtatttggagcattctctagcgatgcattaaaaaacagaatcaatgattctgagtgtaagctacttattactcaagataatggagtaagaggattaaaatttgatattccaatgaaagaaaatgcagataaaattgcagatgaatgcccttctttaaaaacagtagttatggttgaacgttctgaaaatgacatgtttatgaaagaaggaagagatattacatggaatcaatttattgatggttgctcaagtgaatgtcctcctgaagtaatggatgcagaagacccattatttattttatatacttcaggttcaactggaaaaccaaaaggggtaatgcatacaacaggaggatatcttgtctatgcttctcatacgcatgaactagtctttgattatcatcaagatgacgtatattggtgcactgctgatatcggttggattacaggtcattcatatattgtctatggacccttatcaaatgcagcaactcaagtaatatttgaaggggttccaaattatccagattttggaagattttggcaaattgttgaacagcacaaaatcaatgtattctatacagctccaactgcattgcgagcattaatgaaagaaggagatgactgggtaacaaaatatgatttatctagcttaaaagtgttgggaacagttggtgaacctattaaatctccagaatggcattggtattttaacgttataggtaatgaaaaatgtcctattgttgatacatggtggcagactgagactggaggaattttaatgtctccaattcctggatgcgttccaacaaaaccaggatcagccacacttccactgccaggtattataccagaaattttagatgaagaaggaaaagtaataacagaaagaaatactactggctatttagttatgacacaatcctggcctggacaaatgagaacagtgtatggtgatcatcaacgattcattgatacgtatttttctcaagcaccaggaaattattttactggagatggagcttatattgatgatgatggatatttttggattactggaagagtagatgatgtattaaatgtatctggacacagaattggtactgctgaagtggagggagctattggtgctgcaagtggtgtagcagaagctgcagtcattggatataatcatgaaatcaaaggagagggtatttatgcttttgttacgctgatgacaggagttgattcatcggaagaaattaaaaaagatattttggataccgtcaccaaaattattggcccacatgcaaagcctagcgttattcaattttgttcaggacttcccaaaacacgttctggaaaaataatgagaagaattctaaagaaaattgctcaaaatgaaactaaagatttgggtgatatctcaacactagcagatccaagtgttatagatagtttattagaaaagtaag

SEQ ID NO: 309418 - DNA, 1169 bp, Unknown
  Bacterial polypeptide expressing nucleotide sequence isolated from the Sargasso Sea
aatgtcagaaaaaattgaaaatctacttggggaaaatagaacctttgatccaccttcaagtattgttgaaaacgcaaacgctactaaagaatggtttgatttagctgaggaagacagattagcctattggcaaaaacaggcccttgagagaattacttggtataaagagccaaccgaaattttagatgattctaacgcacctttttatcaatggtttaaagacggagaattaaatctttcttacaactgtctagatcgtcatttagaaacagatggagacagagttgcattttactgggagggagaacctggagacactcaagagattacctatcaggatctttatgagagagtttgtaaattatccaatggcttaaaagaattaggagtcaaaaaaggggatagaatagcaatttatctcggcatgactccagagatcgtaatttcaatgttggcatgcgcaagaataggcgctgttcattcagttgtttttggtggtttctctgctgaagcattggctgatcgtataaatgatgcagaagcaaaggtagttattaccgcagatggtgcctggagaaggggagatatcgtccctttaaaaaagaatgtagatgattctttaaaactaacagaccatattgaaagtgttgtagttgtaaaaagaacgaataatgacgtagatatggttgagggattagattattggtatcacgatttagtagataaacaagatgcaacatgtgaaccagaggtcatgaatgcagaagatatgctttacatactctatacatctggcactaccgcaaaaccaaagggaatagtacacacacaggccggataccttaccggagtaactaccacacattcggcagtttttgatgtaaaagaggatgatatttactggtgtgctgctgattgtgggtgggtaactggtcatagctatattgtctatggccctcttgctaataagacaacgagtgttatgtatgaaggagcaccaaacgctccagatgaaaaaagattgtggagtattgttgaaaaatataaagtaaatattttttacacagctccaactgcaataagagcttttatgaagtggggagtagaacaccctcaagcacatgatttatcttctctaaggttattaggaacagttggagagccaatca

SEQ ID NO: 309419 - DNA, 1444 bp, Unknown
  Bacterial polypeptide expressing nucleotide sequence isolated from the Sargasso Sea
aatgtttgcttgtatgagaataggggccattcattctgttgtttttggagggttctcaccagaggcaatttcatcgagaattcttgatgctgattgcgaatatgtaattactgcagatgaaggaattagaggaggcaaaacaatccctcttaagttcagcgtagataaagcattagaaaaatgtccgaaaatcaaaaaagtgatagtttttcaatacacaaaaacagatgttaattggaataataaattagatatttcttatgaggaattagttactaatcaatcaatagaatgtgaatgtactgaattaaaagctgaagacccttcatttattctttacacttctggctcaacaggaaaacctaaaggagtactacatacaactgcaggctaccttttaggtgcaaatctttcatttaaatatatttttggaattagagatgatgatatacattggtgtactgcagacgtaggctggataacaggtcatacttatatcctttatggacctttatcaaatggaattacaacagtaatgtttgaaggagttccgacttatccagatccctcaaggttttggagagtatgtgatcaacacaaagtaaatattttttatactgcacctactgcaataagagcactcattgcacacggtgacaagtaccttgaaagtacatctcgagattcaataagagttctagggacagttggggagcctataaatccagatgtttgggaatggtattatcaaaaagtaggcaaaagcaattgtgaagtagtagatacttggtggcaaactgaaactggctcagttttgatatcacctattgcaggtgttactccaaaaaaacctggttcagcaactttaccattttttggggtaaagccttcactagtagatagcgatggaaaagagcttgaaggtgatgcaaagggcaatctctgcatagattcatcttggccaagtcaaattagaactgtatatggcgatcataaaagaatgaccgatacatactttagtcaatacgaaggaaagtactttactggtgatggtgctaaaagagataaagagggctgctattgggttactggaagagttgatgatgtcttgaatgtttcagggcacagaattggaactgcagaagttgaaagtgcaatcgtaaatcatgttgatgttgctgaagcagcagttgtagggatagaacacgacataaaaggccaggcaatatatgcttatgtaattttaaaagataatgataaagataagaaaataattaactttgaaattcttgaggaagtttctaaaataatagggaaaattgctaagccagaggttatacaatttacgagagacttgcctaaaactagatcgggaaaaattatgagaagaattttgagaaaaatagcaaataatgaatttgaaaatttaggcgatacaacaaca

SEQ ID NO: 309420 - DNA, 896 bp, Unknown
  Bacterial polypeptide expressing nucleotide sequence isolated from the Sargasso Sea
tattttttatactgcaccaactgcaataagagcatttatgaagtctgggcgtgaaatacctgataaatataatttggaaagtcttagacttttgggcacagttggagaaccaattaatcctgaagcatggatgtggtacaaggatgttattggtaaagataaatgccctattgttgatacttggtggcaaactgagactggtggtgtaatgataagtcccttgcctggtgtcgttgctacaaagccaggttcagctactttccctctgccaggaatcgaagttgaaattgtcgataagaatggagataaggttgaggagaacgagggtggctatttaattattaagaaaccttggccaggaatgatgagaacaattcacggaaactcagagagatatttggagagttattgggaatatatttcctttaaaggtgaaaaaaatgtttattttgctggagatggagcacgcattgatgaagatggatatatatggattatgggaagagttgatgatgtcataagtgtttcaggacatcggttaggaacaatggaaatagaatctgctttggtaagccataaatcagttgcagagtctgcagtcgttggcaaaaaagatgacttaaaaggtgaagttatagtcgcttttgtatctttagagaaagacgtgaacggttcttcagaattagtagaggatctaaagaaacatgttgtcaatgaaattggaattatcgcaaagcctgaaaagattataatttccgactctcttcctaaaacacgtagtggaaaaattatgaggagaattttaagatctttggctgctggagaaaaaattagcggtgatataagtactcttgaagatagttctgttttggagaagttgaaagaattatcctaat

SEQ ID NO: 309421 - DNA, 832 bp, Unknown
  Bacterial polypeptide expressing nucleotide sequence isolated from the Sargasso Sea
aaaaaaaacatctagaaaatcacttaaacttttaggaactgtaggagaaccaataaatccagaagcttggatgtggtattataaaactgtgggtaattctaaatgcccaattgtagatacatggtggcaaacggaaactggaggtataatgattgctcctcaaacaggtgctattcctcttaaaccggggtctgcaacaaaacctttctatggaataaagccggtccttgttgataaaaacggtaaagaaattaaaggagctggagaaggaagattatgtatagctcaatcatggcctggccaaatgagaacagtatatggagaccatcaaagatttatagacacatatttttctcaatttaacggaaaatatttcacaggtgatggatgccgaagagataaagatggatattactggattactggtcgagtagatgatgtgattattgtttctggacacaacctagggactgctgaaattgaaagtgcatttgttgctcatccaaaagtagcagaagctgctgttgttggttatcctcatgatattaaaggcaatggtttatattgttatgtaaccttgaatgcaggagaaatagaaacaggcgaacttgaaagagatttaaaactttgggttagaaaacaaattggacctttagcgactccagaccttattcattttactccagggcttcctaaaacaagatcaggaaaaataatgagaagaattctaagaaagattgctgctaatgaacatggtcaattaggggatacaactactctggcagatcctagtgtagttgatagtttggttgataatagaaaaaatatttaa

SEQ ID NO: 309422 - DNA, 814 bp, Unknown
  Bacterial polypeptide expressing nucleotide sequence isolated from the Sargasso Sea
attgtctggaaaataccgtcaaatctatgattcgtctataaagagtaaggagaatttctggaaagaagtctcggaagatattttttggtacaaaaaaccaacaaaaattctgaattcctccaacccaccattttataaatggtttgaagatgggataaccaacacctgttacaacgcgctagattttcatatcgataaaggtagaggcgataagactgcaattatttatgatagcccaattacaggtacaaaatacaaattaacatacaaagaattaagagaaaaagtttctgtatttgccggcgctttaaaaaatcaaggaatttcaaaaggagatagagttataatttatatgccaatgattcctcaggcagttgttgctatgcttgcttgtggaagaataggagctattcattccgtagtatttggaggttttgctgcaaatgaattagcaagtaggatagatgactcaaaagcaaaaataattatttctgcgtcttgtggctatgaacctggaagaactgtacattataaacctcttttaaataaagcaattgaaatagcaaatcataaacctgaaaaatgtattatttggcaaagagaaaaagataaagctgatctagatcctaaaatagatattgattggatggatgctcttaaagaagcgaaacccactgaatgtgaaaaaatgaattctaatgattatgcttacatactttatacatctggaacaacaggaactcctaaagggaatcgtaagagacattggtggtcatattgttgctttgaaatggacaatgaaaaacatctataa

SEQ ID NO: 309423 - DNA, 1267 bp, Unknown
  Bacterial polypeptide expressing nucleotide sequence isolated from the Sargasso Sea
tatggtcaacgaacgcgatatagattggacacacgcaatgcaaaccgcacaggcggcagatccaacacctttaaatggcaacgatccactttatattttatatacttcaggtacaacaggcgccccaaagggtgttgtacgtgaaaatggcgggcacgccgtagcgatgaactacagtatgaaaactgtttacggtatggagccaggcgaggtattttgggccgcctcagatattggctgggtagttgggcactcttatattgtgtatgcaccattaatgtaccgatgtgcaaccgtattatatgagggcaaacctgtgcgcactcccgacgccactgctttttggcgagtagtggaagaatataaagtaagcgccttatttagtgcccccacagcatttagagcaatcaaaaaagaagatcctaatgctgaaggctttaaaaaatataatacctctagtttaaaacgattatttttagcaggcgaacgcctcgatccgcccacatacaattggctaaaagagaaaactcaacttccggtactcgatcattggtggcaaaccgaaacaggctgggccattgcgtgtaatccagtaggaatagaaacattaacaaccaaacctggcagttcaaccgtacctacaccggggtttgatgttcgtatactcgacatggacggtaatgaatgcgcagctaacgaacaaggggccgtagttataaaactacctttaccacccggatgcttaccctctatttggcaagacacagcccgatttaaagccagttatttaagtgaatacgagggctactacctctctggcgatggcggatatatagatgaagacggctacttgttcataatgggccgcactgatgacgttataaatgttgcaggccacagactttctaccggcgaaatggaagaaattgtagcggctcatcctgcggttgccgaatgcgctgtatttggtgttaacgacccactaaaaggccagctcccaatgggcatgattgtacttaaaaatgactttacagggtcaagcgaagaagtcgaaaaagcacttgttgcctcagtgcgcaatcaaattggcgccatagcgtgtttaaaaaatatagttagcgtagagcgcttacctaaaactcgttccggaaaaatactacgtaaaaatttacgccaacttattgatggcgacgaactacaaataccttcaaccatagacgacgcgagtatttttgaagaaataaaccaacaacttactatgcgttag

SEQ ID NO: 309424 - DNA, 1017 bp, Unknown
  Bacterial polypeptide expressing nucleotide sequence isolated from the Sargasso Sea
aatgccaaaaaaaaagaaatcaaaaaagaaaaaaactaaaaggacaaagaaaaaaaaatcttcaaaaaaaagaagaaaaataaaaagagtctcaaaaactaaaagatctacagctaaaagatctgaaaaaaaaaatatcgataaatcatcatctaacgatcaagtaattaaaactaaacctgaatgggttaaaaggagtttagcaaataaagcccaatatcaaaaaaaatattctgattctattaaaaataataattcattttggaaaaaagaaggaaagagaattacttggataaaaccttacaaaaaaattaaagatgtcaaatatagtaaagatgaagtaagaattaaatggtttgaagatggtactttaaacgcatctgcaaactgtattgatcgtcatttaaaagataaaaaagataaaactgcaattatatgggtaggggatgatccaaaagatactcaaaaaatttcttataaacaattacatcaaaaagtttcaaaagccgcaaatggactaaaaaaactagggatacaaaaaggtgaccgtgtcactatttatctgacgatgatacctgaattagcaatactgatgttagcttgtgcaagaataggtgcggtccactcaataatttttggaggtttctctgcagaatcaatttcaggaagagtgaatgattgtaaatcagaatatataattactgctgatgagggagtaagaggaggcaaaactattcctctaaaagcaacgacagatgaagctttatctaactgtccagatgttaaaaaatgtattgtagtaaagagaactggtaattatgtatattgggatcaagatcgagatgtctggtatcacgacctaattaaggatgtaccaaattattgtgagcctgaggaaatgaatgcagaggatcctttgtttattctctatacatcaggatcaactggaaagcctaaaggagtattacataccactggaggatatatggtttatgcttctatgactcatcaatatat

SEQ ID NO: 309425 - DNA, 1354 bp, Unknown
  Bacterial polypeptide expressing nucleotide sequence isolated from the Sargasso Sea
gctagaataggtgcagttcattccataatatttggaggtttttcaccagatagtatttcaggcagaattaatgattgcgaatctgattatgtaatcactgcagatgaaggtgtaagaggtggcaaaacaattcctttgaaatctattacagatgaggctttacagagctgtccaaatgtaaaaaaatgtatcgtagtaaagagaacagggaccaaaaaaattgattggtttaatgatcgtgatgtttggtatcataaaatgacaagtaaagtgtcagcaaaatgtgagcctgaggaaatgaatgctgaggatccattattcattctttacacatctggttcaactgggaaaccaaaaggtgtgctacatacaactggtgggtacatagtttatgcatcaatgactcaccaatatatttttaattataaaccaaaagatatttactggtgcacagctgatataggttgggttacgggacacagttatattatttatggtccacttgctaatggagcaactactatcatgtttgaaggaatacctacttatcctgatacatctagatggtggcaaatagttgataaatataaagttaatattttttatacggctccaacagcaattagagctttaatgagggaaggtgataaacctgtaaagaaaacatctagaaaaactttaaaacttttaggtactgttggtgaaccaattaatcctgaagcttgggaatggtattacaaaactgttggtgacagtagatgccctatcgttgatacttggtggcaaacagaaacaggtggaattttgatcagtcctcaaactggagctatagatttaaaacctggatctgcgaccaaaccattttatggaattaaaccagagatcctagataaagatggcaaggttttgaaaggggaagcacaaggtagactttgtatttcacaatcgtggcctggacaaatgagaagtgtctatggtgaccatcaaagatttatagatacttatttttcacaatttgatgggaaatattttacaggtgatggctgcagaagagacaaggatggatactattggattacaggaagagtagatgatgtaattattgtttctggacataatttaggtactgcagaaattgagagtgcgtttgtagctcatccaaaagtggctgaagcagcagtggttggttatcctcatgatataaaaggaaacgggctttactgttatgtaactttaaatgctggagaaaaaagtactcttgatttagagagagatttaaagctttgggttaggaaacaaattggtccaatagcaactccggacctaattcaattgctccaggactccaaagaca

SEQ ID NO: 309426 - DNA, 425 bp, Unknown
  Bacterial polypeptide expressing nucleotide sequence isolated from the Sargasso Sea
ttattactggatcactggtcgtgtcgatgatgtaattattgtttcatgtcataacttaggaacagctgaaattgaaagtgcttttgttgctcatccaaaagtagctgaagcagctgtggttggttatccccatgatattaaaggtaatggattatattgttatgtaaccttgaatgcaggagaaaatgaaactggtgaacttgagagagatcttaaactttgggtgagaaaacaaattggacctcttgcaacccctgatctaattcattttacaccgggtcttcccaaaacaagatcaggaaaaataatgagaaggattttaagaaagattgctgcaaatgagcatggtcaattaggggacacgactactctagcagatccaagtgttgttgatagtttagttgaaaatagaaaaaatatttaaa

SEQ ID NO: 309427 - DNA, 852 bp, Unknown
  Bacterial polypeptide expressing nucleotide sequence isolated from the Sargasso Sea
ggttgggcgacgaacctgtaaataaatgtgatttatcatctctgagaattttaggtagtgttggagaaccaattaaccctgaggcatggaaatggtaccatgaaatagttggaaaaaaaaaatgtcctgtaattgatacctggtggcaaactgaaactggaggaattttaatatcacctattagtggaaccactcctcttaaacccggttcagccacacttcctctctttggagtaactccattgatagtcgataatgatggaaatgaattaaaaggagcctgtgagggtaacttatgtattaaaacatcttggccaggaatgatgaggactgtttatagagaccacaaaagatttagagatacttatttttcttcttttaaaggaaaatattttacaggtgatggatgtaaaagagatgaggatggttactattggattaccggcagagtagacgatgttatcaatgtatccggacatcgattgggtactgctgaagttgaaagtgctctggtattacataaaaatgtgtctgaagccgctgttgtcggatttcctcatgacatcaaaggtcaaggtatctatgcatatgtaactttaatgacaggacaagagtacaatgaaagtttaaaaaaagaacttatttcttgggtaaggtccgtgattggtccaatagccgcacctgatgttatacaatgggcgccaaatctccccaaaacaaggtcaggaaaaataatgagaagaatattaagaaaagttgcctgtaaggaagaagaatctattggcgatacatcaaccctaaatgatccaaacgtagttagtgaattggttaataatagaggaaaaaactaaa

SEQ ID NO: 309428 - DNA, 1195 bp, Unknown
  Bacterial polypeptide expressing nucleotide sequence isolated from the Sargasso Sea
aatgaacgcagaggacatgttatatatcctctatacatcaggaacaacagctaagccaaaaggaatcgtccacacacaggctggatatcttactggtgttactacaacacattcggcagtatttgatgtaaaggaagatgacatctattggtgtgccgcagactgtggttgggtaacaggtcatagttatattgtgtacggacctttagcaaacaaaacaacaagcgttatgtatgagggtgcaccaaacgcaccagatgaaaaaagactttggagcatagttgaaaaatataaagtaaatatattttacactgccccaactgcaattagagctttcatgaagtggggagtcgaacatccccaagcacatgacttaacgtcactcagattgttgggtactgttggggagccaattaacccagaagcctggatgtggtaccacgaaaacataggaaatgaatcctgtgcaattgtagatacatggtggcagacagagactggttcaataatgattacacccctgccagggataactagtactaaaccagggtcagcatgtggtccaatgccaggcatagatgcagttgttgttgatgaaaatgggaacgaagtctcaaaaggtgagggtggatatttagcaatcaaaacaccttggccatcgatgcttagaacagtgtttggagatgagaaaagatatattgacacctattggtcaaagtatgatggtatgtattttgcaggagatggagcaaaatatgatgatgatggatatttttggcttctcggaagagttgatgacgtgatgaatatatctggacatagaatttcaactgctgaagtagaaagcgcacttgttgcacacgaatcggttgctgaggcagcagtaataggtagagctgatgagatttctggagaagctattgctgcattcgtaacattaatcggtggttttgagggcaatgaagatcttatatccactcttagacaacatgtgagcgataaaattggtccgattgctaaacctaaaagtattgtcattacaaacgatcttccaaaaacaagaagcggaaaaattatgagaagattgttgaaagatatttctgaagaaagaaaactaggagatgtaaccacattggcaaatgcggatatagtttctgagttacaaacaagatcatctgaatcaagcgatgaatga

SEQ ID NO: 309429 - DNA, 667 bp, Unknown
  Bacterial polypeptide expressing nucleotide sequence isolated from the Sargasso Sea
gttacaacaaccaaaccaggatcagccacacatgccatcccaggagtcgtggtagaagtcgtagatgacgctggcaacaaagttgaacgtggaggcggctatctaacaatcactgaaccgtggccatcaatgcttcgaggtatttggggagacccggaaagatacaaagaaacatattggtccgaataccccgatcgatactttgctggtgacggcgccaaaatcgacgatgacggatacttatggctcctaggtcgagttgatgacgttatgaacgtttcgggtcatcgcatctccaccactgaggtggaatcagcactcgtcgaccacccttcagtagcagaagcggcggtagttggtgccacagatgacaccaccggtcaagcgatagttggatattgcattttgagaggaggcaacgaaccaagtgacgagctgcgcgaagagataaggcagcacgttgctaccaaactcggtgccatcgccagacctaaagctgtggtgcttgttcctgatctacccaaaacccgatcaggaaaaatcatgagaaggctgcttcgtgatgtcgccgaaggaagaaagctcggcgacaccacaaccttggccgatgaaagcgttgttgatgagattcgtgatcgcgccgccgaagcacctcaggaggactgac

SEQ ID NO: 309430 - DNA, 1460 bp, Unknown
  Bacterial polypeptide expressing nucleotide sequence isolated from the Sargasso Sea
agtatttggaggattttctccagagtccctcaaggacagaattttagactcagactgtgagagtgtgattactgcagatgaaggactgagaggttctaaaaagatacctctaaaaaataatgtagatacggctttagaagactgcccaaatgtacactcagtttttgttgtaaaaagaactgatgcggacgtggattggaatgataagagggatgttgattatcaagagataattgattcagttccatcagaatgcgaagccgaaccaatggattctgaagatccattatttattttgtacacctctggatctactgggaaacctaaaggtgttcttcatacaactggaggctatcttttgcaggcatccatatctcacaaattagtgtttgattataaagatgatgaaatctattggtgtacagcagatgttgggtgggtaacgggtcactcttatattgtttatggccctcttgccaatgccgctacaaccttaatgtttgaaggaattccaacttaccctaaagcatctagattctgggaagtcatagacaaacataaagttaatattttttacaccgctccaacagctcttagatccttaatggcgcaaggagatgaatacgtgaaatcttcttctagaaattccttgagagttcttggtactgttggtgagcctataaatcctgaagcttgggagtggtattacaaagtggtaggcgattctaaatgccctatagttgatacttggtggcaaactgagacaggagcaatgatgataacccctttagctggatcaaccccacttaaacctggtagtgctactaaaccttttctgggtattgagcctgcacttcttgatgaagatggaaaagagatagaaggagaaggatctggaaatcttgtcattaaatcaacatggccctcacaaattagatccgtttatggagatcaccaaagatgcatagaaacttattactcgatgtatcctggttattacacaactggagatggcgctagaagagataaagatggatattattggataacaggtagagtagatgacgttttaaatgtttctggacatagattaggtaccgcagaagtagagagcgcattggttttacatgaaacagttgcagaagctgcggtagttggatatgagcacgaaataaaaggtcaaggcatatattgctatgtaactctaatgttgggtgaagatcctagtgaagatcttaagaatgatctaattcaattagttgcaaaagaaattggtgccatagctaaaccagatataattcaatgggctcctggattaccaaagacaagatcaggtaaaatcatgagaagaatacttaggaaaatagcatccaatgaagttaacgacctaggtgatactactacactagctgatccatcggttgtggaagagttaatacataatagagagaataaataat

SEQ ID NO: 309431 - DNA, 492 bp, Unknown
  Bacterial polypeptide expressing nucleotide sequence isolated from the Sargasso Sea
gacacatatttttctcatttgatggtaaatattttacaggagatggatgcagaagagataaagatggatattactggatcacaggaagagttgatgatgtaattattgtttcaggtcacaatcttggaactgccgaaatagaaagtgcgtttgttgcccatccaaaagtagctgaggctgctgttgttggatatcctcacgatattaaaggtaatggtttgtattgttatgtaactttaaatgtaggagaaaaatcgactttagatttagagagagatttaaaactttgggttagaaaacaaattggtccgatagctactccagatttaatacaattttcacccggacttccaaagactagatcaggcaagattatgagaagaattctaagaaaaattgcagctaatgaacatgatcaattaggtgatacaactacattggcagatccaagtgtagtaaaaagtttagttgaaaatagaaaaaatacttaaa

SEQ ID NO: 309432 - DNA, 1024 bp, Unknown
  Bacterial polypeptide expressing nucleotide sequence isolated from the Sargasso Sea
tttgcaaagcaaatataaggaaatatacgatttttctataggcaaaaaagagaatttttggaaggaagtcgctgaaaacatattttggtataaaaaaccatcaaaaatactaaattcaagcaaccctcctttttacaaatggtatgaagatggtacaacaaacacttgttacaatgctatagactttcacattgataacggtagaggtgaaaagctagcaataatttacgacagtcctataacaggctcaaaaaaaacatttacatataaccagcttaaagaaaaagtatcattgtttgcgggtgctttaaagaatcagggcattaaaaaaggtgatagagtgattatttatatgccgatgatacctgaagcagtaattgcaatgttggcatgcggaaggataggagcaattcattcagttgtgtttggtggatttgcagcaaatgaattggctagtagaattgatgactcaaaagcaaaaataattgtctcagcttcatgcggttatgaaccaggtcgagttgttgaatacaaacctctgcttaataaagctttggagatagctaagcacaagcctaacaaatgtataatttttcagagagagaaaaataaagctgcattagactccaaaatggacattacttgggaagactcacttaaaaatgcaaaacccgaaaattgtgttgaaatgaatgctaatgactacgcatatattttatatacatcaggtacaacaggcttacctaaaggtatcgtcagagatattggtgggcacattgttgcgttaaaatggactatgaaaaatatttataacattgaccaagacgatgtatggtggtctgctagtgatattggatggatagtgggtcattcatatatagtttatgcacctttattttacggttgtacaacaatactttttgagggaaaacctgttgggacacctgatgctggagttttttggagagtaatttcagaacataaagtaaaatcgttatttacagctccgaccgctattagagca

SEQ ID NO: 309433 - DNA, 898 bp, Unknown
  Bacterial polypeptide expressing nucleotide sequence isolated from the Sargasso Sea
atgcctagaaaaaaaaaagttaaaaaaaaagtaatctctaaaaaacctaaagagacaatttataaaactaagaaagagtggataagtaaagccaccgttaataaatctcaatataccaaaaaatataacgagtcgattaaagacaacgatggattttggaaaaaagagggaaaaagaattaattggataaaaccttataaaaaaattaaagacgttaaatatagtaaagatgatgttcatataaaatggttctatgatggtactttaaatgcctcagcgaattgcattgataggcatcttaaaaataatgctaataagactgcaattatatgggtaggagacgatcctaaagttcaaaaaaaaattacttataaagaacttcataaagaggtttcaaaagcagcaaatggattgaaaaatttgggagttcaaaagggtgatagagtaactatttatcttaccatgataccagaacttgcctacacaatgcttgcatgtgcaagaataggtgcagttcactccataatatttggaggtttttcaccagatagtatttcaggtagaattaatgattgcgaatctgattatgtaataactgcagatgagggtgtaagaggaggcaaaacaatccctttaaaatctattacagatgaagctttgcaaagctgtcccaacgtaaaaaaatgtatcgtcgtgaagagaacaggcaccaaaaaaattgattggtacaatgatcgtgatgtttggtatcacaaaatgacaagtaaagtctcagcaaaatgtgagcctgaagaaatgaatgctgaagatccattattcattctttacacatctggttcaactgggaaaccaaaaggtgtgctacatacaactggtggatatatggtttatgcatcaa

SEQ ID NO: 309434 - DNA, 1090 bp, Unknown
  Bacterial polypeptide expressing nucleotide sequence isolated from the Sargasso Sea
ttcggaggtttttctgcagaagctctagctgacagaattaatgatgccgaagcaaaagttgtaattacagcagatggtgcatggagaaggggagacattgttcctctaaaacagaatgtggatgactccctaaagcttaccgatcatatagagagcgtaatagttgtaaagagaactgagaatgaagtaacaatggttgatggcagagactactggtatagcgaacttgtagataagcaggaagctgattgtgaacctgaagtaatgaacgcagaggacatgttatatatcctctatacatcaggtacaacagctaagccaaaaggaatcgtccacacacaggctggatatcttactggtgttactacaacacattccgcagtatttgatgtaaaggaagatgacatctattggtgtgccgcagactgtggttgggtaacaggtcatagttacattgtgtatggtcctttagcaaacaaaacaacaagtgttatgtatgagggtgcaccaaacgcaccagatgaaaaaagattatggagtattgttgaaaaatataaagtaaatatattttacactgccccaactgcaattagagctttcatgaagtggggagtcgaacatccccaagcacatgacctaacgtcactcagattgttaggtactgttggagagccaattaatccagaagcctggatgtggtatcacgaaaacataggaaatgaatcctgtgcaattgtagatacatggtggcagacggagactggttcaataatgattacaccactaccaggcattactagtacaaaaccggggtcagcatgtggtccaatgccaggcatagatgcagttgttgttgatgaaaatggaaatgaagtatcaaaaggtgaagggggatatttagcaataaaaacaccttggccatcaatgcttagaacagtatttggtgatgagaaaagatatatcgatacttattggtcaaagtatgacgggatgtattttgcaggagatggggcaaaatatgatgatgatggatacttctggcttctaggaagagtcgatgatgttatgaatatctccgggcatagaattt

SEQ ID NO: 309435 - DNA, 1273 bp, Unknown
  Bacterial polypeptide expressing nucleotide sequence isolated from the Sargasso Sea
tatgtttacttgggataatgatagagatgtttggtatcatgaattaatcaaagatgtttcaaatgtttgtgaaccagaggagatgagtgcagaggatcctttattcatcttatacacatctggttcaacaggaaagccaaaaggagttttgcatactacaggcggttacatggtctatgcatcaatgactcatcagtatatctttaattataaaccaaaggatatatattggtgcactgctgatattggttgggttactggacatagctatattatttatggaccattatcgaatggagctaccactatgatgtttgaaggtgttccaaattatcctgacagttcaagatggtggcagattgttgataaatataaagtgaatactttctacacagcgccaactgcaatcagagcactaatgagagaaggtgatcagccagtaaataaaacatcaagaaaatcattaaaattgttaggcactgttggagagccaataaatcctgaggcctggatgtggtattttaatacagtagggaattcaaaatgtccaattgttgatacatggtggcaaactgaaactggtggaattttaatagcaccacaaactggtgctattcctttaaagccgggttctgccactaagcctttttatggtattaagccagtcttggtagacaaggatggaaaagaaataaaaggacaaggagaaggtagattatgcatagctcaatcttggccaggtcaaatgagaactgtctatggagaccatcaaagatttatagatacttatttttctcaatttgatggtaaatattttacgggtgatggatgtagacgagataaagatggttattattggattacaggtagagttgatgatgtaataattgtatcaggacataaccttggtactgcagagatagaaagtgcatttgttgctcatcctaaagttgctgaagcagcagttgttggatatccacatgatattaaaggaaatggattatattgttatgtaactcttaatgcaggcgaatctgaaactggagatcttgaaagagaattaaaactttgggttagaaaacaaattggacctttggccactcctgatctaatacatttcacaccaggactacctaaaactagatctggaaaaattatgagaagaattttaagaaagattgctgctaatgaacatggtcaattaggtgataccaccactttagcagatccaagtgtagtagatagtttagttgataatagaaaaaatacttaa

SEQ ID NO: 309436 - DNA, 1930 bp, Unknown
  Bacterial polypeptide expressing nucleotide sequence isolated from the Sargasso Sea
atgacacaagacatttataatcctaatcccggattttcaaatccgcatataaatgatttcgatgaatatttaagtctatataaagagtcaattgagaatcctgaaaaattctttggcgatctggcaaaagaaaatatttcatggattgaggattttaaagaggtacataactctgagttccaggaaacaaaatggtttgttggaggaaaaacaaacataacgctcaactgtattgatagacaccttgaaaaaaatggcgataaggttgccttgatttgggaaggtgatgagccaggaaactctaaagaaataactttcaaagaattacactctgaggtttgcaggtttgcaaatatccttaaaacacttcaaattaaaaaaggctcaagagtttgtatttatatgccgatgattcctgaagctgcatttgcaatgtttgcatgtgcaagagttggtgcgatccactcagttgttttcggtggattttctccagaatctttaaaggatagaattttggatgctgattgtagaattgtaattactgcagatgaaggtgttagaggcggcaaaaaagttcctttaaaagataatgtcgatgaggctctaataaattgccctgatgttaagaatgtcatcgttgttaaccgaactggtggaaaaattaattggtttgaggatagagatctttggtttcatgaactaaaagataaagttgatgatgtttgcgagcctgagccgatggattctgaagatccactctttattctttatacatctggatcaacgggaaagccaaaaggtgttttacacacaacggctgggtatcttttaggagcacatatctcttttaagtatttatttggattcaatgaaaatgataaatattggtgcacagcagatgttggctggattactggacatacttatattctttatggtcccttatcaaatggggctacttcacttatgtttgaaggcgtgcctacatatccaactgcatccagatgttgggaaatatgcgatgagcatgaaataaatattttttatactgccccaaccgccataagagctttgatgtctctaggagatgaatttgttggaagtacctcgagaaaatcgattaaagttctgggtaccgtcggtgaaccaataaatcctgaggcatgggactggtattactcagttgtaggaaataaatcttgtgaagttattgatacatggtggcaaacagaaactggttcagtccttatctctccgattgcaggcattacgccaacaaaaccaggctctgcaacattaccattttttggtgtaagacctgagctgtatgatgaaaatggtattcagcagtcaggagaagcatcgggtaatctggtgattgagtcttcatggcccagtcaaattagaagtgtttataacgatcaccagagaatgattgatacttatttttcaacctatagcaatatttactttacaggtgacggtgcaaaaagggatgaagatggttacttttggattactggaagagttgatgatgttcttaatgtttctgggcataggcttggaacagctgaggttgaaagtgcgcttgttctgcatccagttgtagctgaagctgctgtggtgggctttgagcatccaataaaaggacaaggcatatatgcttttgttactttaatggtaggtgaagaattttcagataaattatcagcagaattaagaaactttgttggcaaagaaattggccctattgcaaaacctgacttaattcaaaatgctcccggtctaccaaaaactagatcaggcaagattatgagaagaatattacgtaaagttgctgaaggagatttcgaaaacttaggtgatacgacaactcttgctgagcctgctgtggtttctgatcttataaataataaaaaaagtttatgaa

SEQ ID NO: 309437 - DNA, 1729 bp, Unknown
  Bacterial polypeptide expressing nucleotide sequence isolated from the Sargasso Sea
aatgtatgaagaatctattacttctcctgaaaaattttgggaaaaacatggtaatagaattgactggatgaagccctacacaaaaattagggatgtgtcctataataaagaagatcttcatatcagatggtatgaggatggaacactaaacgctagttataattgtttagatagacatctagaaaccaaaggtaataatacagcaattatttgggaaggtgacgacccaaatgagtccaaacatattagctataatgaacttcatgaacaggtatgtaaattttctaatgtattaataaatgctggtgcaaaaaaaggtgatcgaataacaatctatatgccaatgatcccagaagcaacagttgcaatgttagcatgtactagaataggagctattcattcagttgtctttggtggtttttctccagacgctcttgctggaagaattgaggattgtaattcaacaattattattactgcggatgagggtataagaggaggaaaaacgatacctttaaaatctaatactgatgaggctatttcaaaagctaaaatgtgcaaaactacaattgtagttaaaagaacaggagctgaaattaattggatagacggtcaagatgtttggtatcatgaagaaatggaaaaagcatcagctaattgtccacccgctgaaataaatgccgaagatccaatgtttatattatatacttcaggatcgacaggtaaacctaaaggagttcttcatacaactggaggatatatggtttatgcttctatgacacatcattatgtttttgattatcaggaaaatgaaatttattggtgtacggctgatgtaggctgggtaacaggacattcttatatagtttatgggccattatcaaatggcgctactacattaatgtttgagggtgtaccaaactaccccacagtaagtagattctgggaaatagtggataaacataaagttaatatattctacactgctcctacagcaataagagcattgatggctgaaggcagtgaaccagtaaaaaaaacaagacgagacagcctgagaattttaggtagtgttggagaaccaattaatccagaagcatggaattggtataacaatgttgttggtgatggaaggtgtccagtggtggacacttggtggcaaactgaaactggagggatattaattactcctttaccaggagccaccgatacaaaaccaggttctgctacaaaacctttttttgggatattgccagtcattgttgacagtgataacaaagaattaactggagccactgaaggaaatctatgtattaatatgtcttggccaggtcaaatgaggacagtttttggtgaccaccaacgttttatagatacatatttttcaacttttcccggaagatacttttctggtgatggatgtagaagagatgaagacggatattattggataacaggaagagttgatgatgtaataaatgtatctggtcacagaatgggtacagcagaagttgagtctgctctcgtagctcacacagatgttgctgaagcagcagttgttggttacccacatgacataaagggtcaaggcatttacgcctatgttactgtgaatattgatgtaaaaacatcagaagaattattgacagaattaaaacaatgggtaagaaaagaaataggtcccattgctacaccagatttaattcaattttccccaggttcttcctaa

SEQ ID NO: 309438 - DNA, 1891 bp, Unknown
  Bacterial polypeptide expressing nucleotide sequence isolated from the Sargasso Sea
catgagctaccagaaagaatatcgtgaatccattgagaatcctgaagcattctggaggcgccaggccgaactgatcacatggtatgaaaaaccgaagtcgatcctctcccaggatgaaaagggtttttatcactggttcaagggaggaaaactcaacacgagttacctggccctcgatttccatgtggaaaacgggagggccgagcaggcggctttgatttatgattccccggtcactgaaaccgttcgaagctacacgtatcgtgaattgctggatgaagttgcccgttttgccggggtgttacagaaccaaggggttgaaaaaggagaccgggtcatcatctacatgccgatgattccggaagcagtggtggctattttggcttgtgccaggcttggagcgattcactcggtggtttttggaggcttcgccccgaatgaactggcgatccgtattgatgacgcaaaaccaaaagccctggtgacggcttcctgcgggatagaatttactaatatcattgaatacaaacctctggttgatgaagcacttcacatctccagtcaaacccctgaaatcgtcatcctgcttcaacggtcacaagcaagggcttcgatgcaggcagggagggacttcgactggaatgatctgatgtcatctgcgaatcctgctgatccggttcctgtggatgccaccgatccgctttacattctttatacttcggggaccacaggcttgccgaaaggagtgatacgggaaaacggaggccatgccgttgccctcaaatacagcatgaaagcgattttcaacaccaatcccggcgaggtttattgggcgggatccgacgttggctgggtggtgggtcactcctacattgtctatgctccgctgattcatggatgcagcaccattctttatgagggaaaaccggtccgcaccccagatgccggggcattctggagggtactggacgaacaccgggtgaacacttttttcactgccccgaccgctttcagggcagtgaaaaaggaagacccggaggcgaaactcaagcagcagtatgacatcagcaatctaagaaacctttttcttgctggagaaaggctggatcctccgacttatgattggcttgagggaatcatgcattgtccggtcatcgatcactggtggcagaccgaaacaggatggccgatgtgttccaacccgatgggcctggaaccacaaccggtgaaagttggttcagcgacttttccggttccaggctacgacatccaggtattggatgatgagggaaaggcttgtgatccagggaccacggggaatatcgtcgtcaaacttcctcttccgccaagttgttttccctcgctttggaatgacgacgagcgtttccgaaaatcctacctttcccaattccctggctattatcagacaggagacgggggaatcattgacgaagacggttatgtttttgttatgggccgggtggatgatgtgatcaacgttgccggacaccggttatccacggggcagatggaagagttgatcggttcccaccccggagtggcggaatgtgcagtggtcggaatcgatgacgaattacggggtcaggtcccagtcggttttgccgttttgaaggatggtgtggaaatgaaccaccaggatctggaaaaggaactggtctccatcatccggaaggaaatcggtgcagtggcctgcttccgaaaatccgccctggtgaaaaggcttcccaaaacccgttccggcaagatcttacgcaaaaccatccgtcagttggcaacaaccccagaggttccaattcctcccaccatcgacgatccagccattctcgatgaaatccgtgatgcgatgcagaccagtggtattgcgaaatga

SEQ ID NO: 309439 - DNA, 968 bp, Unknown
  Bacterial polypeptide expressing nucleotide sequence isolated from the Sargasso Sea
cataatgtatgaaggtattccaacttatccagatagttctagatggtggcaaataatagataaatttaaggtaaacatcttttacacagctcctacagcaattagagcgttaatgagagaaggagataaaccagtcaaaaaaacatctagaaaatcattaaaattacttggaactgttggagagcctataaaccctgaggcttggatgtggtattacaaagtagttggagattcaaaatcacctattgtagatacctggtggcaaactgagactggtggaatattaattagtcctcaaactggagctataaatttaaaacctggttcagcaactaaaccattttatggaattaaaccagtaatagttgatgaaaaaggcaataccttaaaaggagaatgtgaaggaagattatgtattgcacaatcttggcctggccaaatgagaactgtttatggtgaccatcaaagatttattgatacttatttttcacaatttgatggaaaatattttacaggtgatggatgtagaagagacaaagatggttactattggattacaggcagagtagatgatgtaattattgtttctggacataatttaggaactgctgaaattgaaagtgcttttgttgctcatccaaaagttgcagaagctgcagtagttggctatccacatgacataaagggtaatggattatattgttatgtaactttaaatgttggagaaaaagaagatggagatctagaaagagaattaaaactatgggttagaaaacaaattggtccattagctactccagactttatacatttttctccaggattacccaaaactagatctggaaaaattatgagaagaatactcagaaagattgcggctaatcaacatgaccagttaggagatacaactactcttgctgatccaagtgtagtgcaaagtttagttgataatagaaaaaatacttaaa

SEQ ID NO: 309440 - DNA, 1621 bp, Unknown
  Bacterial polypeptide expressing nucleotide sequence isolated from the Sargasso Sea
attttttggtataaaaacctttcaaaaatactcaattcatctaatcctcctttttacaagtggtttgaagacggtatcacaaacacttgttataacgctttagattttcacattgataaaggtcgtggagataaaacagctataatctacgatagtccaataactggaacaaaaagtaaattttcttacaaagaactaagggacaaagtatctgtttttgcaggtgcacttaaaaatcaaggaataagcaaaggagatagagttataatttacatgccaatgatacctgaggcagtgattgccatgttagcttgcggtagaattggagctgttcattcagttgtttttgggggctttgccgcaaatgaattagcaagcagaattgatgattcaaaagcaaaaattattgtttcagcttcttgtggatacgaacctggaagaactgttcactataaacctttgttaaataaagctattgagattgcaaaacataaaccgaacaaatgtataatttttcaaagagaaaaagacaaagcagagcttaattcaaaaatagatattacatgggaagaagctttaaaaggagctaaaccgactgaatgtgaaaaaatgagtgcaaacgattacgcctatatcctttatacatcgggaacaactggtttaccaaaagggattgtaagagatataggtggtcacatcgttgctctaaagtggactatgaaaaatatttataacataaatcctgatgatgtatggtggtcagccagcgatataggttggattgttggacactcttatattgtatatgctccattatttcatggatgcacaactattttatttgaaggaaaaccaattggaactccggatcctggtgttttttggagaataatttctgaacacaaagtaaaatctttatttactgctcctacagcaataagagcaatcaaaaaagaagatcctgacggaaaattttttaaaaaatatgatttatctaaatttgacactttgtttttagctggagaacgtgcggatcctgatacgattaaatggtttgaaaagctttcaaatgcccctgtaatcgatcactggtggcaaactgaaacaagctgggctattagtgcaaattgtgctgggatagaaaaatttccaactaaatatggttctgcttttaagcctgttcccggttatgatttaaaagttcttaatagtgaaggcaaagaagctaaaagaggtcaaatgggagatatagttgttaagttgcctttacctccaggaacttttccaactttgtggaatgctgatgaaagatataaaaaagtttatatgtcaacttatcctggttactatcaaacttatgatgccggacatattgacgaagacggttatgtttggatcatgtcaagaacggacgatatcataaatgttgctggtcatagattgtctacaggagcaatagaagaagttttggcagagcacaaaaatgttgctgagtgtgctgtaataggaattgcagataaattaaaaggtcagctccctattggactgatagctttaaaagctggcgttaatcgagacaacaaagaaaatacaaaagaatgtgtagcgttagttcgaagaa

SEQ ID NO: 309441 - DNA, 567 bp, Unknown
  Bacterial polypeptide expressing nucleotide sequence isolated from the Sargasso Sea
tatgagcaaaaattttaaatctatttaccaagattcgatcgataatcctgaagcattttggcagggagtttctgatgatattttttggtttaaaaaaccaacaaaaattcttaataaatcaaagcctcctttttacaaatggtttgaagatggagtgacaaatacatgttataatgctctcgatctccatatagatcaaggaaaaggagataagacagctttaatatacgatagccctattacaaatactaaagctaaattcacttttaaggagttaaaagacaaagtttctaaatttgcaggtgctttagttaatcaaggtgttaaaaaaggagatagggtaataatttacatgcccatgataccagaagcagtagttgcaatgctagcttgcggtagaattggagctatacattcagtagtttttggtggttttgcatcaaatgaacttgcaagtagaattgatgatagtagtgctaaagttttaattacagcctcatgtggatttgaaccaggtagaatagttgaatatcgtccacttgtggatggagcccttaagcttgcaaa

SEQ ID NO: 309442 - DNA, 1912 bp, Unknown
  Bacterial polypeptide expressing nucleotide sequence isolated from the Sargasso Sea
atgaaatttgatatcgatagttttgttaaccccaatttaaaagattttttagaataccaatctttatataatgattccgtaaaggatcctagcaatttttttcttaaacaggctttaaaagaaattgattggattaaggaaccaacgaaaggctcaacaggttctttatcttctccaaaatggtttgaagatggcatgttaaatatttcctataactgtattgatagacatgcagagaatcatccagaaaaaactgcaattatttggcaaggagatgaaagagaaaaaaatgaaaatatttcatacatacaattacaaaaacaggtatgcaaactagcaaatggtttgaaatcaataggtgtttcaaaaggagacagagtctgcatttatatgccaatggtgcctcaagcagcatatgcaatgtttgcttgcatgcgtattggcgcaattcattctgttgtatttggaggattttctcctgaagctattaaatctagaattctagatgcagattgcaattatgtgataacagcaaatgaagggataagaggtggaaaaaatattcctctcaaagatagtgtagatgaagcattgaaagattgccctaatgttaaaaaatctattgttcttaaatacactgatacagaaatctcatggaatgatgaaattgatatctggtaccatgagctagtagaccagcaagaagatttctgtgaatgtgaagaaatggcagcagaagacccttcttttattctttacacttctggctcaaccggaaaaccaaaaggcgttttacatacaactgctggatatttacttggagcaacattaacttttaagtatatttttggatattcagacggagataaatactggtgcactgctgatgttggatggataacaggacatacttatattttgtatggcccattatctaatggcgcaacaactttgatgtttgagggcgtaccaacttatccagatccttcaagattttgggaagtttgcgatcagcatgaaataaatattttttatacagctccaacagcaataagagctttgatagcaaagggcgaagaatatctagaaaactcaaaaagagattcacttaaagttctaggcacggttggggaaccaattaatccagaggtttggcaatggtattttgaaagagtgggcaaatctaaatgtgaagtagttgatacatggtggcaaactgaaactgggtcagttcttattagccctattgctggaataacgccaaaaaaacctggttcagcaacattgcctttttttggcatagagccatcaattgttgatgttaatggcacaattctcgaaggcgaagcaaaaggcaatctttgtatcaatagttcatggccaagccagatccgtactgtatacggagatcatgaaagaatgcttcagacttatttttcccagtatccagaaaaatattttacaggagatggggcaaggcgagataaagatggctattactgggttacaggaagggttgatgatgttctaaatgtatcaggacatagaattggaactgcagaagtagaaagtgccattgttaatcatcctcaagtagcagaatcagcagttgttggtgttgagcatgaaataaaaggtcaggccatatatgcttacgtcattcttagaaaaacaaaagaagatcctaataagctagagtctgagattaaagatgaagtggcaaaaattattggcaaaattgctaaacctgacttcatacactttactagagatttgccaaagactagatcaggaaaaatcatgagaagaattttacgcaaaatagcaaataatgatacagagaatcttggtgatgtcactacattggctgatccaaaaattgttgaagaattaatggagaataaagtatgaa

SEQ ID NO: 309443 - DNA, 1554 bp, Unknown
  Bacterial polypeptide expressing nucleotide sequence isolated from the Sargasso Sea
tctacatgccgatgataccagaagctgttatagcaatgcttgcatgtggaagaattggagcaatacactcagttgtctttggtggatttgcatcaaatgagttggccagtaggattgatgatagcaaagcaaagattttgattactgcctcttgtggatttgagccaggcagaacggttgagtatagacctttagttgacggagctcttaaacttgcaaaacataaagttgaaaaagtaattttctttcaaagggagggtaatgaggtgaaacttaattctccacttgagattagttgggaagagtctctaataaatgcaaaagacaaagactgtgttgaaataggagcaaatgaatttgcatacattctatatacatcaggaactacaggaattccaaaaggtatagtgagagatgttggtggtcacattgttgctctaaagtggacaatgaaaaatatttataacatcaatgaaaatgatgtttggtggtctgcaagtgatattggatggatagtaggacactcttatattgtttatgctcctttgtttaaaggatgcacaactgttttgtttgaaggtaaaccagttggaactcctgatgcaggtgttttttggagaataatttctgaatacaaaataaaatcattattcactgcacctacagcttttagagctattaaaaaagaagatccagatggaaaatttttttctaaatatgacttaagttcgtttgagtcactattcctagcaggagaaagggctgaccctgatacattaaagtgggcagaaaatcttttaaatgttcctgtgattgatcattggtggcaaaccgagactagttgggcaattagttcaaattgtactgggatagaaatgcaaaaaactaaatatggttcagcatgtaaagcagtccctggatatgatgttaaaataattaaaccagatcattcaattgctgatccaaatgaaatgggagatatagttgttaaattaccattgccacctggaacatttcctactctttggaatgcagataaaagatatcaagaaaattacatgtctaattataaaggttattatcaaacatatgatgcaggacacattgatgaagatggttacatttggattatgtctagaacagatgacatcattaatgttgctggacatagattatctactggggcaatagaagaggttttatctgaacatcaatcggttgcagaatgtgccgttcttggaattgcagataaattaaaaggacagttaccaataggtctagttgttctaaaaactggagttgaaaaggataatgatactgtctcaaaggaatgtattaaaatggttagagataaaattggaccagtagcagcttttaaagttgtcatcgtaataaaaagattacccaaaacaagatctggtaaaattttaaggggaacaattagaaaaatagctgatggggaagattataaaatgccagcgacaattgatgatccagcaattctaggtgagattactcaaagtttaattgataataaaattcttactaaataat

SEQ ID NO: 309444 - DNA, 1900 bp, Unknown
  Bacterial polypeptide expressing nucleotide sequence isolated from the Sargasso Sea
tttgtctggtaaatacgaaaaaatctatgattcgtctataaagaatagggaaaaattttggaaagaagtttctaatgatattttttggtacaaaaaaccatctaaaatacttaattcctctaatcctcctttttataaatggtttgaagatggtgttaccaatacttgctataatgccctggactttcatattgataatggcagaggcgataaaactgctataatttacgacagtccaattacaggtgttaaatacaaattatcatacaaagaacttagggaaaaagtctcagctttcgctggagctttaaaaaatcaaggtatctcaaaaggagatagaattataatttatatgccaatgatacctcaagctgttgttgccatgcttgcttgcggaagaattggggcaattcattcagtagtatttgggggttttgctgcaaatgaattagcaagtagaatagatgactcaaaggcaaaaataattatttctgcttcttgcggttatgagcctggacgaactgtgcactacaaaccgcttttaaataaagcaattgagatagcaaatcataaacctgataaatgtataattttgcaaagagaaaaggacaaagcagagcttgatccaaaaaaagacattgattggatggaagctttaaaaggagctaaacctgctgaatgcgaaaaaatgaatgcgaatgattatgcatacatcctttacacatctggaacaacaggaacaccaaaaggaatagttagagatattggtggacacatagttgctttgaaatggactatgaaaaatatttataacatagatcaagatgatgtttggtggtccgcaagtgatataggctggatagttggtcactcttatattgtttatgctcctctgttttatggttgcacaactgttttatttgaaggtaaaccagtaggaactcctgatgctggtgttttttggagaataatttcagaatataaagtaaaatcactttttactgccccgacagcaataagagcaattaaaaaagaggatcctgacggaaaatttttcaaaaaatatgatctatctaaatttgatacattgtttttagccggtgagcgtgctgacccagatacaataaagtggtttgaaaaactttcaaatgctcctgtgattgatcactggtggcaaacagaaactagttgggcaataagcgcaaattgtgcaggaatagaaaagtttccaattaaatatggttcagcttttaaaccagtacccggttatgatttaaaagttttaaatagtgaaggaaaagaaaataaagcgggtcaaatgggtgacattgtagttaaattacctttaccaccaggaacttttcccactctgtggaatgcggatgaaagatataagaaagtttatatgtcaacttacgatggatattaccaaacgtacgatgcaggtcatattgatgaagatggttacgtttggattatgtccagaacagacgatatcattaacgtagcaggacatagattgtctactggagcgattgaagaagttttagcggaacataaaaatgttgcagagtgtgctgtaataggaattgctgataaattaaaaggacaacttccaattggattaatagctttaaaagctggagttgatagagaccataaagaaattacaaaagaatgtgtagcactggtgagagagaaagttggtcctgttgctgctttcaaattagctattgttgttaaaagattgcctaaaactagatcaggaaaagttttaagaggaactgttagaaaaattgcagatggagaaacttacaaagtgccaccaactatagatgatccagcaatattagatgagataaaagaagatcttaaagacaataatgttttaaaagtctaa

SEQ ID NO: 309445 - DNA, 1340 bp, Unknown
  Bacterial polypeptide expressing nucleotide sequence isolated from the Sargasso Sea
tactgatgaagctttaatgcagtgcccagatgtaaaaaaatgtatagtcgttaaaagaactggaaattatgttcactggaataatgaacgtgatgtttggtacgaagatataattaaaaaagtttcaaatcattgtgaacctgaagaaatgaacgcagaagatcctttatttattctttatacttcaggatcaactggaaagccaaaaggggtattacatactactggtggttacatggtttatgcatcaatgactcatcaatacatttttaattataagccaaaagatatttattggtgtacggcagatattggctggataactggacacagttatatcatttatggcccactttctaatggagcaactactattatgtttgaaggaattccaacttatcctgataactctagatggtggcaaatagttgataagtttaaagtaaatatattttacactgctccaactgcaattagagcattaatgagggaaggagataaacctgtaaaaaaaacatctagaaaatcacttaaattgttaggaacagttggcgagcctataaacccagaagcctggatgtggtattataaaacagttggagactctaagtgtccaattgtagacacatggtggcaaacagaaacaggtggtatattaataagtccacaaactggtgcaatagatttgaaacctggatctgcaacaaaaccattttatggaataaaaccagttattgttgataaaaatggaaaagcacttaaaggcgagtgccaaggaagattatgtattgctcaatcctggccaggacaaatgagaacggtttatggtgaccatcaaagatttattgatacttatttttctcaatttgacggaaagtattttacaggtgatgggtgtaaaagagataaagatggttattactggattacaggaagagttgatgatgtaataattgtttcaggccataatttaggaacagctgaaatagaaagtgcatttgttgcacatccaaaagttgctgaagcagctgtagtgggatatcctcatgatatcaaagggaatggtctttactgttacgttacacttaatgctggagaaactgagactggtgatttagaaagagaattaaaactttgggttagaaaacaaatcggacctttagctacacctgacttaatacattttacacctggattacctaaaacaagatcgggtaagattatgagaagaattttaagaaaaattgcagctaacgagcacagtcaactcggcgatacaacaactctggcagatccaagtgttgttgacagtttagttgaaaatagaaaaaatatttaaa

SEQ ID NO: 309446 - DNA, 1897 bp, Unknown
  Bacterial polypeptide expressing nucleotide sequence isolated from the Sargasso Sea
tttggggaataatgattcctcaattagggcttctgcaaaaaatgattatatctcattttgggataattgcgcaaaatcattatcatggtttaagccgtggaccaaaactttacaatgggatccaccttttgcacgatggtttgtaggtggaaaaatcaatgcgtcttacaataccttggatattcatcagggttcaaaatctgaaaaaccagcaattttgtgggaaggtgaagatggaactgaccggaaaattacatacaaagagatgttcatcgaggtcaaaaaacttgcaaatgttctaaaatcattaggtgtgaaaaaaggtgaccgtgtcacaatctatcttcctatgataccagaattaccaatatccatgctcgcctgtgcccgaattggtgcaattcataccgtcgtattttctggatttagctcaaaatctctttctgacagagtggaagattctcaatcaaaaataatcatcactgctgatggcggatacaggaaaggtaagataatcaatctcaaagaaattgtagatgactctgcatcttcagtacaatttgtgaaaaatgtcattgtctatcaaagaactggtcaaaaaatacaattgaatgaaaaagatttgctttggcatgaggtaatgcaaaactcatctgaagaatgtgatgcagaaatacttgacagtactgattcattatacatcttatacacttctggtactactgggaaacctaaaggagtattacatgggattggtggttatctaactcatctttattctacatacaaatgggcatttgacataaaagataccgatgtttatttctgtaccgcggatataggatgggttacaggtcatagttatgtggtctatggtcctttgttgcacggtgcaacacaggtaatgtatgaaggtgcacctgatcatcctgattcatctagaatgtgggacataatccaaaaatatggtgttacaattttttacacaacgccaactgcacttcgaatgttaatgaaatttggagatgatattccaaattcatttaatctttcaactttacgtttacttggaactgttggcgaaccgattaatcctgaagtttggaaatggtatttcaatgtaattggaaaaaagaaatgtccaataattgatacatggtggcaaactgaaactggtggaatgttaatcagtcctttacctggtattgaaacaattccattgaaacctggctctgcaacattgcctatccctggattagatattgaagttgttgatgaaactggcaatgaagtagaacctgaaactaaaggttctctaataattaaaactccttggccaggaatgttacttggattatggaaagatactgaaaaatacaaagatgtctattggtcaaaatttgaatcactatattatcctggagattacgccatcaaggattctgatggttacttatggttacttggtcgttcagatgatgttctaaaagttgcaggtcatagaattggaactgcggaattagaaagtagtattgtttctcataatgatgttgcagaatctgcagtatgtggaattcctgatgaagtaaaaggtgaatctataattgcttttgttatgttaaaagaaagtgttagtacttctgaggaacaacttcgttctgaactacgtgaaactattcgaacacaaatcggtcccattgcaactcctagtcaattttactttgtaaacaaacttccaaaaactagaagtggaaaaatcatgcgtcgcttactaaaagcaattgcaaaaaatgaaaaaattggtgatgtaagtactttagaagatggtgcagcggtaaatgaaattcaatctgcattccaagaactacaaaaaaatattgaaaatcagaaaaaataa

SEQ ID NO: 309447 - DNA, 829 bp, Unknown
  Bacterial polypeptide expressing nucleotide sequence isolated from the Sargasso Sea
tttggtttttaaagtttcagaaaaatggtctaaacaagcgtatgtgaataaatcacaatatgaaaaaaaatataagttttctattaaaaataacgatgatttctgggcgaaagagggtaaaagaataaattggataaaaccttattcaaaaataaaagatgttaagtatagtaaagaagatgttcatattaaatggtattatgacggaactttaaatgcttcagcgaattgtatagacagacatttagaaaaaaaggcgaataagcctgccataatttgggttggtgatgatccaagtgactcaaaaaaaatatcttataaagaattacataaaaatgtttgcaaagttgcaaatggtttaaggagtttaggtatacaaaaaggtgacagggtaacaatttacctaactatgataccagaattagcttacacgatgttagcatgtacaagaattggtgctatacattctataatcttcggaggattttctcccgactcaatagctacaagaataaacgactgcgaatctgactacgttataactgcggacgagggtgtgaggggtggtaaaataattccactaaaaaaaattgcagatgaagcgatgatgcagtgtccaaatgtaaaaaagtgtgttgtagtaaaaaggactggaaatccaactaactgggacgatgaaagagacatatcttatgatgacatgattaaaaatgtttctgacaagtgtcctcctgaagaaatgaatgcagaagatccaatgtttattctttatacctctggttcaactggaaaaccaaaaggagttttacataccaccaggaaggttata

SEQ ID NO: 309448 - DNA, 1030 bp, Unknown
  Bacterial polypeptide expressing nucleotide sequence isolated from the Sargasso Sea
tggatgggtaacaggacatagttatatcatttatgggccactttcgaatggtgctactacaattatgtttgaaggtattccgacctatccggactcatcaagatggtggcaaataattgataaatacaaagtaaatactttttatacagctccgacagccataagagctttgatgcgcgagggtgatggtcctgtaaaaaaaactagtcgtaaatctctgaaattacttggcactgtcggagaaccaattaatcccgaagcctggatgtggtattataaaactgtaggtgacaaaaagtgtccgatagttgatacctggtggcaaactgaaactggtggaatattaatttcgccacaaccaggagcaattaacttaaaacctggatctgctaccaggccattttatggaataaagccagcaatagtggatgagtctggtaaggtgctgaaaggcgcatgtaagggaaggctttgtatgactcagtcttggccaggtcagatgagaacagtttatggagaccaccaaagatttatagatacatatttttctcaatttgatggaaaatattttactggcgatggttgtaggcgtgataaagatggatattattggataactggtcgggtagacgatgtaataatagtttcgggccacaatttaggcacagctgaaattgaaagtgcatttgttgcacatacaaaagttgcagaagcagctgtagttggttttcctcatgatataaaagggaatggattatactgttatgtaacacttaactctggtgaaaaacccgatggagatttagaaagagaacttaaactttgggttagaaaacaaataggaccaatagcaacaccagatcacattcaattttcctcaggtctacctaaaactaggtctggaaaaataatgagacgtattttgagaaaaatagcagcaaatgaatataaagatcttggagatacaactactttagctgacccaactgttgttgagtcattaatagacaacagaaaaaataaaagctaa

SEQ ID NO: 309449 - DNA, 1159 bp, Unknown
  Bacterial polypeptide expressing nucleotide sequence isolated from the Sargasso Sea
atggactatcattcaatttataaaagctggcaagcagatccagagagtttttggatggaagcagcagaaggtatagattgggaccaaaaaccaacgtttgctctaaatgagagtaatgaacccttatttgaatggtacacagatagttatgtaaatgcgtgcttcaacgctgtagataggcatgtcgaaaagggccagggagatcaaactgctatcatctacgatagccctatcacagggaaaaagaagcatatcagttatgctcaactgcttgaaaaaacgagccttttagcaggctcgctcttaaagaaaggaattacgaagggtgatagagtaatcatctacatgccaatgattccagaggctattgtcgctatgttagcatgcgcgcggattggagcaatccattctgttgtatttggtgggtttgcttcccatgaactggcagtaagaattgatgatgctcaaccaaaaatcatattagccgcatcatgcggtatcgagccaggaagagttattgagtataagccattaatagatggtgcgattgagctttcagagcacaagcccgaaagtgttgtgattttgcagcgaccagaagctgcagctagtttaatacccggcagagattttgactggaatgagtttcaattaaatgtagaacccactaattgtgttatggttgaaggaaaccaccctgcgtatattttgtatacatcaggtacgactggggctccaaagggagttgttagacctaccgctgggcacctagtagcactgcattggagcatgaaaaatatatacaatattgacccaggagatgttttttgggcagcctctgatgttggctgggtggttggacacagttacatttgctacgcaccattaattcatggaaatactactgtgttatttgagggaaaacccgttggcactccagacgccggaacgttctggagagtgataagcgaacataaagtgaaagcattttttacagcgccgacagcctttcgagcaataaaaagggaagatcccgaaggtaaatttaaatcgcaatatgatttaagctgtttgcaggcgctatttctcgcaggagaacgtgccgacccggatacaataaattgggctaaaaaacctattgggcgtaccagtgattgac

SEQ ID NO: 309450 - DNA, 790 bp, Unknown
  Bacterial polypeptide expressing nucleotide sequence isolated from the Sargasso Sea
cggagaacctataaatcctgaggcatggatgtggtattataaaacagtgggagactcaagatgtcctattgttgatacctggtggcaaacagaaactggtggaatattaatcagtccacaaactggagctataaatcttaaacctggttcagcaacaaaaccattttatggaataaaacctgtaattgttgataaaaagggaaatgttttaaaaggtgaatgtgaaggaagactttgtatagcacaatcatggccaggacaaatgagaactgtttatggagatcaccaaagatttatagatacttatttttctcaatttgatggaaaatatttcactggagatggatgccgaagagataaggatggttattattggataacaggaagagttgacgatgtaataattgtatctgggcataatttaggaacagcagaaattgaaagtgcatttgtcgctcatccaaaagttgctgaggcagcagtagttggttttccccacgatataaaaggcaatggtttatattgttatgtaactttaaatgttggagaaaaagaagatggagatcttgatagagaacttaaactttgggtaagaaaacaaataggcccagttgcaacacctgattttattcaatttgcaccaggacttccaaaaactcgttcgggaaaaattatgagaagaattcttagaaaaattgcagcaaatcaacatgatcaattaggtgacacaactactttggcagacccgagtgttgttgaaagtttggttaataatagaaaaaatatctaa

SEQ ID NO: 309451 - DNA, 1927 bp, Unknown
  Bacterial polypeptide expressing nucleotide sequence isolated from the Sargasso Sea
atgtctgaaaataatatttataagcctatatcaaccaatcctcatattaaagatattgatgaatatcataagctttacaaagaatctatagataactctgaagctttttttcaaaaattagctaaagagaatatttcatggataaatgactttaatgaagttcaaaatgatgggtttgcaaatactaaatggtttataggtggtaaaaccaatgttagtttcaattgtatagatcgacatcttgatgaaaattcaaataaaactgctttaatttgggagggtgacgacccaaatgaatcaaagcaatttacctataaggaattacatttacaagtttgtaaattcgcaaatgttttaaaagagcttggtgttaaaaaaggatctagagtatgtatttacatgcctatgattcctgaagcagcttttgcgatgttggcttgtaccagaattggtgcaatacattcagttgttttcggtggattttcaccagaatcattaaaagacaggatattagatgctgattgtgaaatagtaataactgctgatgaaggagttaggggcggaaagaaagtgcctcttaaatcaaatgtcgatcaagctttagttaattgcccgaatgttagaaccgctttagttattaaaagaacaggtggagatatagattggaataatgaaagagatatttggtatgaagatttggtaaaaaatgtaggttctgaatgcgaccctgagccgatggattcagaagatccactttttattttatatacctcaggttctacaggaaaaccaaaaggagttcttcatactacagcaggctatcttcttggagcccatataagttttaaatatctctttggaattcagccaacagatatatattggtgtactgccgatgttggttggattaccggccatacatatattctatatgggcccttgtctaatggaacaacaacaataatgtttgaaggaataccaacatacccctcttcatcaagatgttgggaaatatgtgataaatataaagtcaatgtcttctatacagctccaacagcaatcagggctttgatgtctcagggagatgatccagttctgaaaacaaaaagaaatagcttaagggttttagggactgtaggtgagccaataaatccagaagcttgggaatggtactacaaagtggtaggtaatagctcatgtgatgttattgatacatggtggcaaacagaaacagggtcggtattaatttctccaattgctggcattactccaatgaaacctggatcagcaacactgcccttctttggagttaaaccagctctatatgatgaacaaggtaagcctttagaaggtgcgaattctggaaatttagtcatagaaaaatcttggccaagccaaattaggagtgtttatggagatcatgacagaatgatatctacctattttgaaacatataaagatttatattttactggtgatggagcgcgaagagatgaggatggctatttttggattacaggccgagtagatgatgtgttgaatgtttcaggacataggttaggcacagcagagatagaaagcgctctagtgcttcatgataaagttgccgaagcagcagttgtaggttttgaacatcctattaaaggacaaggtatctatgcatttgttactcttatgaaagaagaagaatttaatgagggtttgcgaactgagctcattcaatttgtatcaaaagagattggtccaattgctaaaccagatctaattcaaaatgctccaggacttcccaagacaagatcaggaaaaataatgagaagaatacttagaaaaattgctgaaggcgatttctcaaacctaggtgatactacaacacttgctgagccagctgttgttgagtctttagtagaaaatagtcaaaaactatgag

SEQ ID NO: 309452 - DNA, 494 bp, Unknown
  Bacterial polypeptide expressing nucleotide sequence isolated from the Sargasso Sea
gacttatttcgctacctttccgggtcgttattttactggtgacggctgtaggcgagacgaagatggatactattggatcacagggcgtgtagatgacgtcataaatgtttcgggccacagaatggggacagctgaagtagagtctgcgctcgttgctcactcactagtggctgaagctgccgtcgtaggctatcctcatgagataaaggggcaaggcatatatgcgtatgtgacacttaatgttggcgttaaccctgatgaagggctgcggaaagagttagtccaatgggtccggaaggaaataggacctatcgcaagtcctgatttaattcagtgggctcccagccttccaaagactcgctctggaaagataatgcgcagaatacttcgaaaaattgctgaaaatgattttggatcattaggtgatacgtcaactctagcggaaccagccgtcgtagaagacttgatagagaacagggaaaaccgaagctaat

SEQ ID NO: 309453 - DNA, 1909 bp, Unknown
  Bacterial polypeptide expressing nucleotide sequence isolated from the Sargasso Sea
atgacagatgttggacaacaattacatcagacatctattgcgaataaacaggcattttggcaacaagccgccaaggctttagattgggttacgccaagcaaacaaatattagatgaaagcgaggcaccattttaccattggtttagcgatggtgagttaaacacgtgttataacgcgatagaccgacatgtgttagcgggacgtggtgagcagattgcgattcattacgttagcccagtaaccgaaaccgaatacagtattacctatcacgaactgcaggctcaggtagcaaggcttgcagggtatttgcgtactatgggggtgacaaagggtgatcgggtggttatttacatgccgatggtacccgaaacggcctatgccatgcttgcctgcgcgcgcattggcgccattcattcggtggtatttggtggctttgcggccaatgaacttgctacccgtatcaatgatgccaaacctaagctggtaatgtctgcctcctgcgggattgaaccttcaggggtggtgccctataagcccttactagataaagcattaaatgaagcggtgcacaaggttgagcattgcttgattttaaaccgccctcaatatgaagcgcagatgcaaactggtcgagacgccgattggcagaccgcgcttaaaggatgcgaaagcgttgattgcgtcacggtaaatgccaccgatcctttatatgtgctctatacctctggcactacaggccaacctaaaggggtggtgcgtgacaatggtggtcatgcggtcgcattagcttggtcgatggccaatatttatgatattcatcaaggcgatgtgttttgggcggcatcggatgtaggttgggttgttggtcattcctatattgtttatggtccgttactcgtgggggcgaccacgctgttatatgaaggcaaacccgttggcacacccgaccccggcgccttttggcgtacgattgccaagtatcaagttaaaagctttttcaccgcgcccacagcgattcgcgctattaagcgggaagatcccaacggcgaattcattcaaggtgttgatttaagctgcttgaagaatgtctttttggctggggagcgctgcgatcccgacaccctgcattgggctgaagacaagttacataaaccggttatcgatcattggtggcaaactgaaacaggttggccagtagccgcgaatctaatgggggtggcgccgattgcggttaaagccggctcaccggggcgacccgtgcctggatacgaagttgatgtcgtcgatgagcttggcgctaaagtggcggcgaatgtctctggtaatgtggtgataaaattacccttgccaccgggcacgctcacaacgctctggcaaaacaacaaacgttatcaagacagttacttatctatgtacccaggctattacctcacgggagatgcaggctacatggatgaagagggttatctctacattatgagccgcatcgatgacatcattaacgttgcgggtcatcgtctctctactgggcggtttgaagaggtgctgtgccagcatcccgatgtggccgaagccgccgtgattggtgttgatgacaaattaaagggccaagtgccattaggcttagtggtacttaaaaagggcgtgactattacggatgaggagctgcataagcagttaattgcactcgttcgtcaagaaattggtcccgttgcatcctttaggttggtgagcgcgattcaaaagctgccgaaaacccgctcgggtaaaatcctgcgcggcactatgcgtaaaattgccgataatcagcaatatacggcgccagcgaccattgaagatccgcagaccctcgatttagtccgcacgaccttaacccgcatgggctatgccgatgctttagtgggctaga

SEQ ID NO: 309454 - DNA, 1165 bp, Unknown
  Bacterial polypeptide expressing nucleotide sequence isolated from the Sargasso Sea
tttgtatacctcgggttcgactggaaaacccaaaggggtattgcataccacgggcggatacatggtttatgcttctatcacacacgaatacgtcttcgattatcaccctggcgatatatactggtgcaccgcggacgtgggttgggtaacagggcatacctatatcgtttatggcccactggctaacggagccgtcacactgatgtttgagggtgtgccaaattatccagatgcatcgagattttggcaagtgtgtgacaaacaccaagttaacatatgctataccgcgcccacggccatacgagctctgatgcgagaaggggattcgccggttaaagcaacatccagaaaatcgctcaggatacttggaagcgttggagaaccaatcaatccagaagcgtgggagtggtattatcactgtgtgggcgagagcagatgccccattgtggatacgtggtggcaaaccgaaactggcggggttttgatcacacccttacccggtgtcacggaattgaaacctggctctgccagtaaaccattttttggaatccagccagccctggttgatcaaaacggagaaatattagagggtgagacagaaggcaatttgatcattctcgatagctggccaggccaaatgaggaccgtatatggtgatcatcaacgttttgtggatacctacttttcaacttttgataatgcttataccactggtgatggtgctcggcgcgacgcagatggctattattggatcacggggcgtgtcgatgatgtgctcaatgtatccgggcacagaatgggcacagctgaagttgagagtgctttagtggcacatcaaaaagtggctgaggcggctgtggttggatatccccacgaaatcaagggccaaggtatctatgcctatgtcaccctcatgcaaggcgaagaacccagcgaagatttattaaatgagctcaaacagtgggtcaggaaggaaattggccccatagctacgccagatttaatgcaatgggctccagatttgccaaaaactcgatccggcaagatcatgcgtcgcattctcagaaaagtggctgagaacaaataccaagatctgggcgatgtttctaccctggcagatccatccgttgttgaaaacctcattgaaaatcgaatgaataggtag

SEQ ID NO: 309455 - DNA, 1765 bp, Unknown
  Bacterial polypeptide expressing nucleotide sequence isolated from the Sargasso Sea
atatagtaatagtgatgttcatataaaatggttttatgatggcacgcttaatgcttctgcaaactgtatagatagacatcttaaaaacaataaagataaaaccgcaataatttgggtaggggatgatccaaaagttcaaaagaaaatttcgtacaaacaattacatcatgaagtttgtaagatagctaatggtcttaaagaaattggtgtaaaaaaaggtgatagagtaacaatttatttaacgatgatacctgagcttgcatatacaatgcttgcttgtgctagaataggagcaatccattcaataatatttggcggtttttcacctgacagtattgcaggtagaattaatgactgtaattcagactatgttgttacagcagatgaaggtgtgcgaggtggaaaaactatacctcttaaatctattactgatgaagctcttgagagttgtcctaacgttaaaaaatgtgttgttgtaaagagaactggcaaagatgtggagtggtacgacaatagagacgtttggtatcatgatataactaaaaaagtctcttcaaattgtgaacctgaagagatgaacgcagaggatccattattcattctttacacatccggctctacaggaaaacccaaaggggttcttcatacaactggtggatatatggtttacgcatcaatgacacaccaatatatttttaattataaacctaaagatatttattggtgtacagctgatattggatggattactggtcacagttacataatttatggtccattagcgaatggagctacaactataatgtttgagggaattccaacttacccagattcttctagatggtggcaaattgtagataaatgtaaggttaatattttttacactgcacctacagctataagagctttaatgagagaaggtgacggtcctgttaaaaaaacatcaagaaaaaccctaaagcttttaggtactgttggtgaaccaatcaaccctgaggcatgggaatggtacttcaaaacagttggagagtctaagtccccgattgtagacacatggtggcaaactgagacgggcggaatattaataagtccacaaacaggggcaattgacttgaagcctgggtcagcaacaaaaccattctacggtatcaaaccagttattgtagacaaagagggaaaagttttaaaaggagaggctcaaggaagattatgtatagctcaatcttggcccggtcaaatgagaactgtgtatggagaccacaaaagatttattgaaacatacttttctcaatttgacggaaaatattttactggtgatggatgtagaagagataaagatggctactattggataacaggtagagttgatgatgtgataattgtttcaggtcacaaccttggaacggcagaaattgaaagtgcattcgtggcacatccaaaagtggctgaagctgcagttgttggttaccctcacgatataaaaggtaatggtctttattgctatgtcactcttaatgtaggtgaaaaagcagatggtgatttagagagagaattaaagttatgggttagaaaacaaattggtccaatagccacacctgatcttatacatttttctccagggttgccgaaaactagatctggaaaaataatgagaagaattttaagaaagattgcagcaaacgagcatgatcaacttggtgatacaacaaccttagctgacccaagcgttgtacaaagtttagttgatgagagaaaaaatgtttaa

SEQ ID NO: 309456 - DNA, 1379 bp, Unknown
  Bacterial polypeptide expressing nucleotide sequence isolated from the Sargasso Sea
aaattgtatagatagacatttaaataaaaataaaaataaaaatgcaattatttgggttggtgatgatccaaaggtacaaaaaaaaattacatacaaacaactgcatcaagaggtttcaaaaactgctaatgctttaaaagaaattggtgtcaaaaaaggtgatagagtaacgatttatatgactatgatcccagagttggcatatactatgctagcttgtgcaagaattggggcaattcattcaattatttttggaggtttttcaccagatagtattgcgggtagaataaatgattgtaaatctgattatgtagtaactgctgatgaaggaataagaggaggaaaaataattcctttaaaatcaataactgatgaagcattagttcattgtaccaatgtaaaaaaatgtattgtagtcaaaagaacaggtaatagaattaattgggataaaagtagagatgtttggtatcatgaaatagtaaaaaaagcatcttcaatttgtcctcctgaagagatgaatgctgaagatcctttgtttattctctatacgtcaggttctactggaaaaccaaaaggtgtcatgcacacaactggtggctatatggtttatgcttcaatgacacatcaatatgtttttaattataaatctaaagatatttattggtgtacagctgacattggatggataacaggacatagttacattatttatggtcctcttgctaacggagcaacaactataatgtttgaaggaattccaacttaccctgatagttctagatggtggcagatagttgataaatataaagtaaatattttttatacagcaccaactgctattagggcattaatgagagaaggagaagggccagttaaaaaaacatcaagaaaatcattaaaattacttggaactgttggggaaccaataaaccctgaagcttggttatggtattataaaacagttggggattcgaaatgcccgatagtagatacatggtggcagactgaaacaggaggaattatgataagtcctcaaactggagctatagatttaaaaccagggtcagcaacaaaacctttttacggtatcaaacctgtaattgttgataaagatggaaaaattttaaaaggagaatgccaaggaagactatgcattgcacaatcctggccaggacaaatgagaacagtttatggagatcacaatagattcatcgaaacgtatttctcacagtttgatggaaaatattttactggagatggatgcagaagagacaaggatggttattattggatcactggaagagttgatgatgtaataattgtttctggacataatcttggaacagctgaaatagaaagtgcttttgtagctcatcaaa

SEQ ID NO: 309457 - DNA, 1085 bp, Unknown
  Bacterial polypeptide expressing nucleotide sequence isolated from the Sargasso Sea
catggccaaaaaaaagaaaaaaaaatctaaagtaaaaaaaaaatcatctaaaaaagttaagaagaaaactaaagtaaaaaaggtttcaaaaaaaattaaaaaaagaaagaaaagtaaaaagaagagtaaaaaagagaatggttcttctccccctgaaatagtaataaaaactaaaccagagtgggtaaaagcaagtttggcaaataaaagtaagtaccaacaaaaatactctcaatctataaaaagtaatgatgatttttggaggaaagagggaaaaagaattacctggataaaaccttataaaaaaatcaaagatgttaaatacagtactaaagaagtaaaaattaaatggtatcaagatggaactttgaatgcttccgcaaactgtattgatagacacttaaaagacaagaaagataaaactgcaattatttgggttggcgatgatccgaaagatagtcaaaaaataacttataaacaattacaccaaaaagtttcaaaagcagcaaatggcctaaaaaaacttggaattaaaaaaggcgatcgagttacaatttatttaaccatgatcccagagcttgcaattttaatgctagcatgtgttagaattggtgcggttcattcaataatatttggtggtttttctgcagaatcaatttctggaagagttaatgattgcgagtctgaatatataattactgctgatgaaggtgttagaggtggaaaaactatcccactaaaatatacaactgatgaggctttaacaagttgtccaaatgtaaaaaaatgtatagttgttaaacgaactggaaattacatcaattggaatgaagaaagagatgtttggtatcatgatctgattgaagatgttcctactcattgtgagccagaggaaatgaatgcagaggatcctttgtttattttatatacttcaggatcaactggtaaaccaaaaggagttcttcatactaccggtgggtatatggtttatgcatcaatgacccatcaatatatttttaactataaaccaaaagatatttattggtgtactgctgatattggatgggtaactggacatagttata

SEQ ID NO: 309458 - DNA, 1195 bp, Unknown
  Bacterial polypeptide expressing nucleotide sequence isolated from the Sargasso Sea
actgcagatgaaggagtaagaggtggaaaaataattccactaaaaaaaattgctgacgaagctttagatcaatgccctggagttaaaaaatgtgtagtagttgaaaggactggtaatcaggttgattggaacaatgaaagagacgtatcttataaagaattgatttcatcagtgcctgctaaatgtgatcctgaagagatgaatgcagaagatccactatttattctttatacatctggctctactggtaaaccaaaaggtgttcttcatacaacaggtggttatatggtttatgcttcaatgactcaccaatatatttttgattacaaggctaatgatatttattggtgcactgcagacattggttgggttacagggcacagttatataatttacggcccactttctaatggggccactactataatgtttgagggagttccaaattatcccgacagctcaagatggtggcaaattgtagacaaatacaaggtaaatattttttatacagcgcctacagcaataagagctttgatgagagaaggagataaaccagttaagaaaacaagtagaaaaacattaaagttattaggcaccgtcggagagccaatcaatcctgaagcttggatgtggtattacaagactgttggggactcaaggtgcccaatagtagatacatggtggcaaacagaaactggtggaattttgattgcacctcaacctggtgcaatagatttaaaacctggttctgctacaaaaccattttatggcattaaacctgtcttggttgataaagatggtaaggtaattaaaaaagagggtaaagggcgactttgcatggcctcttcatggcctggtcagatgagaacagtttacggagatcatcaaagatttatagatacatatttttctcaatttgatgggaagtattttactggagacggttgcaggcgagacaaagatggatactactggataactggaagagtagacgatgtaattatagtttcaggccataaccttggaactgctgaaattgaaagtgcatttgttgcccatccaaaagttgcggaagcagctgtggtaggttttccacatagtattaaagggaatggattatattgttatgtaacactaaatgcaggggaaaacccatccggtgaccttgaaagagatcttaaactatgggtaagaa

SEQ ID NO: 309459 - DNA, 317 bp, Unknown
  Bacterial polypeptide expressing nucleotide sequence isolated from the Sargasso Sea
cggctttgagcaccctataaagggtcaaggaatatacgcttatgtaaccctcatggttggagaggaagagaatgaaaatttaataagtgaattgcaaaactttgtcgctaaagaaattagtccaattgcaaaacctgatcttattcaatgggcaccagggctgccaaaaacaagatcagggaaaattatgagaagaattttacgcaaagttgcttcgggagaatttaataatcttggtgatacatccaccctcgccgatccaagtgtggtagatgatttaattaaaaataagcgcgatttaaaaataactaactaat

SEQ ID NO: 309460 - DNA, 1090 bp, Unknown
  Bacterial polypeptide expressing nucleotide sequence isolated from the Sargasso Sea
aatgactcatcaatatatatttaattacaaacctaaagatatttattggtgtactgctgatataggatgggtaactggtcatagttacataatatatggaccactctctaatggagcaactactataatgtttgaaggtattcccacatatcctgatacatcaaggtggtggcaaattgttgataaatataaagtaaatatattttatactgcacctactgcaattagagctttaatgagagaaggagatggcccagttaaaaaaacatcaagaaaaacattgaaattactaggtacagttggagagcctataaatccagaagcttggcaatggtactacaaaactgtaggagattcgaaatgtccaatcgtcgatacctggtggcaaactgaaacaggtggaatacttataagtcctcaaaccggtgccatagatcttaaaccaggctctgctactaaacctttttacggaattaaacctgagatagttgataaagatggcaatgtattaaaaggagaagcccaagggagattgtgtattgctcaatcttggcctgggcagatgagaactgtttacggggatcataataggtttatagagacatatttttctcagtttgagggtaaatattttactggagacggatgtagaagagataaagatggttactattggataaccggaagagttgatgatgttataattgtatcaggtcataacttaggaactgcagaaattgaaagtgcatttgtggcacatcctaaagttgctgaagcagcagttgttggatacccacatgatatcaaaggtaatggattatattgttatgttactttaaatgcaggtgagaaacacgatggtgaacttgaaagagaattaaaactttgggtaagaaaacaaattggaccaatagcaactccagattttattcagttttctccaggacttccaaaaactagatctggaaaaattatgagaagaattttaagaaaaattgctgcaaacgaatatgatcaattaggtgatacaacaacacttgctgatccaagcgtagtaaaaagtttagttgaaaatagaaaaaaaaattaa

SEQ ID NO: 309461 - DNA, 592 bp, Unknown
  Bacterial polypeptide expressing nucleotide sequence isolated from the Sargasso Sea
ggatggtaatgaattaaatggaaataatgttcaaggtaatttatgtattaaatctccttggccatctatcatcaggaccacatatggtgatcatgaaagatgcattaatacatacttctcaaactataaaggtatgtactttacaggtgatggagttaaaagagatcatgatggatacctgagaatactcggtagagttgatgacgtaatcaatgtatcaggtcatagaatgggaacagctgaggttgaaaatgcaattaatgagcatgaagatgtaattgaatcagctgttgttggatatcctcatgatattaaaggtgagggtatatatgcatatgttatagtaggtacaaaattaaatgatgataaaattaaggatgagataataaatgttgtaagaaaagtaataggaccaattgcaaaaccagataaaattcaaattgttagtggtttacccaagactagatctggtaagataatgagaagaatcctaagaaaggttgcaagtaatgattttcagaatcttggagacacatctacacttttaaatcctgatattgttacagaaattatagatggagctattatctaa

SEQ ID NO: 309462 - DNA, 1334 bp, Unknown
  Bacterial polypeptide expressing nucleotide sequence isolated from the Sargasso Sea
tgaagcacttgaaagttgtccaaatgtaaaaaaatgttttgttgtaaaaagaactggtaacaaaatcaattgggtagttgatagggatatttggtatcataaaatgattaagaacatttccactaaatgtgaaccagaagaaatgaatgctgaggatccgctatttattctttatacttcaggatctacaggaaaaccaaaaggtgtattgcatactacaggcggttacatggtttatacgtctatgacacaccaatatatatttaattataaacctaaagatatttattggtgtactgccgatataggttgggttacaggacatagttatataatttatggtccactttcgaatggtgcaactacaataatgttcgaaggaattcctacctatcctgatacgtctagatggtggaatatagttgataaatataaagtaaatattttttacactgctccaactgcaattagagctttaatgaaagaaggagataaaccagttaaaaaaacctctagaaagtcactaaaacttttaggaaccgttggagagccgattaaccctgaggcttgggagtggtattataaaacagtcggagattctaggtgcccaattgtagatacatggtggcaaactgaaactggtggaatattaattagccctcaaactggagcaataaatttaaaacctggttcagcaactaagccattttacggtatcaagccagtaatagttgataaggatggaaaagtattaaaaggagaagctcaaggaagactttgcattgcacaatcatggcctggacaaatgagaactgtttatggagatcaccaaagatttcttgatacttacttttctcaattcgatggtaaatattttactggagatggatgtagaagagataaggatggatattattggataacaggaagagtagatgatgtaataattgtatcaggacacaacttaggtacagcagaaattgaaagtgcatttgttgctcatgaaaaagtggctgaagcagcagttgttggctatcctcatgatataaaaggtaatggcttatattgctatgtaacattaaactcaggtgaaaaaagttctttggatttagaaagagatttaaaactttgggtgagaaaacaaattggagctatcgctactcctgatttaattcaatttgctccaggccttcctaaaacaagatccggaaaaataatgagaagaattttaagaaaaattgctgctaatgaacatggtcaattaggtgatacaacaactttagcagatccttcggttgtagataatttagtggataacagaaaaaatatttaaa

SEQ ID NO: 309463 - DNA, 1107 bp, Unknown
  Bacterial polypeptide expressing nucleotide sequence isolated from the Sargasso Sea
aatgtcattagataaaaaaaattcaatcaataacatacttgaagaaaaaagaattttccctccttcaaaaaaatttgcagaaaaatcaaatattagtactaaagaagaattactaagtcttaaaaaacaagcatcagataatcctattcaattttgggaatcttttgcaaaatctgaattagattggcttgagccatttcaaactgtattagataacgaaaatgcacccttttttaaatggtttaaagaaggaaaactcaatattacctataactgcttagatagacacattaagagagggcttggaggaaagactgcactaatatgggaaggcgaacctggagatagcaaaaaatatacttacgaagaacttctaaaagaggtatgtaaaacagctaatgcattaaaagcaattggtgtaaaaaaaggtgatttggtatgtatttatatgccgatgattcctgaagcaatgtttgcgatgttagcttgtgcaagaattggcgcgcctcattcagttgtcttcggaggattttcttcagaagctttaaaagataggttaattgatggaaacgccagattcgttattactgctgatggtggctttagaaaagataaggtgattgaacttaagaaagcagttgatgcggccattaaaagtggggcagataaagttgttgaaaaagtagttgttgttcaacgatcccaaaaagatatttcgatggttgatgatagagatttttggtggcacgaattattaaaagatcaaaaagatcattgtgaaccagaaataatgaatagcgaagatagactatttattctttatacttcaggctctactggaaagcccaaaggtgtagttcacacaacgggtggttacaatctttggtcccatttgacatttaaatggatttttgacttaaaaaatgacgatatttactggtgtacagctgatgttggttggattacaggtcatagttacatagtttatggccctttatctaatggttctacaaccttaatgtatgagggagtgccaaggccatcaaatttaggggctttttgggaaattgtccaaaaatataaggtttctattttttatactgcacc

SEQ ID NO: 309464 - DNA, 1807 bp, Unknown
  Bacterial polypeptide expressing nucleotide sequence isolated from the Sargasso Sea
aatgtcattaaataaaaaaaattcaataaataatatccttgatgaaaagagagtctttcctccttcaaaagaatttgcagataattcgaatattagaactcttgaggaattaacaaagttaaaaaagtatgctttagataaccctatagaattttgggaaacttatgcaaatctagagattgattggtttcaaccattccaaactgttttggatagcgaaaatgctccattttttaagtggtttaaagagggcaaattaaacattacatataattgtcttgataggcacattaaaaatggccttggatcaaaaacagctctcatatgggagggtgagcctggagatagtagaaaatatacttataaggaacttattaaagaggtgtgtaaagcggctaatgcattaaaagaaataggcgtaaaaaagggcgatttagtttgtatttatatgccaatgatcccagaagctatggtcgcaatgttggcttgcgcgagaattggagcgccacattccgtggtatttggcggtttctcctccgaggctctaaaggatagattaattgatgggaatgcaaagtttattattactgcagatgggggctttagaaaagataaaataatagagcttaaaaaggctgtagatttagcaattgagagtggagcaaataaaattgttaaaaaagttcttgttgttcaaagaactaaagaaaatattgtaatggtagaaaatagggatttttggtggcatgaattattaaaaagtcaaaaagattggtgtgaacccgagattatgaatagcgaagataggctttttattttgtatacctcaggatctactggtaaacccaaaggagttgttcatacaactgccggttataatctttggtctcatttaacattcaaatggatttttgacattaaaaatgatgatatatattggtgtactgcggatgttgggtggattacaggtcatagttatatagtttatggcccattatctaatggagctacgactcttatgtatgagggtgttcctaggccatcaaatttaggtgctttttgggaagttattcaaaaatataaggttactattttctataccgcgccaacagcaataaggtcatttatgaagtctgggcgagaaattccggataaatataatttagaaagtcttagacttttaggtacagttggagaaccaattaatccggaagcatggatgtggtatcgagatgtaataggtaagaataaatgtccgatagttgacacctggtggcaaactgaaactggtggtgtaatgataagtcctttacctggagcagttgctgcaaaaccaggttcagcaacttatcccttaccaggaatagaggttgaaattgtagataaagacggggaaaaggttatggagaacgaaggaggatatttaattgttaaaaaaccatggcctggaatgatgcgaactattcatggtaactctcaaagatacttagagagttattgggaatttatttcgtttcaaggagaaaagaatgtttatttcgctggtgatggggcgcgtattgatgaggatggatatatatggattatgggaagagttgatgatgttataaatgtctctggacatagattaggaactatggaaatcgagtctgctttagtaagtcatttatcagtcgcagaggcagctgttgttggaaaaaaagatgagttaaagggtgaagttatagtggcatttgtatctttagaaaaagaagtaaaaagttctttagaattagaagaggaattaaaaagacatgtaataaatgag

SEQ ID NO: 309465 - DNA, 1357 bp, Unknown
  Bacterial polypeptide expressing nucleotide sequence isolated from the Sargasso Sea
tttgagtcgaaaatatagggaagtttacgaaaattcaataaataacaaagagattttttggaagaaagtctctgaagatatattttggtacaaaaaaccaaccaaaattttaaattctaataaccctcctttttataagtggtttgaagatggaataactaatacatgttacaatgctttagatcatcatattgaccaaggtagaggcgaaaaattagcaataatttatgatagtccaataactggaaagcaaaaaaaaatttcatacaaagatttaagagataaagtagctttatttgcgggagcattaaaaaatcaaggtataaacaaaggtgacagagtaattatatacatgccaatgattccagaggcggtaattgcaatgttggcttgcggtagaattggtgcagtgcattccgttgtatttggtggttttgcagcaaatgaattagcaagtagaatagatgactctaaggcaaaattaattgtttctgcttcatgcggctatgaaccaggaagaactgtattttataaacctttagttaacaaagctcttgaacttgcaaatcataaaccaagcaaatgtataatttatcaaagagaaaaagataaggctgaattaaacccagacatagatattacttgggatgaagctcataaagacgtaaaaccagcagaatgtgaaaagatgaatgctaatgattatgcttacatactttatacatctggtactacgggattgcccaaaggaatagtaagggatatcggaggtcatatagttgctttaaaatggacaatgaaaaatatttacaatattgacaaagatgatgtgtggtggtcagcaagtgacattggttggattgttggtcactcttatattgtttatgctcctttattttatggttgtacaactgttttgtttgaagggaagcctgtaggaactcccgatgctggagttttttggagaataatctcagaacataaagtaaaatctttatttaccgcgcctacagctattagagcaattaaaaaagaagatcctaatggagatttctttaaaaaatacgatttaagtaagtttgagaagctttttttagctggtgaaagagctgatccagatacaattaagtggtttgaaaagctttcaggctctcctgtaattgatcactggtggcaaactgaaactagttgggcaatcacctccgattgtacaggtatagagtcttttccagtaaaatatggttctgcttttaaacctgttccaggttatgatttaaaagtattagactcagatggtaaagaagtaggcccaggtaaaatgggtgatattgtagttaaacttcctttgccccctggc

SEQ ID NO: 309466 - DNA, 469 bp, Unknown
  Bacterial polypeptide expressing nucleotide sequence isolated from the Sargasso Sea
aatgaaatcagattttaaggatatttaccgtaaatccattgataaacccgaggatttctggaaagaaatttcaaatgatatcttctggtttaagaagccaactaaaatcttaaacaatagcaaacctcctttctacaaatggtttgaagatggtatcacaaatagttgctataatgccttagattttcatatagacgaaggtagaggtgataaaacagctttaatttacgatagtccaataactggaataaaaggtaatttctctttcaagcaattaaaagataaagtttccaagtttgcgggcgcattatcaaatcaaggagtaaaaagaggtgacagagttatcatttatatgccgatgataccagaggcagtagttgcgatgcttgcttgcggaagaattggtgctattcactctgttgtttttgggggttttgcatcaaacgagcttgcaagcagaattgacgat

SEQ ID NO: 309467 - DNA, 1231 bp, Unknown
  Bacterial polypeptide expressing nucleotide sequence isolated from the Sargasso Sea
catgccaaaaaaaaagaaaaagaaaagcaaggtaagaaaaaaaagagctaaagttagaaaaaaaacttctaaaaataaaaaaagaaaaaataaatcaaaaatagataacgaaaattttatacctgaagttataattaaaacgaaacctgaatggattaaaagtagctgggctaataaaagtaaatatcaacaaaaatattctcagtctataaaaagtaatgatgaattttggagaaaagaaggaaaaagaattacttggataaaaccttataaaaaaattaaggatataaaatacagcacaaaagaagtaaaaattaaatggtttgaagatggaactttaaatgcttccgcaaattgtattgatagacaccttaaggataaaaaagataaaacagcaataatttgggtaggagataatccaaaagaaagtcaaaaaataacttataaacagcttcatcaaaaagtatctaaagcagctaatgggttaaaaaaattaggaattaaaaaaggggatagagtaacaatttatttaactatgataccagaattagcaattttaatgcttgcttgttcaagaattggtgccattcattcgattatttttggaggattttcagcagattctatttctggcagagtaaacgattgtgagtctgaatacattataactgcagatgaaggtttaagaggaggaaaaattattccactaaaagaaactacagatgaagcgttattaaattgcccgaatgtaaaaaaatgtatcgttgttaaacgtacaggaaattatatcaattggaatgataacagagatgtttggtaccatgaattaatcaaagatgttccttatcaatgtgaacctgaggaaatgaatgcagaagatcctttgtttattttgtatacatccggttctactggtaaaccaaaaggagttctccacacgactggcggctatatggtttatgcatctatgacccatcaatatatttttaactacaaaccaaaagatatttactggtgtactgccgacattggttgggtaaccggtcatagctatattatttatggaccgctcgcgaatggggctaccacaattatgtttgaaggtattccaaattatcctgacagttctagatggtggcaaatagtagataaatataaagtaaacactttttacacagctccaactgcaattagagctttaatgcgtgaaggagataagcctgttaaaaaa

SEQ ID NO: 309468 - DNA, 1333 bp, Unknown
  Bacterial polypeptide expressing nucleotide sequence isolated from the Sargasso Sea
tatgagtgataatgaaaagtttgaagtgagcagtgaatggtctgcagaagcccaggttaattctgctaaatataatgagtggtacgaaaattcgctcaatagcaatgaagaattttggaatgagcacggtaaaagaattgattggattaaaccgtatacaaaagtaaaagacgtttcttacgataaagataatttttcaatcaagtggtactacgacggtacacttaacgcatcaagcaactgtattgataggcatttaaaagataaagcagatcaaaccgcaatcatttgggaaggcgatgatccagcagattcaaaaaaaatatcttataaagaattacacagtgaggtatcaaaacttgctaacggcatgaaatctcttggtgttaaaaaaggtgatcgtgtaactatctatatgccaatgattcctgaagcggcttatgcaatgcttgcttgtacaagaattggggcaattcactctgttgtatttggaggcttctctccagactcgttagctggaagaataagtgattgtaaatcagatattgtgatcactgcggatgagggagtaagaggtggtaaagcaattccattaaagaaaaatacagatgaagcaatttcgatttcaggtggcgtacgtcattgtattgttgttaaaagaacaggtggagatattggttggattgatgacagagatgtttggtatcacgaactaactgaaaaagaatctgatgattgtccaccagaggaaatgtcagcagaggatcctctctttatattgtatacatctggatcaactggcaagccaaaaggggttatgcacaccactggtggttacatggtttatgcctcaatgacacatcaatatgtctttgattataaagaaggtgatgtttattggtgcaccgcagatgtcggttgggttacagggcacagttacattgtttatggcccgttagcgaatggcgcagtcactgtcatgtttgagggtgttccaaactatccaagtgcctcaagattttgggaagtggtcgataaacacaggatcaatattttctatactgcacctactgcaataagggcattgatgcgagagggtgaagatcctgttaaaaaaacaagcaggtcatcacttaaattactcggtactgttggagagccgattaatccagaagcatggatgtggtattataatgttgttggcgataaaaaatgtccaattgttgatacttggtggcaaaccgaaacaggtggaattttaataacacctcttccaggtgcaattgcgcaaaaaccaggatcagcaacaaaacctttctttggtgttaacctg

SEQ ID NO: 309469 - DNA, 1030 bp, Unknown
  Bacterial polypeptide expressing nucleotide sequence isolated from the Sargasso Sea
atgactaaagataaaatctataaccctcccctatcagttctggagaattcaaatataaaagagtctgaatttgaagagctataccaatggtctttaaacaaaccagaagagttttgggcttcccaggctgagaattatctgagttggaataataaatggtctaaagtaaaagagactaatattgagaaaggagaaattgtttggtttaaagatgcaaaattaaatgcgtctgtgaactgcattgatagacatcttcctgaaaatgctaaaaaaactgctttcatatgggaaggagataatcctgaagaaacaaaaaatataagctatcaggaacttcatgatgaagtatgcaaatttgcgaatgtccttaaagctagaaatgtaaaaaaaggcgatagagtttgtatctatatgcctatgatccccgaagcaacatatgcgatgttagcttgtgcgagaatcggagcgattcactctgtcgtttttggaggcttttcgcctgagtccttaaaagaccgtatcctagattctgattgccagactgttataactgctgatgagggcttgaggggagggaaaacagttcctcttaaagagaatgttgatgaggctcttcaaggatgtccaaatgtccatactgttttagtaatcaccagaacaggagccgagatttcatggaacgagaactgtgatgttagatttgaagaaatttcagaaggtgttccttccaattgcgagccagaaataatggactctgaagatcccctatttattctctacacatccggatcaacaggtaagccaaaaggagttttgcacactacaggtggatatcttcttcaagctgccatgtctcacaagctagtattcgactataaggatgacgagatctattggtgtactgcagatgttgggtgggttacgggtcattcttatattgtttatggacctctagcaaatggtgcaacatcattaattttcgagggaataccgacctttcttcgccttccagattttgggaagtattgat

SEQ ID NO: 309470 - DNA, 1821 bp, Unknown
  Bacterial polypeptide expressing nucleotide sequence isolated from the Sargasso Sea
aagaaggaaagagaattaattggataaaaccgtatacaaaaattaaagatgttaaatatagtaaatcagatgttaagataaaatggttttacgacggtactcttaatgcatcggcaaattgtattgatagacacttaaagaagaataaagataaaactgcgattatatgggttggagatgatccaaaagttcaaaagaaaatttcctacaaagaattacacaaagaagtttctaaagctgcaaatggtcttaaagaattgggagttaagaaaggtgacagagtaacaatttatttaactatgataccagaacttgcatatacaatgctagcatgtgcaagaataggagccgtacattcaataatctttggtggcttttctccagatagtatttctggaagaataaacgattgcgagtctgattatctaattacagctgatgaaggtgtaagaggaggaaagataatacctttaaaatcaatcgctgacgaagctttggtaaattgcccaaatgtaaaaaaatgtgttgttgttaaaagaacaggcaatagaataaattgggatgaacgaagagatgtttggtaccatgagttaacaaaaaaagtttctaataaatgtgaacctgaagaaatgaatgcagaagatcctttatttattttatatacttcaggatcaactggaaaacctaaaggtgtcatgcatacaacgggcgggtacatggtttatgcatcaatgacccatcagtatatattcaattataaacctaaagatatttattggtgtactgctgacattggttgggtaactggtcatagctatattatttatggaccattatcaaatggagcaacaacaataatgtttgagggaattccaacatatcctgatagttcaagatggtggcagatcgttgataaatataaagtgaatattttttatacagcaccaacagcaataagagctttaatgagagaaggtgataagcctgttaaaaaaacatcaagaaaatcactgaaattattaggaaccgtgggcgaaccaatcaatccagaagcttgggaatggtattataaaactgttggagattcgaactgcccaattgttgatacttggtggcaaacggaaacgggtggaatattaatcagtcctcaaacaggtgctataaatttaaaaccaggttcagcaacaaaaccattttatggaattaaaccagtaatagttagtaaagatggaaaagttttaaaaggagaagctgaaggtcgattatgtattgcacaatcttggcccggtcagatgcggacagtttacggtgatcatcaaagatttattgatacttatttttctcaatttgatggaaaatattttacaggagatggatgcagaagagataaagatggatattactggattacaggaagagtagatgatgtgataatagtatcaggacataatctaggaactgccgaaatagaaagtgcttttgtagctcatccaaaagttgctgaggctgctgtcgttggatatcctcatgatattaaaggtaatggtttgtattgttacgttactttaaatgtgggagaaaaatcaactttagatttagagagagatttaaagctttgggttagaaaacaaattggtccaatagctactccagatctaatacaattttcacctggtcttccaaagactagatcgggtaaaattatgagaagaatacttagaaaaattgcagcaaatgaacatgatcaattaggtgatacaactaccttggcagatccaagtgtagtaaaaagtttagttgaaaatagaaaaaatacttaaa

SEQ ID NO: 309471 - DNA, 499 bp, Unknown
  Bacterial polypeptide expressing nucleotide sequence isolated from the Sargasso Sea
atgaccgaacaaagcctgataaaggtaaccgatgaagtcaagagaacggcattaatcgacaacgaaaagtatcttcaggaatatgaacgctcaataaacgatccggaaaatttctgggccgagcatggacaacggattgattggataaaaccttatacccgtatcaaagatgtctcttattctgaaaaagatctgcacatcaagtggttctacgacggcaccttaaatgtctcttcaaattgcttagacaggcatcttgaaaagaggggtgatcaaacagcgataatttgggagggagatgatcccaaagaagataagagaataactttcaaagaactgcattctgaggtgtgcaaattcgccaatgcgctcaaagagttaggtgtgaaaaagggtgatcgcgtaacgatctatatgcccatgatcccagaagcggccgtagccatgctagcgtgtgctcgggtaggggctattcattcagtagtttttggtggatttt

SEQ ID NO: 309472 - DNA, 1819 bp, Unknown
  Bacterial polypeptide expressing nucleotide sequence isolated from the Sargasso Sea
atgcctaaaaaaaaaaaagttaaaaaaaaagtaatctctaaaaaacaaaaagagacgatttataaaactaagaaagattggataaccaaagcattagttaataagtcacagtatttaaagaaatataatgagtcgattaaagataatgatagtttttggaaaaaagaaggaaaaagaattaattggattaaatcttataaaaaaataaaagacgtaaagtatagtaaagatgatgttcatataaaatggttttatgatggaacattaaatgcatcagcaaactgtatagatagacatcttaaaaagaatgctaacaaaaccgcaattatatgggttggggatgatcctaaaattcaaaagaaaataagttataaagaattacataaagaagtttctaaagcagcaaacggtttaaaaaatttaggtgttcaaaggggagatagagtaacaatttatcttacgatgatacctgagctggcttatacgatgctggcatgtgctagaataggtgctgttcactcaataatatttggtggcttttctccagatagtatttctggcagaattaatgattgtgagtcagattatgtgataaccgcagatgaaggtgtcagaggtggtaaaactattccgttaaaatctataacagatgaagccttgcagagttgcccaaacgttaaaaaatgtatcgtagtaaaaagaactggtactaaaaaaatagattggtttagtgacagagatgtttggtatcatcaaatgacgaaaaaagtttctgcaaaatgtgaaccagaggaaatgagtgctgaagatcctctattcattctttacacatctggttcgactggaaaaccaaaaggagttcttcacacaactggtgggtatatggtttatgcatcaatgactcatcaatatattttcaactataaaccaaaagatatttattggtgcacagctgatattggatgggttactggacacagttatattatttatggtccacttgctaatggcgcgactacaattatgtttgaagggataccaacttatcctgatacatcaagatggtggcaaatagttgataagtataaagttaacattttttatactgcaccgactgcaattagagctttaatgagagaaggtgataaacctgttaaaaaaacttctagaaaatccttaaaacttttaggtaccgttggtgaaccaataaatcctgaagcatgggaatggtattttaaaactgttggagatagtaaatgcccaattgtagatacttggtggcaaactgagacaggtggaattttaattagtcctcaaactggagcgatagatttaaaacctggttctgcaactaaaccattttatgggattaaaccagaaatacttgataaggatggtaaagttttaaaaggagaagctcaaggcagattgtgcatcgcacaatcatggcctggacaaatgagaactgtgtatggggaccaccaaaggtttatagatacatacttttcacaatttgatggaaaatattttacaggagatggatgtagaagagataaagacggatattattggatcactggacgagttgacgatgtaattattgtttcaggacataacctgggaactgcagaaatcgaaagtgcattcgtagctcatccaaaagtagcagaggcagcagtagttggttatccacatgacataaaaggaaatggtctttactgttacgtaactttaaatgcaggagaaaaaagtactcttgatttagagagagatttaaaactttgggtaagaaaacaaattggtccgatagcaacacctg

SEQ ID NO: 309473 - DNA, 1954 bp, Unknown
  Bacterial polypeptide expressing nucleotide sequence isolated from the Sargasso Sea
atgagctcgcagtctctctacaaagtctccggcaatatcgctgccaatgcacttgtaaataacgatcaatataaaaaaatgtaccaagagtcgattgtcaatccagagggtttctggagagagcacggcaaacggatcgattggataaagccatacactaaaatcaaaaaaaccacttttgacgatcataacttatcgattaactggttctacgacggcaccctaaacgcctcagccaactgcttagatcgccatctagcagagcacagcgaccgcgttgccatcatttgggaaggcgataacgccagcgaacaacgtcaaatcacctacggtgagctgcacactcaagtgtgtaagtttgccaacgccctacgcagccaaggcgtgcgccgtggggatattgtgaccatttatatgccaatggtgccagaagcggctgtcgctatgctggcctgtgcccgcatcggtgccgtgcattcggtagtctttggtggcttctctcccgattctatcgcttcacgggtcatagacggtaaatctaaggtcgtcatcaccgccgatgaaggtatgcgtggtggccgcgcgatcccactcaaacgcaacatcgacgatgcgctgaaacatcccgatgtcaccagcgttgagaaggtgattgtacttaaacgtactggcggcaaggttgattgggtagaaggccgcgatgtgtggtggcactctcttgttgaaaccgcatccgagcactgcgccattgaagaaatgggcgccgaagatccgctcttcttactttatacctctggttcaaccggtaatcccaagggcgtattgcacaccaccggcggttatatggtgtatgcctcaatgacccatgagtatgtgttcgattacaaacccggtgagatttactggtgtaccgccgacgtgggttggatcacgggtcattcctacatggtgtacggcccactcgcgaacggtgcaaccgtgcttatccacgaagggatccctaattacccaagtcctgcgcgtttaggcgagatgattgaccgccacaaggtgaatattctctacaccgcgccgacacttatccgtgcactgatggccgaaggtaaacagcattttgacaagtatgatggcagctcgctgcgcatcatgggctctgtgggtgaacccatcaacccagaagcttggcgctggtaccacgaggtcatcggtcatgagcattgcccgattgtcgatacttggtggcaaaccgaaaccggcggcattttgattacgccattaccaggtgcaaccgataccaaacccggctcggcgactcgtcccttctttggggtacaaccggcgctcgtggacaacatgggtaacattttagaaggcgcaaccgaaggtaacttagtgctgctcgactcatggccaggccaaatgcgtaccgtttatggcgaccatgaacgcttcgtgctgacctatttcaaaaccttccgtggcatgtactttaccggtgacggcgcgcgccgcgatgaagacggttactactggatcaccggccgtgtggacgatgtgattaacgtctccggccacagattaggcacagcagaagtagaaagtgcactagtgtcacacgaactggtcgctgaagccgccgttgtgggctatccccatgatattaaaggtcaaggtatttatgcctatgtcaccttaacccgcggcacagaagagagtgaagagcttcgccaagagctgcgccaatgggttcgtaaagaaattggcgctctggccacaccggatcttatccagtgggcgacaggattacctaagacacgttctggcaaaatcatgcgccgtttcctgcgtaagattgccgctaacgaagtgaccaacttaggtgacgcatcaacactggccgacccagccgtgattgagaccttgattgaaactcgcttgaatcgtaacgagtaat

SEQ ID NO: 309474 - DNA, 475 bp, Unknown
  Bacterial polypeptide expressing nucleotide sequence isolated from the Sargasso Sea
tttgatggaaaatattttacaggtgatggatgtaaaagagataaagatggttattattggattacaggaagagttgatgatgtaattattgtatctggacacaaccttggaactgctgaaatcgaaagtgcatttgtagctcattcaaaagttgcggaagctgcagtggttggatatcctcatgacataaaaggaaatggtttgtattgttatgtaactttaaatgttggagaagaaccaagcggagaacttgaaagagaactaaaactttgggttagaaaacagattggtccgttagcaacacctgatataattcatttttcgccagggttaccaaaaactagatcaggaaaaattatgagaagaattttaagaaaaattgctgcaaatgaacatgatcaacttggtgatactacaactttagctgacccaagtgttgtaaagagtctagtccaaaatagaaaaaatatttaaa

SEQ ID NO: 309475 - DNA, 1984 bp, Unknown
  Bacterial polypeptide expressing nucleotide sequence isolated from the Sargasso Sea
gatgtctgcgattgaatcggttcttcacgaaacccgtcagtttgcgccgcccgcggcgctcgaacaggcggcgaccatttccggcatgccggcctatcgcgcgctcgccgccgaagccgaaaacgattacgaaggattctgggcgcgtctcgcgcgcgagggtctggcgtggcacaagccgttcacgaaagtgctcgacgagtccaacgcgccgttctacaagtggttcgacgacggcgagctgaacgcgtcgtacaactgcctcgaccgtcacgtcgaagccggcaacggcgagcgcgtcgcggtgatcttcgaggccgacgacggcaccgtcacgcgcgtcacctatgcggatctcctcgcccgcgtgtcgcgtttcgcgaatgcactgaagaagcgcggaatcggcaagggcgaccgcgtcgtcatctatatcccgatgtcgatcgaaggcatcgtcgcgatgcaggcctgcgcgcgcatcggcgcgacgcactcggtcgtgttcggcggcttctccgcgaagtcgctgaacgagcggctcgtcgacgtcggcgcaaccgcgctcgtcacggccgacgagcaggcgcgcggcggcaagacgctgccgctgaagagcatcgcggacgaagcgatcgcgctgggcggctgcgaggccgtgaagagcgtgatcgtctatcgccgcaccggcggcaagatcgactggcacgccgggcgcgacctgtggatgcacgaactgacggccggcgaatccgaccagtgcgagccggaatgggtcggcgccgagcatccgctgttcatcctgtatacgtcgggctcgaccggcaagccgaagggcgtgcagcacagcacgggcggctacctgctgtgggccgcgcagacgatgaagtggaccttcgactggaagcccaccgacgtgttctggtgcacggccgacatcggctgggtcaccggccacacgtacatcacgtacggcccgctcgcatgcggcggcacgcaggtcgtgttcgaaggcgtgccgacctatccggacgccggccgcttctggaagatgatcggcgaccacaaggtcaccgtgttctacaccgcgccgaccgcgatccgctcgctgatcaaggcggccgaggccgacgacaaggtccatccgaagagctacgacctgtcgagcctgcgcatcatcggcacggtcggcgaaccgatcaatccggaagcatggatgtggtatcacaagtacgtcggccaggagcgctgcccgatcgtcgacacgtggtggcagaccgaaaccggcggccacatgatcacgccgctgccgggcgcgacgccgaccgtgcccggttcgtgcacgctgccgctgccgggcatcatggccgcggtggtcgacgaaaccggccaggacgtgcccaacgggcagggcggcatcctcgtcgtcaagcgtccgtggcccgcgatgatccgcacgatctggggcgacccggagcgcttcaagaagagctactaccccgaggaactcggcgggcggttgtatctggccggcgacggcaccgtgcgcgacaaggacaccggctacttcacgatcatgggccggatcgacgacgtgctgaacgtgtcgggccaccggctcggcacgatggaaatcgaatcggcgctggtctcgcacgaactcgtggctgaagccgccgtggtcggccgcccggacgatacgacgggcgaggcagtggtcgcgttcgtggtgctgaagcgttcgcgtccggaaggcgaggaagcggcggcgctggcgaagacgctgcgcgactgggtcggcaagcagatcgggccgatcgcgaagccgaaggacatccgcttcggcgacaacctgccgaagacgcgctcgggcaagatcatgcggcgcctgctgcgttcgctcgcgaagggtgaagcgatcacgcaggacacgtccacgctcgagaatccggccatcctcgagcagctcgccgaagtgcgctga

SEQ ID NO: 309476 - DNA, 1207 bp, Unknown
  Bacterial polypeptide expressing nucleotide sequence isolated from the Sargasso Sea
atgtcatataagaaaagttatcaaaattggcaaaataatcctatttcatattgggaagaaaaggctaaagatatttcttggtataaaaagcctaaaaaaatactggattcatctgatgctccattttggacttggttcccagatggagaattaaatacctcttataattgtttagacatacatattaaaaacggaaatggcgatagaaaagccctaatctatgatagtcctgttacacagacaaaaaagacctatacctataaagaactattaaataaaactgaaaaaatagctggagctcttcaagagcatggagttaaaaaaggtgatagagtattaatttatatgccaatgataccagaggcagtggcatcaatgcttgcatgtgcaagattaggtgcaatccatgtagtggttttcggaggttttgctcctaatgaattagccacaagaattaatgactctaaacctcagataattattgctgggtcctgtggtatagaaccaggtaaaataattgaatataaacctatgctagacaaagcaattgagttagctaaatataaagttaaaaaatgttttatttttcaaagagagatttgtaaagccaatcttattgatgatagagattttaattttcaggatgtaatagataattcttatagtgttactcctgtacctgtaaagtctaatgacccattatatattttatatacatcaggtactactggagatcctaaaggtatggttagagataatggtgggcacgccgttgctctaaaaaacagcatgaatatggtttatggattgcaaccaggagatgtattttgggcagcatctgatattggatgggtagtgggtcattcatatatagtatatgctccacttttgagtggttgtacttctatattatatgaaggcaaaccaacggggactccagatgctggttcattttggagagttataagtgagtataatgtttcagttatgtttacagccccaacagctctcagagctatcaaacgagacgatcctaatggtaaagaaataaaaaaatataatcttaaaaattttaaaatgcaatttttagctggagaacgagcagacccttctaccattcaatggactgaaaaacatttaaatgttccagttatagaccattggtggcaaactgaaactggatgggctattgcaggcaactttgccg

SEQ ID NO: 309477 - DNA, 766 bp, Unknown
  Bacterial polypeptide expressing nucleotide sequence isolated from the Sargasso Sea
atgtctgattatttaattaatacctccgaggactataataagatttatgaaaaatctaccaatgatgtagaggaattttggagtacactagctaaagataattttaaatggcaaaagccatggaattcagttttagaatgggattttttaaagccagaggttaattggtttcagggcgctaaattgaatataaccgaaaattgtattgatcggcatttagaaagtaatggagataaaatagctatcatttttgaaccaaatgatgtaaatgataaatctgaacatataagttacattaaccttcacaaaagagttaacaaaatggcaaatgttctaaaagacattggggtcaaaaaaggagacagggtttgcatttatttacctatgatacctgagcttgctattagtgttttggcttgtgcaagaattggtgctgttcattctgttgtttttgctggcttttctgcctcagctttatcaacaaggataaatgactgccaatgtgaagtggttataacttcagacggttcatttagaggaaataagattcttaatttaaaagaaatagttgatgatgcacttaatgattgccctcaagtttcttctgttcttgttgcagagagaacaaaatctaaaatcgaattaaaatatggaagggataaattacttaatgatttaattaaaaattcaagtgatagttgtccaatagagattatggattcagaagatccgttatttattttatatacttctggatctacaggca

SEQ ID NO: 309478 - DNA, 600 bp, Unknown
  Bacterial polypeptide expressing nucleotide sequence isolated from the Sargasso Sea
catggcaaaagaaactatatatgaaccttcaaaagaaataataagtaacgctgttatttcaaaggaagagtttgagaagctttatcagcaatcaataaataatccggaacaattttgggaacatcaagcgcgcaattacctatcttgggaacaagaatggaaatcagtaaaagacagtgatttagtaaaaggagaaataagctggttcaaaggggcaaagttaaatgcttctgtaaactgtattgatagacacctagaaaagaatgcagagaaaatagccattatttgggaaggagatgacccaaaagactctttaaagattacttataaacaactccataattctgtatgcaaatttgctaatgcattaaaaaaaagaggaatagggaaaggtgatagagtttgtatctacatgcctatgattcctgaggcagcttatgctatgttggcttgtgcaagaattggtgccatacattctgttgtatttggaggattttctccagaatcactcaaggacagaattttagactctgactgtgaaagtgtcatcactgctgatgaagggttacgaggctcaaaaaagatacccttaaaaaataa

SEQ ID NO: 309479 - DNA, 1742 bp, Unknown
  Bacterial polypeptide expressing nucleotide sequence isolated from the Sargasso Sea
tttagtaaataaatccggatatcaaaaaaaatattcagattcattaaaaaacaacgataatttttggaaaaaagaaggcaaaagaatttcctggatcaagccatatactaaaattaaagattataaatacagtaagactgatgttcatattaaatggttttatgatggaactttaaacgcatcagctaattgtattgatcgacacttaaagaaaaataaagataaaacagcaataatatgggttggtgatgatccaaaagttcaaaaaaaaattagttacaaacaattacatcaagaagtttcaaaagcagcaaatggattaaaagaaataggagtaaaaaaaggagatagagttacaatatatttaacaatgattcctgaattggcatacacaatgctagcatgtgcaagaataggagctgttcattcaattatttttggtggtttttcagcagacagtatttctgggaggattaacgattgcaaatctgattacgttattactgctgatgaaggtgttagaggaggaaagattatagacttaaaaggaaaagttgatgaagctcttttgaattgtccaaatgttaaaaaatgtgttgtggtaaaacgaactggaaacagaattaattgggatgaaagtagagatatttggtatcacgatataactaaaaaagcttctaagtattgtgaacctgaagaaatgaatgcggaagatccattatttattttatatacatctggatccacaggaaaaccaaaaggagttttacacacgactgggggctatatggtttatgcctcaatgacccatcagtatatttttaattataaaccaaaagatatatattggtgcactgctgatattggctgggttacaggtcatagctatataatttatggacctctttcaaatggagcaacaacgatcatgtctgaaggcattcctaattatccagattggtctagatggtggcaaatagtagataaatataaagttaatattttttatacagcaccaactgcaataagagccatgatgagagaaggggacggtcctgtaaaaaaaacgtcaagaaaaactctaaaactactaggaacagttggtgaaccaataaacccagaggcttggcaatggtattttaagactgtaggtgactctagatgtccaatcgttgatacatggtggcagacagaaactggaggaattttaattagtcctcaaactggtgctatagacttaaagcctggatctgcaacaaaaccattttatggaattaaaccagaaatagttgataaagatggtaaggttctaaaaggagaggcacaaggaagattatgtatagctcaatcttggccaggtcaaatgagatcggtatatggagaccataatagatttatagaaacatacttttctcagtttgatggaaaatattttactggagatggatgtagaagagataaagatggatactattggataacaggaagagtggatgatgttattattgtatcaggacataatttaggaactgcagaaatagagagtgcctttgtagcacatccaaaagttgcagaagctgcagtagttggatgtccacacgatataaaaggaaatggattatattgttatgtaactctgaatgtaggagaagaaccaaatggagatctagaaagagaactaaaactttgggtaagaaaacaaattggagtaattgctactccagatttttattcagtttttc

SEQ ID NO: 309480 - DNA, 1276 bp, Unknown
  Bacterial polypeptide expressing nucleotide sequence isolated from the Sargasso Sea
atgaaaaattcatttgctcaaatttataacgattcgcttcaaaaacctgaagaattttggaaagatatttcagaagatgtgttttggtttaaaaaaccaacgcgaattttaaataaatctaatcctcccttctataaatggtttgaagatggtgttacaaacacttgttataacgcattagatttacatatagatcagggacgaggtgataaaacagcattaatttatgacagtcctataactggaaataaagcaaagtttagttttaacgaattaaaagaaaaagtctcaaaatttgctggggctttagataatcaaggggtaaaaaaaggagatagagttataatttacatgcctatgataccagaggcagtaattgctatgcttgcctgtggcagaattggagcaattcattctgttgtatttggaggatttgcgtctaatgagttagccagcaggatagacgatagcaaggctaaagttttaattactgcttcatgtggttttgaacctggaagaacagtcgagtatcggcctttagtagatgaagctttaaaattagcaaatcataaagtcgagaaggtcattttatttcaaagaaaagaccatgaagtaaaacttaacgaacctctggagatcagttgggaagaatgtttagcaaatgctaaaaataaagattgtgttgaaatgggttcaaatgaactagcctatattttatatacatctggaacaacaggtgttcctaaaggaattgttcgagatattggtgggcatatagttgctttaaaatggacaatgaaaaacatatacaacattaacaccgatgatatctggtggtcagcaagcgatataggatggattgttggtcactcttacatagtctatgctccgttatttaaagggtgcactacagtattgtttgaaggcaagcctgttggaactcctgatgctggtacattttggagaataatatctgaatacaaagttaaatcacttttcactgctccaacagcttttagagcaattaaaaaggaagacccagaaggtaaatttttctcaaaatatgatctaagttcatttgaatctttatttcttgcaggtgaaagagctgatcccgatactattaaatgggcagaaaatttattgaaagtacctgtaattgatcattggtggcaaactgaaactagttgggcaataagttctaattgtacaggaattgagatgcaaaaactaaatatggctcagcttgtaaagcagttcctggttatgatgtaaa

SEQ ID NO: 309481 - DNA, 1375 bp, Unknown
  Bacterial polypeptide expressing nucleotide sequence isolated from the Sargasso Sea
agttcaaaaaaaaatatcttataaagagcttcacaaagaagtttcaaaagcagcaaatggattaaaagaaattggagttaaaaaaggtgatagagttactatttacttaacaatgatacccgaactagcatacacaatgcttgcttgtgctagaattggagcagttcattcaattatatttggaggattttcaccagatagtatttctggcagaatcaatgattgtaaatctgattatgtaattactgcagatgaaggtgtaagaggaggaaaaacaattcatcttaaatcaattatggacgaggctttagtagatagtccaaaagtaaaaaaatgtgtggtaataaaaagaacaggaaacaggatcaattgggatcctagtagagatgtttggtatcatgaaattattaaaaatgtttctaacaaatgtgaacctgaagaaatgaatgcagaagatccattatttatattatatacatctggatcgacaggaaaaccaaagggagttttacatacaactggtggttatatggtttatgcttcaatgactcatcagtatatatttaattacaaacctaaagacatttattggtgtacagctgacataggttgggtgacaggtcatagttatataatttatggtccattatctaatggagcaactactataatgtttgaaggaattccaacttatcctgacaattctaggtggtggcaaattgttgataaatataaggtaaatatattttatacagctccaactgcaatacgcgctttaatgagagaaggtgataaaccagtaaaaaaaacatcaagaaaaactttaaaattattaggaactgtaggcgaacctataaatccagaagcttggcagtggtattataaagttgttggagattcaagatgcccaattgttgatacttggtggcaaacagaaactggtggaattttaattagccctcaaacaggagctattaatttaaaacctggttcagcgacaaaacctttttatggaattaaaccactaatagttgataagacaggtaaagttttaaaaggtgaagcacaaggtagactgtgcatagctcagtcatggccaggacaaatgaggactgtttatggagatcataaaagatttatagatacttatttttctcaatttgatggaaaatattttacaggagatggttgtcgtagagataaggatggatattactggataacaggaagagttgatgatgtaattattgtttcaggacataacttaggaacagctgaaattgaaagtgcatttgtagctcaccctaaagttgctgaagcagcagtggttggatacccacatgacataaaaggaaatgggttatactgttatgta

SEQ ID NO: 309482 - DNA, 1507 bp, Unknown
  Bacterial polypeptide expressing nucleotide sequence isolated from the Sargasso Sea
tcgtctataaaccagaaagagagtttttggaaatctgtatcggaagatattttttggtacaaaaaaccatcaaaaattctaaattcttcgaaccctcctttttataaatggtttgaagatggcgaaacaaacacttgttacaacgctgtagatgttcatgtggaaaagggtcgtggcgataaaactgctatcatttatgatagcccaatcacgggtacaaaatacaaactttcctacaaagaactaaaagaaaaagtttcaatttttgctggagcactaaaaaatcagggaattaaaaaaggagatagagttataatttatatgccaatgatacctcaggctgtagttgctatgttagcatgcggaagaattggcgcgattcattcagtagtttttggtgggtttgcagcaaatgaattggcaagtcgaattgacgactctaaagcaaaaattataatttcagcttcttgtggttatgagccaggaagaactgttcattacaaacctcttttgaataaatctattgagattgcaaagcataaaccagaaaaatgtataatttggcagagagaaagagataaagctgatcttgaccccaagagggatattgattgggttgaagctttaaaaggcgctaagccaactgaatgtgaaaaaatgaattcaaatgattacgcttacatactatacacctcaggaacaacaggaactccaaaaggaatagttagagatgttggtggtcatatcgtagctttaagatggacgatgaaaaatatttataatattgatcaagatgatgtttggtggtctgcaagtgatataggctggatagttggtcactcatatattgtttatgctcctctattttatgggtgtacaacagttttgtttgaggggaaaccagtgggcactcctgacgcaggtgttttttggagagtaatatcagaatataaagtaaaatccttatttacagccccaacagcaataagagcaattaaaaaagaggatccagaaggaaaattttttaaaaaatatgatttatcaaaatttgatacgctatttttagctggtgagcgtgctgatcctgatacaataaaatggtttgaaaaactttcgagcgcacctgtcatagatcactggtggcaaacagaaacaagttgggccataagttcaaattgtgcaggaatagaaaaatttccaattaaatatggttctgcttttaaaccagttccgggctatgatttaaaagttcttaatagtgagggtaaagaaaataaagcaggtcagatgggcgatattgttgttaagctgcctttacctccaggtactttcccaacgttatggaatgcagacgaaagatataaaaaagtttatatgtcaacgtatgaaggtttttatcaaacttatgatgcaggccatattgatgaggatggttacgtttggattatgtctagaacagacgatatcattaacgtagcaggacatagattgtctactggagcaattg

SEQ ID NO: 309483 - DNA, 1089 bp, Unknown
  Bacterial polypeptide expressing nucleotide sequence isolated from the Sargasso Sea
tcgactggaagcccaccgacgtgttctggtgcacggccgacatcggctgggtcaccggccacacgtacatcacgtacggcccgctcgcatgcggcggcacgcaggtcgtgttcgaaggcgtgccgacctatccggacgccggccgcttctggaagatgatcggcgaccacaaggtcaccgtgttctacaccgcgccgaccgcgatccgctcgctgatcaaggcggccgaggccgacgacaaggtccatccgaagagctacgacctgtcgagcctgcgcatcatcggcacggtcggcgaaccgatcaatccggaagcatggatgtggtatcacaagcacgtcggccaggagcgctgcccgatcgtcgacacgtggtggcagaccgaaaccggcggccacatgatcacgccgctgccgggcgcgacgcccaccgtgcctggctcgtgcacgctgccgctgccgggcatcatggccgcggtggtcgacgaaaccggccaggacgtaccgaacgggcagggcggcatcctcgtcgtcaagcgtccgtggcccgcgatgatccgcacgatctggggcgacccggagcgcttcaagaagagctactaccccgaggaactcggcgggcgcctgtacctggccggcgatggcaccgtgcgcgacaaggacaccggctacttcacgatcatgggccggatcgacgacgtgctgaacgtgtcgggccaccggctcggcacgatggaaatcgaatcggcgctggtctcgcacgaactcgtggctgaagccgccgtggtcggccgtccggacgatacgacgggcgaagcggtggtcgcgttcgtggtgctgaagcgttcgcgtccggaaggcgaggaagcggcggcgctcgcgaagacgctgcgcgactgggtcggcaagcagatcgggccgatcgcgaagccgaaggacatccgcttcggcgacaacctgccgaagacgcgctcgggcaagatcatgcggcgcctgctgcgttcgctcgcgaagggcgaagcgatcacgcaggacacgtccacgctcgagaatccggccatcctcgggcagttgaaccgctcggtgtgac

SEQ ID NO: 309484 - DNA, 1717 bp, Unknown
  Bacterial polypeptide expressing nucleotide sequence isolated from the Sargasso Sea
tatgccaaaaaaaaaaaagaagaaaagcaaggtaagaaaaaaaaaatctaaagttagaaaaaaaacctcaaaaaaggtgaatagaagatctaaagttagaaaaaaatcttctaaaaaactaaaaaaaaaaattaaagcaaaaaaagaaaacggaaatacacctcctgaagttgttattaaaacaaaaccagaatgggtaaaaagtagcttggcaaataaaagtaaataccaacaaaaatattctcaatccataaaaagcaatgacgaattttggaggaaagaaggaaaaagaattacttggataaagccatataaaaaaattaaggacgtaaaatacagtacaaaagaagtaaaaattaaatggtttgaagatggcactttaaatgcttcagcaaattgcattgatagacatttaaaggataaaaaagataaaactgctattatttgggttggagatgatccaaaagatagtcaaaaaatttcttataaacaacttcatcaaaaagtttctaaagcagcaaatggtttaaaaaaattaggaattaaaaaaggtgaccgtgtaacaatttatttaactatgataccagagttagcaattttaatgctagcttgtgtaagaattggtgcagtacattcaattatttttggaggtttttcagcagattctatctctggaagagtaaatgattgcgaatctgaatatataatcactgctgatgaaggagtgagaggtggaaaaactataccactgaaatatacagtcgatgaagctttaatgagttgtccaaacgttaaaaaatgtattgttgttaaacgaactggaaattatatcaactgggatcataacagagatgtttggtatcatgatttaattaaagacgttcctaatcattgtgaacctgaagaaatgaatgcagaagatcctttgttcattttatatacctcaggttcaacaggtaaacctaaaggagttcttcatactactggtggttatatggtttatgcgtcgatgacacatcaatatatttttaactacaaacctaaagatatttattggtgtactgctgatattggttgggtaactggacatagttatattatttatggaccactttcgaatggtgcaacaactataatgtttgaaggaattccaaattatcctgatagttcaaggtggtggcaaatagttgataaatataaagtaaatactttttacacagcaccaactgcaattagagcattaatgcgagagggagataaaccagttaaaaaaacctctagaaaatcccttaaacttttaggaactgtaggagaaccaataaatccagaggcttggatgtggtactataaaactgtgggtaattcaaaatgcccaattgtagatacttggtggcaaacagaaactgggggaataatgattgctcctcaaacaggtgcaattcctcttaaacctggatctgcaacaaaacctttctatggaattaagccagtgcttgtagataaaaacggtaaagaaattaaaggtgctggagaaggaagattgtgtatagctcaatcatggcctggacaaatgagaactgtttatggtgatcatcaaagatttatagatacatacttttctcaatttaatggtaaatatttcacaggcgacggatgtcgaagagataaagatggttattactggataactggtcgagtggatgatgtgatcattgtt

SEQ ID NO: 309485 - DNA, 1123 bp, Unknown
  Bacterial polypeptide expressing nucleotide sequence isolated from the Sargasso Sea
tcacacgactggtggatacatggtttatgcctcaatgacacatcaatatatttttaattataagccaaaagatatttactggtgcacggctgacattggttgggttacaggtcatagctatataatttatgggccactttccaatggagcaactacaattatgtttgagggaattccaaattaccctgacagttcaagatggtggcaaatagttgataaatttaaggtaaatacattttacactgctccaactgcaatcagagcccttatgcgagaaggcgataaacccgttaaaaaaacatcacgtaaatcattaaaacttttaggcacagttggggaaccaatcaatcctgaagcatggatgtggtactataaaactgtaggaaattctaaatgcccaattgtagatacatggtggcagacagaaacaggtggaattatgattgctcctcaaactggtgctattccacttaagccaggttcagcaacaaaaccgttctatggaattaaacctgtcttagttgataaaaacggtaatgaaattaaaggtgctggagaaggaagactttgtattgctcaatcatggccaggtcaaatgagaacagtttatggtgatcatcaaaggtttattgatacttacttttctcagttcaatggaaaatattttacaggagatggatgtagaagagataaggatggttactattggataacaggtagagtggatgatgtaattatagtatcaggacataacttgggaactgcagaaatagaaagtgcatttgtcgctcatccaaaagtagcagaggcggcagtagttgggtatccacatgatattaaaggaaatggtctctactgttatgtaactctaaatgctggagaaacagaaacaggagagcttgaaagagatttaaaactttgggtaagaaaacaaattggacctttagcaactccagaccttattcattttactctaggtcttccaaaaacaagatctggtaaaataatgagaagaattttaagaaaaattgctgctaatgaacacgagcaattaggtgatactaccactttggcagatcctagtgttgtaaacagtttagttgagaatagaaaaaatatttaa

SEQ ID NO: 309486 - DNA, 1480 bp, Unknown
  Bacterial polypeptide expressing nucleotide sequence isolated from the Sargasso Sea
taaaaaacctacaagtattttaaacaaatctaccccaccattttatagatggtttgaagatggtgtaacaaatacctgttacaacgccattgatgtccatattgataaaggtaggggtgataagactgctttaatctatgatagcccaatatctaacaataaagcaaagtttacatataatgaattaagagaaaaaatatcaaaatttgctggagcactagataatcaaggtattaaaaaaggtgacagggtaataatttatatgccaatgatacctgaggccgttatagcgatgctggcatgtggaagaattggcgcaatacactcagttgtttttggtggatttgcttcaaatgaactagcgagcagaattgatgacagtaaagcaaaaattttaatcacagcctcttgtggatttgaaccaggaagaactgttgagtacagacctttagttgatgaagcattgaaacttgcaaaaaataaagttgaaaaagtaattatctttcgaaggaaagatcacgaagtaaaacttaactctccgcttgagattagctgggaggaagcacttgttaatgccaaaaataaagattgtgttgagattggagcaaatgagtttgcttacattttatatacatctggaactacaggaataccaaaaggaatagttagagatgttggaggtcatatagttgctcttaaatggacaatgaaaaatatttataatgttgatgagaatgacgtatggtggtcggcaagtgatattgggtggatagtaggacattcatatattgtttatgctccattatttaaagggtgtacaacagttttatttgaggggaaaccagttggaactcctgatgcaggagtattttggagaataatttcagagtataaaattaaatctttattcactgctccaacagcatttagagctattaaaaaagaagacccagatggaaagtttttctcaaaatatgatttaagttcttttgaatctttatttctagctggagaaagagctgatcctgatacaataaaatgggctgaaaatcttttaaatgttccagtcatagatcattggtggcaaacagagactagttgggcaataagttcaaattgtactggaatagaaatgcaaaaaactaagtatggttcagcgtgtaaagcagttccaggttatgatgtaaaaataattaaaccagatcattcgattgcaaaaccaaatgagatgggagatatagttgttaagttacctttacctccaggaacatttcctaccctttggaacgctgataagagatacgaagaaaattatatgagtaattataagggttactatcaaacatatgatgctggtcatatagatgaagatggatatatatggattatgtcacgaacagacgacataattaatgttgctggtcaaaaattatctacaggtgcaattgaagaggtttatcagaacatcagtcagtgctga

SEQ ID NO: 309487 - DNA, 2080 bp, Unknown
  Bacterial polypeptide expressing nucleotide sequence isolated from the Sargasso Sea
tatgcctaaaaaaaagaaaaaatctaaatcaagaaaaaaaacctcaaaaagaaagaaggttaaaaaaagaaaaaaaattcttaaaagaaaaaaaaagattagaagtaagattaaaaaagttaaaattaataacgaaggctcaacacaagaactaatttttaaaccaaaaccagagtgggtgaaaagtggtttaattaataaatctcaatatcagaataaatatactgactctattaaaaacaataatgctttttggaaaaaagaaggaaaaagaattacatggataaaaccatataaaaaaattaaagatgtgaagtatagtaaagatgaagttaaaataaaatggtttgaagatggaactttaaatgcctctgctaattgtattgatcgacatttaaaagataaaaaagataaaacagctataatttgggtaggtgatgatcctaaggatactcaaaaaatttcttataaacaacttcatcaaaaagtttcaaaagcagctaatggtcttaaaaaattagggatacaaaaaggagacagagtaacaatatatttaacgatgatacccgagctggctgttttgatgttagcttgtgcaagaataggagccatacattctataatatttggagggttttcagcagagtctatttctggaagagtaaatgattgtaaatcagaatacattataacagctgatgagggtgttagaggtggaaaaacaattccattaaaagcaacaaccgatgaagcattaagtaattgtcctgatgttaaaaaatgtattgttgtcaaaagaacaggaaactatgtttattgggatgacgacagagatgtttggtatcatgatctaattaaagatgtcccaagtcattgtgaacctgaggaaatgaatgctgaagatcctttatttattctttatacgtctggatctacaggtaaaccgaaaggtgtactacatacaacaggcgggtacatggtttatgcttccatgactcatcaatacatatttaactataagcctaaagatatttattggtgtactgcagatattggttgggtaacaggtcatagttatattatttatggtcccttatctaacggagctactacaataatgtttgaaggagtaccaaattatccggacagctcaagatggtggcagattgttgataaatataaagttaatattttttatactgctccaacagctataagagcccttatgcgagagggtgatgatccagtaaataaaacatctcgaaaatctttaaaattattgggtacagtcggagagcctataaatccggaggcttggatgtggtattacaaaacagttggaaactcaaagtgtccaatcgtagatacctggtggcaaacagagacaggtggaattttaattgcgcctcaaacaggagctatacctctaaaacctggatcagcaacaaaacctttttatggaattaaacctgttcttgtcgataaagatggaaaagaaattaaaggtgcaggagaagggagactttgtatagctcagtcttggccaggccaaatgcgaactgtttatggcgatcatcagagatttattgatacttacttttctcaatttgatggaaaatattttactggtgatgggtgcagacgagacaaggatggatattactggatcactggacgagtagatgacgtaattattgtatcaggacacaacttgggtactgctgaaattgaaagtgcttttgttgctcatcctaaagttgctgaggctgctgtggttggttatccacatgacattaaaggaaatggactatattgttacgtaactcttaatgcaggtgagactgagacaggagatcttgaaagagaactaaaattatgggttagaaaacaaataggtccattagcaactcctgacttgattcactttactccagggcttccaaaaacaagatctggaaaaataatgaggagaattcttagaaagattgcagcaaatgaacatggtcaattaggtgatactactactttagctgatccaagtgttgttgatagtttagttgacaatagaaaaaatacttag

SEQ ID NO: 309488 - DNA, 1765 bp, Unknown
  Bacterial polypeptide expressing nucleotide sequence isolated from the Sargasso Sea
atggcagatgacctcatagagtccatattaaatgagtcaagaagttttggaccaccgaaagattttattgatcaagccaatattgatgaagaaaaagcccataatttaaaaaagcaagcagaggaaaaccatattcagtattgggccacccttgcgaaagatcagttggagtggtttcagccctttaataatattctcgatgagtctaaggctcctaattacgaatggttcaatgatggagtgattaatgcttcatataattcattggatgtaaatgtcagtaagaacccaaacaaaactgcaatcatctttgaaacagaggatggaaaatctgagcacattacatacaaagagcttctttcaaaaacctctcaatttgctaacggattgaagaagctgggagtagagccgatggatagagtggtcatctatatgcctatgtgccctgaggcagtgatagctatgcaagcatgcgcaagaattggagcaatacactctgttgtatttggagggttttcctcaaatgccctcaaagacaggattgaagatgctaaatccaagatcgtgataaccgccgatggggcatataggggtggaaatatcattccattgaagcaagcaacagatgaagcggtctctcaatcatcatacaaagtagaaaatgtcgtggtctttcaaaggaccggagaaaaaatagaattcaatgagaagagagatgtttggtggggagacctggtttcagattgtgattcaaattgtgatccagagccactgaatgccgaacacccattgtttattctctatacatctggctctactggtaagccgaaaggaattcagcactcaacagcaggatacatactgcacgcaaaaacaacattttcttgggtatttgatattaaaaatgatgacgttttttggtgcacagcagatgttgggtggatcactgggcatacctatgtggcatatggaccattgctggctggtgccacgattcttatctatgaaggtgctcccacttttccagatgtcggaaggttttgggatatttgcgagaaacatgctgtcaccattttttatactgcgccgacagcaattagagcattgatgaaacacggagatgaaattccacaaagctatgacttgtccagtctgcgtctacttggaacagtaggtgaaccaataaaccctgaagcttggatgtggtaccacagaattattggtcaagagcgttgtccaattgttgatacttggtggcaaacggagacaggcggagccatgatcagcccccttcctggggtcacagagacaaaacctgggtcatgtacaactccaatgccaggtattgatgttgatatcgtcgatgagctaggagagccagtaggcgaggcaaatcagggagggtatctggttatcaaaaaaccatggccctcaatgttaagaaccatatggggagataaccaaagatatattgatacttattgggaaaaatttgacggaaggtattatgttgctggcgatagtgcatacagagatgaggatggttgccattggatcatgggcagaattgacgatgtgctcaatgtctcaggccaccgcttgggaacgatggaggtagagtcggcgcttgtcgcaaatgaaatggttgcagaagcagctgttgttggaagaccacatgaagtcaaaggcgaaagcatctttgcatttgttgtgaccaaaggagagagaccgagtggagaagacgcaaaaaaaatgcaggaagctc

SEQ ID NO: 309489 - DNA, 1468 bp, Unknown
  Bacterial polypeptide expressing nucleotide sequence isolated from the Sargasso Sea
catgaaagatagttttaacaaaatttatcaagaatctatccaaaatcctgagaagttttggcaaaatgtatctgaagatatcttttggtttaagaaaccatcaaaaattttaaacaaatcaaatcctccattttataaatggttcgaagatggagtgacaaacacctgttacaatgcaattgatactcacattgataaaggcaatggtgataaaattgcattgatatatgacagtcctatcacaaataacaaagcaaaattcacttacaatgaattaagagaaaaaatttcaaaatttgctggtgcacttcataatcaaggtatcaaaaaaggcgacagggtaattatttacatgccaatgataccagaggctgttatagcaatgcttgcatgtgggagaattggggcaatacattcagttgtctttggtggatttgcgtcaaatgagttagctagcaggatagatgacagtaaagcaaagattttaatcacagcctcttgtggatttgagccaggtagaacagttgagtatagacctttagttgacggagcacttaaacttgcaaaacataaagttgaaaaagttattttctttcaaagaaaagatcatgaggtaaaacttaactcacctcatgagattagttgggaagagtctttaataaatgcaaaagataaagattgtgttgagataggagctaatgagtttgcttacattttatatacttctgggaccactggaattccaaaaggtatagtaagagatgttgggggtcatattgttgctctcaaatggacaatgaaaaatatctataatgtagatgaaaatgatgtttggtggtcagcaagcgatattggctggatagtaggacactcatatattgtttatgctcctttgttcaaaggatgtacaactgtattgtttgaaggtaaaccagttggaacacctgatgcgggtgttttttggagaataatttctgaatacaaaataaaatctttgtttactgctccaacagctttcagagccattaaaaaagaagatccaaatggaaaatttttttctaaatatgacttaagttcgtttgagtcattgtttttagctggagagagagctgatcctgatactttaaagtgggcagaaaatcttttaaatgttcctgtcattgatcactggtggcaaactgaaactagttgggcaataagttcaaattgtactgggatagaaatgcaaaaaactaaatacggatcagcatgcaaagcagttccaggttacgatgttaaaattattaaaccagatcactcaatagcaaaaccaaatgagatgggcgatatagttgttaaattacctttgcctccaggtacatttcctacactttggaacgctgataagagatatgaagaaaattatatgactaattataaaggttattaccaaacttatgatgcaggacacattgatgaagatggatac

SEQ ID NO: 309490 - DNA, 1692 bp, Unknown
  Bacterial polypeptide expressing nucleotide sequence isolated from the Sargasso Sea
aatgcaaagaataaaaaccttatctgaatatttcaaaaaatacgaattaagcgaaaaagatcctgcaaaattttggtctcaaattgctgattcatttttatggaaaaaaaagtgggacaatgtccttgagtcggattttgaaaatgcagattttaagtggtttaaaaatgctcaattaaatattactgaaaatatttttgagagaaacctttctcaaagaggggataagactgcaattatttgggagccaaatgatcctaaagagtcaccgatatatttatcatacaaagaactttacaagcaaacatgtactttttctaatgctcttagaagtaaaggaattaaaaaaggagacagagtaattatctatatgccaatggtaccagaggcagctattgccatgcttgcttgtgcaagagtgggagcagttcactcagttgtttttgcaggtttttctgctgcatctctagctgatcgaataaatgactgtgaagcaaaaatggtattaacatctgatggaaactttagaggtaataaaacaattcctgttaaagatgtagttgatgaagctcttgaaaaatgttcgtcaatagaaagtgttattgtgttagaaaggacaaaacaaaatattaatatggaggacggaagagactcttggtggcatgaatgtattgaggatcagcctaaaacgtgtgattctgaagttatggattcagaggacttattatttatcttatatacatcaggttcaacaggtaagccaaagggtgttgttcattcttcagctggatacatgatatactcttcgtatacattcttaaacgtattccaatacgatgaagacgacatttattggtgtacggctgatgtaggatggattacaggacattcttatattgtatatgggcctttgctatgtggagctactacagtaatgtttgaaggtgttccaacatatccaaatgttagtcgtttttgggatatagtggataagtataaggtaaaccaattttatacagcaccaaccgcaattcgagctcttcaagctcatggtcttgagccacttgaaaataattcactagattcattgaaagttattggatctgtaggagagccaataaatgaagaagcatggcattggtaccatgataatgttggtaaaggaaagtgtcctttagtagatacatggtggcagactgaaactggtggaataatgatttcagcacttgcgggaataactcctaacaagccagctcatgcctcactgccattaccaggtataatacctgtaattgttgacgcagaaggtaatgaattaaatggaaataatgttcaaggtaatttatgtattaaatctccttggccatctatcattaggactacatacggagatcataaaagatgcattagtacttatttctcgcattataaaggtatgtactttacaggtgatggagtaaaaagagaccatgatggatacctaagaatacttggtagagttgatgacgtaattaatgtatctggtcatagaatgggaacagctgaagttgaaaatgctattaatgagcatgaagatgtaattgaatcagctgtggttggatatccacatgatattaaaggtgagggaatatatgcatatgttattgtaagtacaaaattaaatgatgatgaaattaagaacctagataataa

SEQ ID NO: 309491 - DNA, 1189 bp, Unknown
  Bacterial polypeptide expressing nucleotide sequence isolated from the Sargasso Sea
atgcaaagaattaaatctttatcagagtactttgaccattatgaaaaaagtcaaaaggatccagaaggattctggtctaaaattgctgagtcatttaattggattaaaccttggtcaaaggttttagaatctgattttgaaaaagtaagtattaaatggtttattgatgctaaacttaatattacagaaaatatttttgaaagaaacctagtcaaaaacaaggaaaagactgcaattatctgggagcctaataatccagatgaagaaacaaaaaaaatttcttatcaggagctttacgaagaaacctgtaagttctcaaatgctttaaaaaatcttggaataaaaaaaggggataggattataatatacatgcctatggttcctggagcagcaattgctatgttagcttgcgcaagagttggggcaattcattcagttgtttttgccggattttcatctacttcattagctgatagaattgatgattgtgaagcaaaaatggttataacttctgatggaaattttagaggaaataaagttatacctgtcaaatcagttgttgatgaagctctagaaaagtctaattcgattgaaaaggtagttgtgcttaaaagaactaatcaagatgttaacttagttgaaaatagagatttttggtggcatgaattagttgcagatcaatcttcagaatgtaaagctgaagtcatggattcagaagacatgctatttattttatacacatcaggctcaactggaaaacctaaaggagtggttcatacaactggaggttatatggtatattcagcctatactttttcaaatgtatttcagtatgataaagatgatatatactggtgtactgcagatgtaggatggattacaggacactcttatatagtttatggtcctcttttatgtggtgctacaagcttaatgtttgaaggcgttccaacatacccaaatgttagtagattttgggatatagtggataagcataaagtgaatcagttttatactgctccaacggcaataagagcccttcaagcacatggcttggaacccttagaaaataattcattagaatcattaaaagtaattggatcagttggagaaccaataaatgaagaggcatggcattggtatcatgataatattggtaaggggaactgtccactagtagatacttggt

SEQ ID NO: 309492 - DNA, 1516 bp, Unknown
  Bacterial polypeptide expressing nucleotide sequence isolated from the Sargasso Sea
aggacaaataattaagattaaacctgaatgggttaaaagaagtctagcaaataaatctcagtatcaaaaaaaatattctgaatctattaaaaataacaatacattttggaaaaaagagggaaaaagaattacatggataaaaccttacaaaaaaataaaggacgtgaagtatagcaaagatgaagtgagaattaagtggtttgaagatggtactttaaacgcgtcagttaactgtattgatcgtcatttgaaagataaaaaagataaaactgcaattatttggataggtgatgatccaaaggatactcaaaaaatttcttataaacaattacatcaaaaggtttcaaaagctgctaatggcttaaaaaaattaggaatacaaaaaggtgatcgtgtaactatttatctgacaatgattcccgaactagcaatcttaatgttggcttgtgcaagaataggtgcagtacactcgataatttttggaggtttttccgcagaatcaatctcgggaagagttaatgattgtaaatctgaatatataattacggcagatgaaggagtgaggggaggtaagactattcctctgaaagcaacaacagatgaagctttatctaattgcccagacgtcaaaaaatgtattgtagtgaaaagaactggtaactatgtgttctggaatgaagatcgagatgtttggtatcatgatttgataaaagatgttccaagtcattctgagcctgaagaaatgaatgcagaagatcctttatttattctttatacatcaggatcaactgggaaacctaaaggggttctgcatactaccgggggatatatggtttatgcttctatgactcatcaatacatttttaattataaaccaaacgatatttattggtgcacagcagatattggatgggtaactggtcatagttatataatttatggtcctcttgcaaatggtgcaaccactataatgtttgaaggtgttccaaattatcctgatagctcaaggtggtggcagatagtagacaaatataaagtaaatactttttatactgcaccaacggccataagggccttaatgagagagggcgatggcccagtcaataaaacttctagaaaatccttaaaactattgggaactgttggagaaccaataaatccagaagcgtggatgtggtattataaaacagttggaaattcaaaatgtccgatagttgatacatggtggcagacagaaacagggggaattcttattgcaccacaaactggagctattccattaaaaccagggtcagcaacaaaacctttttatggaattaaaccggtattagttaataaagatggaaaagaaataaaaggtgagggcgaaggtaggctttgtatagctcaatcttggcctggtcaaatgagaacggtatatggtgatcatcaaaggtttattgatacctatttttcacagtttgacggaaaatattatactggagatggatgtaaaagagataaagatggttactac

SEQ ID NO: 309493 - DNA, 1004 bp, Unknown
  Bacterial polypeptide expressing nucleotide sequence isolated from the Sargasso Sea
gctgaagatttgttatacattttatatacatcaggaacaacagctaaaacctaaaggtatcgtccatacacaggctggttacctcactggagttacaactactcatcatgaggtatttgatgttaaagaggatgatatttattggtgtgctgcagattgtggctgggtaacgggtcatagttatattgtttatggacctttagcaaataaatcaacaagtgtaatgtacgaaggtgcaccaaatgcccccgatgaaaaaagattatggagcataattgaaaaatataaagttaatattttttatactgcaccaacggcaattagagcatttatgaaatggggagttgagcatccgcaagctcacgatttaagttcattgagaatacttggtactgttggggagccaattaatcctgaagcatggatgtggtaccacgaaaatattggtggagaaaattgtgcaattgttgatacttggtggcagacagaaacaggctcaattatgatttcacctttgccaggcgtaacaagcactaaaccaggatctgcctgtggtcctttacctggtatagaatctgtaattattgacaatgatggaaatgaagtgggcaaaggagaaggtggatttttagcaattaaatctccgtggccatcaatgcttcgaacagtatatggagatgacgaaaggtatattgatacatattggtctcaacacgaaggtttatattttgccggtgatggtgcaaaatatgatgaagagggttacatttggcttttaggtcgtgttgatgacgtaatgaatatatctggacatagaatatctactgcagaagttgaaagtgcgttagtttcacataatgctgttgcagaggcagcagttattggtcgaagtgatgaaataaccggtgaagcaattgcagcatttgtttctttaattggcactgaggaaggcaatgaagatttgattgcagaacttagacagcatgtaagtgacaaaattggtc

SEQ ID NO: 309494 - DNA, 1195 bp, Unknown
  Bacterial polypeptide expressing nucleotide sequence isolated from the Sargasso Sea
atctataaaagataatgaaagtttttggcgcaaagaaggaaaaagaattacctggatcaaaccttatacaaaaattaaggatataaaatacagcaaaaaagaagttaacattaaatggtactatgacggcactttgaatgcctcagctaattgtatagacaggcatcttgaaaagaaagctaacaagcctgcaattatatgggtcggtgatgatcctgctgactcaaaaaagattagttacaaagaacttcacaaaaatgtttgcaaagcagcaaatggattaaagagtataggaatacagaaaggtgatagagtcacaatttatcttactatgattcctgagcttgcatacataatgttagcctgtgcaaggattggtgctgtacactctattatatttggtggtttttcaccggactctatcgcaacaagaattaacgactgtgaatctgattatgttgtaacagcagatgagggtgtaagaggtggaaagataatacctcttaaaaaaattgccgacgaagcaatggaacaatgtcctaatgtaaaaaagtgtgtggtagtcaaaagaacaggtaactctgtaaattgggataacgaaagggacatatcatatgaagaaataacaaaaaatgtatctgataagtgtgtacctgaagaaatgaatgccgaagatcctttgtttatactttatacttcgggttcaactggtaaaccaaagggtgttttacatactactggtggatacatggtttatgcttctatgacacaccaatatatttttgattacaaaaataaagatgtttattggtgtagtgcagatattggctgggtaacaggtcatagttatataatttacggtcctttagctaacggggcaactacaatgatgtttgaaggggtgcctaactatccagacagttctagatggtggcaaataattgataaatttaaggtaaatattttttacacagctccgacagctataagagctttaatgcgtgaaggagataatcctgttaaaaaaactagtagaaaatctttgaagttattgggtactgtgggcgagcctataaaccctgaggcttggatgtggtactacaaagttgttggggaaacaaagtgtccaattgtagatacttggtggcaaactgaaactggcggtattttaatatcgccacaacctggtgctatc

SEQ ID NO: 309495 - DNA, 769 bp, Unknown
  Bacterial polypeptide expressing nucleotide sequence isolated from the Sargasso Sea
gcatggatgtggtattataatgtcgttggtgacaaaaaatgtccaattgtcgatacttggtggcagacagaaactgggggtattttaataactcctctgcctggcgcaattgcgcaaaaaccaggatcagcaacaaaacctttctttggcgtcaaaccagaaattttagatgctgagggaaatattcttgaaggcgcttgcgaaggctctctttgcctagcggactcttggcctggacaaatgagaactgtatacggtgatcacaaaagatttattgaaacatatttttcacaattcgatggaaaatattttacgggtgatggctgtagaagagatgaagatggctattactggatcactggaagagttgatgatgtaataaacgtatcgggtcacagaatgggaactgcagaagttgagtctgcattagttgctcatccaaaagtcagtgaagccgcagttgttggttaccctcatgatataaaaggccaaggtatctatgcttacgtgacgctcaatgcaggagaggaaacatcagatgaattatataaagaacttgtagcatgggttcgaaaagaaattggtccaattgcatcaccagatttaatacaatgggcaccaggtcttccaaaaacccgatcaggtaaaattatgagaagaattttaagaaagattgcagaaaatgaatacagtaatttaggagacacatctacgctagctgaacctgcagtagtcgatgatctaatcgacaatcgaatgaacaagtaat

SEQ ID NO: 309496 - DNA, 1393 bp, Unknown
  Bacterial polypeptide expressing nucleotide sequence isolated from the Sargasso Sea
atgccgaaaaaaaagaaaaaaagaaaagcaaaaaaaaagaaaataataaaaagaaaaaagatttctaaaaaaaaagtcgaacaaaacgttgagaaagagctagtttataaaacaaaaaaagactggatcagtaaagcaactgtaaataaatcacaatacgaaaaaaaatataaagcatcactttcagataatgatggtttttggaaaaaagagggaaaaagaattaattggatcaaaccttatacaaaaattaaagatgtaaaatatagtaattcagatgttaaaataaaatggttttatgatggaacacttaatgcttcagcaaactgtattgatagacacttaaaaaaaaataaggacaaaacagcaataatatgggtaggtgacgatccaaaagtccaaaaaaaaatctcttacaaggaacttcacaaagaagtatctaaagcagcaaacggattaaaagaaattggtgttaagaaaggtgatagagttacaatttatttaacaatgatacctgagttggcatatacaatgcttgcttgtgctagaatcggggcaatccattcaattatatttggaggattttctccagatagtatttctgggagaattaatgattgcaagtctgatttcgtaataactgcagatgaaggtgtaagaggaggaaaaatcatacatcttaaatcaattatggatgaagcattagttgaatgtccaaaagtaaaaaaatgtgtagttgtaaaaagaactggaaatagaattaactgggattcctcaagagatatttggtaccatgaaatgatcaaaaatgtttctaataaatgtgatcctgaagaaatgaatgcagaggatcctctgtttattctttatacatctggatcaacaggaaaaccaaaaggagttttgcatactactggtggttatatggtttatgcttcaatgactcatcaatatatatttaattataaaccaaaagatgtttattggtgtacagctgatattggttgggtaacgggtcatagttatataatttatggaccattgtctaacggtgcgaccactattatgtttgagggaattccaacctatcctgacaattcaagatggtggcaaatagttgataagtataaagtaaatattttttatactgctcctacagcaatacgtgcgcttatgagagatggtgataaaccagtaaaaaagacttcaagaaaaactctcaaattattaggaactgtaggtgaacctataaatccagaagcttggcagtggtattataaagtagttggggactcgagatgccctatagttgatacttggtggcaaacagaaactgggggtattttaataagtcctcaaacgggtgcaataaacttaaaacctggttctgcaa

SEQ ID NO: 309497 - DNA, 984 bp, Unknown
  Bacterial polypeptide expressing nucleotide sequence isolated from the Sargasso Sea
cattacaggggccaagggagtaaaaaaaggagatcgagttataatttatatgccaatgattcctgaggcggttattggtatgctcgcatgtggaagaattggagcaattcattcagtagtttttggaggatttgcttcaaacgaattggcaagcagaatagatgacagtagagcaaaagttttacttacagcgtcttgcggttttgagcctggaagaacagttaaatataaacctcttgtcgatgaagcactaaaattagcatctcataaaattcagaaaataatattatttcaaagaccagataacgaagtaaaattaaatgctcctaatgaaattagttgggatgaggcattatcaaatgcaaaaaatgttgattgtgttgaaatgaacgcaaatgaatttgcttatattttatatacatcaggaacaactggaattccaaaaggaattgtaagggatattgggggtcacattgctgctctaaagtggacaatgaaaaatatttacaatattgaccaggatgatgtttggtggtcagccagtgacattgggtggattgttggtcattcttatattgtatatgcaccattgtttaaaggatgcacaactgtattatttgaaggtaagccagttggaactccagacgctggagctttttggaaaataatatctgactacaaagtaaaatctttatttactgctccaacagcttttagggctattaaaaaagaagaccctgagggtaagtttttttctaagtatgatctaagttcatttgaaagtttatttcttgcaggagaaagagcggatccggatacaatcaaatgggcagaatctcttttaaaagttcctgtaattgatcattggtggcaaactgaaactagttgggcaataagctctaattgtactggcatagaaatgatgaaaacgaagtatggttcggcttgtaaagctgttcctggatatgatgtaaaggttattaa

SEQ ID NO: 309498 - DNA, 856 bp, Unknown
  Bacterial polypeptide expressing nucleotide sequence isolated from the Sargasso Sea
ttgtccaagattgaatcggttcttcacgaaacccgtcagtttgcgccgcccgcggcgctcgaacaggcggcgaccatttccggcatgccggcctatcgtgcgctcgccgccgaagccgaaaacgattacgaaggattctgggcgcggctcgcgcgcgagggtctggcgtggcacaagccgttcacgaaagtgctcgacgagtccaacgcgccgttctacaagtggttcgacgacggcgagctgaacgcgtcgtacaactgcctcgaccgtcacgtcgaagccggcaacggcgagcgcgtcgcggtgatcttcgaagccgacgacggcaccgtcacgcgcgtcacctatgcggatctcctcgcccgcgtgtcccgtttcgcgaatgccctgaagaagcgcgggatcggcaagggcgaccgcgtcgtcatctatatcccgatgtcgatcgaaggcatcgtcgcgatgcaggcctgcgcgcgcatcggcgcgacgcactcggtcgtgttcggcggcttctccgcgaagtcgctgaacgagcggctcgtcgacgtcggcgcaaccgcgctcgtcacggccgacgagcaggcgcgcggcggcaagacgctgccgctgaagagcatcgcggacgaagcgatcgcgctgggcggctgcgaggccgtgaagagcgtgatcgtctatcgccgcaccggcggcaagatcgactggcacgccgggcgcgacctgtggatgcacgaactgacggccggcgaatccgaccagtgcgagccggaatgggtcggcgccgagcatccgctgttcatcctgtatacgtcgggctcgaccggcaagccgaagggcgtgcagcacagcacggggc

SEQ ID NO: 309499 - DNA, 1082 bp, Unknown
  Bacterial polypeptide expressing nucleotide sequence isolated from the Sargasso Sea
caatatatattttgattataaaaatagagacgtttactggtgcactgctgatatcggatgggtaacagggcatagttatataatttatggaccattatctaatggagccacaactataatgtttgaaggaattccaaattatccaaatagttctagatggtggcagatagtagataaatataaagtaaatattttttataccgctccaactgcaataagagctttaatgcgagagggggatgatccagttaaaaaaactagtagaaaatcattaaaacttttgggtactgtaggggaacctataaatccagaagcatggatgtggtactacaatgtagtaggaggaaaaagatgtccagttgttgatacttggtggcaaacagaaacaggtggaattttaatttcccctcagcctggtgcaataaatttaaaacctggatctgctacaaaaccattttatggaattaagcctgttatagttgatgaaagcggaaaagtattaaaaggtgcctgtaaagggagactgtgtatggcacaatcttggccaggacaaatgagaacagtatatggtgatcatcaaagatttatagatacgtatttttcgcaatttgatggaaaatatttttctggagatggatgtagaagagataaagatggttactattggattacaggaagagttgatgatgttataatagtatcaggacataacttaggtactgctgaaattgaaagcgcatttgttgcacacagcaaagtagcagaagctgcagtagtaggctacccacatgaaattaaaggtaacgggttgtattgttatgtaactttaaatgctggagaaaattcaagtggggatttagaaagagaattaaaactttgggttagaaaacaaattggaccgattgctacacctgatcaaattcaatttgcgcctggattaccaaaaacaaggtctggaaagattatgagacgtatacttagaaaaattgctgcaaatgaacatcatgatcttggtgatactactaccttggcagatccatcagtggtcgagtctttagtagataatagaaaaaataagtaat

SEQ ID NO: 309500 - DNA, 418 bp, Unknown
  Bacterial polypeptide expressing nucleotide sequence isolated from the Sargasso Sea
ctggataactgaaagagtggacgatgtaataaatatttctggtcacagaatgggaactgcagaagttgagtctgctcttgttgaacataaattagtagcagaatctgctgtagttgggtatccacatgatataaaaggtcaaggtatttatgcgtatgttactttggtattaggatcagagccttcaattgaaattgaaaaggaacttaaacaagttgtaagaaagataattggtcctattgctacgcctgatcttattcaattttcaccagcattacccaaaacacgttctggaaagattatgagacggatattaaggaaaatagctgcaaatgagcacagcgagcttggtgacacctcaactttagctgatccttccgtcgttgagaacttaatcgaaaatagaaaaaatatataa

SEQ ID NO: 309501 - DNA, 664 bp, Unknown
  Bacterial polypeptide expressing nucleotide sequence isolated from the Sargasso Sea
atgaaaaatagttttaacgaaatatatgaagaatctattcaaaatcctgagaaattttggaaaaatgtgtcagatgatatcttttggtttaaaaaacctaccaagattttaaacaaatctaatcctccattttataaatggtttgaagatggcgttacaaacacctgttacaatgcaattgatgttcatgttgacaatggtaaaggtgataagactgctttaatctatgatagccctataactaacagtaaagcaaaatttacatatagtgaattaaaagaaaaaatatcaaaatttgctggagcgctagataatcaaggagttaaaaaaggtgacagagtaattatctatatgccgatgatacctgaggcggtaatagcgatgcttgcttgtggaagaattggtgcaatacactcagttgtctttggtggatttgcttcaaatgaactagcaagtagaattgatgatagtaaagcaaaaattttaatcactgcctcttgtggatttgaacctggaagaactgttgaatatagacctttagtagatggagcattaaaacttgcaaaacacaaagttgaaaaagtaattttgtttcaaagaaaagatcatgaagtaaaacttaactcaccactagaaatcagctgggaggaagcacttaattaat

SEQ ID NO: 309502 - DNA, 1067 bp, Unknown
  Bacterial polypeptide expressing nucleotide sequence isolated from the Sargasso Sea
gatgatccaaaagtacaaaaaaaaattacgctacaaacaattacaccaagaagtttcaaaggcggcaaacggattaaaagaaataggagtaaaaaaaggagatagagttacaatttatttaactatgatccctgagttggcatatacaatgctagcatgtgcaagaataggagcagttcattcaattatttttggaggtttttcagcagatagtattactggaagaattaatgattgcaaatctgactatgttattactgctgacgaaggtgttagaggaggaaaaattatacatttaaaaacaacagttgatgaagctctattgaattgtccaaatgtaaaaaagtgtgttgtagtaaaacgaactggaaacagaattaattgggatgaaagtagagatgtttggtatcacgatataactaaaaatgcttcaaagaattgtgagcctgaggaaatgaatgctgaagatccattatttattttatatacatctggatccacaggaaagcctaaaggagttttgcacacgactggtggttatatggtttatgcatcaatgacccatcagtatatttttaactataaaccaaaagatatatactggtgcactgctgatattgggtgggttacaggccacagttatataatttatgggcctctttcaaatggagcaacaacaataatgtctgaaggtattcctaactatcctgattggtccagatggtggcaaatagtagataagtataaggtaaatattttttatactgctccaactgcaataagagccatgatgagagaaggagatggaccagtaaaaaaaacatcaagaaaatcacttaaattacttggtactgttggagaaccaattaatccagaagcctggcaatggtattttaaaactgtaggggattctagatgtcctattgttgatacttggtggcagacagagactggaggaattttaattagtcctcaaactggagcaatagacttaaaacctggatctgcaacaaaaccattttatgggattaaacctgaaatagtcgataaaagatggaaaggttctt

SEQ ID NO: 309503 - DNA, 571 bp, Unknown
  Bacterial polypeptide expressing nucleotide sequence isolated from the Sargasso Sea
gtgtgagggtaaactttgtattttagatagttggccaggccaaatgagaacagtttatggagatcatcagcgtttcattgatacttattttagtcagttcaaaggaaaatattttacaggagatggatgtcgaagagataaagatggtttttattggattactgggagggtagatgattgtatcaatgtgtctggacatttgcttgggacagctgaaattgaaagtgcttttgttgaacatgaattagtttctgaagcagcggtagtaggttatccacatgatattaaaggccagggtatctatgcttatgtaacaacaaatacgggggttcaagtaagtgaagatttgaaaacagaacttgtccagtggattagaaagaaaataggtccaatcgcaacgccagataaattacaattctcaccaggacttccaaaaacaagatcaggcaaaattatgagaagaattttaagaaagatagcatcaaaagagcaagaccaactaggtgatacatcaacattggcggacccaaatgttgttcaatctttaatagacgggtctaaaaatatctaa

SEQ ID NO: 309504 - DNA, 703 bp, Unknown
  Bacterial polypeptide expressing nucleotide sequence isolated from the Sargasso Sea
ctgaagatatttttttggtttaaaaaacccacaaaaattttaaataaatctaaccctcctttttataaatggtttgaggatggagttactaatacttgttataatgcactggatattcatatcgataaaggaaatggaaaaaaaactgcactaatctatgacagtccaataactggcaacaaagatcaatatacatatgaagaattaaaagtaaaagtctctaaatttgcaggagctttagttaatcagggtgtcaataaaggtgacagaataattatttacatgccaatgatacctgaggcagtcatagcaatgcttgcttgtgcgagagtaggagcaattcactccgttgttttcggtggatttgcctcaaatgagcttgctagtagaattgatgacagtaaagcaaaaatattaattactgcatcatgtggttttgaacctggaagaacggttgagtataaacccttggtagatgaggcagttaaacaagcaaatcataaagttgacaaaacaattttatttcagcgaaatggttatgaagtaaaattgagagcacccgatgaaattagttgggatgaggctctttcaaatgcaacggaaactaattgtgttgagatgaattcaaatgaatttgcatatatattatatacatcaggtacaactggaactccaaaaggaatagtaagagatattggtggtc

SEQ ID NO: 309505 - DNA, 1315 bp, Unknown
  Bacterial polypeptide expressing nucleotide sequence isolated from the Sargasso Sea
aatggcaagaagatctaaaaaaaaaactaggtttaaaagaaaatcaaagaagagagttacaaaaaagaaaagaaataataatactaatcaagaactcatatttaaaactaagtctgattggatcaaaaaggctttaattaataaaaaacaatacgataaaaaatattcatcatctttaaaaaataatgacgacttttggaaaaaagaaggtaagcgtataacttggattaaaccctattccaaaataaaagatgtgaagtatagcaaaagcgatgttcatataaaatggtattatgatggcactttgaatgcatcagctaactgtattgatagacaccttaaaaaaaataaagataaaacagcaataatttgggttggagatgatccaaaagtgcagaaaaaaattagctataaacaacttcataatgaagtttctaaaacagccaatgcatttaaagatcttggaattaaaaaaggagatcgtgtaacaatttatctaacgatgataccagagttagctattaccatgctggcttgtgcaagaattggcgctgtgcattctattatctttggtggtttttcacctgatagtattgccggtaggattaatgactgtaaatcagattatgtaattactgcagacgaaggattgagaggagggaaaaaaattccgcttaaatcaattacagatgaagctttatcaaactgtccaaatgtaaaaaaatgtattgtagttaaaaggacaggtaattttataaattgggaaaaagatagagatgtttggtatcacgatataattaaaaaggcttcaaaaaattgtgaacctgaagaaatgaatgcagaagatcctctttttatactttacacttctggttcaactggaaagccaaaaggtgtgcttcatacgacaggggggtacatggtttatgcctcaatgacacatcagtatatttttaattacaaaccaaaagatatttattggtgtacagcagatattggttggatcactggccatagttatataatttatggacctctttcaaatggagcaacaacaattatgtttgaagggataccaacatatcctgatagctcaaggtggtggcaaatagttgataaatataaggtcaatattttttatacagctccaacggcaataagggccttgatgagggagggagaaaagcctgttaaaaaaacttctcgtaaatctttaaaattacttggaactgtaggagaaccaataaatcctgaagcatggatgtggtatttcaaaactgttggtgaaggcaagtgtccaattgtagatacttgg

SEQ ID NO: 309506 - DNA, 1042 bp, Unknown
  Bacterial polypeptide expressing nucleotide sequence isolated from the Sargasso Sea
catgtcggataaattcaataaaatttatgatcattcaataaaaaatcctgaaaaattttggcaagaagcagctgaagacatcttttggtttaaaaaaccgacaaaaattttaaatcaatctaatcctcctttctataaatggtttgaagatggagtaactaacacttgttacaacgccttagacattcatatcgatcaaggtagaggaaaaaacattgctcttatctatgatagccccataacaggtaacaaaagcaaatttacctacgaggaacttagatctaaagttgcaaaatttgctggagcattaaaaaatcagggagtaaataaaggtgatcgagtaattatttacatgccaatgatcccagaggctgtgattgcaatgcttgggtgtgcaagaattggtgcaatacactctgtagtctttggtggatttgcatctactgaacttgcaagcagaattgatgatagtaaagcaaaactattagtgactgcttcatgtggttttgaacctggaagaacagttgagtataaacctttagttgatgaagcaatcaaaatagcaaatcataaaatagagaagatgattttattccaaagaccaggtcacgaggtaaaattaaatgctcctcttgaaattagctgggatgaagttgtatctaaagcagaaccagctgattgtgttgagatgaactccaatgagtttgcgtatattttatatacctcaggcacaactggaactccaaaaggaatagtaagagatgttggtggtcacattgttgctttgaagtggaccatgaaaaatatttataatattgataccaatgatatatggtggtcagcaagtgatattggatggattgttggacactcatatattgtttacgcaccattgtttaaaggatgcacaacagttttatttgaaggtaagccagttggaactccagatgctggggcattttggaaaattatttcagactataaagttaaatctttgtttaccgcgccaactgcatttagagcaataaagaaagaagaccct

SEQ ID NO: 309507 - DNA, 1936 bp, Unknown
  Bacterial polypeptide expressing nucleotide sequence isolated from the Sargasso Sea
caaaacttatcctgtgcctgagaacattcttcagtctacacatctaaccgcatctcaatatgatgagatgtataagcaatctgtagagcaacctgaagcgttctgggctgagcacgcatccatgcttgagtggtatcaaaagcccaccaaaattaaaaacacaatgtttggtgaaaacgatgtgtctattaagtggtttgaagatggtgagttaaatgccagctataactgtattgaccgccatctagctgataatgccacaaaagtcgcctttcactgggaaggtgactcaccagaagatagccaagatatcacgtatcaacaagtgcactatgaagtttgtaaattagcgaatgcacttaaagaaatgggcgtagcaaaaggtgatcgtgttgcgatttacatgccgatgatacctgaggctgcctacgccatgctagcgtgtgcccgaattggtgcagtgcactcggtgattttcggtggattttcacctaacgctattgccgatcgtatcaacgacagcaacgccaaagtcgtgattactgctgatgaaggccgtcgtgctggaagaagtattccactgaaagcgaatgtggataaagcactgtctggtgatgcgtgtccgtctattactcatgttttagttcataagctcacaggaggagaagtagactggaatgctaagcacgatgtgtggtggcatgacgctgttgatggcgtgtcagcgcagtgtgaaccagaggtaatgaacgcggaagacccactgtttatcctttatacatcaggctctactggaacgccaaaaggtgtagtacacaccacgggcgggtatctcttatattctgcgatgacctttaaatatgcctttgactacaaagaagacgatgtttattggtgtaccgctgatgtaggctggatcacaggccacagctacatggtttatggccctatggtgaacgccgcatcacaagtgttctttgagggtgtaccaacctatccagacgttaagcgtattgctcaggtagtggaaaaatacaaagtaaatagtttatataccgcgccaactgctatccgtgcattaatggcccacggagatgttccagctgaagggtgtgatgtctcatcgcttcgtctgttaggaacagtaggtgaacctattaatcctgaagcatgggaatggtaccaccgcgtaattggtatgagccgttgtcctattatcgatacatggtggcagacagaaacaggtggacacatgatcctgcctttgcctggcgctacggagttaaagcctggctcagcgactcgcccattcttcgggattcagccagcgctatttgatgctgacggtaatgagcttgaaggggcagcagaaggtaatcttgttattaaagacagctggccgagccaagctcgaacggtttatggcgatcatcagcgctttatcaacacctactttagcgcatacaaaggtgtgtacttcaccggtgatggtgctcgttgcgatgaagatggcttttactggatcactggtcgtgtagatgacgtgctaaacgtttctggtcaccgtttgggcaccgctgaaatcgaaagcgcacttgttgcccatcctaaagtagctgaggctgccgttgttggcttcccacatgatatcaaagggcagggtatctacgtttacgtaacaccaaatgaaggggttgaagcaaatgaagcccttactaaagagcttaaggcgtgggtgcgtcaagagctaagcccgattgctacacctgatatgatccaatggtctcgtggattacctaaaacccgctctggtaaaattatgcgccgtattttgcgtaagattgccgccaatgagcatgagcaattaggtgacacatctacgttggcggatccatcggttgttgatacactgatagaggaacgtctaaataagtag

SEQ ID NO: 309508 - DNA, 1312 bp, Unknown
  Bacterial polypeptide expressing nucleotide sequence isolated from the Sargasso Sea
gatgtttgcaataatcttgttattaaaagaacaggcggtaatatacgattggaatccaaatattgatatttggtatgaggatctttatgaggatgcagaaaacatttgtccaattgaaccaatggattctgaagaccctttatttatcctctatacatctggttcgactggaaaacctaaaggtgttcttcacagcacagctgggtatttgctaggtgcacacatgagttttaaatacttatttggcattcaacctaacgataaatattggtgtactgctgatgtaggttggataactggtcacacttatatactttatggtcctttatcaaatgcaacaacatctttaatgtttgaaggtgttccaacatatccttctgcatcaaggtgttgggaaatatgtgataagtactcattggatattttttatacagctcctacagccataagagctttaatggctcaaggagacgaatatgtccagtctacaaaaagaaaaactttaagagttttaggtactgttggagaaccaataaatccagaagcatgggaatggtactattcagtagttggaaactcaaaatgcgacataattgacacttggtggcaaactgaaactggttcagttttaatctctccaatagcaggtataacacctacaaaaccgggatctgcaactctgcctttttttggagttataccaagtctttatgacgaaagtggtaatgttcttgaaggtgaagcatcgggtaacttagtaatagaaaaatcatggccgagtcaaatacgaagtgtttatggcgatcatcaaagaatgatagatacatatttttcaatgtacccgaataaatattttaccggtgatggcgccagaagagacaaagatggatattattggattacaggtcgtgtggatgatgttttaaatgtttcagggcatcgactaggaacagctgaaattgagagtgctcttgttcttcatccaaaagttgctgaagctgcggtagtaggttttgaacatccaataaagggtcaaggtatttatgcttttgttaccttaatgcatgatgaaaatttcaacgaagacttgttaaacgagttaaaaaaatttgttgtgaatgaaattggttcaatagctcggcccgatctaatacaaaattctccaggtttacctaaaactagatctggaaaaataatgagaagaatacttagaaaaattgcagaaggtgatttctcaaatcttggagatactaccactcttgctgatcctttggtagtagattcattaattgaaaataaacaaaatttataa

SEQ ID NO: 309509 - DNA, 1000 bp, Unknown
  Bacterial polypeptide expressing nucleotide sequence isolated from the Sargasso Sea
ttatgggccattagctaataagacaacaagtgttatgtatgaaggagcacctaatgctccagatgaaaaaaggttatggagcctagttgaaaaatataaagtaaatattttttatacagcaccaactgcgattcgagcatttatgaagtggggagttgaacatccaaaagctcacgatttaagctcattaagattacttggatctgttggagaaccaataaaccctgaagcgtggatgtggtatcacgaaaatattggaaatgagcaatgcgctattgttgatacatggtggcagacagaaactggctccattatgatttcacctctacctgggataaccagtacaaaaccaggatcagcatgtggaccattaccaggggttgactcagtaattattgatgaaaaaggcaatgaagttggaaaaggtgaaggaggttatcttgcaattaaatctccttggccatccatgttaagaactgtatatggagacgacaaaagatatattgatacatattggtctcaacacgaaggcctgtactttgccggtgatggtgctaaatatgatgatgatggttatgtttggcttcttggaagagtagatgatgtaatgaatatctctggtcatagaatctctactgctgaagtagagagcgcactagtctctcatgaatctgttgctgaggctgccgtaattggcagatccgatgaaataagtggagaagcaattgctgcatttgtttcattgattggaacagatgcaggagatgaaaaattaatatcagaattaaggcaacatgtaagcgacaagattggacctatagcaaaaccaaagagcattgtaattacagctgatcttccaaaaacaagaagtggaaaaatcatgagaaggttattaaaagatatttcagaagaaagaaaattgggtgatgtaactacacttgcaaatgctgatattgtctctgaattgcaacagaggtcatcagaaagtgatgaagattaa

SEQ ID NO: 309510 - DNA, 1236 bp, Unknown
  Bacterial polypeptide expressing nucleotide sequence isolated from the Sargasso Sea
atataaagaaatctacgattcttcgataaagaatagagagaaattttggaaagatgtcgctagtgacatattttggtacaaaaaaccaaccaaaattttaaactcaaagaatccacctttttataaatggtatgaagatggaataacaaacacctgttataacgctttagaccttcatattgataaaggtagaggggaaaaaacggcaattatctacgatagtccgataacaggaaaaaaaaataaatttacttataaagaattaaaagaaaaagtttccctttttgctggagctctaaaaaatcaaggaattaataaaggagaccgcgtaatcatttatatgcctatgatacctgaggcagtaatagctatgttagcttgtggaagaataggagctgtccattcagtagtttttggtggctttgccgctaatgaacttgcaagtcgtattgatgattcaaaagcaaaacttattgtttcagcatcttgcggttatgaacctggtagaactgttcattataaaccgcttgttaataaagcattagaattatctaagcacaaaccacataaatgtataatttttcaaagagaaaaagataaagctgaattagactctaagatagatattgattggaatgaagctcttaaagatgcaaaaccaactgagtgtgaacaaatgaatgcaaatgactacgcttacattctttatacttcaggaacaactgggcttccaaaaggaatagtaagagatattggtggacacatagttgctttaaaatggacaatgaaaaatatttataacatagatcaagatgatgtttggtggtctgctagtgatattggttggatagttggtcactcatatattgtttatgctcccttattttacggatgcactacagttctttttgagggaaaacctgtaggtactcctgacgcaggtgttttttggagaattatttctgattataaagtaaaatctttatttacggctcctacagcaataagagcaataaaaaaagaggaccctgaagggaaattttttaaaaaatatgatttatctaaattcgatactttatttttggctggagaacgtgcagatccagatacaataaaatggtttgaaaaactatctaatgcacctgtcatagatcactggtggcaaactgagacaagctgggctataagctcaaattgtgctggtatagaaaatttccaattaaatatggctctgct

SEQ ID NO: 309511 - DNA, 724 bp, Unknown
  Bacterial polypeptide expressing nucleotide sequence isolated from the Sargasso Sea
gttgatacttgggtggcaaactgagactggtggtgtgatgataagccccttgcctggagtcgttgctacaaagccaggttcagctacttttcctctgccaggaatcgaagttgaaattgtcgataagaatggagataaggttaatgagaacgaaggcggctatttaattattaagaaaccttggccaggaatgatgagaacaatccacggaaactcagagagatatttggagagttattgggaatatatttcctttaaaggagaaaaaaatgtttattttgctggagatggagcacgcattgatgaagatggatatatatggattatgggaagagttgatgatgtcataagtgtttcaggacatcggttaggaacaatggaaatagaatctgctttggtaagccataaatcagttgcagaggctgccgttgttggcaaaaaagatgatttaaaaggtgaagttatagttgcttttgtatctctagagaaagacgtgaaaggttcttcagaattagtagagaatctaaagaaacatgttgttaatgaaattggaattatcgcaaagcctgaaaaaattataatttctgactctcttccgaaaacacgtagtggaaaaattatgaggagaattttgagatctttggctgctggagaaaaaattagtggggatataagcactctcgaagatagttctgttttggaaaaattgaaagaattatcctaa

SEQ ID NO: 309512 - DNA, 1681 bp, Unknown
  Bacterial polypeptide expressing nucleotide sequence isolated from the Sargasso Sea
atgacacaagaaatttataatcctaatcccggattttcaaatccgcatataaaagattttgatgaatatttaagtctatataaagagtcaattgataatcctgaaaaattctttggcgatctggcaaaagaaaatatttcatggattgaggattttaaagaggtacataactctgagttccaagaaactaaatggtttgttggaggaaaaacaaacataacgctcaactgtattgatagacaccttgaaaaaaatggcgataagattgccttaatttgggaaggtgatgagccaggaaactctaaagagataactttcaaagaattgcactctgaggtttgcaggtttgcaaatatccttaaaacgcttcaaattaaaaaaggctccagagtttgtatttatatgccgatgattcctgaagctgcatttgcaatgtttgcatgtgcaagaattggtgcgatccactcagttgttttcggtggattttctccagaatctttaaaggataggattctggatgctgactgcagaattgtaattactgctgatgagggtgttcgaggcggaaaaaaggttcctttaaaagctaatgttgatgaagccctaaaaaactgtcctgatgttaagaatgtcatcgttgttaaccgaaccggcggagaaattaattggtttgaggatagagacctttggtttcatgaactaaaagttaaagttgatgatgtttgcgagcctgagcctatggattctgaagatccgctctttattctttatacatctggatcaacgggaaagccaaaaggtgttttacacacaacagctgggtatcttttaggagcacatatatcttttaaatatttatttggattcaatgaaaatgataagtattggtgcacagcagatgttggctggattactggacatacttatattctttatggccccctatcaaatggggctacttcacttatgtttgaaggtgtgccgacatatccaactgcatccaggtgttgggaaatatgcgatgagcatgaaataaatattttttatactgccccaactgccataagagctttaatgtcactaggagataaatttgttggatgtacctcgagaaaatcgattaaagttttgggtactgtcggtgaaccaataaatcctgaggcatgggactggtattactcagttgtaggaaataaatcttgtgaagttattgatacatggtggcaaacagaaactggttcagttcttatctctccgattgcaggcattacgccaacaaaaccaggctctgcaacattaccattctttggtgtaaggcctgagctttatgatgaaaatggtattcagcagtcaggagaagcatcaggtaatctggtaattgagtcttcatggccaagtcaaattagaagtgtttataacgaccatcaaagaatgattgatacttatttttcaacctatagcaatatttactttacaggtgacggtgcaaaaagggataaagatggttacttttggattactggaagagttgatgatgttcttaatgtttctggccataggcttggaacagctgaggttgaaagtgcgcttgttttgcatccagttgtagctgaagctgctgtggtaggctttgagcatccaataaaaggacaagggatatatgctttttgttactttaatg

SEQ ID NO: 309513 - DNA, 994 bp, Unknown
  Bacterial polypeptide expressing nucleotide sequence isolated from the Sargasso Sea
atgtctaataatatttttcctccaagcgacaaatttaaagccaatgctattattgacaaacaacgctatgaagaaatgtattctgaatcgataaatgatccagatgcgttttggtcaaagcatggtttgcgaatcgactggattaaacccttcactaaaatcaaaaacgtttcgtacgaacacccaaatgtttcaataaagtggtttgaggacggtgagcttaatgtttcagctaactgtgtcgaccgacatcttgaaagtcgtggtgagaaaacagctatcatatgggaaggggacaacccctctgagagcaagcatgtaacttatagcgaactgcatcgacaagtaagcaagcttgcaaatgtttataaaaatttagggttatccaagggtgaccgcgtcgtgctttatatgccaatgatacctgaggcagcatatgcaatgctcgcgtgtgcaaggattggagcaattcactccattgtttttgcaggattttcacctgaagcgttagccgctcgagttgaaggctgtaaagcgtcacttatagtgacagccgatgaagctcccaggggaggaaaaaatacaccactgaaggcaaacgtagataaagcattagagatatgcggtgatgtgcaaactcttgtagttgaaagaaccggaggtaatgtcccgatgacggaaggtcgcgacatctcttataattcagcaatgaaggatgcatctgaaaaatgcgagccaacagccatgaatgccgaagacccgttatttatactttatacatcaggctcaactggcgcgcctaaaggtgttcaacactgttcaggcggctatttggtttgggcttcaatgacacatgaatacgtatttgattatcatcaaaatgatattttctggtgtactgcggacgtgggatgggtaaccggccatagctatattgtttatggtccccttgcaaatggagcaacgactttaatgttgagggaattccaaccta

SEQ ID NO: 309514 - DNA, 1948 bp, Unknown
  Bacterial polypeptide expressing nucleotide sequence isolated from the Sargasso Sea
catgagcgagagcaaggtctacccggtcaaagcccacatcagcaacggcgccctgctggacaaggcaggctatgaagccatgtaccgggcctcggtgcaggatccggatgccttctggggcgagcagggcaagatcctcgactggatgaagccctacaccagggtcaagaacacctcctatgatccgggccacgtctccatcaaatggtatgaagacggcctgctcaacgtctctgccaactgtctggaccgccatctggcccagcgcggcgacaaggtcgccatcatctgggaaggggacaacccagccgaagatcgcaagctcacctaccgcgagctgcacaccgaggtgtgcaagtttgccaacgtcttgaaggcgcagggagtgcatcgcggcgacgtggtctgcctctacatgcccatggtgccggaagccgccatcgccatgctggcctgtacccgcatcggcgcggtgcacagcatcgtgttcggcggtttctcgccggaagccctggccggtcgcatcatcgactccggctcttccatcgtcatcaccgccgatgaagggctgcgcggcgggcgtccggtgccgctcaagaagaacgtggatgaagcgctcaccaacccggagaccaaggtcaacaaggtgatcgtgctcaagcgcaccggcggcaacatcgcctggcacaaccacagggacatctggtggcacgacgccgtcgccaccgccagcaccgactgcccgcccgaggcgatgggggccgaagatccgctattcatcctctacacctccggctccaccggcaaacccaagggggtgctgcacaccaccggcggctatctggtctatgccactctcaccttcaagtacatcttcgactaccacgaagaggacatctactggtgtaccgccgacgtgggttgggtcaccggccactcctatctggtctacgggccgcttgccaacggcgccaccaccatcatgttcgaaggggtgcccaactacccggccaccaaccgcatgagccaggtggtggacaagcaccaggtaagcatcctctacaccgcccctaccgccatccgcgcgctgatggccaagggcaacgaggcagtcgccggcacctcccgttcgagcctgcgcatcatgggctcggtgggcgagcccatcaacccggaagcctgggagtggtactaccgcaccataggcgaggagcgctgccccatcgtcgatacctggtggcagaccgagaccggcggcatcctcatcagtccgctgcccggcgtcaccgatctcaagcctggctcggctacccgtcccttcttcggcgtgcaaccggcgctggtggacaacatgggcgagccgctggagggggccaccgagggcaacctggtgatcaccgactcctggccgggccagatgcgcaccgtgttcggcgatcacgagcggttcgagcagacctacttctccaccttccccggccgctacttcaccggcgacggtgcccgtcgcgacgaggatggttactactggatcaccggacgggtggatgatgtactgaacgtctccggtcaccgcatgggcaccgccgaaattgaatccgcgctggtttcccatcccaagatcgccgaagcggcggtggtgggcgtgccgcacgagataaagggtcagggcatctacgcctatgtcaccctgatcgccggcgaggagccgagccgcgagctgcataaagaggtgaaggagtgggtccgcaaggagatcggcgccatcgctaccccggacgtgatccactgggccgaggggctgcccaagacccgctccggcaagatcatgcggcgaattctgcgcaagatcgccaccggcgagaccgacagcctgggggatatctccaccctggcggatccgggcgtggtggacaagcttatccgcgagaagtcggaagcagcctga

SEQ ID NO: 309515 - DNA, 1165 bp, Unknown
  Bacterial polypeptide expressing nucleotide sequence isolated from the Sargasso Sea
gaagccgcaatcgcgatgctcgcgtgcgctagaataggagccgttcacagtgtggtcttcggcggtttctctcctcaatctctcagggatcgaattcaagactctgagtgttgcgcagttatcacggccgatgagggccttcgaggagggaagtcgataccgttaaaacaaaactcagatattgcggtggaggagtgcccatcagtccacagcataatcgttgtacaaaggaccggaggcgagatcaaatggaacactcaaaaggacatttggtatcacgaccttattcgaggacagagcgataactgtccgatagaaataatggatagcgaagatccgctgtttatcctctatacatcaggatcgaccgggaagcctaaaggtgttcagcattcctcagggggttatctactgcacgctgcaatcacccataaatacgtcttcaattacaaagaagatgacgtttattggtgcacggctgacgttggctggatcactggccactcttatatcgtttatggtcctcttgctaatggagcaagtaccttaatgtttgaaggggttcctacatatccagatgcatctagattttggcaggtgattgacaagcatcaagtcaatattttctacaccgctcctacagctcttcgacaattaatgtctcaaggagatgagtttgtatccaaaacagatagaaaatctttaaaactattgggttcagtcggggagcccataaaccccgaggcctgggagtggtattatcaaatagttggcgataaacgatgtccaatagtcgacacttggtggcaaacagagaccggtggaataatgataactccgctccctggagctacctcattaaaaccaggttccgcaacactccccttttttggcattcggccagctttgatggatgcagagggtaatattattgaggaacttgaggcttccgggaatctagcgattaaagattcttggccaggtcaaataagaaccgtttatggggatcatcaaagagtgattgatacctactacgcagcttatcccggcttatatttcactggtgatggagcgcgaagggactctgagggctattattggataaccggtcgggttgatgacgttatggtggtctcaggacacaatataggtactgcggaagtag

SEQ ID NO: 309516 - DNA, 2041 bp, Unknown
  Bacterial polypeptide expressing nucleotide sequence isolated from the Sargasso Sea
atggctaaaagaccaaaaaaaaaaactaaaaaaaaatcttctaaaaagagaaaaaaaaacatcaagaaaagaaaaaaaattcttaaaaaaatttcaaatataaatcaagaaacaatttttaaaacaaaatccgattgggttaaaaaagctttagtaaacaaaaaacagtacgaaaaaaaatataatcactctattaaacaaaatgatgagttttggaaaaaagagggtaaaagaattacttggataaagccatatactaaaatcaaggatgtaagatatagcaaatcagatgttcatattaaatggttttatgatggaacgcttaatgcatcagcaaactgtattgatagacatttaaaaaaaaataaagataaaacagcaatcatttgggtaggcgacgatccaaaggtacaaaaaaaaatatcctacaaacaactacacaatgaagtttctaaaactgcaaatgcacttaaggatttaggtatcaagaagggtgatagagttacaatttatttaacaatgatacccgagcttgcttacaccatgttagcttgcgctagaattggtgcaatacattctattatttttggtgggttctcgccagatagcatatccggcagaatcaacgactgtaaatcagattatgttataactgcagatgaaggacttagaggtggaaaaataatccctttgaaatcaataactgacgaagctctacttaactgcccaaatgttaaaaaatgtatagttgttaaacgaacaggaaatagagttaattgggatgaaagccgggatgtttggttccacgagattactaaaaaagcatcctcaacatgcgaaccagaggcaatgaacgctgaagaccctcttttcattttatatacatcaggatctactggtaagccaaaaggagttttacatacaactggaggctacatggtttatgcgtccatgactcatcaatacatatttaattacaagcctaaagatatttattggtgtacagcagatattggctggataacaggtcatagctacataatttatggcccactagcaaatggtgcaacaacgattatgtttgagggaattcctacttatccagacacatcaaggtggtggcagatagttgataagtacaaagtaaacattttctatactgcaccaacggctataagggctttaatgagagagggtgaaggaccggttaaaaaaacttcaaggaaaactcttaaattattaggaactgtaggggaaccaataaatccagaggcctggcaatggtactttaaaactgttggggactcgagatgtcctattgtagatacttggtggcaaacagaaactggaggaattttaataagtcctcaaactggcgcaattgacttaaagcctggttctgcaactaagccattttatggaataaaacctgctattgtagatcaagatggaaaagttttaaaaggagaagcaaaaggaagactatgtatttctcaatcatggcctggacaaatgcgaacggtttatggagatcataatagatttatagaaacatacttttcacagtttgatggaaaatattttacgggggatggttgtagacgagataaagatggatattattggattacaggcagagttgatgatgtaataattgtatctggtcataatctaggaactgcagaaatagaaagcgcttttgtagctcacccaaaagtagctgaggctgcggttgtggggtatccacatgacataaaaggtaatggtctttactgttatgtaactcttaatgtgggtgaaagccctagtggtgatttagaaagagacttaaaactttgggtgagaaaacaaattggcccaatcgctaccccagatttaattcatttttcacctggtttacctaaaacaagatcaggaaaaataatgagaagaattttaagaaagattgcagcaaatgaacatgaacaacttggggatacaacaacattagcagatccaagtgttgttgagagcctagtaaacgagagaaaaaatatttaaa

SEQ ID NO: 309517 - DNA, 1567 bp, Unknown
  Bacterial polypeptide expressing nucleotide sequence isolated from the Sargasso Sea
atgtcaaaggatcacaaaatttattcaccgtctgctgattggactgttaatgctcatattaactcactagataaatataaagagatgtataacaaatctattgaagaccctgatgctttttggagcgatattgcaaaaaggatcacatggtataaaccgtgggaaaaagtaagagattttaactttcaaaatggtgagataaagtggtttgaaaatgggaagctaaatgtcagctataactgtcttgacaggcacgttgaatcaggtaatggtgaaaaaaccgcaatcatatgggagggcaatgatccatcagaagataagcattacacttataataaacttttagaaaaggtaaagaaattctctaatgttttaaaagatcttggaatagaaaaaggtgaccgcgtgtgcatctatatgcaaatggtgccagaattagcgattgctatgttagcatgtgctagaattggagctgtacactcagttgtattcggtgcattcagcgctgattctcttcgtgatagaattaatgactcgcaatgtaaattgctaataactcaggacactggtgtaagaggtcagaaaaataatattccaatgaagctaaatgctgataaagctcttgttgatactccttctataaattctgtggttgttgtaaaacgcactggagtggatataaatatgattgatgggcgtgatgtctggtggcatgagcagatagaaaaagctgatgcaaattgtgatccagttcacatggattcagaagaccctctctttattttatacacttctggcagtactggaaaaccgaaaggtgttttacacactactgggggatatcttgtgtatgcatctttcacccaccatactatctttgattacaaggataatgatgtttactggtgtactgctgatattggctggatcactgggcattcctacattgtttatggtcctctttcaaatcaggctacaactattatgtttgaaggtgtaccaaattatccagatttcggacgtttctgggatgtcgtagataaacatgaagtaaatcaattctacaccgcacctacagctcttcgagcgctgatgaaggaaggtgatgcttgggtaaattcgagaaaacttgatagtcttagaatacttggaacagttggtgaaccaattaaagaacctgagtggaattggtatcataaaatagttggaaaagagcgttgcccgattactgatacatggtggcagacggagacaggaggaatactgatatcacccttaccaggagcaactccaactaagccaggctctgctacttttccttttttcggaatacatccagtactaatgactgatgatggtaaagaaatcgagggtaaaaatgtccaaggcctacttgcattaaaaacatcatggcctggacaaatgcgcacgatatatggagaccataagcgtttcattgagacgtatttttctcaatttcctggatattattttacaggcgatggagcaaaaagagatgaagatggatactattggataaccggaagagtagacgatgttttgaata

SEQ ID NO: 309518 - DNA, 1888 bp, Unknown
  Bacterial polypeptide expressing nucleotide sequence isolated from the Sargasso Sea
catgaacaaagaaaaaatatataacgtcccaaaagatatatcggaacattcaaatgttagtgaatctgaatttcaagtgctatataaacaatctttagaaaacccagatgagttttggtcttctcaagctgagtcttatttagattgggataaaaaatgggaagaagttaaaaatacaaatattgaaaaaggagagattgcttggttctctggagggaaattaaatgcatctgtaaattgtattgatagacaccttccgaaagataaaaataaaattgcatttatttgggaaggagatgatccagaagaatcaagaaatatcacttatcaagaccttcatgatgaggtgtgtaaattttctaatgttcttaaagctagaggagtaaaaaaaggagatagagtttgtatttatatgcctatgattccggaagccacatatgcgatgttggcttgtgcaagaattggagcaatacattctgtagttttcggaggtttctctcctgaatctttgaaagatcggattctggactcagattgtcaaacggtgattacggctgatgaaggcttaaggggtggaaaaactatccccttaaaacaaaatgtagatgaggctttagagggctgctcaaatgtccatacagttttggttataacaagaacagaggctgagattccatggaatgaagattgcgatgtgcgatatgaggaaatttctaaaaacgtttctaatgaatgcactccagaattgatggacgcggaagatccgcttttcatcctctatacatctggttcaacaggaaagccgaagggtgttttacacactactggtgggtatcttttgcaggcagctatgtctcataagcttgtttttgactacaaagagaatgaagtctattggtgcacggcagatgtgggttgggtaacaggtcattcatatatcgtttatggccctcttgcgaatggagctacttctgtaatctttgaaggaatacctacttatccttccccatcaagattttgggaagtaattgacaagcataaagtaaatattttttatactgctcctacggcactgagagcgctgatggcccaaggagatgacttcgtagagtcttcatcaagagagtctctaaggattcttggtactgttggagaacccatcaatccagaagcatgggaatggtattttaaagtggtcggaaattcctcttgtcctatagtcgatacctggtggcaaaccgaaaccggtgcgatgatgataacacctgtagcagggtttacagctatgaaacctggaagtgctactaagccatttttaggaattgaacctgcccttctagatgaaaatggagaagaaatagttggtgaaggctcaggaaacctcgttattaaatctagttggccctcgcaaataagaactgtttacggagatcaccaaaggtgtgtcgatacttactattctatgtatccgggatactatacgacaggagatggtgccagaagagatgctgacggatattattggattacaggaagagtagatgatgtgttgaatgtatctggtcatagactaggaactgccgaggtagaaagtgcgttggttctgcatcagcaggtagcagaggcagctgtagtgggttacgagcatgaaataaagggtcaaggaatttattgctatgtaacacttatgtctgatgtatctccgaatgaagaactcaaatctgatctaattcaacttgttgcaaaggaaataggtccaattgctaaacctgatatcattcaatgggctcctgggttgcctaaaacaagatctggtaaaattatgagaaggatacttagaaagatagccactaatgagatcgataacttaggtgatactactactttg

SEQ ID NO: 309519 - DNA, 1272 bp, Unknown
  Bacterial polypeptide expressing nucleotide sequence isolated from the Sargasso Sea
gtctgtaactgcattgatagacatcttcctgaaaatgctcaaaaaactgctttcatatgggaaggagataatcctgaagaagcaaaaaatatcagctatcagaaacttcacgacgaagtatgcaaatttgcgaatgtccttaaagctagaaatgtaaaaaaaggcgatcgagtttgtatctatatgcctatgatccccgaagcaacatatgcgatgttggcttgtgcgagaattggggcgattcactctgttgtttttggaggcttttcccctgagtccttaaaagaccgtatcctggattctgattgccaaactgttataactgctgatgaaggcttgagaggagggaaaacagttcctcttaaagagaatgtagatgaggcacttcaaggatgtccgaatgtccatactgttttagtcatcaccagaacaggagcagagatttcatggaatgagaactgcgatgttagatttgaagaaatttcaaagggtgttccttccaaatgcgagccagaaataatggactccgaagatcccctatttattctctacacatctggatcaacaggtaagccaaaaggagttttacacactacaggtggatatcttcttcaagctgccatgtctcataagctggtattcgactataaggatgatgaaatctattggtgtactgcagatgttggctgggttacggggcattcttatattgtttatgggcctctagcaaatggtgcaacatcattaatcttcgaaggaataccgacttatccttcgccttcaagattttgggaagttattgataaacacaaagtaaatattttttatacagcaccaactgcactaagagctcttatggcacaaggtgatgaatttgttgaatcatcgagtagagattcactgagaatcttagggacagtgggagaacctattaatcctgaagcatgggaatggtatttcaaagttgttggagattctgcttgtcccatagtcgatacttggtggcagactgaaactggagccatgatgattacccctgtagcaggatttacttcgatgaagccaggaagtgctacaaaaccttttcttggtattgagccagctcttctggacgaaagtggagaagaaattataggcgagggttccggaaatcttgtcattaaatctagctggccctctcaaatcagaacggtatatggtgaccatcagagatgcatagatacttactactcaatgtttcccgggtactacacaactggggatggagcgaga

SEQ ID NO: 309520 - DNA, 1294 bp, Unknown
  Bacterial polypeptide expressing nucleotide sequence isolated from the Sargasso Sea
caaaccattttataaatggtatccagatgcaagtttaaacacatgtttcaatgctatcgacagacacgttatgaatgggagaggagaacaagatgcaatattgtatgatagccctgtcacaaagacaaaaaagaaaattacctattcagaacttaaatatcaagtttccatttttgctggagcacttaaaaatttaggtgttctaaagggggatcgtgtaatcatttatatgccaatgatacctgaagcgttggtggccatgctagcttgttctagactaggagcaattcactctgtagtatttggtggttttgcttcaaatgaactagctgtaagaattgacgattgcaagccaaaaataattgtatctgcatcgtgcgggcatgagccaaataggattgttgaatataaacccttacttgacaacgcaattaaaattgccagtcatcaagtggaaagatgtataatttatcagcgtgaagccctaaatgttgagcttattccagaccaagatatagattggaatgaggttgttaaagatgtttcattggctgatccggttgaagtacaagcaaacgatcctttgtatattttatatacatcaggaacaactggaaaaccgaaaggagttgttagggataatggaggacatgcggtgtctctaaaatggtcaatgaaaaatatatataatgttgaacctggggatgtttattgggctgcgtcggatattggatgggtagttggtcattcttatatcgtttatgcacctttgcttcatggttgtacgacaattttatttgaagggaaacccgtcgggacaccagattctggaacattttggagaattatttctgagtataaggtcaaagtgttatttacagctccaacagctctaagagctgtcaagagagatgacccaaatggtgagtttattaaaaaatttgatttaacatccttgcagtctctatttcttgctggagaaagagctgatcctgatacggtgttgtggctggaaagaaaattaaatattcctataattgatcattggtggcaaacagaaactggatggcctgttgctgcaaaccctttaggtatagaatcgtttccaattaaaattggttcccccactttagctatgccaggatatgatgttagggttttatcagaagatggcaatgaagttccaaaaggaacattaggagcaatttcaataaaattacctttgccaccaggatctttacctagtttgtggaatgcagatgatagatttatagagtcttatttatcaactttt

SEQ ID NO: 309521 - DNA, 1411 bp, Unknown
  Bacterial polypeptide expressing nucleotide sequence isolated from the Sargasso Sea
tcaacttgtaagatacttattacgcaagatacaggagttagaggagttaagcagaatatttcgatgaaagctaatgctgataaggcggttgctgaaactccctcgattgaacatgtggttgttgttaaaaggactggtgaaccagttaatatggttaaaggacgggatgtttggtggcaggatgaaatgttagaggtaaatgatgaatgtgagcctatagaaatgaatgctgaagatccattatttatattatatacttcaggttctacaggaaagccaaagggggtgctacattctacagctggctatcttttatacactaatttttcatttgaaatgatttttgattacaaacaagaagatatctattggtgtacagctgatattggttggattacaggacattcttatatcgtttatggcccgctatcaaattgtgcgacatcaattatgtttgaaggagttcctaattatccagattttggtcgtttttgggatatcgtagataagcataaggttaatttattttatacagcgcccactgctcttagggctcttatgaaagaaggtgatcaatgggttgagaatcgtgatttatcatctctccgtttgcttggcacagttggcgagcctattaaagagccggaatggatgtggtatcatagtgtaattggtaaagaaatgtcaccgattattgatacatggtggcaaactgaaactgggggtataatgattgcccctttgccgggagcgactcctacaaaaccaggatcagctacttttccattttttggaatagagcctgttttattaacagaagagggtgatgaaatagttgggaatgatgtatctggactattggcaataaaatcatcatggccgggccagatgcgaacagtctatggagaccataaacgatttattgagacatatttttctcaattcccaggatattattttacgggtgatggtgcgaaacgtgataaagatggatattattggataacaggaagagtagatgatgtattaaatgtatctggccatagaattggtactgcagaggttgaaggagctattggcaaaacagaagatgttgctgaagcagctgttgtaggttttcctcatgatattaaaggtcaaggtatttatgcttttgtgacattgatgactgggattgacccaagtgattccattgaaaaaaatattcgggataaggtttctaaagagattgggcctcatgcaaaacctgatagaatacaatttacacctgctttgccaaaaacacgttcaggtaaaataatgagaagaatcttaagaaaaatagcagaaggtgattttgataatttaggagatatatctacgcttgctgatccaagtgttgttgatagtcttataaataatactaattaga

SEQ ID NO: 309522 - DNA, 1373 bp, Unknown
  Bacterial polypeptide expressing nucleotide sequence isolated from the Sargasso Sea
tttttggtcaaaacatggtaaacgaatagattggtttaagtcttatagcaatattaaggatgttttatacagtaaagatgatgttaaaattagatggtactatgatggaacaactaatgtatcatataattgtgttgataggcatgccaaaataactcctgacaaaatagcaataatttgggaaggagatgacccaacaaaagtaaaaaaaataagttataaagagcttcaatctgaagtttgtaaagttgcaaacgcccttaaaaaagttggtgtaaaaaaaggggatagggtaacaatttatcttacaatgataccggaactagcctatgtaatgcttgcatgtgctagaattggagcaatacactctataatatttgggggtttttcatctgaatctatagctgggagaattaaagattgtaattctgaatttgttgtaactgcagatgaaggagtcagaggaggaaaaaatattccactcaaagatataacagatagagctctagaaaattgtccggatgttaagaaatgtttagttgtaaaatatacaaataataatgttaatatgattaatgatagagatatatttcttaataagttaatttctgaagttgatgattattgcgaaccagaagaaatgggtgctgaagaccctctatttattttatatacatctggttcaacaggaaaacctaagggtgttttgcatacaactggaggttatcttgtttacgcatcaatgactcatgaatatatttttaattataaaaaagatgacatctactggtgtacagctgatattggttggattacaggacatagttatataatatatggaccactttcaaacggagctacgacattaatgtttgaaggagttcctaattatccaactttttcaagattttgggaagtaatagataagcacaaagttaatattttttacactgctccaacagctattagagcattaatgagggaaggagatgattacgtgaaaaaaacatcgagatcttccttgaaattacttggaacagtcggtgaaccaataaaccctgaggcatggaaatggtattatgaaattccaggtaattcaaaatgtccaatagttgatacttggtggcaaaccgagacaggtggaattttgatatctcctcaaacaggagctatagagctaaaaccaggttcagcatcaaaacctttttatgggatagaaccatgtatagtaaataaagatggagaagagcaaattggtgaagcagagggaatgttatgtttaaaaaattcttgggccagtcaaatgcgaagtgtttatggtgatcatagaagatttatatcaacttatttttcacaatttgatggtaaatatt

SEQ ID NO: 309523 - DNA, 632 bp, Unknown
  Bacterial polypeptide expressing nucleotide sequence isolated from the Sargasso Sea
aatgtctgaagataatttatatcatccatctgaaaaagcaaaaaaagtttcacttattaatgaaaagcatttttctgaaaaatatgattattcaatagaattaaatgataaattttggtctgaagaagggaaaaaaatagaatggataaaacctttttcaaaagttaaagatgtatcatatgatatcaaagaccttcacataagatggttttatgatggctctcttaatgtatcttctaattgtctagatagacacttagaagctagaggaaatcagattgctattatctgggaaggtgatgacccaaacgaaacaaaaaaaatcacctatcgagagttatatgaggaggtttgtaagttctctaatgctctaaaagccaatggcgcaaaaaaaggtgacaggataacaatatatatgccaatgatccctgaagctgcagttgcaatgctagcttgtgctaggataggcgccattcattcagtcgtttttggtggattttctcctgactcactagctggcagaattactgattgtgattcaaatattattattactgcagatgaaggtatacgtgggggtaaaataatacctcttaaagaaaatacagatgcagctttaaagttatgcagtt

SEQ ID NO: 309524 - DNA, 446 bp, Unknown
  Bacterial polypeptide expressing nucleotide sequence isolated from the Sargasso Sea
gatgacacaagaaatttataatcctaatcctggattttcaaatccgcatataaaagatttcgatgaatacttaagtctatataaagagtcaattgagaatcctgaaaaattctttggcgatctggcaaaagaaaatatttcatggattgaggattttaaagaggtacataactctaagttccaggaaactaaatggtttgttggaggaaaaacaaacataacgctcaactgtattgatagacaccttgaaaaaaatggtgataaggttgccttgatttgggaaggtgatgagccaggaaactctaaagaaataactttcaaagaattacactctgaggtttgcaggtttgcaaatatccttaaagcacttcaaattaaaaaaggctccaaagtttgtatttatatgccgatgattcctgaagctgcatttgcaatgtttgcatgtg

SEQ ID NO: 309525 - DNA, 1231 bp, Unknown
  Bacterial polypeptide expressing nucleotide sequence isolated from the Sargasso Sea
catgaggcaacatcgtggagtcagtgcaaaatgtgaacctgtagctatggactctgaagaccctctttttatcttatacacgtctggatcgacaggtaagcctaaaggtgtattacacacaacaggtggttacttggtttacgcgtcattcactcatcaaatggtatttgattaccatccaggagatatttattggtgtacagctgacctgggttggataacaggtcattcctatattgtttatgggccattatcgaatcgagcgacaacagttatgtttgaaggtgtaccaaattatccagattttggtcgcttttgggatgtggttgacaaacataaagttaatcaattctataccgcacctacggctttacgcgcattgatgaaagagggaaatgaatgggtttcttccagagatctatcttccttgagattactaggtacggttggagaaccagtaaaagaaccagagtggaagtggtattatgatattgttggccaaggacaatgtccaattgttgatacgtggtggcaaacagagacaggcggtattttgataacgcctttgcctggcgcgacacctactaaacctggttctgcaaccttgccattttttggagtagaacctgtattattaactgaagatggaaaagagatagaaggaaacaatgtgtctggtttactggcattgagatcatcatggccaggacaaatgcggactatctatggagaccataagcgatttattgatgtatatttttctcaatgcccaggctattattttacaggagatggtgcgcgaagggatgaagatggttactattggatcactggacgtgtggatgatgtattgaatgtttctggacatagaattggtacggctgaggtagagggtgctatagggaaagcaaatggtgttgctgaagctgctgttgttggctttccacatgatataaagggacagggcatctatgcatttgtaactcttatgaccggagtaaatgagtcagatgaaatctatagtggtattttagaatctgtgaaaaaagacattggtccacacgctaagcctgatgagatacagttcacacctgcattacctaagaccagatcgggaaagatcatgcgtagaattttaaggaaaatagcagaaggtgacctagataatatgggtgatacttcaacacttgcagaccctagtgttgtagaaagtcttacgaaaggacagtag

SEQ ID NO: 309526 - DNA, 1966 bp, Unknown
  Bacterial polypeptide expressing nucleotide sequence isolated from the Sargasso Sea
atgacagaaaagttgattgagtccatattgaatgagtctagaagctttgccccttcaaaaaaatttatcaagcaagccaatattgacaacgaagaggcggaaagattaagggaagaagcttcacaaaatcacattgaatattgggctaaattagccagggctcatttgcattggtttctcccatttaacaacatactggatgaatcaaatgcgcccaattatgaatggttcaatgacggagagatcaacgcttcttttaattcactggatataaatgccaataaaaatccagaaaaaactgcaattatatttgaaacagaggatggaaactctgagtgcatcacatacaaagatcttcttttaagaacctctcaatttgccaatggccttaagaagcttggcgtaatgccgatggatagggttgtgatatatatgcccatgtgccccgaggccgtgattgcgatgcaggcatgcgcaagaattggcgcaatacactctgttgtttttggagggttttcatcaaatgcactcaaggacaggatagaggacgcccaatcaaagattgtgattactgctgacggagcatatagaggtggaagcgttattccgcttaagcaagcaacggatgaggcggtgacaaactctttgcacaaagtaaaaaatgttgtggtttttgaaagaacaggggaaaaaatagaatttgatcaagaaagagacatttggtggacagacctgatctcagattgtccttctcactgtgatccagagccccttaatgctgaacacccattgtttatactctacacctcaggttccacaggcaaacccaaaggaattcaacactccaccgcgggatatattttgcatgcaaaaacgactttttcttgggtttttgatatcaaggaagatgatgttttctggtgtactgcagatgtgggctggattacaggacacacttatgttgcatatggccctctgctcgcaggcgctacgattcttatctatgagggcgctcctacttttccagatgtgggaagattttggaagatttgcgaaaagcatgccgtgacaattttttatactgcacctactgccatcagagccttaatgaagcatggagatgagattccaaacagctatgatttatcacagcttcgcttgcttggtactgtcggcgaaccgataaaccccgaagcttggatgtggtatcacagtgttattggccaagagcgttgcccaatagttgatacttggtggcagactgagacaggcggggcaatgattagcccccttccaggtgttacaaacactaagcccggatcgtgcacaacaccgataccaggcattgatgttgatattgtgaatgaatctggcgaaccggtagaagaaccaaaccaaggtggatacctcgtcatcaaaaaaccatggccctcgatgctcagaaccatatggggagacaatcaaaggtatattgacacctattgggacaagtttgacggaagatactatgttgctggcgacagcgcatacaaagatgaagatggctgccattggattatggggagaattgacgatgttctcaatgtctctggccatcgtttaggaactatggaggttgagtcggcacttgtcgcaaatcagaaggttgccgaagcggctgtcgtaggtaaaccacacgaagtcaagggcgagagcatttttgcttttgttgtaaccaaaggagataggccagttggagatgaagcaaaaaaaatgcaagaagtcctgagagaatgggtcagcgaacaggtcggcgcaatagcaaagccagatgaaattcgtttttcagataatttgccaaaaacacgctcaggcaagattatgagaaggctgcttcgtgcaatcgctcgagaagaagcaatcactcaagacatatcgacgttagaggatgagtcaatcattaggcagcttcaaggcgaggaataat

SEQ ID NO: 309527 - DNA, 2074 bp, Unknown
  Bacterial polypeptide expressing nucleotide sequence isolated from the Sargasso Sea
catgcctaaaaaaaagaaaaaaaaatctaaagtaaaaaaaaaatcttctaaaaaagttaagaaaaaaactaaagtaaaaaaggtttcaaaaaaaatcaaaaaaaaagcaaaaagcaaaaaagaaaatggctcttctcctcccgaaatagttataaaaactaaaccagaatgggtaaaagcaagtttagcaaataaaagtaagtaccaacaaaaatattcacaatctattaaaagtaacgatgatttttggagaaaagaaggaaaaagaattacttggataaaaccttataaaaaaatcaaagacgttaggtacagcactaaagaagtaaaaattaaatggtatgaagatggaactttgaatgcttcagctaactgtattgatagacatttaaaagataaaaaagataaaactgcaatcatttgggttggcgatgatccaaaagatagtcaaaaaattacttataaacaattacaccaaaaagtttccaaagctgcaaatggtttaaaaaaacttggaattaaaaaaggagatcgagttacaatttatttaaccatgatcccagagcttgcaattttaatgctagcatgtgttagaattggagcagtccattcaattatatttggtggtttttctgcagaatcgatttcaggaagagtaaatgattgtgagtctgaatatataatcactgctgatgagggagttagaggaggaaaaactattccattaaaatatacaactgatgaggctctcacaagttgtccaaatgtaaaaaaatgtattgtggttaaacgaacaggaaattacatcaattggaatgaggaaagagatgtttggtatcatgatttaattaaagatgtttcaagtcattgtgaacctgaagaaatgaatgctgaggatcctttatttattttatatacctcaggatcaactggtaaaccaaaaggagttcttcatactacgggtgggtatatggtatatgcatcaatgacccatcaatatatttttaactataagccaaaagatatttattggtgtactgctgatattggatgggtaacgggtcatagttatattatttatggaccccttgctaatggtgctacaacaataatgtttgagggaattcctaattatcctgacacttcaaggtggtggcagatcgttgataaatataaagtaaatatcttctataccgctcctacagcaatcagagctttaatgcgtgaaggtgataaaccggttaaaaaaacctctagaaagtctctaaaattgcttggcactgttggtgaaccgattaatccagaggcttggatgtggtattacaaaacagttggaaactcaaagtctcccatcgtagatacttggtggcaaacggaaacaggaggaatactaatagcccctcaaactggagctattccattaaaacctggttcagctacaaaaccgttctatggaattaagcctgttatcgttgataaaaacggcaaagagataaaaggcgctggcgaaggaaggctttgtattgctcaatcatggccaggtcaaatgagaactgtttatggagaccatcaaagatttatcgacacttatttttctcagtttaatggtaaatattttactggtgatggctgtagaagagataaagatggatattactggatcacaggacgagttgatgatgtaattattgtatctggtcataatttgggaacagctgagattgaaagtgcatttgttgctcatccaaaagttgctgaagcagctgtagttggttatccacacgatattaaaggaaatggtttgtattgttatgtcactttaaatgcgggagaaactgaaaatggagatcttgaaagagatttaaaactttgggtcagaaaacaaattgggcctctagcaactcctgacttaatacactttactccgggtcttccaaaaactagatcaggtaaaataatgagaaggattttgagaaagattgctgcaaacgagcatggacaattaggtgacaccactactttagctgatccaagtgttgtcgatagcttagtcgataatagaaaaaatatttaa

SEQ ID NO: 309528 - DNA, 934 bp, Unknown
  Bacterial polypeptide expressing nucleotide sequence isolated from the Sargasso Sea
catgcttaagaaaaaaaaagttaaaaaaaaagtaatctctaaaaaacctaaagagataatttataaaactaagaaagaatggataagtaaagctaccgttaataaatctcaatacataaagaaatataacgagtcgattaaagacaacgttggattttggaaaaaagaaggaaaaagaattaattggattaaaccttataaaaaaattaaagacgttaaatatagtaaagatgatgttcatatcaaatggttctatgatggaactttaaatgcctcagcgaattgcattgataggcatcttaaaaagaatgctaagaaaacagcgattatatggataggagatgatcctaaagttcaaaaaaaaattacgtataaagaacttcataaagaggtttcaaaagcagcaaatggattaaaaaatttgggagttcaaaagggtgatagagtaacaatttatcttacaatgataccagaacttgcctacacaatgcttgcatgtgctagaataggtgcagttcactcaataatatttggaggtttttcaccagatagtatttcgggtagaataaatgattgcgaatctgattatgtaatcactgcagatgaaggcgtaagaggaggaaaaacaatacccttaaaatctattacagatgaagctttacaaagctgtcctaatgtcaagaaatgtatcgtagtaaaaagaacaggtaccaaaaaaattgattggtttaatgatcgtgatgtttggtatcacaaaatgacaagtaaagtttcagcaaaatgcgagcctgaggaaatgaatgctgaggatccattattcattctttacacatctggttcaacagggaaaccgaaaggtgtgctacatacaactggtggatatatggtttatacatcaatgacacaccaatatatttttaattataaacccaaa

SEQ ID NO: 309529 - DNA, 782 bp, Unknown
  Bacterial polypeptide expressing nucleotide sequence isolated from the Sargasso Sea
agtaataatttatatgcccatgatacctgaagctgttatagcgatgcttgcttgtgcgagaattggagccatacactcagttgtttttggtggatttgcctcaaacgagcttgcaagtagaattgacgacagtaaagcaaaacttttggtaactgcttcatgcggttttgagcccggaaggactgttgaatacaagcctctagtagatgaggcaataaaacttgctaatcacaaaattagtaaaatgattttgtttcaaagaaagggtcatgaggtcaaattaaatgctccagtagagatcagctgggatgaagcccatgctaacgcaaaggacacagattgtgtggaaatgaattcaaacgaatttgcttatattctttacacatcaggcactaccggaactccaaagggtatcgttagagatatcgggggtcacatcgttgctttaaaatggactatgaagaatatttataacatcgatgaagatgatatttggtggtcagcgagtgatattggctggatagtgggtcactcatatattgtctacgctccattatttaaaggatgcacaactgtgctgtttgagggcaagcctgtcggtacacctgatgcaggtgctttctggaaaatcatttcagactataaagttaaatcattattcacggcaccaacagcttttagagcaattaaaaaagaagatcctgagggcaagtttttctctaaatatgacttaagtaaatttgaaagtctttttcttagcaggagagcgtgcagaccctgat

SEQ ID NO: 309530 - DNA, 1091 bp, Unknown
  Bacterial polypeptide expressing nucleotide sequence isolated from the Sargasso Sea
catgatacctgagttagcgtacactatgttagcttgcgctaggattggtgcagttcactcaataatatttggtggtttctcaccagactcaatcgcaacaagaattaatgactgcgagtcagattatgtaattactgcagatgaaggtgtaaggggtggaaaaataataccactaaaaaaaattgctgacgaagctatgatgcaatgtccaaatgttaaaaaatgtgtagttgttaaaagaacagggaatactgttgattggaacgatgatcgagatatttcctatgatgatattacaaaagatgtatctgataaatgtgtggcagaagaaatgaatgcagaagatccgctatttattctttatacctcgggatctactggaaaaccaaaaggtgttttacatacaactggtgggtacatggtttatgcttccatgacacatcagtatatttttgattataaaaacaaagatatttattggtgtacagctgacatcggttgggtaactggacatagttatattatttatggacccttagctaacggtgctaccacaattatgtttgaaggagttcctaattaccctgatagttcaagatggtggcaaatagttgataaatacaaagttaatattttttataccgcgccaacagcaattcgtgcattaatgcgcgagggagacggtccagttaagaaaacaagtcgaaagtcattgaaacttttaggtacagttggtgaaccaattaatcctgaggcatggatgtggtactacaagacagttggtgaaaaaaaatgtccaatagtcgatacatggtggcaaaccgaaacaggagggattttaatttctccacaaccgggagctattaatttaaaacctggatcagcgacaaaacctttttatggcatcaaacccgcgatagttgatgaatctggaaaagttttaaaaggagcttgtaagggcagactttgtatgactcaatcttggccgggacaaatgagaacagtttatggagatcacaaaagatttatagatacttatttttcacaattcgatggaaaatattttacaggtgatggatgtagaagagaca

SEQ ID NO: 309531 - DNA, 526 bp, Unknown
  Bacterial polypeptide expressing nucleotide sequence isolated from the Sargasso Sea
aatgtcattagataaaaaaaattcaatcaataacatacttgaagaaaagagaattttccctccatcaaaaaaatttgcagaaaactcaaatattagtactcaagaagaattactaagtctaaaaaaacaagcatcagataatcctattcaattctgggaatcttttgcaaaatctgaattagattggtttgaaccatttcaaactgtattagataatgaaaatgctcccttttttaaatggtttaaagaagggaaacttaatattacatataattgcttagatagacacattaagagagggcttggagaaaagactgcacttatatgggaaggcgaaccaggagatagcaaaaaatatacttacgaagaacttctaaaagaggtatgtaaagcagctaatgcgttaaaagcaattggtgtaaaaaaaggagatttggtatgtatttacatgccgatgattcctgaagcgatgtttgcgatgctagcttgcgcaagaattggcgcgcctcattcagttgtctttgga

SEQ ID NO: 309532 - DNA, 1910 bp, Unknown
  Bacterial polypeptide expressing nucleotide sequence isolated from the Sargasso Sea
catggcagagaatgataaggcggcagggcgagttgcaagtgtgatgcaggagcatcgctcgtttccgccgtcaaaagaattttcaagccgatctcgtattggatcgatggaagcgtaccaagccctctatgagcaggctgcaaatgaccctaacggtttctgggcagagcgggctcaatcattaccatggatgaaaccatacgacgaagttttacgatgggctgctccacacgcagagtggtttgtgggtgggcagacaaatgcttcagcagcatgtatcgatcagcacgttgaagctgggctaggtgacaagactgcgattgtatgggttggcgaacccactggtgaacgacgaacactctcgtttcgtgaactcaaggaagaagtaagcaaagccgcttcaggattatcacgcttaggtgtgaaacaaggtgaagttgtttctatttacatgccaatgacaccggaacttgtcattgcaatgttggcatgcgcgagaatcggtgcagtgcactcggtcatttttggtggtttttcaagcgaagcgattgcagaccgaaataacgatgcgcaagctgttgctgtcataacttctgatggtggatggcgtcgaggaagtgctttgccactgaaggcaaacgttgacgaagctgtcaagaaatcacccactgtgaaacatgttgttgttcttaaacgcactggacaagaagtcgcgatggtcgatgggcgggacgtgtggtggcatgacatgattgcgaatgaatcgggagactttgcaccagtcccaatggattcagagtcgccactttttattctgtatacgagcggatcaaccggaaagccaaaaggaattaagcacacaacggccggttatctgctgtgggcgaaaacaacggcggagtgggtttttgatctacgggacgatgatttgttctggtgcacagctgattgtggctggattacggggcacagttatgtcacctatggcccgttagcggctggcgtcggaatcctcatttatgaaggggcaccagacgctcctcaccaaggccgcttctgggagattatcgaagaggaaaagccaactattttttacacagccccaactgctattcgggcatttatgaaatggggccccgaacatattgacggcaaagatctgtcgagccttcggttacttggcactgttggagaaggtattaatcccgaagcatggatgtggtaccacgagacaataggggctgaacgctgccccattgtcgatacatggtggcagacagagactggcggaatcatgatgagcccgcttcccggttgcatccctacgaagccgggtagttgcacgctgccgttgccaggtgtttgtccagaaattgttgatgcttcaggtgaaccagttgaaccaggtgaaggtggctggcttgttatgacaaagccttggccaggaatgctccgtggtatctggggtgatgaagaacgctttgtggaaacctattgggaacgggttccaggaaagtatcttgccggtgataacgcaaggaaggatgaagacggctactactggattatgggtcggattgatgatgtgcttaatgttgccggccatcgactctcgacaattgagattgaaagtgcgttggtaagccatccatctgttgcagaggcagcagcagttggtcgtccgcatgaggtcaaaggtgaggccatttcggtcttcgtcacgctgaagtctggcgagccggatgaagcatttaagaaagagttgcggcagcatgttcgtcagcaaataggtgcgatcgcctcaccggacgatgttcactttacggcagcccttccaaagacacgcagtggtaaaatcatgcgacgtcttcttcgcgatatagctgctggtcgcgaaacagtcggtgata

SEQ ID NO: 309533 - DNA, 867 bp, Unknown
  Bacterial polypeptide expressing nucleotide sequence isolated from the Sargasso Sea
tatgtctaagtttgatattaagaattatgtaaatccacatatcactaccctcgaagactttaattcacaatataaagaatcaattcaaaatccaagttccttttttctcaaaaaagctatctcttatctttcatggtttcaggagccaactattggacataatggaagttttgaagaaccaaaatggtttgaggatggaatattaaatataagttataactgcattgatagacatgcaaaaaaaaatccagagaaaattgcaattatttggcaaggggatcaagagagcaactctaaagaaatttcttatcaagaacttcttgaagaagtttcaaaattagcaaatggtttaaaatctttaggtgttaaaaagggcgacagagtatgcatttatatgcctatgatccctgaagcagcatattcaatgtttgcttgtatgagaataggggccattcattctgttgtttttggagggttttcaccagaagcaatttcatcgagaattcttgatgctgattgtgaatatgtaattactgcagatgaaggaattagaggaggcaaaacaatcccacttaagttcagcgtagataaagcattagaaaaatgtccgaaaatcaaaaaagtgatagtttttcaatacacaaaaacagatgttaattggaataataaattagatatttcttatgaggaattagttactaatcaatcaatagaatgtgaatgtacagaattaaaagctgaagacccttcatttattctttacacttctggctcaacaggaaaacctaaaggagtactacatacaactgcaggctaccttataggtgcaaatctttcatttaaatatatttttggaattaaagatga

SEQ ID NO: 309534 - DNA, 796 bp, Unknown
  Bacterial polypeptide expressing nucleotide sequence isolated from the Sargasso Sea
ctggtcggtgaaccaataaatcctgaggcatgggactggtattactcggttgtaggaaataaatcttgtgaagttattgatacatggtggcaaacagaaactggttcagttcttatctctccgattgcaggcattacgccaacaaaaccaggctctgcaacattaccattctttggtgtaaggcctgagctgtatgatgaaaatggtattcagcagtcaggagaagcatcaggtaatctggtaattgagtcttcatggccaagtcaaattagaagtgtttataacgaccatcaaagaatgattgatacttatttttcaacctatagcaatatttactttacaggtgacggtgcaaaaagggataaagatggttacttttggattactggaagagttgatgatgttcttaatgtttctggccataggcttggaacagctgaggttgaaagtgcgcttgttttgcatccagttgtagctgaagctgctgtggtaggctttgagcatccaataaaaggacaaggcatatatgcttttgttactttaatggtaggtgaagaattttcagatgaattatcagcagaattaagaaactttgttggcaaagaaattggtcctattgcaaaacctgacttaattcaaaatgctcccggcctaccaaaaactagatcaggcaagattatgagaagaatattacgtaaagttgctgaaggtgatttcgaaaacttaggtgatacgacaactcttgctgagcctgctgtagtttctgatcttattaataataaaaaaagtttatgaa

SEQ ID NO: 309535 - DNA, 1948 bp, Unknown
  Bacterial polypeptide expressing nucleotide sequence isolated from the Sargasso Sea
aatgtctgaaaaaattgaaaatttacttggagaagatagaacttttgaccctccaacgagcattgtagagaatgcaaacgctacacaagaatggtttgacctagccaatgaagacagacttgcttactggcagaaacaagctttagagagaatcacctggtataaagaacccaaagagattttggacgactcagatgcacctttctataagtggtttaaggatggagaactcaacctttcttacaattgtcttgaccgtcatttagagactgatgcagacagaattgctttttactgggagggagaaccaggagactctcaagaaataacatatcaagatctttatgagagggtctgtaagctttcaaacggcctaaaagagcttggtgttaataaaggtgatagaatcgcaatttaccttggtatgacgcctgaaattgtgatctctatgctcgcctgcgcaagaataggtgctgtccattctgttgtattcggaggtttttctgcagaagctctcgctgacagaattaatgatgcggaagcaaaagttgtaattacagcagatggtgcttggagaaggggagacatagttcctctaaaacagaatgtggatgactccctaaagcttaccgatcacatagagagcgtaatagttgtaaagcgaactgagaatgaagtaaccatggttgacggcagagattattggtatagcgaacttgtagataagcaggaagctgattgtgaacctgaagtaatgaatgcagaggacatgttatatatcctctacacatcaggtacaacagcaaagccaaaaggaatcgtgcacacacaggctggatatcttactggtgtaactacaacacattctgcagtatttgatgtaaaggaagatgacatctattggtgtgctgcagactgtggttgggtaacaggtcatagttatattgtgtatggacctttagcaaacaaaacaacaagcgttatgtatgagggtgcaccaaacgcaccagatgaaaaaagactttggagcatagttgaaaaatataaagtaaatatattttacactgccccaactgcaattagagctttcatgaagtggggagtcgaacatccccaagcacatgacttaacgtcactcagattgttgggtactgttggggagccaattaacccagaagcctggatgtggtaccacgaaaatataggaaatgaatcctgtgcaattgtagatacatggtggcagacagagactggttcaataatgattacacccctgccagggataactagtactaaaccagggtcagcatgtggtccaatgccaggcatagatgcagttgttgttgatgaaaatgggaacgaagtctcaaaaggtgagggtggatatttagcaatcaaaacaccttggccatcgatgcttagaacagtgtttggagatgagaaaagatatattgacacctattggtcaaaatatgatggtatgtactttgcaggagacggagcaaaatatgatgatgatggatatttttggcttctcggaagagttgatgacgttatgaatatatccggtcatagaatttcaaccgctgaagtagaaagcgcacttgttgcacatgaatcggttgctgaggcagccgtgataggtagagctgatgagatttctggtgaagctattgctgcattcgtaacattaattggcggttttgagggaaatgaagatcttatatccacccttagacaacatgtgagcgataaaattggtccgattgctaaacctaagagtattgttatcacaaacgatcttccaaaaacaagaagtggaaaaattatgagaagattgttgaaagatatttctgaagaaagaaaattaggagatgtaaccacattggcaaatgctgatatagtttctgagttacaaacaagatcatctgagtcaagcgatgaatga

SEQ ID NO: 309536 - DNA, 793 bp, Unknown
  Bacterial polypeptide expressing nucleotide sequence isolated from the Sargasso Sea
gttggtgaacctataaatccagaggcatggaaatggtactatgaagtaccgggtaattctaagtgtcccatagtagacacttggtggcaaactgagacaggtggaatactaatatcacctcagactggagctatagaattaaaaccgggttctgcctctaaacctttttttggtattgagccttgtattgttgataaagatggaaatgaattagaaggtgaatgtgaaggtatgttgtgtatgaaaagatcgtggccaggtcaaatgcgaactgtttacggcgatcataaaagattcattgatacatatttttcacaatttaatggaaaatatttcacaggtgacggatgtaaaagggacaaagatggatattattggattacaggcagagtagatgatgtaattattgtatcgggacataatttaggtacagccgaaatagaaagtgcttttgtgtctcataaagatgtttctgaagctgcagtagttggctatcctcatgatgtaaaaggtaatggtttatattgttatgtttctctaaaagttggagttgatacatcagatgatttagttgcagatttaaaaaaaactattagagaaaaaattggtccaatagctacacctgattttatacatattactgctggtttgccaaagacgagatctgggaaaataatgagaagaattttaagaaaaattgcctctaatgaatttgagaatttaggagacacttcaacacttgcagatccatccgtagttgataatttaattgaaaatagaaaaaataaataaa

SEQ ID NO: 309537 - DNA, 1250 bp, Unknown
  Bacterial polypeptide expressing nucleotide sequence isolated from the Sargasso Sea
ggtcatcatctacatgccgatgattccagaagcagtgttcgcaatgttgtcttgtgccaggcttggagcgattcactcggtggtttttggaggcttcgccccgaatgagttggcgatccgtattgatgatgcaaaaccaaaagccctagtgacggcttcctgtgggatagaatttaacaatattattgaatacaaacctctggttgatgaagcacttcgcatctccagtcatgctcctgaaaccgtcatcctgcttcaacggtcacaagcaaaggcttcgatgcaggcagggagggacttcaactggaatgatctgatgtcatctgcgaatcctgttgattcggttcctgtggatgccaccgatccgctttacattctttatacttcaggtaccaccgggctgccgaagggtgtgatacgggaaaacggaggtcatgctgttgcccttaaatacagcatgaaagcgattttcaacaccaatcctggcgaggtttattgggcgggatccgacgttggctgggtggtgggtcattcctacatcgtctatgctccgctgattcatggatgcagcaccatcctttatgagggaaaaccggtccgcaccccggatgctggagcattctggagggtactggacgaacacagggtgaacacttttttcactgccccaaccgctttcagagcagtgaaaaaggaagacccggaggcgaaactcaagcagcagtatgacatcagcaatctgagaaccctttttcttgctggagaaagactggatcctccgacttatgattggcttgagggaatcatgaattgtccggtgatcgatcactggtggcagaccgaaacaggatggccaatgtgttccaacccgatgggcttggaaccacaaccggtgaaagtcggttcagcgactttcccggttccaggctacgacatccaggtattggatgatgagggaaaggcttgcgatctggggacgacagggaatatcgttgtcaaacttcctcttccgccaagttgtcttccctcgctttggaaagacgacgagcgtttccgaaattcctacctttcccaattccctggctattatcagacaggagacggggggatcattgacgaagacggttatgtttttgtgatgggtcggctggatgatgtgatcaacgttgccggacaccgattatccacggggcagatggaagagttgatcggttcccaccccggagtggcggaatgtgcagtggtcggaa

SEQ ID NO: 309538 - DNA, 1648 bp, Unknown
  Bacterial polypeptide expressing nucleotide sequence isolated from the Sargasso Sea
ctgggcgatgtgcgccggttcagctaccgagaactgcatggcgaggtctgccgtgcagccaatgccctcaaagcgctgggcattggcaaaggcgatcttgtggccctctacatgccgatggtgccagaggcagccattgccatgttggcctgtgcccgcatcggtgctccccattcagtggtgtttggagggttctcagccgatgcccttcgtgatcgcctcatcgatggtgaagccaaagccgtcatcactgctgacggtggattccgcaaggacaaaccagtttctttaaagcctgcagtggatgaggccctggccggtggggttgtcccctcagtgcaagccgtgctggtggtacagcgcaccaaagaagccgtgaccatggagcctggtcgggatcattggtggcattaccgggttcctcagcaatcgagcgattgccctgctgagccgatggctagcgaagaacgcttatttgtgctctacacctctggctccacaggaaaacccaaaggagtggtgcacaccactgcgggttacacgctctgggcgcacctcaccttccgttggatttttgatctcaaggaagacgatgtgcattggtgcaccgctgatgttggttggatcactggccacagctacatcgtctatggaccgctctccaatggcgccacaactgtgatgtacgagggggcacccaggccatcgaagcctggagccttctgggagctgattgagaaacacaaaatcacgcttttctataccgctcccacggcgatccgagccttcatgaagagtggtcgcgctgtgccggatggttatgacatgagttcattgcgcatccttggcacggttggagagccaatcaatccagaggcttggatctggtatcgcgatgtcattggcggcaatcgttgccccatcattgacacctggtggcagaccgagactggcggcgtgatgatcagccctctgccaggggcaacacccaccaaacctggatcagccacgctgcctttgcccggtattgctgctgatgtggtggatgcctccggtaaccgtgctagcgctgatgaaggtggcttcttggttgtgcgccgcccctggccaggaatgatgcgcaccgtgcatggtgatccagatcgttttcgacgcagttactgggaacatctgcgagctcctgatgggagcgttatttacttcgctggtgatggagctcgccgtgatgctgatggctatttctgggtgatgggccgggttgacgatgtgatcaacgtctctggtcaccggttgggcacgatggaaatcgagtcggctttggttagccaccctgcggtggctgaggccgcagtggtcggtcgtccagatgatctcaaaggtgaaggcatcgtggcgttcgtcagtcttgaagggggccgtgatggcagtgccgagttgatggccgaattacggcaacacgttggtgcggagatcggcccgatcgctcgccctgatgaaatccgtttcagcgatgccctgcccaagacccgcagcggcaagatcatgcgccggatccttagagctttagccgctggtgaagaggtcaagggagataccagcacacttgaggaccgaagcgttctcgagcggctaagggccgagggttaag

SEQ ID NO: 309539 - DNA, 1444 bp, Unknown
  Bacterial polypeptide expressing nucleotide sequence isolated from the Sargasso Sea
tatttgaaccaagtggaagaattaaaaaataatgcaaatgcaacatctgaatggtttcaagatgctgaaaaagatagattagagtactggaagcagcaggcgcttaatagaataacttggtttaaagaacctaccgaagtcttagatgattcaaatgcaccattttttaagtggtttagtgatggtgagttaaacctttcttacaattgccttgatagacatttagaaacagatggagatagagttgcatattactgggaaggtgaacctggagatactcaagagattacttatagagatctttatgaaagagtatgtaagttgtcaaatgcacttaaaagtttaggagtccaaaaaggagataggatagctatttaccttggtatgacgcctgagatagtagtttctatgcttgcctgtgcaagaattggagcagtgcactctgtagtattcggtggtttttcagctgaagcactagctgatcgtataaatgatgctgaagcaaaggtagtgataacagctgatggcgcatggagaagaggagaaattgttcctctcaaggagaacgtcgacaactcattagaactaacagaatttatagaaagtgttgttgtagtaaaaagaaccgaacaagaagtaaatatgaaagatggaagagattattggtatgaggagattgttgaaaagcagtctgcagagtgtgagcctgaagtaatgaatgcagaagacctactctacatactttatacttctggaaccacagcaaagccaaaaggaattgttcacacacaagccggttatttaactggggtaactactactcatagtgcggtatttgatgtcaaagatgatgatatttattggtgtgcagcagattgcggatgggttactggacatagctatattgtctatgggccattagctaataagacaacaagtgttatgtatgaaggagcacctaatgctccagatgaaaaaagattatggagcttagttgaaaaatataaagtaaatattttttatacagcaccaactgcgattcgagcatttatgaagtggggagttgaacatccaaaagctcacgatttaagctcattaagattactcggatctgttggagagccaataaaccctgaagcgtggatgtggtatcacgaaaatattggaaatgagcaatgcgctattgttgatacatggtggcagacagaaactggctccattatgatttcacctctgcctgggataaccagtacaaagccagggtcagcatgtggaccattacctggggttgactctgtcattattgatgaaaaaggcaatgaagttggaaaaggtgaaggaggttatcttgcaattaaatctccttggccatccatgttaagaactgtatatggagacgagaaaagatatattgatacatattggtctcaacacgaaggcctgt

SEQ ID NO: 309540 - DNA, 850 bp, Unknown
  Bacterial polypeptide expressing nucleotide sequence isolated from the Sargasso Sea
actgtttgaagatggtgatggtaaatctttaataaaagtttcagatagttgggcaaatcatgcctatgtcaatgagtcgaaatataaaaagaaatataagctttcaatcaaagagaatgaaaaattttgggctaaagaaggaaaaagaattacttggattaaaaaatactcaaaaattaaagacgttaaatacagtaaagaagaagtaaaaattaaatggttttatgacggaacattaaatgcatcagctaattgcattgatagacatcttaagaaaaatccaagcaaaaccgcaattatctgggtaggtgatgatccagctgactctaagaagatatcatacagagaactgcatcaaaatgtttgtaaggcagcaaatggtttaaaaagtttaggtgttcaaaaaggtgacagagtaacaatttatttaacaatgattccagagcttgcttacattatgcttgcttgtgcgagaataggtgcggtccactcaattatttttggaggtttctcaccagactctattgcaacaagaatatcagattgcgagtctgagtacttaatcacagcagatgagggtgtaagaggaggaaaaataattccacttaaaaaaatagcagacgaagccttggatcaatgtccaaatgtgaagaaatgcgttgtagtagagagaacaggaaaccaggtcaattggaacaatgaaagagatatttcatataaaaaattgatttcttctgttccgacaaaatgtgatcctgaagaaatgagtgctgaagatcctttatttattctttatacctctggttccactggtaaaccaaaaggagttttacatacaacaggcggttac

SEQ ID NO: 309541 - DNA, 1000 bp, Unknown
  Bacterial polypeptide expressing nucleotide sequence isolated from the Sargasso Sea
atgaactcaaattttgaaaaaatttataacgaatcaataaaaaacccagaagaattttggaaaaaagttgctgatgatatgttttggttcaaaaaacctacaaagatattaaataaatctaaggcaccattctacaaatggtatgaagatggtgttacgaacacttgttataacgctttagatttccacattgataatggaagaggagagagaacggctttaatctatgatagccctataactggtaataaaaaaaaaatttcctataaagaattaaaagaaaaagtttcaaaatttgctggagcactacaggaccaaggagtaaaaaaaggagatagagttataatttatatgcctatgattcctgaggcagttattggtatgctcgcttgtggaagaattggtgcaattcattcagtagtatttggtggttttgcttcaaatgaattagcgagtagaatagatgatagcaaagcgaaagttttgcttactgcctcgtgtggatttgagccaggaagaacagttcaatataagcctcttgttgatgaggctataaaattagcatctcataaaatcgaaaaactaatattgtttcaaagaccagataatgaagtaaaattaaattctccaaatgaaattagttgggaagaagcattatcgaatgcaaaaaatgttgattgtgttgaaatgaatgcaaatgagtttgcgtatattttatatacatcaggaacaactggaattccaaaaggaattgtaagagatgttggtggtcacattgctgcacttaagtggacgatgaaaaatatttataacattgatcaagatgatgtttggtggtcagcaagtgacataggatggattgttggtcattcttatattgtttacgcaccattatttaaaggatgcacaactgtattgtttgaaggtaagccagttggaactccagatgcaggagctttttggaaaataatttctgaatataaagtaaaatctttattta

SEQ ID NO: 309542 - DNA, 1441 bp, Unknown
  Bacterial polypeptide expressing nucleotide sequence isolated from the Sargasso Sea
gactccatagctacaagaattactgattgtgaatcagaatatctaataactgcagacgaaggtgtaaggggtggaaaaataattcctttaaaaaaaatagccgatgaagctttagatcaatgtccaaacgtaaaaaaatgtgttgttgttgaaagaactggtaatcaagttgattggaacaatgaaagagatgtttcttataaggaattaatttcatctgctcctactaaatgtgatccagaagaaatgagcgctgaagatccgttatttattctttacacttctggttcaacaggaaaaccaaaaggtgttcttcacacaacaggtgggtatatggtttatgcttcaatgactcatcaatatatatttgattataaagctaacgacatttattggtgtactgctgatattggttgggttacgggacatagttatataatttatggacctttatcaaatggagcaacaaccattatgtttgaaggtattccgaattatcctgatagttctaggtggtggcaaatagtagataaatacaaagtaaatattttttataccgctccaactgcaattagggctttgatgagagagggagatgcaccagttaaaaaaacacacagaaaatctttaaaattattaggtacggtaggagagccaattaaccctgaggcttggatgtggtattacaaaacagttggggattctaggtgtccaatagttgacacttggtggcaaactgagaccgggggtattttaatagctcctcagccaggagcaatcgatcttaaacctggctcagccacaaaacctttctatgggatcaagccagtgctagtggataaagacggtaaagtaataaaaggtgaaggtaaaggaagattgtgtatggccagttcttggcctgggcaaatgagaacagtttatggagaccatcaaagatttatcgatacgtatttttctcaatttgatggaaaatatttcactggggatggatgtaaaagagataaagatgggtattattggattacaggtagagtagatgacgtaatcatagtttccggtcataatcttggtactgcagagattgaaagtgcattcgttgctcatccgaaagttgctgaagcagcagtagttggtttcccacacagcataaaaggaaatggattatattgttacgttactttaaatgcaggcgaaaatccgactggagacttagaaagagatttaaaactttgggttagaaaacagatcggaccgatagccactccagatgtaattcaattcgccccaggtcttcctaaaactaggtctggtaaaataatgaggagaattttaagaaaaattgctgcaaatgaacctgaaaatctaggagatacaactactctagccgacccaagtgttgtcacttcgttagtagaaaatagacaaaataaaggttaag

SEQ ID NO: 309543 - DNA, 1194 bp, Unknown
  Bacterial polypeptide expressing nucleotide sequence isolated from the Sargasso Sea
aaaagaagttaacattaaatggtactatgacggcactttaaatgcctcggctaattgtatagacaggcatcttgaaaagaaaggtaacaagcctgcaattatatgggtcggtgatgatcctgctgactcaaaaaagattagttacaaagaacttcacaaaaatgtttgcaaagcagcaaatggattaaagagtataggaatacagaaaggtgatagagttacaatttatcttactatgattcctgaacttgcatatataatgttagcctgtgcaaggattggtgctgtacactccattatatttggtggtttttcaccggactctatcgcaacaagaattaatgactgtgaatctgattatgttgtaacagcagatgagggtgtaagaggtggaaagattatacctcttaaaaaaattgccgatgaagcaatggaacaatgtcctaatgtaaaaaagtgtgtggtagtcaaaagaacaggtaacactgtaaattggaataacgaaagagacatatcatatgaagaaataacaaaaaatgtatctgataaatgtctacctgaagaaatgaatgccgaagaccctttgtttatactttatacttcaggttcaactgggaaaccaaagggtgttttacatactactggtggatacatggtttatgcttctatgacacatcaatacatttttgattacaaaaatagagatgtttattggtgtagtgcagatattggttgggtaacaggacatagttatataatttatggtcctttagctaacggggcaacaacaatgatgtttgaaggggtgcctaactatccagacagttctagatggtggcaaataattgataagtttaaggtaaatattttttacacagctccaacagctataagagctttaatgcgtgaaggagataatccggttaaaaaaactagtagaaaatctttaaagttattgggtactgtgggcgagcctataaaccctgaggcttggatgtggtactacaaagttgttggggaaacaaagtgtccaattgtagatacttggtggcaaactgaaactggcggtattttaatatcgccccaacctggtgctatcaacttgaaacccggttcagcaacaaaacctttttatggaataaaaccagcaatagtcgacgagtctggtaaagttttgaaaggtgcatgtaaggg

SEQ ID NO: 309544 - DNA, 1182 bp, Unknown
  Bacterial polypeptide expressing nucleotide sequence isolated from the Sargasso Sea
gaagttaaaaaatgtttaatagtcaaaaggacaaataaagagatagaaataaagttaaatagagatgttttttatcaagatctaattaatgaggttgaggatatttgcgaacctgagattttaaatgcggaagatccattatttattctatacacatcaggctctacaggcaaacctaaaggagtaatgcatacaagtggtgggtatttagtttatgcatcaatgacccatgaatacatatttaattataagcctgatgatatttattggtgtacagctgatattggttggataacgggtcatagctacattatctatgggccgcttgctaatggcgctacaacattaatgtttgagggtgttccaaactatcctgatttttctagattttggcaaatagtagataagcacaaggttaatatattttatactgcccctactgcaatcagagctcttatgagagaaggagatgaatatgttaaaaaaactaatagatcatcattgaaacttttaggcagtgtaggtgagccaattaatccagaagcgtggaagtggtattttgaagttcctggaaattctaaatgccctatagtagatacttggtggcaaactgaaacaggtggtattctaatatcaccacaaacaggagctatggagctaaaaccagggtcagcatcaagaccttttttcggaattgagccttgtattgtaaataaagaaggaaaggaattagaaggtgaatgtgaaggaatgctttgtatgaaaagatcatggcctggtcaaatgagaactgtttatggtgatcataaaagattcattgatacatatttttctcagtttgatggaaagtacttcactggtgatgggtgtagaagagataaagatggctactattggattactggaagagttgatgatgtaataattgtatcaggacataatttaggaactgctgaaatagaaagtgcatttgtgtctcataaagatgtgtctgaagctgcagttgttggctatcctcatgaagtaaaaggtaatggtctatattgttatgtttctctaaaagttggtgtcgatacatcagatgatttggtgaatgatttaaaaacaacaataagagaaaagattggaccaattgcaacacctgatttcattcatatcacatcaggtttacctaaaacgcgt

SEQ ID NO: 309545 - DNA, 1132 bp, Unknown
  Bacterial polypeptide expressing nucleotide sequence isolated from the Sargasso Sea
aggtgttttacatactactggtggatacatggtttacgcatctatgacacatcaatatatttttaattataggcctaaagatatttattggtgtactgctgacattggatggattacaggacatagctatataatatatggacctttagcaaatggagctactacaattatgtttgaaggaatacctacatacccagatacatcaagatggtggcagatagtcgataaatacaaagtaaatattttttatactgcaccaacagcaattagagctttaatgagagagggagatggtcctgttaaaaaaacttcaagaaaatctttaaaattacttggaactgtaggtgaacctataaatcctgaagcatggcaatggtattttaagactgtaggagattctaagtgtcctatagtagatacatggtggcaaactgaaactggtggaatattaataagcccacaaactggagcaatagatttaaaaccaggatctgctactaaacctttttacggcataaaacctgttatcgttgatcaggaaggaaaagtattaaaaggtgaagctcgaggaaggttatgtatagctcaatcttggcctggacaaatgagaaccgtttatggtgatcacaatagatttatagaaacttatttttcacaatttgatggtaaatattttacaggagatggctgcagaagagataaagatggctattactggatcacaggtagagttgatgatgtaataatcgtatcaggacataatttaggaactgcagaaatagaaagtgcatttgttgcacatccaaaggttgctgaagcagctgtggttggttatccacatgatattaaaggtaatggcctttattgttatgtaacattaaatgtaggtgaaaaccatgatggagatcttgaaagagaattaaaactatgggttagaaaacaaatcggaccaatcgcaacacctgaccttatacatttttctccaggacttcctaaaacaagatctggaaaaattatgagaagaattttaagaaaaattgccgcaaatgaacacgaacaacttggtgatacaacaactttagccgacccaagtgtagttaaaagtttagttgataatagaaaaaatatttaa

SEQ ID NO: 309546 - DNA, 1012 bp, Unknown
  Bacterial polypeptide expressing nucleotide sequence isolated from the Sargasso Sea
atgaattttgatataaaagattttaagaacccaaacttaaaagatttagatgaatacaggcatatgtatgagaaatctgttactgatccaagctcattttttcttgagcacgcacttaaagaattggattggtttgaaaaacctagcgtaggttattctggaaaaattactaaaccaacttggtttaaagacggggtgcttaatattactcataactgtatcgatcgccacgcagcaaaaaaccctaataaaacagcaattatttggcagggtgacgaaaaagaaaatacaaaaaatatatcttatgaccaattattaactgaggtgagcaagttagctaacggactaaaatcaattggcgtcaaaaagggcgacagagtatgcatttacatgcctatgattcctgaggcagcttattcaatgttggcttgtatgcgaataggtgcgatacattctgtagtgtttggtgggttttctccagaagcaattagttcaagaattctagattcagattgccaatatgtaatcacagcagacgaaggaattagaggtggaaagagagtaaaccttaaagaaaatattgatattgctttgaagaattgtccaaacgtgcaaaaaacaatcgtttttaaatacaccaatgcaaaaatagattgggttgattctagagatgtttgttatgacgagctcatcagtcaaatgcccgatgtttgtaagcctgaaaaaatgcatgcagaagacccatcatttatcttgtatacatcaggctcaacaggaaaaccaaaaggtgtaatgcatacaacaggtggctacttattaggggctacaatgtcattcaaatatatctttggattttcttcggaagacgtctattggtgcacagctgacgttggttgggtaacaggccacacttatattgtatatgggccactttcaaatggtgccacaacattaatgtttgaaggaattccaacatatccagatccatcaagattttgggaagtatgtgacc

SEQ ID NO: 309547 - DNA, 1948 bp, Unknown
  Bacterial polypeptide expressing nucleotide sequence isolated from the Sargasso Sea
atgaccgccagcaaaacttatcctgtgcctgagaacattcttcagtctacccatttaaccgcatctcaatacgacgagatgtacaagcaatctgtagagcaacctgaagcgttctgggctgagcacgcatccatgcttgagtggtatcaaaagccaaccaaaattaaaaacacgatgtttggcgaaaacgatgtgtctattaagtggtttgaagatggtgaattaaatgccagctataattgtattgaccgccatctggctaacaatgccacaaaagttgcctttcactgggaaggcgactcaccagaagatagccaagatatcacgtatcaacaagtacactacgaagtttgtaaactagcgaatgcacttaaagatatgggcgtaacaaagggtgaccgtgtcgccatttacatgcctatggtacctgaagctgcctatgccatgctagcgtgtgcccgcattggtgcagtacattcggtgattttcggtggtttctcaccaaacgcaattgccgatcgtattaatgatagcaacgcgaaagtggtcattacggcagacgaaggccgccgtgctggaagaagcattccgttaaaagcgaatgtagataaagcgctggctggcgatgcatgtccatctatcactcacgttttagttcacaagctaacgggtggagatgttgattggaatgacaagcacgatgtgtggtggcacgatgctgtagagggtaaatctgcgcaatgtgagccagaggttatgaatgcggaagacccgctgttcattctttacacatcaggttctaccggaacaccaaaaggtgtagtacataccacaggcggttatctactatattccgcaatgacctttaagtatgcctttgattataaagatgacgatgtgtactggtgtactgctgatgtgggctggatcacgggtcacagctatatggtttacggaccaatggttaacgctgcgtcacaagtattttttgagggcgtaccgacttatccagatgttaaacgcatcgcgcaggtcgtagagaagtacaaggtaaatagtctttataccgcgccaactgctatccgcgcattaatggctcatggtgacgttccagcagaagggtgtgatttatcttcgctgcgtttactaggcacagtgggtgaaccaattaacccagaagcatgggagtggtaccacagagttattggtaaagggcgttgtcctatcatcgatacatggtggcagacagaaacgggtggacacatgattctgcctctacctggcgccacggaactaaaaccgggttcagctacgcgcccattcttcggtattcagccggcgctatttgacgctgacggcaaagagcttgagggcgtagcagaaggtaacctagtaattaaagacagctggccaagtcaagcgcgcacggtttacggcgatcaccaacgctttattaacacctacttcagcgcatacaaaggcgtgtacttcacgggcgacggcgcacgtcgtgacgaagatggcttctactggatcaccggtcgtgtggatgacgtattgaacgtatcgggtcaccgcttgggtaccgctgagattgaaagtgcacttgttgcccaccctaaagtggccgaggctgccgttgttggtttcccacatgacattaaagggcaggggatctatgtttatgtaacaccaaatgaaggggttgaagcagatgaagcccttactaaagagctcaaagcgtgggtacgccaagagttaagcccaattgccacaccggatatgattcagtggtcacgcggactacctaaaactcgctcaggtaaaattatgcgccgtatcttgcgtaagattgctgccaatgagcatgagcaattaggtgacacatctacgttggcggatccatcggttgttgatacactgatagaggaacgtctaaataagtaga

SEQ ID NO: 309548 - DNA, 1954 bp, Unknown
  Bacterial polypeptide expressing nucleotide sequence isolated from the Sargasso Sea
tatgagctcgcagtctctctacaaagtctccggcaatatcgctgccaatgcacttgtaaataacgatcaatataaaacaatgtaccaagagtcgattgtcaatccagagggtttctggagagagcacggcaaacgcatcgattggataaagccatacactaaaatcaaaaaaaccacttttgacgatcataatttatcgattaactggttctatgacggcaccctaaacgcatcggcaaactgtctagatcgccatttggcggcgcacagcgaccgtgttgccattatttgggaaggcgataacgccaacgaacaacgcaaaatcacctacggtgaactgcacactcaagtatgtaaatttgccaacgcgctacgcagccaaggcgtacgccgtggcgatatcgtcacgatttatatgccaatggtgccagaagccgccgtcgcgatgctggcctgcgctcgcattggtgctgtgcattccgttgtttttggtggtttctcacccgattctatcgcctctcgggttatcgatggtaaatccaaaatcgtcatcacctccgatgaaggtatgcgtggtggccgcgccattccgctcaaacacaacatcgacgatgcgttaaaacatcccgatgtgaccagtgttgagaaagtcattgtgcttcaacgcactggcggcaagattgactgggtagaaggtcgcgatgtgtggtggcattcactggttgaaaccgcatccgaacattgcgctgtcgaagaaatgggcgcagaagatccgctgttcttactctatacctcaggttcaacgggtaatccaaaaggcgtattgcacactactggtggttatatggtgtatgcctccatgacccacgagtatgtgttcgattacaaacccggtgagatttactggtgtactgctgatgtgggttggattactggtcactcctatatggtatatggcccgcttgccaacggcgcaacggtactcatccacgaaggtgttcctaaccacccaagccctgcgcgtttaggcgagatgattgaccgccataaagtcaatattctctatactgcaccaacgcttattcgtgcactaatggccgaaggtaaacaacattttgataagtacgatggcagctcactgcgcatcatgggctctgtaggcgaacccatcaacccagaagcttggcgttggtaccacgaggtcatcggccacgagcattgcccgattgtcgatacttggtggcaaactgaaacaggcggtattttgatcaccccactgccaggcgcaactgatactaagcccggctcggcgactcgtcctttctttggggtacaaccggcgctcgtggacaacatgggtaacattttagaaggcgcaaccgaaggaaacttagtgctgctcgactcatggccaggccaaatgcgtaccgtatatggtgaccatgaacgtttcgtgctgacctattttaaaaccttccgtggcatgtactttaccggtgacggcgctcgccgcgatgaagacggttattactggatcactggccgcgtggacgacgtgattaacgtctcaggtcacagattaggtaccgccgaagtggaaagtgcactggtgtcacacgaactggtcgctgaagctgctgttgtgggctatccccatgatattaaaggccaaggtatttacgcttatgtgaccttaacccgcggtacagaagaaagcgaagaacttcgccaagagctgcgccaatgggttcgcaaggaaattggcgccttagcaacaccggatcttatccagtgggcaacaggattgcctaagacacgttctggcaaaatcatgcgccgcttcctgcgtaagattgccgcgaacgaagtaaccaatttaggggatgcatcaacactggccgacccagctgtgattgaaaccttgattgaaactcgcttgaatcgcaacgagtaa

SEQ ID NO: 309549 - DNA, 1255 bp, Unknown
  Bacterial polypeptide expressing nucleotide sequence isolated from the Sargasso Sea
agggatgtatcttataaagaattaatatcttcagttccatctaaatgtgatcctgaggagatgaatgcagaagatcctttgtttattctttatacctctggttctactggaaaacctaaaggtgtacttcatactacaggtggttatatggtttatgcttcaatgacacatcaatatatttttgattataaagcaaatgatatttattggtgtactgctgatattggttgggttactggacacagttatattatttacggaccacttgctaacggggcaacaacaattatgtttgaaggcgtaccaaattaccctgatagttctagatggtggcaaatagtggataaatataaagttaatattttttacacagctccaactgcaataagagcattgatgagagaaggtgatggtccggtaaaaaaaacaagtagaaaaactttaaaactcttaggaaccgtaggagaaccaattaatcctgaagcttggatgtggtattataaaacagttggagactctcgatgccctatagttgatacttggtggcaaacagaaacagggggaatacttattgctcctcaaccaggagctattgacctgaaaccaggttcagctactaaacctttctacggtattaagccagttttggttgataatgatggaaaagttataaaaggtgaaggaaaaggcaggttatgtatggcaagttcttggccaggtcaaatgcgtacggtttatggtgatcatcaaagatttattgatacttatttttctcagcatgatggaaaatatttcactggtgacggctgcaaaagagataaagatggatattattggataactggtagagttgacgatgtaattattgtttcaggacacaacattggaactgctgaaatagaaagcgcatttgtagcacatccaaaagtcgcagaagcagcggtagttggatttccacatagtattaaaggtaatgggctttattgttatgtaactttaattgctggagagaatccatcaggagacttagagagagaattaaaacaatttgtaaaaagacttgttggagctcattgctacccagacataattcaatttgcacctggattaccaaaaacaagatcgggtaaaattatgagaagaattttaagaaaaattgcagagaacgatcctgataatttaggcgatacaactactttagcagatccaactgttgttgcctcgctagtggagaataggcaaaataaaggttaat

SEQ ID NO: 309550 - DNA, 1444 bp, Unknown
  Bacterial polypeptide expressing nucleotide sequence isolated from the Sargasso Sea
tctcctgaatcccttaaagatagaattcttgattctgattgtcgtattgtgattacagctgatgaaggggtcaggggtggaaaaaaggttccccttaaagctaatgttgataaagcactaatgcaatgtccgaatgtaacaaatgtggtggtggttcagagaactcaggggcatattgcttggcatgaaggacgtgatttatggtatcacgatcttaaaaaatcagcagagaaagagtgtccaccggagccaatgaaagcagaagatcccttatttattctttacacatcaggttctacaggcaaacccaagggagtgcttcatacaacaggtggatatcttcttggggcacatctttcatttaagtatttgtttgggtacgaagattcagataaatactggtgtactgccgatgttggttggatcaccgggcatacctatattctttatgggcctcttagtaatggtgcaacaacgttaatgtttgaaggtttaccaaattatccaactgcgtctcgttgttgggaagtttgtgataaatacgagatcaatattttttatacagcacctacagccattagagctttaatggctcaaggcaatgagtttgtaacaaaaactcaaagatcctctctaaaagtccttggtacagttggagagcctataaatcccgaagcatggcattggtattatgaagtcgttgggaatgcaaactgtgaggtaattgatacgtggtggcaaactgaaactggttctgtactaatttcacccattgccggagtcactcctacaaaacccggatcagcaacacttccattttttggtgttataccagaaatctttgatgatcaaggaaatgctaaagagggagcggtatctggaaacttagtgatcaaacattcatggccaagtcaaattcgaagtgttttcaatgatcatcagagaatgatagacacttacttttccacttatgctgatatttattttacaggtgatggtgcacggagagatgaagatggctatttttggataactggaagagtagatgatgttctcaatgtttctgggcaccgtttgggcactgctgaaattgaaagcgcacttgtacttcatgaaaaaattgccgaagctgcaattgttggttttgagcatcctataaaaggccaaggcatctatgcttttattaccctcatgtcaggggaagttttttatgatggtttcgaacaagaattaagaaactttgttgcaactgaaattggccccattgcaaaaccagatttaattcaaaatgctcctggtctccctaaaacacgatccggtaaaattatgcgaaggattctcagaaaaattgcagcaggagatatcaaagaattaggagataccacgactcttgctgatccttccgttgtcgaagctcttgttgagggagcaaagtccttgtaga

SEQ ID NO: 309551 - DNA, 841 bp, Unknown
  Bacterial polypeptide expressing nucleotide sequence isolated from the Sargasso Sea
tatatagtctatggcccactatgcaatggcggtacttccttggtctttgaaggagttccaacttatcccaatatgtctcgattttgggaggtgatcgataagcaccaagtaaaccagttttatacggcacccacggctatcagagcattgatggggggcggggatacttggttggaaagcacatcgcggagttcattaaaattattgggtaccgttggtgagccgattaatccggaggcttgggattggtattttaacaaagttggaggtggtcgctgcccggtggtcgatacttggtggcaaactgagactggcgcacatatgttaaccccattgcctggagcgaccactttgaaaccgggttcagctaaccgtccttttttcggtattcaacctgcgctcttggatgctgaggcaaatgaaatatccggcgaaggcgagggtatattagtcataaagacatcatggccgtcccaaataagaaccgtatttggagatcacgatagatgtgtagatacatatttttctgcctaccctggctattatttcacgggtgatggcgcgcgaagggatgaggatggagattactggattacgggtcgtattgatgatgttctcaatatctctggtcatagaatcggcactgcagaaattgaaagtgctttagttcttcattcgaaggtagcagaggcggctgtggttggttgtccgcatgaaatcaaaggtcaaggcatatattgctacgttacaccaatgtcccatgttataccagatgacgatctctatgatgaattaattggcgttgtgcgcgagcgaaattggggcaaatgcaaaacctgat

SEQ ID NO: 309552 - DNA, 1528 bp, Unknown
  Bacterial polypeptide expressing nucleotide sequence isolated from the Sargasso Sea
tatgccaatgattcctgaagctgcttatgcaatgttagcttgtacaagaattggcgctatccactccgttgtttttggaggtttttcaccagaagcacttgctggtagaataaatgattgtaactcttcattgataattacagctgacgagggaattagaggtggtaaaaaaataccacttaaaaaaaatactgatgaagcacttttaaaagctaaatgttgtaaaaaatgtctagtagttaaaaggactggtggggatgtaaactggaatgaagaaagagatttttggtacgatgaaataagttcaaacgtctcacatgaatgtcaaccagaagaaatgaatgctgaagatccaatgtttattctctatacctctggttctacaggtaaacccaaaggcgtattgcatactacaggtggttatatggtgtatgcttcaatgacacatgaatatgtttttgattataaaaaaaatgaaatatattggtgtactgcagatgtaggttgggtcactggacattcttatattgtgtatgggccactctctaatggggcaacgacacttatgtttgaaggagtgccaaattacccctcagttagtaggttttgggaagtggttgataaacataaagttaatattttttatacagcaccaactgctataagagctctaatggctgaaggtgataagcccgtaaagttaactagtagaaaaagcctaagaatattaggtacagttggtgaaccaattaatcctgaagcgtggaactggtataacgaagtagtaggagaaaaaaaatgtcctatagttgatacttggtggcaaacagaaactggtggaattttgattacacccttgccaggtgctacggaaacaaaacccggttctgctacaaaaccatttttcgggataaaacctatattggtggataatgaaaataatgaactttctggggctacagaaggaaatttatgtatagaaatgtcctggcctggtcaaatgagaaccgtttatggtgatcatgaacgtttcattgacacctattttaaaacttttccaggaagatatttctcaggcgatggatgtaaaagagacgaagatggttattattggattacaggaagggttgatgatgttattaatgtgtctggtcacagaatgggaactgcagaagtagaatctgcattggtttctcacaccaatgttgctgaagcagcagtagttggatatcctcatgacataaagggacaaggtatttatgcctacgtaactttgaatattggtactgaagatagtcaagagttattaaaagagttaaaaagttgggtacgtaaagagatcggtccaatagctacacccgatctaatccaattttcaccccaattaccaaaaacaagatcaggaaaaatcatgagaagaatattaaggaaaattgcagctaacgaatatagtgatcttggagatgtttcaactcttgcagatccaaatgttgttgaaaatttaattgcaaatagacaaaatcaatga

SEQ ID NO: 309553 - DNA, 1708 bp, Unknown
  Bacterial polypeptide expressing nucleotide sequence isolated from the Sargasso Sea
ttcaattgtattgataggcatctaaaaaataatgcgaataaagtcgctctaatatgggagggtgatgatccatcagattctattagcttaacctaccagcagctccatgatgaagtatgtaaattctcaaatgttcttaaaaatctaggagtaagaaaaggttcaagggtttgcatttatatgcctatgatagttgaagcagcctttgcaatgcttgcttgcacaagaattggtgctgttcattctgttgtttttggtggtttttcgccagagtcattaaaagacagaattcttgatgctgattgtaaaattgtaataacagctgatgaaggtttgagaggcggcaaaaaagttccactaaaacttaatgtagatgaagctcttaaggaatgtccaaatgtaaaatccactttagttataaaaagaactggtggagatatttcatgggatgaaaatcgtgatgtttggtatgaggaattatctaaagatgctgaaactacctgcaaccctgagccaatggattctgaagatccccttttcatactttatacatctggttcaaccggaaagcccaaaggtgtgttgcattccactgctgggtatttgttaggtgctcacattagttttaaatatctgtttggtataaggccagaagataaatattggtgtactgctgatgtcggatggataactggtcatacatatattttgtatggtcctctttcaaatggtgctacaactttaatgtttgaaggtattccaacttacccatccgcatcaagatgttgggaaatatgtgataaacatgaaattaatatcttctatactgcgccaacggctattagagcacttatggctcaaggagatgagcctgttctaaaaactaaaaggaactctctaagagttttaggaactgttggtgagccaatcaatccagaggcatgggattggtattacagtattgttggtcaatctaaatgtgaaatcatagatacttggtggcaaactgaaactggttcagttctaatatctcctattgcaggtgtcacaccaacaaaaccaggatcagctacccttcctttctttggagtaaaaccagcactttacgatgaaagtggcaaaacgctagatgggccaaattcaggaaacttggtaatggagcaatcttggccaagtcaaatcagaagcgtctatggagatcatcagagaatgctagatacctactttagtatatacaatgacatctactttactggtgatggggctagaagagatgaagatggttattactggattactggaagagtggatgatgttctaaatgtctcaggacatagacttggtaccgctgaaattgaaagttctcttgtgcttcatccaaaagtagcagaagctgctgtggttggatttgaccatccaattaaaggtcaaggcatttatgcttttgttactttaatgattggagagtcatatagtgacgaattaaataatgaattaaaacaattcgtagctaaagaaataggtgcaatcgcaaagcctgacctaatccagaatgcacctggtcttccaaaaacaaggtctggaaaaataatgagaagaattttaagaaaaattgccgaaggcgatctatcaaatcttggcgataccactactcttgcagatccgtcagttgtagattctctaattagcaataaaataagcttgtgaa

SEQ ID NO: 309554 - DNA, 1584 bp, Unknown
  Bacterial polypeptide expressing nucleotide sequence isolated from the Sargasso Sea
caggtattaaaaaaggtgatagagcaataatttatatgccgatgatccctgaggctgtagttgcaatgcttgcatgtggaagaattggagctattcattcagttgtttttggcggatttgcctcaaatgaattagcaaatcgaatagatgatagtaaagcaaatatattaattactgcttcatgtggttttgagccaggaaaaactgttgagtataaacctttggttgatgaagctctaaaattagcttctcataaaattgataagctaattcttttccaaaggtctggtcacgaagtaaaattaaatgctccaaaagaattaaattgggatgaagtattatcaaatgctcaaaatgttgattgtgtagaaatgaattctaatgagtttgcatacattttatatacttctggaacaaccggtgcaccaaaaggaattgttagggatattggtggtcacatagttgctcttaaatggacaatgaaaaatatttacaatattgacactgatgatatttggtggtccgcaagtgatattggttggattgtgggtcattcatacattgtttatgcgccactatttaaaggctgcactactgttttgtttgaaggaaaacctgttggtactccagatgcgggggttttttggaaaataatttctgattataaagtaaaatcactttttactgccccaactgcatttagagcaattaaaaaagaagaccctgaaggaaaatttttctctaaatatgatttaagttcatttaaaagtttatttttagcaggcgaaagagcagatcctgacaccataaaatgggctgaaaaactattaaaagttccagtaattgaccattggtggcaaactgaaacaagttgggcaattagttctaattgcacaggaatagaaatgatgaaaacaaaatatggctcagcttgtaaagctgttcctggttatgatgtaaaaataattaaaccagatcaaactttagctaaaccaaatgaaatgggagatattgttgttaaacttccattaccaccaggaacttttccaacattgtggaatgctgataagagatatgaagaaacttatatgactaattatgaaggctattatcaaacttatgatgcaggacacattgatgatgacggatatatttcgattatgtccagaacagatgacatcataaatgttgcaggacacagattatcaacaggagcaatcgaagaagtattgtccgagcatcaatctgttgctgaatgtgcggtacttggaattgctgataaactaaaaggacaattaccaataggattaatcacattaaaaactggagttgataaagatgatgaaactattactaaagaatgcatacaaatggttagagataaagttggaccagttgctgcatttaaggttgcaataattgtaaaaagattaccaaagacaaggtcaggaaaaatattaagagggacagtaagaaaaattgctgataatgaaccttataaaatgcctgcaactattgatgatcctactatactaacagagataaaagaagatcttattaaaaataatatcctaaaagactaaa

SEQ ID NO: 309555 - DNA, 1187 bp, Unknown
  Bacterial polypeptide expressing nucleotide sequence isolated from the Sargasso Sea
tgaagatccattatttatactttatacttctggctctactggtaaacctaaaggagttcttcatacaacaggtgggtacatggtttatgcatcaatgactcatcaatatatttttgattataaaagtaatgacgtgtactggtgtaccgcagatataggctgggtaacaggacatagttatattatttatggtcctctagctaatggagcaaccactattatgtttgaaggagttccaaattacccagataactctcgctggtggcagattgttgacaaatacaaagtcaacattttttatactgcaccaactgctattagatctttgatgagagaaggagataaaccagttaaaaagactaataggaagtcattaaaattactaggcacagtaggagagcctataaatccagaagcttggatgtggtattacaaagtcgtcggtgactctagatgtccaatagttgatacttggtggcaaaccgaaacaggaggtatattaattgcacctcaacctggtgctatagatttaaaaccaggttcagcaactaaaccattttatggaattaagcctgtacttgtagacaaagacggcaaagtcataaaaggtgagggaaaaggaagattatgcatggcccaatcttggccaggtcaaatgcgaactgtatacggcgatcatcaaagatttattgatacttatttttctcaagttgatggaaaatattttaccggagatggatgcagaagagataaagatggatattactggattacaggaagagtagatgatgtaattattgtatcgggtcataatcttggcacagcagagattgaaagcgcttttgtggcgcatccaaaagttgctgaagcagcagtcgtaggcttcccacatagtattaaaggaaatggattatactgttacgttactttaaatatgggagaacaagctacaggtgatttagagagagacctcaaactttgggttagaaaacaaattggccctatagctacgccagatgttattcaatttgctcctggcttgccaaaaacgagatcaggaaaaattatgagaagaattttaagaaagattgcggctaatgatccaggcaatttaggagatacaacaactttagctgatccaagtgttgttgaatctttagttcagaatagacaaaacaaaggttaat

SEQ ID NO: 309556 - DNA, 1039 bp, Unknown
  Bacterial polypeptide expressing nucleotide sequence isolated from the Sargasso Sea
tacagcagatattggttgggtaactggccatagctatattatttatggtcctcttgctaatggagcaactacaattatgtttgaaggaattccaaattatccagatacttccagatggtggcaaattgtagataaatataaagttaatactttttatacagcacccactgctattagagctttaatgcgtgaaggagacaagccagtaaaaaaaacttcaagaaagtcacttaaattattaggaacagttggagaaccaataaatcctcaagcttggatgtggtattataaaactgttggaaattctaaatgcccaatcgtagatacttggtggcaaacagaaactggtggaataatgattgctcctcaaactggtgctattcccttaaaacctggatcagctactaaaccattttatggaattaaacctgcaatagttgataaaaacggaaaagaaattaaaggagctggtgaaggaaggctttgtatttctcaatcatggcctggtcaaatgagatccgtttatggggatcaccaaagattcatagatacctatttttcacaatttaacggaaaatattttactggtgatggatgtagaagagataaagatggatattattggattacaggtagagttgatgatgtcattatagtttcaggacataaccttggtactgcagagattgaaagtgcatttgttgctcatccaaaagttgctgaggcagccgtggttggttatccacacgatctaaaaggtaatgctttgtatgtttatgttactttaaatttaggtgaaaaagaaaatggagatttagaaagagaactaaaaaatcatgtagctagaacgttgggacctatttatagaccagatattatccactttactccaggattaccaaaaactagatctggaaaaataatgaggagaattttaagaaaaattgcagcaaacgaacatggacaattaggtgatactactacgttagctgatccaacagttgttgaaagtttagttgataatagaaaaaatatttaa

SEQ ID NO: 309557 - DNA, 964 bp, Unknown
  Bacterial polypeptide expressing nucleotide sequence isolated from the Sargasso Sea
aatgttcgaaggaattccaacctttcctaatgcttctagattttgggaagttatagataaacacaatgtaaatattttttatacagcccctacggctctcagagctctaatggctcagggtgatgaatatgtgaaatcttcttctagagagtccttaagaattctaggtaccgtcggcgaacctataaatcctgaagcttgggagtggtattacaaagttgtaggtaattcaaaatgtcctatagtcgatacatggtggcagacagaaacaggggcgatgatgataacccctctagctgggtcaaccccacttaaacctggtagcgccactaaaccatttcttggcgtagaacctgcactgcttgatgaaaacggaaatgagatagaaggagaaggatctggaaaccttgttattaaatcaagttggccttctcaaataaggtccgtctatggagatcatcaacgttgtgtagaaacctattactctatgtatcctgggtactatacgactggagacggggcgagaagagataaagatggatactattggatcactggtagagtggatgatgttttaaacgtttctggacacaggctaggtactgctgaagtagagagtgcattagttttacatgaaaaagtagctgaagcggcagtggttggttatgaacatgaaattaaaggacaaggcatatattgctatgtaactcttatgctgggccaagatccaagtgataatcttagaaatgacctcattcaattagtaggtaaagaaataggcgctattgcaaagccagatataatccaatgggcacctggattaccaaagacgagatcgggtaaaataatgagaagaatacttaggaaaattgcttctaatgaagttgatgatcttggagatacaactactttagctgacccttcagttgtagaagaattaataaaaaatagagagaataaataa

SEQ ID NO: 309558 - DNA, 1060 bp, Unknown
  Bacterial polypeptide expressing nucleotide sequence isolated from the Sargasso Sea
gatgacgttttttggtgcacagcagatgttgggtggatcactgggcatacctatgtggcatatggaccattgctggctggtgccacgattcttatctatgaaggtgctcccacttttccagatgtcggaaggttttgggatatttgcgagaaacatgctgtcaccattttttatactgcgccgacagcaattagagcattgatgaaacacggagatgaaattccacaaagctatgacttgtccagtctgcgtctacttggaacagtaggtgaaccaataaaccctgaagcttggatgtggtaccacagaattattggtcaagagcgttgtccaattgttgatacttggtggcaaacggagacaggcggagctatgatcagcccccttcctggggtcacagagacaaaacctgggtcatgtacaactccaatgccaggtattgatgttgatatcgtcgatgagctaggagagccagtaggcgaggcaaatcagggagggtatctggttatcaaaaaaccatggccctcaatgttaagaaccatatggggagataaccaaagatatattgatacttattgggaaaaatttgacggaaggtattatgttgctggcgatagtgcatacagagatgaggatggttgccattggatcatgggcagaattgacgatgtgctcaatgtctcaggccaccgcttgggaacgatggaggtagagtcggcgcttgtcgcaaatgaaatggttgcagaagcagctgttgttggaagaccacatgaagtcaaaggcgaaagcatctttgcatttgttgtgaccaaaggagagagaccgattggagaaggcgcaaaaaaaatgcaggaagctcttagggaatgggtggctgaacaagtgggcgcaattgcaaaaccagatgaaattcgattttcagataatttgccaaaaacacgttctggcaagattatgaggagattgcttcgagcaattgcaagagatgaagccatcacacaagatatatccactcttgaggatgagtctatcattaagcaactccaaggcgaagattagt

SEQ ID NO: 309559 - DNA, 1309 bp, Unknown
  Bacterial polypeptide expressing nucleotide sequence isolated from the Sargasso Sea
aatgtctgacaaattcaacaaaatctacgaacaatcaattaataatccagaaaaattttggagtgaagcagcaaatgatatcttttggtttaaaaaaccaactaaaattttaaacaaatcaaacccacctttctataaatggtacgaagatggtgtaacaaacacttgttataatgcattagacattcacatcgatcagggtaaagggaaaagaactgcactaatatacgatagtccgatcactggtaataaaagtaagttttcatatgaggaattaagatcaaaagtttcaatatttgcaggggcacttaaagaccaaggcgttaataaaggagatagagttatcatttatatgcctatgataccagaggcagtagttgctatgcttgcttgtgcaagaataggagcaatacactctgtagtctttggtggatttgcatctaacgagctcgcaagtagaattgatgatagtaaagcaaaagtattagtcactgcttcatgtggttttgagcctggaaggactgtagaatataaaccactagtagatgaagcaattaaacttgctaatcacaaaattgataaaatgattttatttcaaagatcaggtaatgaggtaaaattaaatgctcctaaagaggtaagttgggaagaagtagtttcaaaagcaaatgaagttgattgtgttgaaatgaattcaaatgaatttgcctatattctatatacatctggaaccacgggtactcctaaaggaatagtaagagatattggtggtcatatagttgcattaaaatggactatgaaaaatatttataacatagatgcgggagatatttggtggtcagcaagtgatattggttggattgttggacattcgtatattgtttatgctcccttatttaaaggatgtgcgactgttttatttgaaggaaaaccagttggtactccagatgctggagcgttttggaaaatcatttctgactataaagtaaaatctttatttactgctcctactgcatttagagcaattaaaaaagaagacccggaaggaaaatttttttctaaatacgatttatcaaaatttgaaagtctatttcttgctggagaaagagcagatccagatacaatcaaatgggctgaaaatttattaaatgttcctgtcattgatcactggtggcaaactgaaactagctgggcaatcagttctaattgcacaggaattgaaatgatggaaacgaaatatggttcagcttgtaaagctgttcctgggtatgatgtaaaaattataaagtcagatcaaacttttggctaa

SEQ ID NO: 309560 - DNA, 877 bp, Unknown
  Bacterial polypeptide expressing nucleotide sequence isolated from the Sargasso Sea
actgcaattagagctttcatgaagtggggagttgaacatccccaagcacatgacttaacttcacttagattgttaggtactgttggggagccaattaatccagaagcctggatgtggtaccacgaaaacataggtaatgaatcatgtgcaattgtagatacatggtggcagacggagactggttcaataatgattacacctctgccaggcattacaagtacaaaaccagggtcagcatgtggtccaatgccaggcatagatgcagttgttgttgatgaaaatggaaatgaggtctcaaaaggtgaagggggatatttagcaatcaaaacaccttggccatcaatgcttagaacagtgtttggagatgagaagagatatattgacacctattggtcaaaatatgatggtatgtattttgcaggagatggagcaaaatatgataatgatggatatttttggcttctcggaagagttgatgatgttatgaatatatccggtcatagaatttcaaccgctgaagtagaaagcgcacttgttgcacatgaatctgttgctgaggcagccgtgataggtagagctgatgagatatctggtgaagctattgctgcattcgtaacattaattggtggttttgaggggaatgaagatcttatatccaccctaagacaacatgtgagcgataaaattggtccgattgctaaacctaaaagtattgttattacaaacgatcttccaaaaacaagaagtggaaaaattatgagaagattgttgaaagatatttctgaagaaagaaaattaggagatgtaaccacattggcaaatgctgatatagtttctgagttacaaacaagatcatctgagtcaagcgatgaatgag

SEQ ID NO: 309561 - DNA, 1110 bp, Unknown
  Bacterial polypeptide expressing nucleotide sequence isolated from the Sargasso Sea
gttatcttgtttatgcgtctatgactcatgaatatatttttaattataaaaaagatgatatctattggtgtacagcagatattggttggatcactgggcatagttatataatttatggcccactttcaaatggcgcaactacattaatgtttgagggcgtgcctaattatccaactttctcaagattttgggaggtgatagataaacataaagtaaatattttttacacggccccaacggcaattagagcaattatgagagaaggggatgattatgtaaaaaaaacatcgagatcttctctaaaattacttggaacggtgggtgagccaataaatccggaagcttggaaatggtattatgaaattccaggaaattctaaatgccctattgttgatacgtggtggcaaactgaaactggaggaatattaatttctcctcaaagtggggctattgatttgaaaccaggctcagcatctaaacctttttatggaattgaaccatgtatagtaaataaagatggtgaagagcaaagtggtgaagcagagggaatgttgtgtcttcaaaattcttggccaggtcaaatgcggagtgtgtacggtgatcatgaaagatttatatcaacttatttttcacaatttgatggaaagtattttactggagatggttgtagaagagataaagatggatattattggattactggaagagttgatgatgtaataatagtttcaggccacaacctaggtactgcagagattgaaagtgcttttgtttctcacccaaaagtatctgaggctgctgttgttggttatcctcatgatataaaaggaaatggattatattgttatgtttctcttatagttggcgctgaaagcaatgaaggtttaaagctagagctaatacaaactattaggtcaaaaatcggtcctattgctacacctgattttatacattttactgatggactgcctaaaacccgttcaggaaaaataatgagaagaatattaagaaaaattgcagcaaatgaagaggatcaactaggagatattacaactctggcagacccaagtgtagttaaaaagttaatagaaaataaactaaataattagc

SEQ ID NO: 309562 - DNA, 1909 bp, Unknown
  Bacterial polypeptide expressing nucleotide sequence isolated from the Sargasso Sea
atgacagatgttggacaacaattacatcagacatctattgcgaataaacaggcattttggcaacaagccgccaaggccttagactgggtgacgccgagcaaacaaatattagatgaaagcgaggcaccgttttatcactggttcagcgatggcgagttaaacacttgctacaacgcggtggacaggcatgtgttggcggggcgtggtgagcaaattgccattcattacgtgagcccggtgacggaaaccgaatacagcattacttaccgtgagttgcaggcccaagtggcaaggcttgcgggctatttgcaaagtgttggtgtgactaagggagaccgtgtggtcatttacatgcccatggtgcccgagaccgcctatgccatgcttgcctgcgcgcgcattggtgccatccattcagtggttttcggcggctttgcggccaatgagctggcgactcggatcaatgatgccaaaccaaagttggtcatgtctgcctcctgcgggattgagccttcaggcgtggtgccctataaacccttactggacaaagcattaaatgaagcggtgcacaaggttgagcactgcttgattttaaatcgcccccaatatgaggcgcagatgcaagcggggcgtgataaggactggcaaactgccttatgtacgagcgatagtgccgattgtgtgacggtaaaagccaccgatcccctgtatgtgctctatacctcaggaaccacgggtcaacccaagggcgtggtgcgtgacaatggcggtcatgcggtggcattggcttggtccatggccaatatttatgatattgcccaaggggatgtgttttgggcagcatcggatgtgggctgggttgtaggacactcctatatcgtctatggtccgctgcttgtcggggcgacgaccttgttatacgaaggaaaacccgtaggcacgccggatcccggcgccttttggcgcacgattgcgaagtatcgagtcaaaagcttttttaccgcgcctacggcgatccgcgccattaagcgcgaagatcccgacggcgaatttatccaaggtgtcgatttaagctgcttgaagaatgtctttttggctggggagcgctgcgatcccgatactttacattgggccgaagccaaactgaaaaaaccagttatcgatcattggtggcaaactgaaaccggctggcctgtggcggcaaacctgatgggggtggcaccgattgccgttaaagcaggatcgcccggccgacccgtcccaggatatgaggtcgatgtggtcgatgagatgggcgccaaagtggcggcgaatgtctctggtaatgtggtcatcaaattgccgctgccaccgggcacactcaccacgctctggcaaaataataaacgctatcaagatagttacttatctatgtacccaggttattacctcactggggatgcgggttatatggatgaggatggctatctgtatatcatgagccgtatcgatgacattattaacgtagccggccatagactctccaccgggcggtttgaagaggtgttgtgccagcatcccgatgtggccgaagcggccgtgattggtgtcgacgataaactcaaaggccaagtgcccttgggcttagtggtactaaaaaagggcgtgaccattacggatgaggagctgcataaacagttaattgccctcgttcgccaagaaattggtcccgtcgcgtcctttaggttagtgagtgcgattcaaaagctgccgaaaacccgctcgggcaaaatcctgcgcggcactatgcgtaaaattgccgataatcagcaatatacggcgccagcgaccattgaagatccgcagaccctcgatttagtccgcacgaccttaacccgcatgggctatgccgatgctctagtgggctaag

SEQ ID NO: 309563 - DNA, 946 bp, Unknown
  Bacterial polypeptide expressing nucleotide sequence isolated from the Sargasso Sea
aatggtacaaaagggacaaatagaccacttactccaagaatccgacgttatttcaccaccagacactctaaaatccaatgccaacttacctaactacgaagaggaatatcaacaatccattgaaaatccagaagctttttgggagtctgtagcaaaagagctacattggttttcaccctgggacaaaatctatgagaattccttcccaaatttcaaatggtttataaacggaaaatgtaatatcacatacaacgctttagaccgacatttagacgaaaacagaaataaagtcgccttgatatggcttgccgaagacggaagtgaacgaactttcacttatggcagactacataatctagtttgcaaatttgcaaacggtttaaagtccctgggtatcactaaaggagatcgagtcgtaatctacatgcctcttacgcctgaaggagtaatagctatgttagcttgtgctcgcataggggcagtccacagtgtagtcttcgcaggctttagtgtttccgcattggcagacagaattgatgacgtgcaagctaaagctttaatcactggagatataggaatccgaagaggaaatcatgtagatctaaaatctattgctgatgccgctcaacaacgttctacaactctcgaacatacaattgtatggcgccgcctaggggaacaaactcctcttttacaaaaccaaatagatttcgaccaacttgtaagccaaagcagctctcactgccctgccgaagtaatggattcagaagatcctctttacatcctttatactagtggcactacaggaaagcctaaaggagtcctccatgttcatggcggctatatggtcggcacgtattatcactttaaaaccttttgggatataaagaaaaacgacacattttggtgcacctccgatattggatgggtcgtaggccatagctac

SEQ ID NO: 309564 - DNA, 1942 bp, Unknown
  Bacterial polypeptide expressing nucleotide sequence isolated from the Sargasso Sea
catgtcagaaagcataaaaatacctgtatttgaaaacttcaaaaacaaagctcacattactaaagataaatatgatgaaatttataaattttcctctgataatcctgagagtttctggaaaaaagaaggacaaagaattaattggataaatccatatacaaaaattaaggatgtgacatggtctaacaataatgtcgatattaagtggttttacgatggaacacttaatgcaagttataactgtatagatcgacatctgttagataagcctgataaagttgctattatttgggagggtgatgatccaaatgattcactaaaaattacctacaaagaacttcataaaaaagtatctaaatttgcaaatatgttgaagcattatggtgttcaaaaaggtgatagagtaacaatttatatgcctatgatacctgaagcagcatatgcaatgttagcttgctcaagaattggtgcaattcattcagttgtgttcggtggcttctctccagatgctcttgcaggaagaattcttgattgtgattcaaaatacttaataactgctgatgaagggataaggggaggtaaacttgtacctttaaaggctaattccgataaagctcttgaacaatgcaaagatgtaaaaaatgtttttgttgtcaaacgaacaggtggaaacatcgaaatgaaagatggaagagatatttggtatcatgaagcaattgaacaagtggatgatgaatgcccgcctgaggaaatgaatgctgaagatccgctttttattctttataccagcggatcaactggtaaaccaaaaggtgttctacatacaactggtggttatatggtatatgcatcatatacacatgaaataatatttgattatcatgataatgatatatattggtgcactgctgatgtcggttgggtaactggccattcatacatagtttacggtcctctagctaatggcgcgactaccctgatgtttgaaggagtacctaattatccctccaattcaaggttttgggaagtatgcgataaacacagcgttaatattttttatactgctccaacagccattagggccctgatgaaagaaggaaactctccagttgagtcaactagtagaaaaagcataaggctgctaggaactgttggtgaaccaattaatcctgaagcttggatgtggtatttcaatatagtaggagaaaaaagatgtccgatagttgatacttggtggcaaacagaaactggagcaacattaatttcgccattaccgggggcaacagatttaaaaccaggttcagcctcaaaacctttgccaggaataaaacctgtacttttagactctgaaggaagcatcttagaaggtgaaaatgaaggaaatttatgtatagcagatagttggcctggacaaatgcggactgtttatggagatcataaaagatttattgaaacctattttagtcaatatgatggatactacttcactggcgatgggtgtaaaagagatgaagatggttattattggataaccggaagagtggatgatgttataaatgtttctggtcatagaatgggaacagctgaagtagagagtgctcttgtttcgcacacgaaagtatctgaagctgctgtggtaggttttcctcatgaaattaaaggtcaaggaatttatgcttatgtaactcttaatgctggagaaaatggtaatgaagaaataagaaaagaattagtaaactgggtaagaaaagaaattggtccaatagctagtcctgatttaatacaatttgctccaaatttaccaaaaacaaggtcaggtaaaataatgcgtcgtatcttaagaaaaattgcagagaatgattattctgaattgggtgatacatctacactagccgaacctacggttgttaatgagttaatagaaaatagacaaaataaataa

SEQ ID NO: 309565 - DNA, 856 bp, Unknown
  Bacterial polypeptide expressing nucleotide sequence isolated from the Sargasso Sea
aatgcgtgagggtgataagccagttaaaaaaacctctagaaagtctcttaaattgcttggcactgttggtgaaccgattaatccagaggcttggatgtggtattacaaaacagttggaaactcaaagtctcccatcgtagatacttggtggcaaacggaaacaggaggaatactaatagcccctcaaactggagctattccattaaaacctggttcagctacaaaaccgttctatggaattaagcctgttatcgttgataaaaacggcaaagagataaaaggcgcaggcgaaggaaggctttgtattgctcaatcatggccaggtcaaatgagaactgtttatggagaccatcaaagatttatcgacacttatttttctcagtttaatggtaaatattttactggtgatggctgtagaagagataaagatggatattactggatcactggacgagttgatgatgtaattattgtatctggacataatctaggtaccgctgagattgaaagtgcatttgttgctcatccaaaagttgctgaagcagctgtagttggttatccacacgatattaaaggaaatggtttgtattgttatgtcactttaaatgcaggagaaactgaaaatggagatcttgaaagagatttaaaactttgggtcagaaaacaaattgggcctctagcaaccccagacttaatacactttactccaggtcttccaaaaactagatcaggtaaaataatgagaagaattttgagaaagattgctgcaaatgaacatggacaattaggtgacaccactactttagctgatccaagtgttgtcgatagcttggtcgataatagaaaaaatatttaa

SEQ ID NO: 309566 - DNA, 1050 bp, Unknown
  Bacterial polypeptide expressing nucleotide sequence isolated from the Sargasso Sea
aatgaaaaatatagaatcaaatttcaaagaatctaggatatatactcccaataaaaattttgcaaaatctgcaactgtcacagataaaatattagttaatttatatgatgaatataaaaaaaatccagatgtattttggtcgaacttagctaagcaagaaattaaatggataaaagaattcacaaatgtgtgcgaaggtaatgcgccagactttaaatggtttaaagaaggcaaactgaatatttcagagaattgtttagatcgtcatattactaatgagaatgacgctattattcatatttctgaagaaaataaaaagcaggtcatttcttataaggagttatatcaaaaagtaaataacttttcatttgctttaaagtccttggatattaaaaaaggatccagagtgataatttatatgcctaccatacctgaatctataatagcaatgttatcgtgtgcaagactaggtttaattcattcagtagtttttgcagggttctcctcggaatctttaaaaaacagaattaatgattgcgaagctgaactaataattacagtagatagctttagaagaaatggtaaaataataatgtcaaaagaaacagttgataatgctataagacaagactgtccctctataaaaaatattattgtatttaagaattctgatgaagatgtatcttttaatccgaatatagatttatggtggcatgatatcctgcctaagtcagatcaaacgatttcaccagaggttatgtcttcagaggatatactctttatactttatacatctggttccacaggaaaacctaaaggcattatacatactagcgctggctatctattaaactgtatattaactaataaatgggtctttgatctaaaaaaagatgacattttttggtgtactgcagatattgggtggatcacaggacatagttatgttgtatatggaccattagctactggctcaactatactaatttatgatggcgcaccaacatttccaaaggaagataggttttgggagataattagtcaaaataa

SEQ ID NO: 309567 - DNA, 1554 bp, Unknown
  Bacterial polypeptide expressing nucleotide sequence isolated from the Sargasso Sea
aatgcaaagaataaaaaccttatctgaatatttcaaaaaatacgaattaagcgaaaaagatcctgaaaaattttggtctgaaattgctgattcattcatttggaaaaaaaagtgggacaatgtccttgagtctgattttgaaaatgcagattttaaatggtttaaaaatgctcaattaaatataactgaaaatatttttgagagaaacctttctgaaagaggtgacaagactgctatcatttgggagccaaatgatcctaaagagtcaccaatatatctatcatacaaagaactttacaagcaaacatgtactttttctaatgctcttagaagtaaaggaattaagaaaggagacagagttattatctacatgccaatggttccagaggcagctattgctatgcttgcttgtgcaagagtgggcgcagtgcactcagttgtctttgctggcttttctgctgcatctttagcagatagaataaatgattgtgaggcaaagatggtattaacatctgatggaaactttagaggaaataagacaattcctgttaaagatgtagttgatgaagctcttgaaaaatgttcttcaattgaaagtgttattgtcttagaaaggacaaaacaaaatattaatatggaggacggaagagacttttggtggcatgaatgtattgaggatgaatctaatatatgcgattctgaagttatggattcagaggacttattatttattttatatacatcaggctcaacaggtaagccaaaaggtgttgttcattcttcagctggatacatggtatactcttcttatacattcttaaatgtattccaatatgatgaagaagatatttattggtgtactgctgatgtaggatggattacaggacattcttatatagtatatggacctttactttgtggtgccactacagtaatgtttgaaggcgttccaacatatcctaatgttagtcgtttttgggatatagttgataaatataagattaatcaattctatacagcaccaactgcaattcgagctcttcaagctcatggtctagaaccaattaaaaataactcactcgattcattgaaagttattggatctgtcggagaaccaataaatgaagaagcatggcattggtaccatgataatgttggtaaaggaaagtgtcctttagttgatacatggtggcaaactgaaacaggtggtataatgatctcagcacttgcaggaattactcctaataagccagctcatgcttctttaccattaccaggtataataccagtaatcgttgacgcggagggtaatgaattaagtggaaataatgttcaaggtaatttatgtattaaatctccatggccatctatcataaggtctacatacggagatcacgaaagatgcattagtacatatttctcacactataaaggtatgtactttacaggtgatggagtaaaaagagaccatgatggatacttaaggatacttggaagagttgatgacgttattaatgtatctggtcatagaatgggaacagccggaagtgaaaa

SEQ ID NO: 309568 - DNA, 445 bp, Unknown
  Bacterial polypeptide expressing nucleotide sequence isolated from the Sargasso Sea
tgtcggagggataaagatgggtattattggattactggtagggtagacgatgttcttaatgtttctggccatcggatgggaacagcagaagttgaaagtgcgttagtggcacattcttcagtttcagaaagtgctgtggttgggtttccacataaaattaaaggtcaaggtatttatgcctttgtaacattgatgagtggtaaggagccctcagatgaattgaaagatgaattaaaaaattgggtcagtaaggaaatcggagcaatagcaaagcctgaggtcattcaatgggcgccaggactgccgaagacacgttctggtaagataatgaggagaattttaaggaagatagcagaaaatcaatttgatgaactcggtgacacttcgactttagctgatccttctgtagtagagagtttgatacagaatagattgagttcttgat

SEQ ID NO: 309569 - DNA, 559 bp, Unknown
  Bacterial polypeptide expressing nucleotide sequence isolated from the Sargasso Sea
catgactaaagaaagaatatacgaaccttcagaaaaaattattaacgatgccgttatttctaatgatgagttcgaagaactttataaagaatcaatcaacaacccagatcaattttgggatcagcaagcacgcacttaccttttatgggacaaagaatgggatgtaataaaagaaagtgatctaacgaaaggcgacataagctggtttaaaggggctaaattaaacgcttccgtaaattgcattgacaggcacctagagaataatggtgagaagactgcaattatctgggaaggagacgaccctcaagactctttaaagattacctacaaacaattgcatgagtctgtctgtagatttgccaacgccttgaagaaaagaggaataagcaaaggagatagggtttgtatttacatgcccatgattcccgaggcggcttatgctatgttggcttgtgcaagaattggtgcaattcattcagtagtatttggaggattttctccagaatccctcaaggacagaattttagactcagattgtgagagtgtcattactgcagat

SEQ ID NO: 309570 - DNA, 1648 bp, Unknown
  Bacterial polypeptide expressing nucleotide sequence isolated from the Sargasso Sea
tggataaataaagctttagttaaaaaatccgaatatgaaaataaatataaaaaatctttaaaaaacaacgaagagttttggaaaaaagaaggaaaaagaattacttggattaaaccttataaaaaaattaaaaatgtaaaatatagtaaagatgaagttcgcataaaatggtatgaagatggaacactaaatgcatcagcaaattgtattgacaggcatcttaaagataaaaaagataaaacagcaattatttgggttggtgataatccaaaggatacaaaaaaaattacttataaacaactgcacaaagaagttagcaaaactgccaatggtttgaaacaattaggaattaaaaaaggagatcgtgttacaatttatttaacaatggtacctgagttagcaattaccatgctggcttgtgctagaattggtgcggttcattcaattatttttggtggcttttctgctgattccattgcgggaagaattgatgattgcaaatcagattatgtaataactgctgacgaaggtattagaggaggaaaaacgattccattaaaatatactgttgatgaagcactttcaaaatgtagaaacattaaaaaatgtattgtagttaaaaaaactggtaactacataaattgggataataatagagatgtttggtatcacgaaataattaaaaatgtatctactcaatgtgatcccgaagaaatgaacgccgaagatcctttgtttatattatatacatcaggttcaactggaaaacctaaaggagttcttcatacaactggcggatatatggtttatgcatcaatgacacatcaatatatttttaactataaacctaaagatatttatttttgttcagccgacataggttggataacaggtcatagctatatagtttatggtccgctagctaatggagccacaacaattatgtttgaaggaataccaacttatcccgatacttcaagatggtggcaaatagtagataaatacaaagtaaatattttttatacagccccaacagctattagagctttaatgagagagggagaagctcctgttaaaaaaacgtctagaaaatctttaaaattacttggtacagttggcgagcctattaaccctgaagcttggcaatggtattacaaagttgtaggtgattctagatgtccaattgtagacacatggtggcaaacagaaacgggtggaattttaattagtccacaaactggagctatagatttaaaacctggatctgctacaaaaccattttatggcattaagcctgtaattgtcgacaatgatggaaaagttttaaaaggagaggctaaaggaaggttgtgtatagctcaatcttggcctggacaaatgagaacggtctatggcgatcataatagatttattgaaacttacttttctcaatttgatggaaaatattttacaggagatggatgtagaagggacaaagatgggtactattggataactggaagagttgatgatgttattattgtttcaggacataacctgggtacagcagaaatagaaagtgcgtttgttgcacattcaaaagtagctgaagctgcagtagttggttatccacatgacatcaaaggtaatggtttatattgttacgtaa

SEQ ID NO: 309571 - DNA, 1336 bp, Unknown
  Bacterial polypeptide expressing nucleotide sequence isolated from the Sargasso Sea
gatgaagctttaatgagttgtccaaatgttaagaaatgcattgttgtaaaacgaacaggaaattacataaactgggatcaaaatagagatgtttggtttcatgatttaattaaagacgttccaaatcattgtgaacctgaagaaatgaacgctgaagatcctttgtttattttatatacttcgggttcaacaggtaaacctaaaggagttcttcatactactggcggttatatggtttatgcatcaatgacacatcaatatatttttaattacaaaccaaaagatatttattggtgtactgctgatattggttgggttactggacatagttatattatttatgggccactttcgaatggtgcaactactataatgtttgaaggaattccaaattatcctgatagttcaaggtggtggcaaatagttgataaatataaagtgaatacattttatacagcaccaactgcaattagagctttgatgcgtgaaggtgataaacctgttaaaaaaacatctagaaaatcacttaagcttttaggaactgtaggagaaccaataaatccagaggcttggatgtggtactataaaactgtgggtaattccaaatgccctattgtagatacttggtggcaaacagaaacaggaggtataatgattgctcctcaaacaggggccattcctctaaaacctggttctgcaacaaaacctttctatggaattaagcctatccttgttgataaaaatggtaaagagataaaaggtgctggtgaaggaagactatgcatagctcaatcttggcctggccaaatgagaacagtatatggagatcatcaaagatttattgatacttacttttctcagtttaatggaaaatatttcactggtgatggatgtcgaagagataaagatggttattactggatcactggtcgtgtagatgatgtaattattgtttcaggtcataacctgggaactgctgaaattgaaagtgcatttgttgcacatccaaaagtagctgaggccgctgtagttggttaccctcatgatattaaaggaaatggattatattgttatgtaactttaaatgctggagaaaccgaaactggcgaacttgagagagatcttaaactttgggttagaaaacaaattggacctcttgcaaccccagatctaattcattttacacctggtcttcctaaaacaagatcaggaaaaataatgagaagaattttaagaaaaattgctgctaatgagcatggtcaattaggagacacaactactctagcagatccgagtgtagttgatagtttagttgacaatagaaaaaatatttaaa

SEQ ID NO: 309572 - DNA, 670 bp, Unknown
  Bacterial polypeptide expressing nucleotide sequence isolated from the Sargasso Sea
atgacaaatagttttaacaaaatttatcaagagtctattcaaaatccagaggaattttggagaaatgtgtcagatgatatcttttggtttaaaaaacctaataagattttaaataaatctaatcctccattttacaaatggtttgaagatggggttacaaacacctgttacaacgctattgatgttcatatagacaatggtaacggtgataagactgctttaatctatgacagtcccataactaacagtaaagcaaaatttacatataatgaattaagggaaaaaatctcaaaatttgctggagcactggataatcaaggtgtcaaaaagggtgacagagtaattatttatatgccaatgatacctgaagcagttgtagcgatgctagcatgtgggagaattggtgcaatacactcggttgtctttggtgggtttgcctcaaatgaactagcaagtagaattgatgatagtaaagcaaagattttaattactgcatcctgtggatttgaacctggacgaactgttgaatatagacctttagttgacggagcattgaaacttgcaaaacataaagttgagagagtaattttctttcaaaggaaagaccatgaaataaagcttaactctccgactgaaattaactgggaggaggcacttgttaatgccaaaa

SEQ ID NO: 309573 - DNA, 1984 bp, Unknown
  Bacterial polypeptide expressing nucleotide sequence isolated from the Sargasso Sea
atgtctgcgattgaatcggttcttcaggaacgccgtgttttcccgccctccgctgaagcagcggcgggtgcgacgatctccggcatggatgcgtaccgggcgctggccgccgaagcggaacgcgattacgaaggcttctgggggcgcctcgctcgcgagacgctgagctggagcaagcccttcagcaaggtgctcgacgaatcgaaggcgcctttctatacctggttcgaagacggccagctgaacgcgtcgtataacagcatcgaccgtcatgtcgaagccggtaatggcgagcgcattgcgatcgtcttcgaagccgacgacggcactgtcaccaacgtcacctataacgatctgctgcaacgcgtgtcgcgttttgcgaacgcgctgaagaagcgcggcgtgaagaagggcgatcgcgtcgtgatctatatgccgatgtcgatcgaaggcattgtcgcgatgcaggcctgcgcacggatcggcgcgacgcattcggtggtgttcggcggcttctcgtcgaagtcgctcaatgagcggctggtggatgtgggcgccgtcgcgctcgtcacgtccgacgaacaaatgcgcggcggcaaagccttgccgctgaagaatatcgccgacgaagccatcgccatgggcggctgcgatgcggtgaagagcgtgatcgtctacaagcgtaccggtggcaagatcgcgtgggacgacagccgcgatctgtggatgcacgagctcacgcaggccgaatcggatcaatgcgcgcctgaatgggtcggcgccgagcatccgcttttcattctgtacacgtcgggctcgaccggcaagccgaagggtgtgcagcacagcaccggcggctatctgctgtgggccgcgcagaccatgaagtggaccttcgactggaagccgacggacgtgttctggtgtaccgccgacatcggctggattactggccacagctacatcacgtatggaccgttgacgctcggcggcacccaggtcgtgttcgaaggcgtgccgacctatccgaacgccggccgcttctgggacatgatcgcgaagcacaaggtcacgctgttctataccgcgcccacggcgatccgctcgctgatcaaggctgccgaagcggacgagaaagttcatccgaagagcttcgatctgtcgacgctgcgcattatcggcacggtcggcgagccgatcaatccggaagcatgggtgtggtatcacgagaacgtcggcggcggtcgttgcccgatcgtcgatacgtggtggcaaaccgaaaccggcggtcacatgatcacgccgctgccgggggccacgcccctggtgccgggttcgtgcacgctgccgctgccgggcatcatggcggcggtagtcgatgaaaccgggcaggacgtgccgaacgggcagggcggcattctggtggtgaagcgtccgtggccgtcgatgctgcgcaatgtgtggggcgatccggatcgctaccagaagagctatttccccgaagagctcggcggcaagctctatctcgccggcgacggcgcggtgcgggacaaggagaccggctacttcacgatcatgggccgcatcgacgatgtgctcaacgtgtccggccaccgtctcggcacgatggagatcgaatcggcgctggtgtcgaacccgatcgtggcggaagcggccgtggtgggccgtcccgatgcgacgaccggcgaagccgtgtgtgccttcgtggtgctcaagcgcgcgcgtcccgaaggcgaagaagcggtgaagctcgccaacgaactgcgtgcctgggttgctaaggaaatcggtccgattgccaagccgaaggacatccgcttcggcgagaacctgccgaagacgcgttcgggcaagatcatgcgccgcctgttgcgctcgcttgcgaagggcgaggaaatcactcaggacgtctcgacgctggagaacccggcgattctcgatcagctcggcgagtcgctctgaa

SEQ ID NO: 309574 - DNA, 1063 bp, Unknown
  Bacterial polypeptide expressing nucleotide sequence isolated from the Sargasso Sea
atgtttggtcgttaagtatacagaaaacaaagttaacatgatggatgaaagagacttatacatagatgaattaatttctgatgttgatgaatattgtgagccagaagaaatgaattcagaagaccctctatttattttatatacatctggatcaacaggcaaaccaaaaggtgttctccatacaactggtgggtacttagtttatgcctcaatgactcatgaatatatttttaattataaaaaagatgatatctattggtgcacagctgacattggatggattactggccatagctatataatttatggaccgctatcaaacggtgctactacattgatgtttgaaggggtgcctaactatccaaatttttcaaggttttgggaagttatagataagcataatgtgaatattttttatactgctccaacagcaataagagctttaatgagggaaggtgatgattatgtaaaaaaaacatctaggtcttctttaaaattacttggcacagtaggagagccaataaatccagaagcttggaagtggtattatgaggttccaggaaattcaaactgtccaattgttgatacttggtggcaaactgaaactggaggaatcttaatatcaccgcaaagtggtgctatgaacctaaagcctggctcagcatcaaaacctttttatggaattgagccatgtattgtaaataaggatggagaagaacaacatggagagtcagaggggatgctatgtcttaaggactcttggccaggtcaaatgagaacagtctatggtgatcacaaaagatttatttcaacatatttttcacaatttgatggaaagtattttactggagatgggtgcaaaagagacaaagatgggtattattggattaccgggagagttgatgatgtgattattgtttctggccacaaccttggaacagcagagattgaaagtgcttttgtttcacatcctaaagtttctgaagctgctgttgttggttaccctcatgatattaaaggaaatggattgtattgttatgtttcccttatagctggaacagaa

SEQ ID NO: 309575 - DNA, 845 bp, Unknown
  Bacterial polypeptide expressing nucleotide sequence isolated from the Sargasso Sea
tgctaaaggagataagtacctagaaaactcagacagatcctctcttaaagttcttggcacagttggcgagccaataaatcctgaggtttgggagtggtattttgaaaaagttggaaaatcaaactgtgaggtcgtcgacacttggtggcaaacagaaaccggttctgtattaattagtccaatagctggcatcactgctaaaaaaccaggatcagcaactttaccattttttggagttaagccttcactcgtagacaacgatggcattgaaattataggagagggtaaaggaaatttatgcattgatcaaagttggccaagccagattagaacagtatatggagatcatgaaagaatggttcaaacttatttttctcaatacaaaggaaaatattttacaggagatggagcaaaacgagatactgatgcatattactgggttacaggaagagtagatgatgtactgaatgtttcaggccacagaattggaacagcagaagttgaaagtgcaattgtaacgcatcctgatgtagctgaagcggcagtagttggaatagagcatgatataaaggggcaagctatctacgcatttgtaatattaaaagatactgaaaaaaataatggcttggtagaaaatgagattattgatactgtctcacaatctattggaaaaattgctaaaccagaagtcattcatataacaagagacctgcctaaaactcgctctggaaaaattatgagaaggatccttagaaaaatagcaaacaaagatacagcaaatttaggtgacgtgacaactttagctgatccgagtattgttgaagaattaattaattcgagataat

SEQ ID NO: 309576 - DNA, 1924 bp, Unknown
  Bacterial polypeptide expressing nucleotide sequence isolated from the Sargasso Sea
atgtcaacgaattcaattcaagcaattgcgtctaatccttatatcaaagatcttgatgaatatagaaagttatatgatgaatcaataaataatccaaaagatttttttaaaaaaatggctactgaaaatctttcatggataaaagattttgatgaagttcataatagcaagtttgcaaatacagaatggtttaaaaatggaaagataaacgttagcgaaaattgtctagataggcatctagaggacagatctgaaaaaactgctttgatttgggaaggagatgagcctggagactctaaatcatattcttttaaagagttacatgaagaagtttgtaagttttcaaatgtattaaagaatcttgaaattactaaaggttcaagggtttgtatttatatgcctatgattcctgaggctgcatttgcaatgttagcttgcacaaggatcggagctattcattcagtcgtttttggtggtttttcaccagaatctctaaaagatagaattttagatgctgactgcgagatagtaatcacagctgacgaaggtgttcgaggaggaaaaaaagttcctttaaaagcgaatgtcgatgaggctttagaaaaatgtccaaatgtaaagaatacaattgttatcaaaagaacaggtgatcaagtaaattgggttgccgatagagacttatggtatgaagatctttcaaaagatgttgatttgacatgcgaacctgaaccgatgaattcagaagaccctctatttattctctatacgtctgggtctacaggaaaacctaaaggcgttcttcacacaacagcaggttatcttcttggcgcacatatgagtttcaaatatttgtttggtataaatgaatctgatgtttattggtgtacagccgatgttggttggattactggacacacttatatcttgtacggtcctttatcaaacggaacaacaacaataatgtttgaaggcgtcccaacttatccaagctcatcgagatgttgggaggtatgtgataaatataatgtaaatgttttttacacagctccaacagccataagagccttaatgtctcaaggtgatgaacccgttcttaaaactaaaagagactctcttagagttcttggaacagtgggagaaccaattaatcccgaagcttgggattggtactataaagttgtagggaatggctcgtgtgatgttattgatacttggtggcaaacagaaacaggttcagttttaatatcgccaatatcaggtgttactccggtaaaacctggatcagcaacattgccattttttggagtaaagccagcaatttatgatgaagaaggccaagcattagaaggtgcagcctcaggtaatttagttattgaatcctcctggcctagtcaaattagaagcgtctatggtgatcatgaaagaatgatatcaacttactttaaaacatatgaagatatttattttactggtgacggagcaagacgagatgaagatgggtatttttggataacaggtagagttgatgatgttctaaatgtttctggccacagacttggaacagcagagattgaaagtgctttagtacttcatgattctgttgcagaggcagcggtggtaggatttcaacatccaattaaaggacaaggtatttatgcatttgttaccttaatgaaaggtgaagattttaatgatgctcttgagcaggaactaacaaaatttgtttcaaaagagataggtcctattgcaaaacctgaccttattcaaaacgctcctggtcttcctaaaacaagatctggaaaaattatgagaagaatattaagaaaaattgctgaaggtgatttcgataatcttggagacacaaccactcttgcagagcctgctgttgttgcatctttgcttgaaaatagcaaaaaactatgaa

SEQ ID NO: 309577 - DNA, 1537 bp, Unknown
  Bacterial polypeptide expressing nucleotide sequence isolated from the Sargasso Sea
atgtctaagaaaaaaaaagtaaaaaaaaaaataatctctaaaaaacctaaagagacaatttataaaactaagaaagactggataagtaaagccacagttaataaatctcaatacacaaaaaaatataatgagtcgattaaagacaatgatggattttggaaaaaagaaggaaaaaggattaattggattaagccttataaaaaaattaaagacgttaaatatagtaaagatgatgttcatatcaaatggttctatgatggtactttaaatgcttcagcgaactgcattgataggcatcttgaaaagaatgctcacaaaaccgcaattatatgggtaggtgatgaccctaaagttcaaaaaaaaattacatataaagaacttcataaagaagtttcaaaagctgcaaatggattaaaaaatctgggagttcaaaagggagatagagtaacaatttatcttacaatgataccagaacttgcctacacaatgctcgcatgtgctagaataggtgcagttcactccataatatttgggggtttttcaccagatagtatttcaggcagaattaatgattgcgagtctgattatgtgataacagcagatgaaggtgtaagaggtggcaaaactatccctttaaaatctattacagatgaagctttacagagctgtcctaacattaagaaatgtattgttgtaaagagaacgggttccaaacaaattgattggtacaatgatcgtgatgtttggtatcataaaatgataagcaatgtctcagcaaaatgtgaacctgaagaaatgaatgccgaagatccattattcattctttacacatctggttcaacagggaaaccaaaaggtgtactacatacaactggtggatacatggtttatgcatcgatgactcaccaatatatttttaattataagcctaaagatatttactggtgcacagctgatatagggtgggttacaggacatagttatattatttatggtccacttgctaacggtgcaaccacaataatgtttgaaggaatacctacttatcctgatacatctagatggtggcaaatagttgacaaatataaagttaatattttctacactgctccaactgcaatcagagctttgatgagagaaggtgataaacctgtaaagaaaacatctagaaaaactttaaaacttttaggcactgttggtgaaccaattaatcctgaagcttgggaatggtattataaaactgttggagatagtagatgcccaatcgttgatacttggtggcaaacagaaactggtggaatattaataagtcctcaaactggggctatagatttgaaacctggttctgcaacaaaaccattttatggaattaaaccagagatcctagataaagatggcaagggttttaaaggagaagcacaaggtagactttgtatttcacaatcttggcccggacaaatgagaagtgtgtacggtgatcatcaaagatttatagatacttattttcacagtttgatggaaatattttacaggtgat

SEQ ID NO: 309578 - DNA, 937 bp, Unknown
  Bacterial polypeptide expressing nucleotide sequence isolated from the Sargasso Sea
tatgagaagaaagaagaaagcaaaaaaagctctaagcaaagataaagataaagataaagaattaatattaaagactaaatcagagtggatcaaaaatgctttagtcaataaaacaaaatatcaaaaaaaatattctgattcattaaaaaacaacaatgaattttggaaaaaagagggaaaaagaattacgtggataaagccttataagaagattaaaaatgttaagtatagtaaaaaagaggtaaaaattaaatggtatgaagacggtactttgaatgccagtgctaactgtattgatagacatttaaaagataaaaaagataaaacagcaattatatgggttggagacaatccaaaagatcaaaaaaaaatatcttacaaacagttacatcaagaagtgtctaaggctgcaaacggtttaaaaaaattaggtataaaaaaaggcgatagagttacaatttatttaacgatgatacctgagttagcattcactatgctggcttgcgcgcgaataggagcaattcattcaataatttttggtggcttttcggccgactctatatctggaagagttaatgattgcaagtctgaatatattattactgcggatgaaggtgtaaggggtggaaaaactattcctttaaaagatattactgatgaagcattattaaattgtcctaatgttaaaaaatgtatcgtagtaaaaaggactggtaatcaagtaaattgggttaatggaagagacgtttggtataacgaaatgacaaaaggtgtatcaaataaatgtgaacctgaggaaatgagtgcagaagatcctttgtttattttatatacatcaggatcgactggtaagcctaaaggggttttgcatacaacaggtggttatatggtttatgcgtctatgactcatcaatatatttttaattataaacccaaa

SEQ ID NO: 309579 - DNA, 667 bp, Unknown
  Bacterial polypeptide expressing nucleotide sequence isolated from the Sargasso Sea
atgtcagataaattcaacaaaatttacgatcattcaataaaaaatcctgaaaaattttggcaagaagcagctgaagacatcttttggtttaaaaaaccaacaaaaattttaaataaatctaatcctcccttctttaaatggttcgaggatggagtaaccaacacgtgttacaacgccttagacattcatatcgatcaaggtagaggaaaaaacactgcccttatatatgatagccccattacaagtaacaaaagtaaatttacctacgaggaacttagatctaaagttgcaaaatttgctggagcattaaaaaatcagggcgtaaataaaggtgatagagtaattatttacatgccaatgatccctgaggctgtgattgcaatgcttgggtgtgcaagaattggtgcaatacactctgtagtctttggtggatttgcatctactgaacttgcaagcagaattgatgatagtaaagcaaaactattagtgactgcttcatgtggttttgaacctggaagaacagttgagtataaacctttagttgatgaagcaatcaaaatagcaaatcataaaatagagaagatgattttattccaaagaccaggtcacgaggtaaaattaaatgctccccttgaaattagctgggatgaagttgtatctaatgcag

SEQ ID NO: 309580 - DNA, 1942 bp, Unknown
  Bacterial polypeptide expressing nucleotide sequence isolated from the Sargasso Sea
atgtccgataatatcaaaataccagtatttgaaaattttaaagatagcgctcatttaactaaagataaatatgaagaagcttataaatttgctttggataatcctgaagccttttgggaaaaagaagggaaaagaataaactggataaacccttatacaagggtcaaagatgtgacatggtccaacaacgatgtaaatattaaatggttttatgatggaaccttgaatgcgagttataattgtatcgatagacatttatcagataaatctgatcaaattgcgattatttgggaaggtgatgatccaaatgagtcaaaaaaaattacatataaagaattacaccaaaaagtttctaaatttgcaaatatgatgaaacacttcggtgttcaaaaaggtgatagagttacaatatacatgcctatgatacctgaagccgcatatgcaatgttagcttgttcaagaattggagcaattcactctgttgttttcggaggcttttctcctgatgcacttgctggcagaatacttgactgtgattctaaattcttaataactgctgatgaaggaataaggggtggcaaaattgtaccattaaaagttaattcggataaagctcttgagcaatgcccagatgtaaaaaatgtctttgttgttaaaagaactggtggagacattgaaatgaaagaagatagagatctttggtatcatgaggcagttgaacttgttggtgatgaatgtcctcctgaagaaatgaatgcagaagatccactttttattctttatactagcggttcaacaggtaagcccaaaggtgttcttcatacaactggtggttatatagtctatgcatcatatactcatgaaataatttttgattatcatgataaggatatttattggtgcactgctgatgttggttgggtaactggacattcttatatagtttatggacctctagctaatggagccactaccttaatgtttgaaggagtaccaaattatccatctaattcaaggttttgggaagtatgtgataaacatagtgtgaatattttttatactgctccaacagcaataagagctcttatgaaagagggagatgcaccagtcaaatcaactagtagaaaaagtatacgattacttggtactgttggagaaccaattaatccagaagcttggatgtggtattttaatacagtgggagaaaaaaaatgcccaatagttgatacttggtggcaaacagaaactggggcaacattaatctcgcccttacctggtgctacagatttaaaaccgggatcagcttcaaaacctctgccaggcgtaaggcctgtcctcctagactctgaaggaaatattttagaaggtaaaaatgaagggaatttgtgtatagccgatagttggcctggacaaatgcgaactgtttatggggatcataaaaggtttattgaaacttattttagtcaatatgatggttactatttcactggggatggatgtaaaagagacgaagacggctattattggataactggaagagtagatgatgttataaatgtttctggtcatagaatggggacagctgaagtagaaagcgccctagtttctcatgaaaaagtatctgaagccgctgttgtaggctttcctcatgaaattaaaggtcaaggaatttatgcgtatgtaacccttaatgctggagaaaacggtaacgaagaaattagaaaagagttaataaaatgggttagaaaagaaattggtccaatagctagcccagatttaattcaatttgcaccaaatttacctaaaacaagatcaggaaaaatcatgcgtcgtatcttaagaaaaatcgctgaaaatgaatattcagaattaggtgatacatcaacgctagcagaaccgatggtagtcgatgaattaatagaaaatagacaaaataaataaa

SEQ ID NO: 309581 - DNA, 1453 bp, Unknown
  Bacterial polypeptide expressing nucleotide sequence isolated from the Sargasso Sea
tttggtgggtttagctcagaggcacttaaaaatcgtattactgattgtgatggcaaaatgctcataacggccaacgcaggagttcgtggtggtaaaagtattcctctcaagcaaaatgcagatgcggctatggaaggtaccagcattgaatactgcatggttgtaaaacatacagatgatgaatgtgaaatgcaatctgggcgagattttttctggcatgaagaaattgcaaatgcctcttctgattgtcctgcagaagaaatggatgcggaagatccgctttttattctatacacatcaggttcaaccggaaaacctaaaggtgtcctccacaccactgcaggatatcttgtttatacttctctgactcatcaatatgtgtttgattatcatgatggagacatatactggtgtacagctgatatagggtgggttacaggacacagctatattctttacggccctctggctaatggagctactacacttatgtttgaaggagtcccaaattatcctgattttggtcgattctgggacatttgtgacaaacataaagttaacattttttatactgcaccaacggcaattcgtgccattgcaaaagaaggagatgaattggtcagcaagcggaatttaagttccttacgattgttgggcactgtaggggaacctataaatcctgaagcatggctttggtatcacagggttgttggacatagtaattgtccgattgtagatacatggtggcagacagaaacaggaggaattttgattaccccgctcccaggagcaacacgtactaagccaggttctgcaacacgtcctttttttgggatacaacctttattggtggacggtgacggaaatgagctcgaaggtgctgccagtgggaatctatgtattaaacatccatggcctggccaaatgcgaactgtttatggtgatcatgagaggtttgttcagacatatttcagcacatataagggcctatattttactggtgatggctgtcggcgtgatgaagatgggtattactggattaccgggcgtgttgatgatgttttaaatgtttcaggacatcgaatgggtacagccgaattagaatcagcactggtgcttcatgaaaatgtggctgaagcagcagttgttggtttccctcatgaaatcaagggacagggtatttatgcctttgtaacattaaacacaggagttgagccgactgctgaattgcaaaaagaattagtacaactcgttcgaaaagagatcggcccgattgcttcttttgatgtagttcaatgggcaccgggacttccaaagacgcgttccggaaaaataatgcgtcgtattttgcgtaaaattgctgaaaatgaaatggaaagcatcggcgatacttccacactcgctgatccgtctgtagtagatgatttaatatccaatcgtcctgcaaattaag

SEQ ID NO: 309582 - DNA, 1942 bp, Unknown
  Bacterial polypeptide expressing nucleotide sequence isolated from the Sargasso Sea
gatgacagataaagatttatataaaccagcattagacattgttaaaaactcccatgccaatgaaaaaatttatgaaaaaatgtatagtgaatctattaactctccagaagagttttggaaagaacatggtcagcggattgattggataaagccgtatacaaaagttaaggatgtatcatataaaaaagaaaatcttcatattaattggtatgaagatgggactctaaatgcaagttttaactgcttagatagacacctgaaaacaaaaggtaaaaatactgcaattatttgggagggtgataatccaaacgaatctaaacatataagttacaatgacctgtacaaagatgtttgtaaattttctaatgtcttaaaggatgctggcgccaaaaaaggagatcgtataactatttatatgcctatgattcctgaagcaacaattgcaatgttagcttgtactagaattggagcaattcattctgtagtttttggtggattttctccagatgcacttgctggaagaatagaagattgtaattcttcaattattataaccgctgacgaaggtatacgaggtggcaaagttatacctctcaagtccaatactgatgaggctatatctaaggcaaaaatgtgtaaaactacaattgttattagaagaacaggatcagaaattaattggattgaaggacaagatatttggtatcacaaagaaatggaaaaggcttctcttgattgtcctccaactgaaatgagtgctgaagaccctatgttcattttatatacctctggatctactggtaaaccaaaaggagttcttcattctactggtggttacatggtttatgcctctatgacacatcattatgtttttgattatcaggaaaacgaaatttattggtgtactgctgatgttggctgggttacaggtcactcttatatcgtctacggaccgctttctaatggtgccacaactcttatgtttgaaggtgttcctaattatccgactgtaagtcgattttgggaaattgttgataaacaccaagtaaatattttttatactgcaccaacagcaataagagcattgatggctgaaggagatgatccagttaagaaaacaaaacgaaacagcttaaggatattgggtagtgttggtgaaccgattaatccagaggcatggaattggtataataatgtagttggaaataataaatgcccgatagttgacacttggtggcaaacggaaactggcggaatattgataacacctttacctggcgcaactccaacaaagcctggctctgctactaaacctttttttggtattttgccagttcttgtcgatgctgaaaataatgagttagaaggagctactgaaggcaatttatgtataaatatgtcttggccaggacaaatgagaacagtatatggtgaccatcaacgttttattgacacatatttttcgacttttcctggaagatatttctctggagatggttgtagaagagacaaagatggatatttttggattactggaagagttgatgacgtaattaatgtgtctggccatagaatgggaacagcagaagttgaatctgcacttgttgctcattctgatgttgctgaagctgcagttgttggctacccgcacgatattaaaggtcaaggtatctacgcgtatgttacagtaaacattaatgttgaaagctcagaggaattgttattagaacttaaaaagtgggttagaaaggagataggacccattgctactcctgacttaattcaatttgcaccagggcttcctaaaacaagatctggtaaaataatgaggcgtattttgagaaaaattgcagcaaacgagcatgacgaacttggagatgtatctactttagctgacccattagttgtagaaaatttagtagaaaacagaaagaatatttaa

SEQ ID NO: 309583 - DNA, 1945 bp, Unknown
  Bacterial polypeptide expressing nucleotide sequence isolated from the Sargasso Sea
atgtctgtaattgagtctaaactctcagagaaaaaaaattacaaacctaataaagacttcactgcaaaagcgaatataaaaaaagacgatttaaataacttaatttcatcttatgtaaaaaatcctcatgattattgggagaaactagccagagattatatttcttggagcaaagattttacaaaagttgtttcgggtactgccccaaattataagtggtttgaggatggagaactaaacgtatcatttaactgtcttgatagacacgctaatcaagagaaagatgcgattatacatatctcagaagataacaaaaaaacgatattatcatatagtcagcttggtattatggtaaaaagttttgcatttgaactaagtagcataggattaaaaaaaggtgatagggttattatttatatgcctacaatcccacaatcaattgcagtaatgttagcatgctcaagattaggtttgattcattctgtagtatttgcaggattttcagctgagtctctcaaagataggattaatgactgccaagcatcggcagttataactgttgacagttttttgagaaacggaaaaataattactacaaaaaatacggtgaatactgctctcgagtttggttgcccatctattaaacatttaattatatataatcataacaatactgaatttgtaaaaaaagatatagatattatttggaatgaaaatcttacaaaacgaagtgtagacttaaatcctattcagatgaattctgaagatattttatttatcctatacacgtcaggctcaacaggaaaacctaaaggaatagttcactcaaccgggggttatcttttacattgcatgttaaccaatagttgggtttttgatttaaaagatgatgatattttttggtgtacagctgatataggatggattactggtcatagttatgtagtttatgggccactgtccatgggtgcgacgatattaatatacgatggcgcacctacatatcctcacattgggagattttgggagatcatagaaaaaaatcaagtttctattttttatactgcacctacggctattagaacactgatgaaattaggtgaaaatcttcctgacgattttaatttagaatcgttaagattactgggcactgtaggagaaccaatcaatcccaaggcttgggaatggtatcattcaaaaataggttcttcaaaatgtccagtagttgatacatggtggcaaactgaaacaggagctaatatgattgcgccgatacctggcgttactaatactatccctgggacttgtaccaagccattacctggaattgatgtggggattgtagataatgatggtatagaaattgatgaaccaaataaaggcggtaatttagtaatcaaacaaccatggccatcaatgctcagaggaatatggggcgataatcagagatatcttgatacatactggaagagatactctaataaattttatgtaactggagacaccgctagatttgacgaactagggaatgtttggattatgggtagagctgatgatgttgtgaatatatcaggtcatagactcggaactatggaagttgagtcatcaattgtatctcatgagtatgtagctgaggctgctgtagtaagcttcaaacatgaaattaaaggggaggcgatacatgcgttcgttacgctaaaagataattactctcaacataatacgaaagaatttgcagatgaaattagggattgggtaaaagaaaaaataggctcaattgccaaaccagaccgtatatcattttctagcggtcttccaaaaacaaggtctgggaaaataatgagacgacttcttagaaatttagcaagggatgaaaatattactggtgatatttctacgcttgaaaacgaagatgtaattacccaactcagaaaaactttataac

SEQ ID NO: 309584 - DNA, 1501 bp, Unknown
  Bacterial polypeptide expressing nucleotide sequence isolated from the Sargasso Sea
aatgttggcatgcgcaagaataggcgcttttcattcagttgtttttggtggtttctctgctgaagcattagctgatcgtataaatgatgcagaagcaaaggtagttattaccgctgatggtgcctggagaaggggagatatcgtccctttaaaaaagaatgtagatgattcattaaaactaacagaccatattgaaagtgttgtagtcgtaaaaagaacgaataatgacgtagatatggttgagggattagattattggtatcacgatttagtagataaacaggatgcaacatgtgaaccagaggtcatgaatgcagaagatatgctttacatactctatacatcaggcactaccgcaaaaccaaagggaattgtacacacacaggccggatacctcacaggggtaacaactacacattcagcagtttttgatgtaaaagaggatgatatttactggtgtgctgctgattgtgggtgggtaactggtcatagctatattgtctatggtcctcttgctaataagacaacgagtgttatgtatgagggagcacctaacgctccagatgaaaaaagattgtggagtattgttgaaaaatataaagtaaatattttttacacagctccaactgcaataagagcatttatgaagtggggagtagaacatcctcaagcacatgatttatcatctctaagattattaggaacagttggagagccaattaatccagaagcttggatgtggtaccacgaaaatattggaagcgaatcttgtgcgattgttgatacatggtggcaaactgagacaggatcaatcatgatcactccactaccaggtatcactagtacaaaaccaggatcagcttgtgggccgatgccaggaattgatgcaattgttgtagacgaaaaaggaaacgaagtttcaaaaggagaaggtggataccttgcaataaaaacaccatggccttcaatgttgagaacagtttttggagatgaaaaaagatatatcgatacctactggtcaaaatatgatggaatgtattttgctggtgatggtgcaaaatatgatgatgacggatatttctggttacttggaagagtggatgatgtaatgaatatatcaggtcataggatatcaacagctgaggtcgaaagcgcccttgttgcacatgagtctgtggcagaagctgcagtaattggaagagcagatgaaatttctggagaggcaattgcagctttcgtaaccttgattggtggctttgaaggaaatgatgaactgatcacgactttacgacaacatgtaagtgataagataggacctatcgcaaaaccaaaaagtattgtgataacaaatgaccttccaaaaacaagaagtggaaaaataatgagaagactacttaaagatatttcagaggaaagaaaactcggagatgttacaactcttgcaaatgcagacatcgtttcagaattacaaactagatcgtcagagtcagctgatgaatga

SEQ ID NO: 309585 - DNA, 618 bp, Unknown
  Bacterial polypeptide expressing nucleotide sequence isolated from the Sargasso Sea
aatgacattagataaaaaaaattcaatcaataacgtactcgaagaaaagagaattttccctccatcaaaagaatattcagaaaactcaaatattagttctcaagaagaattaataagtctacaaaaacaagcatcaaacaatccaacaaaattttgggaatcttttgcaaaatctgaattagattggtttgagccattccaaactgtattagatagcgataaagcaccattttttaaatggtttaaagaaggaaaactcaatattacatataactgcttagatagacacattagtagaggactaggagggaaaactgcactgatatgggaaggtgaaccaggagatagcaaaaaatttacttatgaagaacttctaaaagaggtatgtagagctgctaatgcattaaaaaacattggagttaaaaaaggggatttggtatgtatttatatgccaatgattcctgaggcaatgtttgcgatgttggcttgtgcaagaattggtgcgcctcattcagttgtatttggaggattttcttcagaagctttaaaagatagattaattgatggaaatgccagatttgttattactgcagatggaggctttagaaaagataaggt

SEQ ID NO: 309586 - DNA, 1831 bp, Unknown
  Bacterial polypeptide expressing nucleotide sequence isolated from the Sargasso Sea
tttggggctaaagaaggtaaaagaattacttgggatgaaaaagtataccaaaattaaagatgttaagtacagtaaagatgaagttaaaataaagtggtattatgatggaactcttaatgcttcagcgaattgtatagatagacatttaaagaaaaatccaagcaaaacagcaatcatttgggtcggtgacgaccccgctgatacaaagaaaatttcttacaaagagttgcaccaaaacgtatgcaaggctgcaaatggtttaaaaagtttaggtattcaaaaaggagatagagttacaatttatctgactatgatccctgaattagcttacataatgttagcttgtgcgaggattggtgctgttcattctattatttttggtggtttttcacctgactcaatagctactagaattactgattgtgagtctgaatatttaataactgcagatgaaggagtaagaggtggaaaaataattccgttaaaaaaaattgctgatgaggctttagatcaatgtcccggagtaaaaaaatgtgtagttgttgaaagaactggaaatcaagttgattggaacaacgaaagagatgtttcatacaaggagcttatttcatcagttccatcaaaatgtgatccggaagaaatgaatgcagaagaccccctatttattttatatacctctggatcaactggaaaacctaaaggagttcttcacactacgggtggatacatggtttatgcttcgatgacccatcagtatatttttgactataaggctaatgatatttattggtgtacagctgatataggttgggtaacaggtcatagttatattatttacggacctctctcaaacggagcaacaactatcatgtttgaaggagttccaaactatccggatagctctagatggtggcaaatagtagataaacataaagtaaatattttttacactgcccctacagcaataagagctttgatgcgagagggagataagcctgtaaaaaaaacaagtagaaaaacgctaaaattattaggaactgttggagaacccataaatccagaggcttggatgtggtattacaaaacagttggggactctagatgtccaattgttgatacttggtggcaaacagaaactggaggaattttaattgcacctcaacctggagctacagatttaaaaccgggctcagcaactaaacctttttacggcatcaaaccagttttagttgataaagatggtaaaacagtgaaaggcgaaggcaaaggtagactttgtatggctgcttcttggccaggtcaaatgcgaacagtttatggagatcatcaaagatttatagatacttatttttctcaatttgatggaaaatacttcactggagatggatgtagaagagacaaagatggatattattggattacaggaagagtggatgatgttataattgtatcaggccataacctaggaacagctgagattgaaagcgcatttgttgcgcatcctaaagtagcagaggcagctgtcgttggatttccgcatagtattaaaggaaatgggctatattgttatgtgactttaaacgctggtgaaaatcctactggagatttagaaagagatcttaaactttgggtgagaaaacaaatcggtccaattgctacacctgacgttattcaatttgcacctgggttaccaaaaacaagatccggaaaaattatgagaagaattttaagaaaaattgctgcaaatgagcatgatcagttaggagatactactacattagcagatccaagtgttgtaaaaagcttagttgataataggaaaaatatttaa

SEQ ID NO: 309587 - DNA, 511 bp, Unknown
  Bacterial polypeptide expressing nucleotide sequence isolated from the Sargasso Sea
agatcataatagatttatcgaaacttatttttcacaatttgacggaaaatactttacaggggatggttgtagaagagataaagatggatattactggataacaggaagagttgacgatgttattattgtttcaggacacaacctcggtacagcagaaattgaaagcgcctttgttgctcatccaaaagtagctgaagctgcagtggttggataccctcatgatataaaaggtaacggtctttactgttatgtcaccctcaatgtaggtgaaaaagcagatggtgatttagaaagagaattaaagttgtgggttagaaaacaaataggtccaattgctacaccagatctaattcatttttcaccaggattaccaaaaacaagatctggaaaaattatgagaagaattttaagaaagatcgcagcaaacgaacatgatcaacttggtgatactacaaccttagctgacccaagtgttgtacaaagtttagttgatgagagaaaaaatgtttaa

SEQ ID NO: 309588 - DNA, 1078 bp, Unknown
  Bacterial polypeptide expressing nucleotide sequence isolated from the Sargasso Sea
tatatttttaattacaaacctaaagatatttattggtgtacagctgacataggctggataacgggacacagttatataatttatggtccgttggcaaatggagcaacaacaattatgtttgaaggtattccaacttatcctgatagttctagatggtggcagatagtagacaaatacaaagtaaatattttttatactgcaccgacagcaattagagcattaatgagggaaggagaaaaacctgttaaaaaaacttcaagaaaatctttaaaattacttggtacagttggcgaaccaataaatccagaagcttggttatggtattataaaacggttggagaatcaaaatgcccaatagtagatacctggtggcagactgagactgggggaattatgataagtcctcaaacaggtgccatagatttaaagccaggatcagcgacaaagcctttttatggaattaaacctgcaatagttgataaagatggaaaggttctaaaaggtgaatgtcagggaaggctatgtatagcccaatcttggcctggacaaatgaggacagtttatggagatcataatagatttatagaaacatatttttcgcaatttgacggaaaatatttcactggtgatggatgcagaagagataaagatgggtactattggataactggtagagtggatgatgtaataattgtctctggacacaacctgggaacagcagaaatagaaagtgcttttgttgctcattcaaaggtagctgaagcagcagttgttggatatccacatgatataaaaggaaatggattgtattgttatgtaactttaaatgttggagaaaacccaaacggagaccttgagagagatcttaaactttgggtaagaaaacaaattggaccaattgctacaccagattttattcagtttgcacctggactaccaaaaacaagatctggaaaaataatgagaagaattttaagaaaaattgctgctaatgagcatgaacaacttggagacactactactttagcagatccaagtgttgtaaaaagtttagtagataacagaaaaaatacttaaa

SEQ ID NO: 309589 - DNA, 1362 bp, Unknown
  Bacterial polypeptide expressing nucleotide sequence isolated from the Sargasso Sea
catgtctgaatatactgagatacatgccgattcgatttctcactccgacgagttctggcttgaagtaacaaagaagacaatcgattggaaggttccgccgacaataggattgaaaggcgattacaggactattagagattcacagatctcatggttcagtgatggaaggctcaatgcatcgacctcatgtcttgatcagcatctgattgaaagaggtagcaagacggcgatattgtgggaaggtgatgagccgggagatgtaaggaagttgtcctactcagagttgcattcggaggtatgcagattctccaacgcccttgagtcaataggagtcagcaaaggagatagggtgattatctacatggggatggttccagaagccgccattgcaatgctttcgtgtgcgagaatcggagccatacattcagtagtctttggaggcttctcggcagattcattggccaacagagtgattgattctggatccaaggtgataatcacgatggatgagggattgaggggaggaaaggcagtaccactgaagaagacgacagatacagcagtagaaatcgttcaggatttggactcttccgagaatgtcgagtcggttatcgttctgaaaaggacaggtggagaaattgactgggatacagacagggatctttggtggtcggagatttgcgaggggaagccagatgttcacgaaccgacggtggtcgatgcggagcaccctctgttcattctgtacacgagtggatcgactgggaagccgaaggggcaagtccactcccacgggggttacatcacatacacttcctttactcacaggacggtttttgatctccgggaggatgacgtctttgcgtgcgtggcagacgtagggtggattaccgggcactcctacatcgtatatggcccgttagccaacggtgcgactaccttcatgtttgagtcgacaccgttgtacccggatgcaggcagatactgggacatggtggaaaggcacggcttcactattttctacacggccccgacagcaatcagagcactagcatcgaaaccaagggagttcgtcagcaggagcgataggagcaccctcagagtcctcggaaccgtgggtgaaccgataaatccggaggcatgggagtggtactgggatgttgttggggaggggcggtgtaccatcgtggacacgtggtggcaaaccgagactggtggaatttgtataagccctatagcccctattaccccagttattggtggttccgcgacgctaccattacccggaatacaaccgaggattttcaactcagagggagagatgctagaaggtgtgagcgagggtctgctatgcattgaaaa

SEQ ID NO: 309590 - DNA, 1219 bp, Unknown
  Bacterial polypeptide expressing nucleotide sequence isolated from the Sargasso Sea
atggttgcaggtgaatcgggagactttgcaccagtcccaatggattcagagtctccactttttattctgtatacgagcggatcaactggaaagccaaaaggaattaagcacacaacggccggttatctgctgtgggcgaaaacaacggcggagtgggtttttgatctacgggacgatgatttgttctggtgcacggctgattgtggctggattacggggcacagttatgtcacgtatggcccgttagcggctggcgtcgggatccttatttatgaaggggcaccagacgctcctcaccagggccgcttctgggagattattgaagaggaaaagccaactattttttacacagccccaactgctattcgggcattcatgaaatggggccccgaacatattgacggcaaagatctctcgagccttcggttgcttggcacagttggagaaggtattaatcccgaagcatggatgtggtatcacaaaacaataggagctgaacgctgtcccattgtcgatacatggtggcaaacagagactggcggaattatgatgagtccgcttcccggttgtattcccacgaaaccaggtagttgcacattgccgttgccgggagtttatccagaaattgttgatgcttcaggtgagccagttgaaccaggcgaaggtggctggcttgttatgacaaagccttggccaggtatgcttcgtggtatctggggtgacgaggaacgtttcgttgaaacgtactgggaacgagtcccaggaaagtaccttgctggtgataacgcaagacaggatgaagatggctacttctggattatgggtcggattgacgatgttcttaacgttgctggtcatcgactttcaacaattgaaattgaaagtgcgttggtcagtcatccagctgttgcagaggcggcagcggttggtcgtccacatgacgtcaaaggtgaggctgtttcggtttttgtcacgctcaagtccggtgagccagacgaagcattgaaaaaagagctgcgacagcatgttcgtcagcaaataggcgcgattgcctcacctgatgacattcacttttccgcatcactccctaagacacgtagcggcaagatcatgcgaaggcttcttcgagatatcgctgctggtcgcgaaacagttggtgatacaacaacgctcgaagactatacggtcttagcgaatctccgtagtagtgatgagtaaa

SEQ ID NO: 309591 - DNA, 1288 bp, Unknown
  Bacterial polypeptide expressing nucleotide sequence isolated from the Sargasso Sea
aatacattcaattatttttggaggtttttctccagacagtatttctggcagaattaatgattgtaaatcggattatgtaattactgcagacgaaggagtaagaggaggaaaaattattccattaaaatctatcacggatgaagctttaattaattgtcctaatgttaaaaaatgtgttgttattaaaagaacaggtaacagaattaattgggatgaaacaagagatgtttggtacgaagatatgataaaaaatgtgtcaaaaaaatgcgaacctgaggaaatgaatgctgaggatcctttatttattctttatacatctggatcaacaggaaaacctaaaggagttttgcacactactggtggatacatggtttatgcatcaatgacacaccagtatatttttaattacaaaccaaatgatatttattggtgtacagctgatataggttggatcacaggacacagttatattatttatggacctttatctaatggagcaactactataatgtttgaaggaattccaacttaccctgatacttctagatggtggcaaatagtagacaaatataaagtaaatatcttttatacagcaccaactgcaattcgtgcacttatgagagaaggagataaacctgttaaaaaaacatcaagaaaaacacttaaattattaggaactgttggtgaaccaataaatccagaagcttggcaatggtattataaaactgttggggactcgaattgtccaattgttgatacttggtggcaaacagaaactggaggaattttaataagtccacaaactggtgcaataaatttaaaacctggttcagcaacaaaaccattttatggaattagacctgttatagtggataaaaatggaaaaaccttaaaaggagaaggtcaaggaagactatgtatagctcaatcttggcctggacaaatgagaactgtatatggggatcatcaaagatttatagatacatatttttcacaatttgaaggaaaatattttacaggggatggatgtaaaagagataaagatggatattattggattacagggagagtagatgatgtaattattgtttctggtcataacctaggtacagcagaaattgaaagtgcatttgtagctcatccaaaagttgcagaagctgcagtagtaggatttcctcacgacataaaaggtaatggattatattgctatgttactctaaatgctggtgaaaacgattcattagatttagaaagagacttaaaactttgggttagaaaacaaattgtc

SEQ ID NO: 309592 - DNA, 524 bp, Unknown
  Bacterial polypeptide expressing nucleotide sequence isolated from the Sargasso Sea
aacggtatatggagatcatcaaagatttattgatacttatttttctcaatttaacggaaaatatttcactggtgatggatgtcgaagagataaagatggttattactggataactggtcgtgtggatgatgtaattattgtttcaggacacaacctaggaactgctgaaattgaaagtgcttttgttgcacatccaaaagtagctgaagctgctgtagttggttaccctcacgatataaaaggcaatggcttatattgttatgtaacattaaatgcaggagaaaacgaaacaggcgaacttgaaagagatcttaaactttgggttagaaaacaaatcggacctcttgcaaccccagatctaattcattttactccaggtcttcctaaaacaagatcaggaaaaataatgagaagaattctaagaaagattgctgccaatgaacatggtcaattaggagatacaactactctggcagatccaagtgtagttgatagtttggttgaaaatagaaaaaatatttaaa

SEQ ID NO: 309593 - DNA, 1667 bp, Unknown
  Bacterial polypeptide expressing nucleotide sequence isolated from the Sargasso Sea
gccagctataatttgggttggtgatgatccaagtgactcaaaaaaaatatcctacaaagaattacataaaaatgtttgtaaggttgcaaatggtctaaaaagtttaggtatacaaaaaggggaccgcgtaacaatttaccttacgatgatacctgaattggcttacacaatgttagcttgtacaagaattggtgctatacattcaataatctttgggggattttctcctgactcaatagcaacaagaataaatgattgtgagtctgactacgttataaccgcagatgagggtgtgagaggtggtaaaataattccacttaagaaaattgcagatgaagcaatgatgcaatgccccaatataaaaaaatgtgttgttgtaaaaagaaccggaaattcagttaattgggataatgagagagatatatcttacgaggatatgataaaaaatgtatctgacaagtgtcctcctgaagaaatgaatgccgaagatcctatgtttattctttatacctctggttcaactggaaaacctaaaggtgttttgcatactactggaggctatatggtttatgcatcaatgacacatcagtacatatttgattacaaaccaaaagatgtttatttctgtagtgcagatattgggtgggtaactggtcatagctatatcatttatggtccactttcaaatggagcaactactattatgtttgaaggaattcctaccttcccagatagttcaagatggtggcaaataattgataaatataaagttaatattttttatactgcacctacagcaatacgtgcacttatgagagaaggagatgctccggtaaaaaaaacaagcagaaaatcattaaaattacttggtactgttggtgaaccaattaatccagaagcatggatgtggtattacaaaactgttggaaattccaaatgtccaattgttgatacatggtggcaaactgaaactgggggaatattaatttcgcctcaacctggagcaattaatttaaaaccaggatctgcaactaaaccattctatggaattaaaccggctatagttgatgaaaatggaaaaataataaaaggagcaggtaaaggtagactttgtatgcttcagtcttggccgggtcagatgcgaactgtttatggagaccacgaacgatttataaaaacatatttttcacaattcgatggaaagtattttactggtgacgggtgtagacgcgataaggatgggtattattggataacaggaagagttgacgatgttattattgtttcaggacataatttaggaacagcagaaattgaaagcgcttttgttgctcatacaaaagttgctgaggctgccgtagttggttacccccacgacattaaaggaaacggactttattgttacgtaactcttaacgccggagaaaacccagacggagatctagaaagagaacttaaattatgggtaagaaaacagattggtccaatagcaacaccagattatattcagttttctccaggattgccaaaaacacgttcaggaaaaattatgagaagaattttaagaaaaattgcagccaatgaacatcatgatttgggtgatacaacaacattggctgatccctctgtagtagaatcattggtagagaatagaaagaataaataat

SEQ ID NO: 309594 - DNA, 1783 bp, Unknown
  Bacterial polypeptide expressing nucleotide sequence isolated from the Sargasso Sea
atgccaaaaaaaaagaaaaaaaagtctaataaaaaaagaaaaaataaaaaaaaaaataaatcaaaaaaaagaaaaaaaattcttaaatcaaaaagaaaaaagaaaattaaattaaaaaaaatagaagatactgagggtccaaaagaacttatttataaagttaaaacagattgggttaaaaaagctacagtcaataagtctgagtacgaaaagaagtatagacaatcattgaaagataacgacggattttggaaaaaggaaggtaagcgaattacgtggattaaaccttacacgaaaattaaagatgttaaatatagtaaatcagatgtacacattaaatggttttatgatggaactttaaatgcctcagcaaattgtatcgatagacatttaaaaagaaataaagataaaactgcaattatttgggtcggtgatgatcctaaggttcaaaaaaaaattacttacaaacagttacatcaagaagtttctaaagcagcaaatgggttaaaagagttaggagttaaaaagggagatagggttacaatatatttaactatgatacccgaacttgcttacacgatgctggcatgcgcaagaataggtgccattcattctataatttttggtggcttctcgcctgatagtatatctggaagaataaatgattgtaagtctgattacgtaataactgcggatgagggcataagaggcggtaaaactattcatttaaaatcaataacagacgaggcattagttgaatgtcctaaagtaaaaaaatgtatagttattaaaagaactggaaatagaattaattgggacgaaagtagagatgtttggtatcacgatatgattaaaaatgtttcttcaaattgcgaaccagaagaaatgagcgcagaggatccgttgtttatactttatacatctggttcgacgggcaaacctaagggcgtattacatacaactgggggctatatggtttatgcgtctatgactcaccaatatattttcaattataagtctaaagatatttattggtgtagcgcggatatcggttgggttacaggacatagttatataatttacgggcctctatctaatggagctactactattatgtttgagggaataccaacatatccagatagttcgagatggtggcaaattatcgataagtataaagtaaatattttctatactgctccaactgcaataagagcactaatgagagagggggataaaccagtaaaaaaaacctcaagaaaatcacttaaattgctaggaactgttggcgaaccaataaatcctgaggcttggcaatggtattttaagactgtaggagactctagatgcccaatagttgacacttggtggcaaactgaaactggtggaattttgataagccctcaaactggagctatagatttaaaacctggctcagcgacaaagcctttttatggaattaagcctgtattagttgataaaaatggaaaagttcttaaaggtgaagctcaaggcagattgtgtatttcacaatcatggccaggacaaatgagaactgtttatggtgatcatcaaagatttatagacacttacttttcacagtttgatggtaaatattttactggagatggatgtaggagagataaagatggatattattggatcacaggcagagttgatgatgtaattattgtctctggccataacttaggtacagctgaaatagaaagtgcatttgtagctcaccctaaagtggcagaagcagcggttgttggatatcctc

SEQ ID NO: 309595 - DNA, 1911 bp, Unknown
  Bacterial polypeptide expressing nucleotide sequence isolated from the Sargasso Sea
aatgaatgaaaaaatagagaatttattaaacgaagatcgtttatttgaaccaagtgaagaattaaaaaataatgcaaatgcaacatctgcatggttcaaagacgctgagaaagatagattagagtactggaagcaacaggcacttaatagaataacttggtttaaagaacctaccgaagtattagatgattcaaatgcaccattttttaagtggtttagtgatggggagttaaacctttcttacaattgccttgatagacatttagaaacagatggagatagagttgcatattactgggaaggtgaacctggagatactcaagagattacctatagagatctttatgaaagagtatgtaagttatcaaatgcacttaaaagtttaggagtccaaaaaggagataggatagctatttaccttggtatgacgcctgagatagtagtttctatgcttgcctgtgcaagaattggagcagtgcactctgtagtattcggtggtttttcagctgaagcactagctgatcgtataaatgatgctgaagcaaaggtagtgataacagctgatggcgcatggagaagaggagaaattgttcctctaaaggagaacgtcgacaactcattagaactaactgaatttattgaaagtgtggttgtagtaaaaagaactggacaagaagtaaatatgaaagatggaagagattactggtatgaggagattgttgaagagcagtctgcagagtgtgagcctgaagtaatgaatgcagaagacttgctctacatactttatacttctggaactacagcaaagccaaaaggcattgttcacacacaggctggttatttaactggcgtaactactactcatagtgcagtatttgatgttaaagatgatgatatttattggtgcgcagcagattgtggatgggttacaggacatagctatattgtctatggaccattagctaataagacaacaagtgttatgtatgaaggagcacctaatgctccagatgaaaaaaggttatggagcctagttgaaaaatataaagtaaatattttttatacagcaccaactgcgattcgagcatttatgaagtggggagttgaacatccaaaagctcacgatttaagctcattaagattacttggatctgttggagaaccaataaaccctgaagcttggatgtggtatcacgaaaatattggtaatgagcaatgcgctattgttgatacatggtggcagacagagactggctccattatgatttcacctctacctggtattacaagtacaaaaccaggatcagcgtgtggtccattaccgggcattgattcggtaattattgatgaaaaaggaaatgaagttggtaaaggtgaaggtggttatcttgcaattaagtctccttggccatctatgttaagaactgtatatggagacgacaaaagatatattgatacatattggtctcagcacgaaggtttatattttgcaggcgatggtgcaaaatatgatgatgatggttatgtttggcttcttggaagagtagatgatgtaatgaatatctctggtcatagaatctctactgctgaagtagagagcgcactagtctctcatgaatctgttgctgaggctgccgtaattggcagatccgatgaaataagtggagaagcaattgctgcatttgtttcattgattggaacagatgcaggagatgaaaaattaatatcagaattaaggcaacatgtaagcgacaagattggacctatagcaaaaccaaagagcattgtaataacagctgatcttccaaaaacaagaagtggaaaaatcatgagaagggtattaaaagatatttcagaagaaagaaaattgggtgatgtaactacacttgcaaatgctgatattgtctctga

SEQ ID NO: 309596 - DNA, 1107 bp, Unknown
  Bacterial polypeptide expressing nucleotide sequence isolated from the Sargasso Sea
atatggtttacgcctcgatgacacatcaatatgtctttgattataaagatggtgacgtttattggtgcactgcagatgtaggctgggttacaggacatagttacattgtatatggtccgttagcgaatggcgctgtcacggtcatgtttgagggtgttccaaactatccaagcgcctctcgtttttgggaagtggtcgataaacacaaaattaatattttctacaccgcaccaactgcaattagagcgctaatgagagaaggtgaagatcctgttaaaaaaaccagtagatcatctctcaaattactagggactgttggagagccaattaatccagaagcgtggatgtggtattataatgtcgttggtgacaaaaaatgtccaattgttgacacgtggtggcaaaccgaaactggaggtattttaatcacacctcttcctggtgcaattgcacagaaaccaggatcagcaactaaaccattctttggtgtcaaacctgaaattttagatgctgaaggaaaaattcttgaaggagcttgcgagggttctctctgtttagcagattcttggcctggtcaaatgagaacagtttacggagatcataaaagattcattgaaacgtatttctctcaatttgatggaaaatattttacgggtgatggctgcaggagagatgaagatggttattactggatcactggaagagtagatgatgtcatcaatgtatctggtcaccgaatgggaacagcagaagttgagtcagctctcgttgctcatcctaaagttagtgaagcagcagttgtcggttaccctcatgatattaaagggcaaggtatctatgcatacgtgacgcttaatgcaggagaagaaacatcagacgaattatataaagaacttgttgcatgggttcgaaaagaaattggcccgatcgcatcacctgatttaatacagtgggcgccaggtcttccaaaaactagatcaggaaaaatcatgagaagaattttaagaaagattgctgaaaatgattacagtaatttaggtgatacatctacattagcagaacccgctgtggtaaatgatcttgttgaaaatcgaatgaacaaataac

SEQ ID NO: 309597 - DNA, 1294 bp, Unknown
  Bacterial polypeptide expressing nucleotide sequence isolated from the Sargasso Sea
atgatacctgagctagcatacacgatgttggcatgtgctaggattggagcaattcactcaattatatttggaggattttctcctgatagtatatctggaagaattaatgattgtaaatcagattttgtaataactgctgacgagggagtgagaggtggcaagacaattcatcttaagtcaattatggacgaagcattagtaaactgtccaaatgtaaaaaaatgtgtagttgtaaagagaactggtggaagaattaactgggatcctttaaaagacgtttggtatcatgaaataactaaaaatgtttcaacaaaatgtgaaccagaagaaatgaatgcagaagatccattatttatactttatacctctggatcaacaggtaaaccaaagggtgttttgcatacaactggtggatatatggtttatgcgtcgatgacacatcagtacatatttaattataaacagaaagatatttattggtgcactgctgatattggttggataactggtcacagttatattatttatggccctctttctaatggcgcaaccactataatgtacgaaggcataccaacttaccctgacagttctagatggtggcaaatagtagataaatataaagtaaatattttttacacagctccaactgcaattcgagcacttatgagagagggagaaaaaccagttaaaaaaacttcaagaaaaacacttaaattacttggaactgtaggagaaccaataaatccggaagcttggcaatggtattataaaaccattggagattctagatgtccaatagttgatacatggtggcaaactgaaactggtgggattttaattagcccacaaactggagcaattcatttgaaacctggatcagcaacaaaacctttttatggaatcaaaccagtaatagttgacaaaaatggtaaggtattaaaaggagaagctaaaggacgactttgtatagctcaatcttggccaggtcaaatgagaacagtatatggagatcatcaaagatttttagatacttacttttctcaatttgatggaaaatattttacaggtgatggttgtcgaagagataaagatggatactactggataacaggaagggtagatgatgttataattgtatcaggtcataatttgggaactgccgaaatagaaagcgcatttgtcgctcatccaaaagtagctgaagcagcagttgtgggtttccctcacgatataaaaggaaacggattatattgttatgtaactttaaatgctggtgaaaacacactttaga

SEQ ID NO: 309598 - DNA, 1036 bp, Unknown
  Bacterial polypeptide expressing nucleotide sequence isolated from the Sargasso Sea
gctgatcgcattaacgacagtgaggctaaagtggttattaccgctgatgaagggcgcagagcagggcgcagcatccctcttaaagcaaacgttgataaggcgttggcgaacgatgcttgtccttctatcacgcatgtcgttgtgcataagcttactggtggcgatgtcgattggaacagtgagcacgacgtttggtggcaagatgcaattggtaattgctctgcgcagtgcgaaccagaggtcatgaacgccgaagacccactatttattttgtatacatctggctctactggcacaccgaaaggcgttgtgcataccactggcggttatttattgtattcagccatgacgtttaaatacgcctttgattaccgagatgatgacatttattggtgtactgctgatgtaggctgggtaacggggcacagttacatggtttacgggcctatggttaatgccgcgtcacaggtgttttttgaaggtgtacctacatatccagatgttaagcgcattgcgcaggtggttgaaaaatataaagtaaacagcctgtataccgcaccaacggcaatccgtgcgctaatggcccatggagacacacccgcagagggctgcgacctatcatcgctgcgtttgttgggcacagttggtgaaccgattaacccagaggcatgggaatggtatcaccgcgtgattggtaaaggccgttgcccaattatcgatacctggtggcaaacggaaaccggtgggcatatgattttgccgttaccgggtgcgacagagcttaagcctggttcggcaactcgccctttcttcggcgtagcgccagcgctatttgatgctgatggcaaagaacttgaaggtgccgccgaaggtaacctcgtcattaaagacagttggccgagtcaggctcgcactgtttatggcgacccatcacgttttattatacctattttagtgcgtatgaaggtgtgtactttaccggtgatggcgcgcgtcgcgatgaagatggctgctattggatcacaggccgtgtaga

SEQ ID NO: 309599 - DNA, 541 bp, Unknown
  Bacterial polypeptide expressing nucleotide sequence isolated from the Sargasso Sea
ttggccgagtcaggctcgcactgtttatggcgacccatcacgttttattatacctattttagtgcgtatgaaggtgtgtactttaccggtgatggcgcgcgtcgcgatgaagatggctgctattggatcacaggccgtgtagacgacgtactcaacgtttcaggccaccgcttaggtactgcagaaatcgagagcgcattggtagcgcacagcaaagtggccgaggctgcggttgttggatatcctcacgatattaaaggccaagggatctacgtttacgtgagtcctattgaaggcgtagaggttaatgatgcccttaccaaagagctgaaaggctgggtacgccaagaactgagccccatagccacacccgatattattcagtggtcaacggggctgccgaaaacacgttctggtaaaattatgcgtcgtatattgcgcaaaatagcggcaaacgagcatgagcaactgggtgatacatcgacgttggcggatccatccgttgttgatacactcatagaggaacgactcaataaataat

SEQ ID NO: 309600 - DNA, 484 bp, Unknown
  Bacterial polypeptide expressing nucleotide sequence isolated from the Sargasso Sea
aatggctgacaagatcatccagccacatcctaaatttaaaaatcctcatattcctgatatgcaaacttatcaggagatgtatcaagaatccataacaaatccaaagagatttttcggtaaagaagccgaagaaaacttatcatggttccaaaaattttcatctgttcataacgatcaatttgaaaataccaagtggttcaatggtggtctgatcaatgtttctcataactgcattgatagacaccttgagaagcatagtgagaaaactgcattgatttgggaaggagatgatcctcaagataataaaattattacctatgaagagctatacgaacaagtttgtcaatttgcaaatattttaaaaaaattaaacgtcaaaaaaggtactcgggtctgtatctatatgccaatgatacccgaggcagcttttgctatgctggcatgtacaaggattggtgccattcattcagtgttttggaggatt

SEQ ID NO: 309601 - DNA, 1269 bp, Unknown
  Bacterial polypeptide expressing nucleotide sequence isolated from the Sargasso Sea
tttggtatgtatttatatgccgatgattcctgaagcgatgtttgcgatgttagcttgtgcaagaattggcgcgcctcattcggttgtctttggaggattttcttcagaagctctaaaagataggttaattgatggaaacgccagatttgttgttactgctgatggtggctttagaaaagataaggtgattgaacttaagaaagcagttgatgtggccattgagagtggggcagataaagttgttgaaaaagtaattgttgttcaacgaacccaaaaaaatatttctatggttgatgatagagatttttggtggcacaaattattaaaagatcaaaaagatcattgtgaaccagaaataatgaatagcgaagatagactttttattctttatacttcaggctctactggaaagcccaaaggtgtagttcacactataggtggttacaatctttggtctcatttgacatttaaatggatttttgatttaaaagatgacgatatttactggtgtactgctgatgttggttggattacgggtcatagttatatagtttatggccctttatctaatggtgctacaaccttaatgtatgagggagtgccaagaccctcaaatttaggggctttttgggaaattgttcaaaaatataaggtttctattttttatactgcaccaactgcaataagagcatttatgaagtctgggcgtgaaatacctgataaatataatttggagagtcttagacttttgggcacagtcggtgaaccaattaatcctgaagcatggatgtggtacaaggatgttattggtaaaaataaatgtcctattgttgatacttggtggcaaactgagactggtggcgtgatgataagtcccttgcctggagtcgttgctacaaagccaggttcagctactttccctctcccaggaattgaagttgaaattgtcgataagaatggagataaggttaaggagaatgagggtggctatttaattattaagaaaccttggccaggaatgatgagaacaattcacggaaactcagagagatatttggagagttattgggaatatatttcctttaaaggagaaaaaaatgtttattttgctggcgatggagcacgcattgatgaagatggatatatatggattatgggaagagttgatgatgtcataagtgtttcaggacatcggttaggaacaatggaaatagaatctgctttggtaagtcacaaatcagtcgcagagtctgcagtcgttggcaaaaa

SEQ ID NO: 309602 - DNA, 2029 bp, Unknown
  Bacterial polypeptide expressing nucleotide sequence isolated from the Sargasso Sea
atgccaaaaaaaaataaaaaaataaaaaagaaaaaaaatattataaaaaaaagaaaaaaaaatttcagaaaaaaatctgaaaaaaaaattgaaaaagaaataatttataaaactaagaaggagtggattaataaagcaatagtaaataaatcacaatacgaaaaaaaatataaagtttcaatttcagataatgataatttttggaaaaaagaaggtaagagaattaattggattaaaccttatacaaaaattaaagatataaaatatagtagatcggatgttagaataaaatggttttatgatggaacattaaatgcttctgctaattgtatagatagacatttaaaaaagaacaaggataaaactgcaataatatgggttggtgatgatccaaaagttcaaaaaaaaattacttacaaggaactacacaaagaagtatcgaaggcagcaaatggattaaaaaaaattggtgttcaaaaaggtgatagagttacaatttatttaacaatgatacctgaattggcttatacaatgcttgcttgtgcaagaattggtgcagttcattcaattatatttggaggattttcgccagatagtatttctggaagaattaacgattgtaaatctgattatgtaattactgctgatgaaggtgtaagaggaggaaaaacagtacatcttaaatcaataatggatgaagctttggttgaatgtccaaaagtaaaaaaatgcgttgtaattaaaagaactggaaacagaattaattgggatgacagaagagatgtttggtatgatgaaatgataaataatgtttcttctaaatgtgatcctgaagaaatgaatgctgaagatccattgtttatcctttacacatctggatcaacgggaaaaccaaaaggtgttttacatactacgggtggctatatggtttatgcttcgatgactcatcaatatatatttaattataaacctaaagatatttattggtgtacagctgatataggttgggtaactggtcatagttatataatttatggtccattatctaatggcgcaactactgtaatgtttgagggaattccaacatatcccgataattctaggtggtggcaaatagttgataaatataaagtaaatattttttatacagctccaacggcaataagggctcttatgagagaaggtgataaaccagtaaaaaaaacatcaagaaaaacccttaaattattaggaactgttggagaaccaattaatcctggagcttgggaatggtattataaaatagttggagactctagatgtccaatagttgatacctggtggcaaactgaaacgggaggaattttaataagtcctcaaacaggtgcaataaatttaaaaccaggatctgctacaaaaccattttatggaattaaaccagtcatagttgataaaacaggaaaagttttaaaaggagaagcacaaggtagactttgtatagctcagtcatggcctgggcagatgagaacagtttatggagatcataaaagatttatagatacatatttttcacaatttgatggaaaatattttactggagatggttgtagaagagataaggacggatactattggattacaggcagagttgatgatgtaataattgtatctggtcacaatttaggaactgcagaaatagaaagcgcatttgtggctcatccaaaagttgcagaagctgctgtagttggtttccctcatgatattaaaggaaatgcattgtattgttatgtgactcttaatgttggagaaaagggagatggaagtcttgaaagagaattaaaaaatcatattgctaaaacacttgggcctatatacagacctgaaacaattcagtttgcaccaggtttgccaaaaacacgatcaggaaaaattatgagaagaattctgagaaagattgcagcaaatgaacatgatcagcttggtgacacaactactttggcagacccaggagtagtgaaaagcttagttgataataggaaaaatatttaaa

SEQ ID NO: 309603 - DNA, 774 bp, Unknown
  Bacterial polypeptide expressing nucleotide sequence isolated from the Sargasso Sea
caaaagatatttattggtgtactgctgatattggttgggtaactggacatagttatattatttatggaccactttcgaatggtgcaacaactataatgtttgaaggaattccaaattatcccgatagttctagatggtggcagatagttgataaatataaggtaaatactttttatacagccccaactgcaattagagctttaatgcgtgagggggaaaaaccagttaaaaaaacctctagaaaatcacttaaacttttaggaacagtcggagaaccaataaatccagaagcttggatgtggtattataaaactgtaggtaattctaaatgtccaattgtagatacttggtggcaaacggaaacaggaggtataatgattgctcctcaaacgggtgctattccacttaaacctggatctgcgacaaaacctttttatggaattaagccttcactcgttgataaaaacggtaaagaaattaaaggagctggtgaaggtagattatgtatagctcaatcgtggcctggacagatgagaactgtttatggtgatcatcaaagatttattgatacgtatttttctcaatttaacggaaaatattttactggcgatggatgtcgaagagataaagatggttattattggattactggtcgagtagatgatgtaattattgtttcagggcacaacctaggaactgctgaaattgaaagtgcatttgttgctcatccaaaagtagctgaagctgctgtagttgttaccctcacgatataaa

SEQ ID NO: 309604 - DNA, 1195 bp, Unknown
  Bacterial polypeptide expressing nucleotide sequence isolated from the Sargasso Sea
aaagagcatatcacttatgcacaactgctagaaaaaacgagcgttttagcgggctctcttataaccaaagggattacaaaaggtgacagagtaatcatctatatgccaatggttccagaagccattgttgccatgctagcatgcgcgcgaattggggcaattcattctgttgtatttggtggctttgcttctaatgaacttgctgtaagaattgatgacgctaaaccaaaaaccatactggccgcatcatgcggtatcgaaccaggaagaattattgagtataagccattaatagatggtgcgattgagctttcagagcacaagcccgaaagtgttgtgatattgcagcggccacaatctgtagctagtttaatacctggtagggattttgactgggatgagttccaaatagatgcagaacccgctgattgtgttatggttgaaggaaatcatcccgcatatattttatatacatctggaacaactggggctcctaaaggagtcgtaagaccaaccgctgggcatctagttgcactgcattggagcatgaaaaatatatacaacgttgatccgggagatgttttctgggcggcttctgatgttggctgggtggttggacacagttacatttgctacgcgcctttaattcatggaaatactactgtgttatttgaaggtaagcctgttggaactccagacgcaggaacgttttggcgggtaataagcgaacataaagtgaaagcattttttactgctccaacagcgtttcgagcaataaaaagagaagatccagaaggtaaatttaaatcacaatatgatttaagctgtttgcaggcactattcctagcaggagaacgtgccgatcctgatacgataaattgggctcaaaatctattgggcgtaccagtgattgaccattggtggcagaccgaaactggctggacaattgttggcaatccaacgggaatagagagccttccaataaaggttggaagcccatcagtgcctatgccaggctacgatattaaaatattagataatgatggaaatgaattatccaatggtgaattgggagcagtcgctataaaattgccacttccaccgggaagtttaccaacgctttggaacgccgaagaacgctttaaaaaatcttacctcgctacatttccagggttctacgaaactggagatgccg

SEQ ID NO: 309605 - DNA, 861 bp, Unknown
  Bacterial polypeptide expressing nucleotide sequence isolated from the Sargasso Sea
tatgagtgaaaatgaaaagtttgaagtaagcagtgaatggtctgtagaagctcaaattaatactaataaatataatgaatggtatgaaaattctctcagcaacaatgaagaattttggagtgagcacggtaaaagaattgattggattaaaccatatacaaaagtaaaagacgtttcttacaataaagataatttttcaatcaagtggtactacgatggcacacttaacgcatcaagcaattgtattgacagacatttaaaagataaagcagatcaaaccgcgatcatttgggaaggcgatgatccagcagattcaaaacacatatcttataaagaattacacagtgaggtatcaaagcttgctaacggcatgaaatctctaggagttaaaaaaggtgatcgtgtaactatttatatgccaatgattcctgaagcagcttacgcaatgctagcatgtacaagaattggtgcaattcactcagttgtatttggaggtttctctccagactcgttagctggaagaataagtgattgtaaatcagatattgtgatcactgcggatgaaggcgtaagagggggtaaagcaattccattaaagaaaaatacagatgaagcaatttcgatttccggtggagtgcgtcattgtattgtagttaaaagaactggcggggatattggttgggttgatgatagagatgtttggtatcatgaattgactgaaaaagaatctgatgattgtccacctgaggaaatgtcagcagaagatcctctctttatattatatacatctggatcaactggaaaaccaaaaggggtaatgcataccactggcggttatatggtgtatgcatcaatgacaca

SEQ ID NO: 309606 - DNA, 1912 bp, Unknown
  Bacterial polypeptide expressing nucleotide sequence isolated from the Sargasso Sea
atgaaatttgatatagataactttatcaatccaaatttaaaagattattcagaatatgagaccctatataacgattcaataaatgatcctaataatttctttttaaaacaagctttagaagaaattgattggatcaaaaaaccaacaaagagttctacagggacgctatctgaaccaaaatggtttgaagatggcacattaaatatttcttataactgcatagatagacatgcaaaaactcatccagataaaaccgctattatttggcagggagatgaaaaagagaataatcaatatatttcctacaaacagttgcatcatgaggtctgcaaacttgcaaatggttttaagtcagttggaatttcaaaaggggatagagtctgtatttatatgccaatggtgcctcaggcagcctatgctatgttcgcatgtatgcgtattggcgcaattcattctgtcgtatttggcggattttctcctgaggccataaaatccagaatacaagacgcagattgtcagtatgtaataactgcaaatgaaggcataagaggaggcaagaaaatacctcttaaagatagtgttgatgaagcactgcatgaatgtcctaatgtaaaaaaatgtatagtgcttaaatatacagatacaaaagtttcatggaatgatgagattgatatttggtatcacaagctaatagataatcaagaagatttttgtgaatgtgaagaaatgtctgcagaagacccttcattcattttgtacacttctggctcaacaggaaaaccaaaaggtgttttacatactactgctggatatcttctcggggctactctaacctttaagtatatttttggatactcagaaggtgataaatactggtgcaccgccgatgtcggatggatcactggacatacgtatattttatatgggccattatcgaatggtgcaacgacacttatgtttgaaggaataccaacttatcctgatccctcaagattctgggaagtctgtgatcaacatcaaatcaacattttctatacagcaccaacagcaataagagcattaattgcaaaaggagaagaatatctggaaaattcaaagcgtgattctttaaaagttcttggtacagttggagagccaataaacccagaagtttggcaatggtactttgagaagattggaaaatctaactgtgaggtagtagacacctggtggcaaactgaaacgggttcagtcctaattagtcctattgcaggaataacaccgaagaaacctggttcagcaactctacctttctttggtgtggagccatccattgttgatgtaaatggtgaagtaatgctgggcgaagcaaaaggtaatctttgtataaataattcatggccaagccaaattcgtacagtttatggagatcatgaaaggatggtacaaacttatttttcacaatatccaggaaagtactttactggggatggagcgaaaagagataaagatggctactattgggtcacaggccgggttgatgatgttttaaatgtatcaggacatagaattggaacagcagaggtggaaagtgctgtcgtaaatcatccagatgtcgctgaatcagcagttgttggtgttgaacatgacattaaaggacaagcaatttacgcctatgtaattttaaaaaaaactgataaggatataagcagtttagagatagaaattattgatgaggttacaaaagctatcggtaaaattgctaaaccagattttatacattttactagagacttacctaaaacaagatcagggaaaattatgagaagaattttacgaaagatagcgaatagtgatacagaaaatctgggtgatattacaaccttagctgacccgaatattgttgacgaattaataaggagtaaagtatgag

SEQ ID NO: 309607 - DNA, 1386 bp, Unknown
  Bacterial polypeptide expressing nucleotide sequence isolated from the Sargasso Sea
tatggttaaaaaaaaatccaaaaagaaagcaaaaagaaaaaaaaataaagttagaaaaaagaaaaataaatttagtaaaaagataaagaaaattagcagaaaaaaatcagacactgaaaaaaaaaacgaagagataatttacaaaactaaaagtgagtgggtaaaaaaatctttaattaataaatctggttatgaaaaaaaatattcgcagtctataaaagataatgaaggtttctggaaaaaagaaggtaagagaattaattggataaaaccatacacaaaaattaaagatgttaaatatagtaaatcagacgtacacattaggtggttttatgacggaactttaaatgcatcggcaaattgcattgatagacatttaaaaaaaaataaagataagactgcgattatatgggttggtgatgaccctaaggtgcaaaaaaaaattacttataaacaattgcatcaggagtttcaaaagctgcaaatggttaaaagaattaggggtaaaaaaggagacagagtaacaatttatttaaccatgattccggagcttgcatatactatgttggcctgtgcaagaattggagctgtgcactctataatttttggtggattttccccagatagcatctcaacaagaattaatgattgtgaatctgattacgtagtaactgcagatgaaggtattagagctggcaaaattattgatcttaagtttattacagatcaagctttagttgattgtcctagagtaaaaaagtgtatcgtagttaaaagaactggaaacagaataaattgggataatagtagagatgtttggtaccacgatatgatcaaaaatgtatcatctaattgtgaacctgaggagatgaacgccgaagatccattatttattttatatacatctggctctacaggaaaaccaaagggtgtacttcatactacaggcggttatatggtttatgcctcaatgacacatcagtacatatttaattataaaccaaaagatatatatttttgcagtgctgatattggttggattacaggtcacagctatataatttatggtccattatcaaattgtgcaacaacagttatgtttgaaggtgttccaacatttcctgatgcatcaagatggtggcaaattatagataaacataaagtcaatattttttatactgcgcctacggcaatcagagcattaatgaaagaaggtgacaaactcgtaaaaaaaacatctagaaaatctcttaaattacttggtacagttggtgaaccaataaatcctcaagcttgggaatggtattataaaacagttggagattctagatgtccaattgttgatacgtggtggcaaactgagacaggaggcattttaataagtcc

SEQ ID NO: 309608 - DNA, 709 bp, Unknown
  Bacterial polypeptide expressing nucleotide sequence isolated from the Sargasso Sea
tgatacatggtggcagactgagactggaggaattttaatgtctccaattcctggatgtgtgccaacaaaaccaggatcagccacattacctttgccaggtattgttccatcaatcttagatgaagaaggaaatgaaattaaagagaggaacactactggctatttagtaatgacacaatcttggcctggacaaatgcgcacagtatatggtgatcaccaacgattcatcgatacgtatttttctcaagcaccaggaaattattttactggggatggagcgtatattgatgatgatggatatttttggattactggaagagtggacgacgtattaaatgtttctggacatagaattggtacagccgaagtagaaggagctataggtgctgcatctggagtagctgaagctgcagtgattggatatagtcatgaaatcaaaggcgaaggcatttatgcttttgtcacattaatgacaggagtagaagcttcagcagagattgaaaaagatatcctaagtactgtgacaaaaattattggtcctcatgcaaagccaagtgctattcaattttgttcagggcttccaaaaacaagatctggaaaaattatgagaagaattctaaagaaaattgcccaaaacgaaacggatgatttgggagacacttcaacacttgctgatccaagtgttatagatagcttattaaagaaatga

SEQ ID NO: 309609 - DNA, 1207 bp, Unknown
  Bacterial polypeptide expressing nucleotide sequence isolated from the Sargasso Sea
atgagtgtgtctgatatttataaatccaaagattgggttagagataaagcattaattagcaaagaagattataaaaaactttatcatcaatctattacagatccattatccttttgggatgaacatggtaagcgactcgcctggtataagccttatactaaaataagagactattcatatgatataaataatctctatattaaatggtacgaagacggagtattaaatgtgtcttataactgtatcgaccgccatattgaaaaacttggagataaaatcgctattctatgggaaggggatgacccagcagacactaaaaaaattacttataaagaacttctaatagaagtatgtaaattttcaaatggactaaagtcattaggtatcaaaaaaggtgacagagtgactatttacatgccaatgattcctgaagcagcagttgctatgcttgcatgtacaagaataggagcaatccattcagttgtattcggagggttttctcctgaagcactggtggggaggcttgaagattgtaattctgaatttattattacctctgacgagggagttcgaggaggaaagatcatcccacttaaaagaaatgtggacatggctatttctaaagttaaagattttaaaaaatgtattgttgtaaaaagaacaggaaatgagattccatggaatgataagtatgattattggtatcatgatctgattgataactcctctgatatatttgaaccagaaaaaatgtcagcagaggatccaatgtttattttatatacatctggatcaaccggaaaaccaaaaggcgttcttcacactacaggaggatatttagtttatgcttcattaacgcatcaatatgtttttgattatcatgatgatgatatatattggtgtactgctgatgtaggttgggtaactgggcactcttatattatttatggccctttgtgtaatggagcaactactgtgatgtttgagggggttcctaattacccggacgctagtaggttctgggaaattgtagataagcacaaaattaatattttatatactgcgcctacggctattcgtgctctgatgtctgaaggtaataagttcctagaaaatacatccagaaaatcactgcgaattctaggaagcgttggagagccaataaatccagaggcatggcggtggtactacgaagccagcaggtaat

SEQ ID NO: 309610 - DNA, 1310 bp, Unknown
  Bacterial polypeptide expressing nucleotide sequence isolated from the Sargasso Sea
tccaaatgttaaaactaccttagtaataaaaagaacaggtggtgatataaattgggtaaatgaaagagatatatggtatgaagatcttataaaaaatgtaagtgcaaaatgtgaccctgaacctatggattcagaggatcctctatttattctatacacttcagggtcaacaggtaaaccaaaaggtgttctccatactactgcaggatatctacttggtgctcatataagctttaaatatctctttggcatccaggcagaagatatatattggtgtactgcagatgtaggttggattactggtcatacatatatcctatatggacctctatcaaacggaacaacaacaataatgtttgaaggagtgccaacatatccttcttcatcaagatgttgggaaatatgtgataaatataaagtaaatattttttatacagctcctacagcaatcagagcactaatgtcacaagggaatgatccagttcttaagactaaaagaagtagtttaagagttttagggactgttggtgaaccaataaatcctgaagcttgggaatggtattataaagtagtaggtaatagttcatgcgatgtggttgatacatggtggcaaactgaaacagggtctgtattaatttctccaattgctggtattacatcaatgaagcctggatcagcaacactgcctttttttggagtaaaaccagctctttatgatgagcaaggtaaacatttagaaaatgctaattctggaaatttagttatagaaaaatcctggccaagccagataagaagtgtttatggagatcataatagaatgatatctacctatttcgaaacttataaagatatatattttacaggcgatggagcacgaagagatgatgatggatattattggatcacaggaagagtcgatgatgtactaaatgtttcagggcatagattaggtacagcagaaatagaaagcgctctagttcttcatgataaagttgccgaagctgcagttgttggttttgaacaccctattaaaggacaaggtatatatgcatttgttactcttatgaaagaagaagaatttaatgaagacttgcggactgagcttattcaatttgtttcaaaagagattggtccaattgctaaaccagatctaattcaaaatgctccagggcttccgaaaacaagatcaggaaagataatgaggagaatacttagaaagattgctgaaggagatttctcaaatcttggagacacaacaactcttgctgagcctactgttgttgaatctttgatagaaaatagtcaaaaac

SEQ ID NO: 309611 - DNA, 1078 bp, Unknown
  Bacterial polypeptide expressing nucleotide sequence isolated from the Sargasso Sea
actggtctttgactataaagataatgaagtctattggtgtactgcagatgtaggctgggttaccggtcattcctatattgtttatgggcctctagctaatggtgctacaacattaatgttcgagggaattccgacctttcctgatgcttctagattttgggaagttatagataaacacaatgtaaatattttttatacagcccctacggctctcagagctctaatggctcagggtgatgaatatgtaaaatcatcttctagagagtccttaagaattctgggtaccgtaggcgaacctataaatcctgaagcttgggagtggtattacaaagttgtaggtaattcaaaatgtcctatagtggatacatggtggcagacagaaacagggtcgatgatgataacccctctagctgggtcaaccccacttaaacctggcagcgctactaaaccatttcttggcgtagaacctgcactgcttgatgaaaacggaaatgagatagaaggagaagggtctggaaaccttgttattaaatcaagttggccttctcaaataaggtcagtctatggagatcatcaacgttgtgtagaaacctattattctatgtatcctggatactatacgaccggagacggagctagaagagataaagatggatactattggatcactggtagagtggatgatgttttaaacgtttctggacacaggctaggtaccgctgaagtagagagtgcattggtattacatgaaaaagttgctgaagcggcagtggttggttacgaacatgaaattaaaggacaaggtatatattgctatgtaactcttatgttggaccaagatccaagcgaagatcttagaaatgaccttattcaattagtaggtaaagaaataggcgctattgcaaagccagatataatccaatgggcacctggattaccaaagacgagatcaggtaaaataatgagaagaatacttaggaaaattgcttcgaatgaagttgatgatcttggagacacaactacgctagccgatccttcggttgtagaagaattaataaataatagagagaataaataa

SEQ ID NO: 309612 - DNA, 416 bp, Unknown
  Bacterial polypeptide expressing nucleotide sequence isolated from the Sargasso Sea
aatgagatatgaagatttatatagtgaatggaaaaatgatcctgagaaattctggattaatgctgcacaaaatatagattggataaaatttccaagttttgctttagattcttccaatagaccgttttataagtggtttcctgatggtttagtaaatacatgctataatgctgttgatcgtcacgtgataaaaggaaaaggtgaaaaaactgcaattatttatgatagtgctatcagaagcgttaaagaaaaaatcacatatagccaattacttgaaagagtaactaaatttgcccatgcaatgagtaacgctggtattacaaaaggtgatagagtaattatttatatgccaatgataccagaagcaatagtatcaatacttgcttgctcaagaataggagctattcattcagttg

SEQ ID NO: 309613 - DNA, 1633 bp, Unknown
  Bacterial polypeptide expressing nucleotide sequence isolated from the Sargasso Sea
catgacaaaagataaaatctataaccctcccctatcagttctggagaattcaaatataaaagaatctgaatttgaagaactataccaatggtctttgagcaaaccagaagagttttgggcttcccaggctgagaattatctaagttggaataataaatggtctaaagtaaaagagactaatatggagaaaggcgaaatcatatggtttaaagatgcaaaattaaatgcgtctgtgaactgtatagatagacatcttcctgaaaatgctgaaaaaactgctttcatatgggaaggagataatcctgaagaaacaaaaaatatcagctataagaaacttcatgatgaagtatgcaaatttgcgaatgtccttaaagctagaaatgtaaaaaaaggggatagagtttgtatctatatgcctatgatccccgaagcaacatatgcgatgttggcttgtgcgagaattggggcgattcactctgttgtttttgggggcttttcccctgaatccttaaaagaccgtatcctggattctgattgccagactgttatcactgctgatgagggcttgagaggagggaaaaaagttcctcttaaagagaacgtcgacgaggctcttcaaggatgtccaaatgtccacactgttctagtcatcaccagaacaggagcagagatttcatggaatgagaactgtgatgttagatttgaagaaatttcaaaagacgttcctgccaattgcgaaccagaaataatggactccgaagatcccctatttattctctatacatctggatcaacaggtaagccaaagggagttttacacactacaggtggatatcttcttcaagctgccatgtctcacaagctggtattcgactataaagatgatgagatatattggtgtactgcagatgttggctgggttactgggcattcttatattgtttatggacctctagcaaatggtgcaacatcattaatctttgaaggaatacccacttttccctcgccttcaagattttgggaagttattgataaacacaaagtaaatattttttatacagcaccaactgctctaagagctcttatggcacaaggtgatgaatttgttaaatcatcgagcagagattcactgagaatcttagggacggtgggagaacctataaatcctgaagcttgggaatggtatttcaaagttgttggagattcttcttgtcccatagtagatacttggtggcagactgaaactggagccatgatgattacccctgtagcaggatttacttcgatgaagccaggaagtgctacaaaaccttttcttggaattgagccagctcttctgaacgaaagtggagaagaaattataggcgagggttctggaaatcttgttattaaatctagctggccctctcaaatcagaacggtatatggtgaccatcaaagatgcatagatacttactactcaatgtatcctgggtactacacaactggcgatggagcgagaagggattcagatggatattattggataactggaagagtagatgacgtacttaatgtatctggtcataggttagggacagcagaagttgaaagtgctttagttcttcataaagatgtagctgaagcggcagta

SEQ ID NO: 309614 - DNA, 350 bp, Unknown
  Bacterial polypeptide expressing nucleotide sequence isolated from the Sargasso Sea
aagtgcgtttgtagctcatccaaaagtagctgaagcagcagtagttggatatccacatgacataaaaggaaatgggctttactgttatgtaactttaaatgctggagaaaaaagtactcttgatttagagagagacttaaaactttgggttaggaaacaaattggtccaatagcaactcctgacttaattcaatttgctccaggacttccaaaaacaagatcaggtaaaataatgagaagaattctaagaaaaattgctgctaatgagcatggtcaattaggagatacaacaactttagctgatccttctgttgtcgaaagtttggttgataacagaaaaaatatctaga

SEQ ID NO: 309615 - DNA, 1431 bp, Unknown
  Bacterial polypeptide expressing nucleotide sequence isolated from the Sargasso Sea
attaatggaaaattaaatatcactgaaaatatatttgaaagaaatttatctaaaataaaagataaaattgctatcatttgggaacctaatgatcctaataacaaagttaaaaaaataacctataaagaattatattatcaagtttgtcaattttcaaatgctttaaagaaaaaaaatgtaaagaaaggggatagagttataatctatatgccaatggtgcctgaagctgtagttgctatgttatcttgtgctcgattgggcgcaattcattcggtcgtatttgctggttttagtgcaaattctttatctgatagaattaatgattctggtgcgaaagtaatcattacttcagatggaaattatagaggtaataaaataattcctgtaaaaaaaattgttgatcaagcaattcaaaaaacaaattctattgaaacagtaattgttttaaataggactaatatggatgtttcgatgaatgaggatagagattactggtatgatgaaataattaaaaatgagtctaccacaaacaaagctgaaaccatggattcggaagatcctttatttattttatatacatctggctcaacaggaagtcctaagggtgtactgcactcttgtggaggttacatgatctatagtcaatatacatttgaaaatatttttcaaaataaaaatgatgaaatatattggtgtactgcagatattggatggataactggacattcatatattgtttatggtcccttattaagtggagcaacaaccttaatgtttgaaggtgttcctacatatcctgatcctagtagattttggaaaatagttgataaacataaagtaaatcaattctatactgctccaacagcaattagagctttacaatcttttggagataaatattttgaaaaatcaagcctaaattcattaaaagttattggttcagtaggggaaccaataaatttagaagcttggaattggtacaattcaaatataggtaaaaataaatgtcctttagtagatacatggtggcaaacagaaacagggggcattatgatctctcctattcctggagtaattaaacctaagccaacttatgctacacttcctctccctggtatccaacctatacttttagataataatggaaatgaaattaaagataatgaagtagaaggtaatttgtgtattaaatatccttggccttcaatattaagaacaacttatggtgatcatgaaagatgtaaaaagacctatttctcaacttttaaaggatactattttactggagatggagcaaaaagagataacgatggtaattatagaatattaggtagggtagatgatgtaattaatgtttctgggcatagaattggcacggctgaagttgaaaatgctataaatgaaaatgtttcagtaattgaatctgctgtt

SEQ ID NO: 309616 - DNA, 1099 bp, Unknown
  Bacterial polypeptide expressing nucleotide sequence isolated from the Sargasso Sea
atgccaaaaaagaaaaaaagaaaaaaaattaaaaagaaaaagtcttcaagaaaaaaaagattaaaaaggattaaagttaaaaaaattgaaaattctgaattaatttataaaacaaaaagcgattggataaaaaaagcaataataaataaatctggatatgaaagaaaatattctgattcaattaaaaataacgatagtttttggaaaaaagaaggtaagagaattacctggattaaaccttacactaaaattaaagattataaatatagcaagtcggatgttcatattaaatggttttatgatggaactttaaatgcttcagctaattgtatcgatcgtcatttaaagaaaaataaagataaaactgcaataatatgggttggggatgatccaaaagtacaaaaaaaaattagttataaacaattgcaccaagaagtttcaaaagcagcaaatggattaaaagaaataggagttaaaaaaggtgatagagttacaatttatttaacaatgatacctgagttagcatatacaatgctagcatgtgcaagaataggagccattcattcaataatttttggaggtttctcagcggacagtattactggaaggattaatgattgtaagtcagactacgttattactgctgatgaaggtgttagaggtgggaaaattatagatttaaaagcaacagttgatgaggctctactaaattgtccaaatgttaaaaagtgtattgtagtaaaacgaactggaaacagaattaattgggatgaaagtagagatgtttggtatcacgatataactaaaaaagcgtcgaagaattgtgagcctgaagaaatgaatgctgaagatccactatttattttatatacatctggatctactggaaaacctaagggagttatgcacacaacgggtggttatatggtttatgcatcaatgactcatcaatatatttttaactataaaccaaaagatatttattggtgtactgctgatattggttgggttacaggtcatagttatattatttatgggcccctcgcaaatggagccacaacaattatgtctgaaggtattcccaattatccagattggt

SEQ ID NO: 309617 - DNA, 357 bp, Unknown
  Bacterial polypeptide expressing nucleotide sequence isolated from the Sargasso Sea
aaattgaaagtgcttttgtagcgcattcaaaagtagctgaagcagctgttgttggttttcctcatagtattaaaggaaatggtttatattgttatgtaactttaaatgcaggagaaaaacctgatggagacttagagagagatcttaaactctgggttagaaaacaaattggtcccattgcaacaccagatgtaattcagtttgctcctggcctacccaaaacacgatcaggaaaaattatgagaagaattttaagaaagatcgctgctaatgatcctgataatcttggagatacaaccacattggcagatcctagcgtagttgaatctttagttcagaatagacaaaataaataat

SEQ ID NO: 309618 - DNA, 1054 bp, Unknown
  Bacterial polypeptide expressing nucleotide sequence isolated from the Sargasso Sea
tatatacgatagtcctatcacaggtaataaaaaaaaattcacttataaagaactaagagacaaagtatcaaaatttgcgggtgctctaaaaaatcaaggtataaaaaaaggagatcgagtcataatatacatgcctatgatacctgaatctgtaattgcgatgcttggatgtggaagaattggagcaatacattccgtggtatttggaggttttgcatcaaatgaacttgcaagcagaattgatgatagtaaagcaaaacttttaatcactgcgtcatgtggattcgaaccaggaaggacagtagagtataaaccattagtagataaagcacttcagcttgcttctcacaaattagaaaaggttatactcttccaaagagctggtcatgaagttaagcttaattctccaaaagaaattagctgggatgaatcgttgtctaatgcaaacgatgtagattgtgtagaaattaattctaatgaattttcatatattttatatacttctggtactacaggaatccccaaaggtattgttagagatgtaggtggacatatagttgctcttaaatggacaatgaaaaatatttataacattgatgtggatgatgtttggtggtctgctagtgatattggttggatagtaggtcactcatatattgtttatgctccattgttcaaaggatgtactacagttttatttgaaggaaaacctgttggcacacccgatgcaggtgcattctggaaaataatatcagactataaagtaaaatctctttttactgccccgacagcatttcgagcaataaaaaaagaagatcccgaaggaaaattttttacaaaatatgatcttagcaaatttgaatcattatttctcgcaggtgaaagagcagatccggatacaattaagtgggcagagtctttgcttaaagttcctgtaattgatcattggtggcaaactgaaactagctgggcaattagttcaaattgtacagggatagaaatgatgaaaattaatatggctcagcttgcaaagctgtgcctggatatgatgtaa

SEQ ID NO: 309619 - DNA, 1015 bp, Unknown
  Bacterial polypeptide expressing nucleotide sequence isolated from the Sargasso Sea
aggacatagttacataatttatggtcctcttgctaacggtgctacaacaataatgtttgagggaattccaaattatccagatacttctagatggtggcaaattatagataaatttaaagttaatactttttatactgctccaactgcaataagggccttgatgagagaaggagatagtccagttaacaaaacatctagaaaatctttgaaattactcggaactgttggagaaccaatcaatcctgaagcttggatgtggtattacaaaactgttggaaattctagatgtcccattgttgatacttggtggcaaactgaaactggaggtataatgatttctccccaaacaggagctattcctttaaaacccggttcagctacaaaaccattctatggaattaagcctgtacttgttgataaaaatggtaaagaaattaaaggagctggagaaggaaaactatgtattgctcattcttggcctggacaaatgagaacagtttatggagatcatgatagatttataaatacatatttttctcaattcgatggaaaatattttacaggtgatggctgtaaaagagataaagatggatattactggataacaggaagagtagatgatgtcataatcgtatcaggacataatctaggaactgctgaaattgaaagtgcatttgttgctcacccaaaggtagctgaagcagcagtggttggttatccacatgatattaaaggaaatggtttatattgctatgtaactttaaatgctggtgaaaaagatactggcgagctagaaagagacttaaaactttgggttagaaaacaaattggtcccctagcaacacctgacttaattcattttactccaggactacctaaaacaagatccggaaaaattatgagaagaattttaagaaaaattgctgcaaatgaacatgaccaattaggtgacactaccactttagcggatccaagtgttgttgaaagtttagttgataatagaaaaaatatttaa

SEQ ID NO: 309620 - DNA, 1237 bp, Unknown
  Bacterial polypeptide expressing nucleotide sequence isolated from the Sargasso Sea
ggcagaacctgctgcttgtgtgccagtgcttggcacagatccgctgtatattttgtatacctcaggcactaccggcaaacccaaaggcgttgtgcgggacaatggcggccatgctgtggctttaagttacagcatgcaggccgtgtatgatactaagcctggcgatgtattctgggcggcctcagacgtcggctgggtggtgggccactcctatattgtttacgcgcccctgctcgcaggttgcactactgtattgtacgaaggcaaacctgtatttacaccggacgccagcgctttctggcgagtctgcgccgaacatcaagtgaatgtgctctttgctgcccccaccgcatttcgggctattcgcaaagaagatccggaagctacgcttcaaacttatgatttatccgcactaaagtatatttttatggcgggagagcggcttgatcctgccacttaccattgggtagtcgataaaataggcaaaccagtgatcgatcactggtggcaaaccgaaaccggttggcctatcagtgcgaatccggctgggcttgaattaatgaatgccaaagcaggttcgtccacagtgcctgtaccaggttttaatgtggaaattctggatgaaagcggcttacctgtgccagccaatcagcaaggctttatagcgctaaaactgcctttaccccctggctgcttaagcagtatctggggtaatgacgaacgttttgttgacggttatttatcgactttccctgactattacgccagtggcgacggtggttacatagatgacgaggggtatttgtttgtgatgggccgcactgacgatgtaataaacgtcgctgggcatcgcttatccacaggcgaaatggagcagatagtcgccagccaccctgcagtcgccgaatgttgtgttgtaggtatttatgaagctattaaaggccagcaacctttggctatggtgttagtgaaaaatggtgtggatatcagtgaaagccagcttgaggctgaacttattgctatggtgcgacaggaaataggtgctgtagcctgttttaaaaaggctattatcgttcaacgtttacctaaaacccgctccggcaaaatattgcgtaaattgctgcgacaaatagccactggcagcgactatacagtgccatccactatagacgacccggcctgtttacctgagcttgcagagctgatgttgcaaaaggatttaattggcagtcagtga

SEQ ID NO: 309621 - DNA, 1735 bp, Unknown
  Bacterial polypeptide expressing nucleotide sequence isolated from the Sargasso Sea
gtttttaaagttccagaaaaatggtctaatcaagcctacgtaaacaaatctcaatatgaaaaaaaatataatttatctatcaagaataatgaagatttttgggcaaaagaagggaaaagaattaattggattaaaccttacacaaagataaaagatgtgaagtacagtaaggatgatgttcatatcaaatggtattatgatggaaccctaaatgcttcagctaattgtattgatagacatttagaaaaaaagagtaataagactgcaataatttgggtgggggacgacccgagcgattcaaaaaaaatatcttacaaggaacttcacaaaaatgtttgtaaagctgcaaatggcctaagaagtttagggatacaaaaaggagatagagttacgatttatcttacaatgattccagaattagcttatacgatgctagcctgtacaagaattggagctatacattcaattatctttggaggtttttctcctgactctatagcaacaagaataaatgactgtgaatctgactacgttataactgcagatgaaggtgtaagaggtggaaagataatccctcttaaaaaaatcgcagacgaagcaatgatgcaatgtcctaacgttaaaaaatgtgtggttgttaaaagaactggtaatgaggttaattgggataacgaacgggatatatcttatgacgagatgattaagaatgtatctgataaatgtcctccagaagaaatgaatgctgaagatccaatgtttatactctacacctcaggttctactggaaagcctaaaggagttttgcatactacgggtggctacatggtctatgcatccatgacacatcagtacatatttgattacaagcctagagatatttatttttgtagtgcagatattggttgggtaactggacatagttatattatttatggtccactttcaaatggagcaacaactattatgtttgaaggagttccaacttaccctgatagttcaagatggtggcagataatagataaatataaagtaaatattttttatacagctcccacagcaattcgagcgctgatgcgagaaggtaatgctcctgttaaaaaaactagcagaaaaacattaaaattacttggtactgtcggtgaaccaataaatccagaagcatggatgtggtattacaaagttgttggggattctaaatgtccaatcgttgacacgtggtggcaaactgaaactggcggaatattaatttcacctcaacctggagcaattaatttgaaaccaggttccgctacaaaacctttttatggaatcaagccagctatagtagatgaaaatggaaaagtaataaaaggggcaggcaaaggtagactttgcatgcttcaatcttggcccggtcaaatgagaacagtttatggggaccatgaaagatttataaaaacatatttttcacaatttgatggtaaatattttactggtgatgggtgtagacgtgataaagatggatactattggataacaggaagagtggacgatgttattattgtttcgggacataatctaggcactgcagaaattgaaagtgcgtttgttgctcatacaaaagttgctgaagctgctgttgttgggttcccccacgatataaaagggaatgggctttattgttatgtcactcttaatgccggtgaaaaccctgatggagatttagaaagagaactaaagttatgggttcgaaaac

SEQ ID NO: 309622 - DNA, 388 bp, Unknown
  Bacterial polypeptide expressing nucleotide sequence isolated from the Sargasso Sea
atagtatctggtcataatttaggtactgcagaaattgaaagcgctttcgtagcacattcaaaagtagcagaagctgctgttgttggatatccccatgatattaaaggtaatggattgtattgttatgtaactttaaatttaggtgaaagtcccagtggcgatcttgaaagagaattgaaactttgggtaagaaaacagataggacctttggcaactccagactttattcaatttgctccaggtcttccaaaaactagatctgggaaaataatgagaagaatattaagaaagatcgctgctaatgagtatgatcaattaggagacacgactactttagctgatccaagtgttgtaaaaagtttagttgaaaatagaaaaaataattaaa

SEQ ID NO: 309623 - DNA, 1939 bp, Unknown
  Bacterial polypeptide expressing nucleotide sequence isolated from the Sargasso Sea
atgtcagataatttattttctcctaataaagaattttcggataatgcatattttaaatcattggatcaatataatgatttatataatcaatctatatcaaacccagaaaatttttgggcagaaattgcaaatcgaatcacatggtttaaaaaatgggataaagttcgagaatatgattttataaagggctcaataaagtggtttgatggtgcgaagctaaatgtaagttataattgtttagaccgtcatgttgaaaatggttttggcgagcaaagcgctatcatatgggaaggaaataatcctcaagaagaccaatcatttacttataatgagttactttctgaggtgaaaaaatttgctaatgttttaaaaagtattggagtagaaaaaggtgatcgagtatgcttgtacatgcaaatggttccccaattaccaattgcaatgctcgcatgcgcaaggataggagcagtgcattcggtagtctttggcgcatttagtccagaatctcttcgagatcgtattaatgattcttcatgtaaagttttgattacacaagacactggagttcgtggaacaaaacagaatattccaatgaaggcaaatgctgataaagcagtatctgaaacaccttctattgagcatgtaatagtcgttaaaagaacaggtgttgatgttgagattaaaagtgaccgtgatttatggtggcatgaaatgatggaaaacgctgatttggaatgtattcctgaagaaatgaatgcagaggatcctctttttatattatatacatctggctccactggaacgccaaaaggagtaatgcatacaacaggcggatatcttgtttatacttcatttactcacgaaaaaatatttgattacaaaccgggtgatatttattggtgcacagctgatattgggtggattacaggacattcatatattgtatatggtccgttagcaaatcgagcagtaactataatgtttgaaggtgttcctaattatccggattttggaaggttttgggatgtggttgataagcataaagtaaaacagttttacacagcccccactgctctgcgtgccttaatgaaagaaggtgatgatcatgtaataagtcgcaatctttcaagcttacaattattaggcacagtaggagaaccaattaaggaacctgaatggatgtggtattataatattgttggaaaaggtaaatgtccaattgttgatacttggtggcaaacggagacaggtggaatattaatttctccacttccaggtgctacacctactaagcctggatcagcaacaaacccgttctttggcatagagcctgttctattatcagatgatggaaaagaaatagaaggaaataatgttcaagggcttctagcaatcaagcaatcctggccaggccaaatgagaacagtttatggagatcatcaacgattcattgatacatatttctcacaagtgcctggttactattttactggtgatggtgcccgtagagataaggatggttattattggataactggaagagtagatgatgttcttaatatttctggtcatcgtattggtactgcagaggttgaaggtgctataggaaaagctactggtgttgcagaagctgctgtagttggctttccgcatgaaataaaaggccaagggatttatgcatttgtaacattaatgacaggcacagtagacaatactgatataaatgaaggaattatggatagtgtaactaaaattattggtcctcatgcaaaacctgataaaatacaatacacccctgctttacctaagactcgttctggtaagattatgagacgaattttaagaaagatagcagaaggagatatggaaaatatgggtgatacatcaacacttgcagatccaagtgttgttgatgaacttattaaaggaaaaaaataat

SEQ ID NO: 309624 - DNA, 918 bp, Unknown
  Bacterial polypeptide expressing nucleotide sequence isolated from the Sargasso Sea
aaatagtagacaagtataaggttaatattttttatactgctccaactgcaataagatccatgatgagagaaggagatgcccctgtaaaaaaaacttcaagaaaaacccttaaattacttggaactgttggtgaaccaataaatcctgaagcttggcaatggtattttaaaactgttggtgactctagatgtccaatcgttgatacctggtggcagacagagactggaggaattttaattagtcctcaaactggagctatagacttaaagcctgggtctgcaacaaaaccattttatggaattaaaccagaaatagttgataaagaaggtaaggttctaaaaggagaagcgcagggaagattatgtatagctcaatcttggccaggtcaaatgagatctgtttatggagaccataatagatttatagaaacgtatttctcgcaatttgatggaaaatattttactggggatggatgtagaagagataaagacggatattattggataacaggaagagtagatgatgttattattgtctcaggacataatttgggaactgctgaaatagaaagtgcctttgttgcacatccaaaagttgcagaagctgcagtagttggatacccacatgatattaaaggaaacggattatattgttatgtaactctaaatgtgggagaaaaacataatggagacttggacagagaattaaaaaactgggtaaaaaaaaatataggagctcatgctcgtcctgattttatacaatttactcctggattaccaaaaacaagatctggaaaaataatgagaagaattttgagaaagatagctgctaatgaacatgaacaacttggagatacatcaaccttagctgatccaggtgttgttgaaagtctagttgaaaatagaaaaaatatttaga

SEQ ID NO: 309625 - DNA, 1815 bp, Unknown
  Bacterial polypeptide expressing nucleotide sequence isolated from the Sargasso Sea
atcaaaagccagcaagcctgttaaaaaagctggatcaacatcattaccaatggtttagcgatggtgtaatgaatacctgctatatggcgctggatcatcagattgagcaaggccgtggcaatcaaacagcactgatttacgactctccggttaccggcaccagcaaaaaatacagttacttgcagctttgggatcaagtggcactttttgcgggtgtgcttaaagccaatggtctggaaaaaggtgatcgggccgtcatttatatgccgatgatcccggaagcggccatagctatgctggcagtagctcgtttaggcgctgtgcactctgtggtatttggtggtttttcttcgcatgaactggcgatgcgtattgatgatgcagcaccaaaacttattatcagcgcgtcctgtggtatcgaaattaaccgcattattgcctacaaacctttgttggacgaagccttgcaaaaagccagtcataaggtgcattgcagcattgtctatcagcgtgagcagcagccttgtgcattagtggcaggtcgtgatttagactggcaacagcaaatgcaatcggctgaacctgctgcctgcgtgcccgtacttgcgacagatccgctctatattctgtatacctcaggcacgaccggcaaacccaaaggcgtagtgcgcgacaatggcggtcatgcggtggcgctgcattacagtatgcaggctgtgtatgacaccaaaccaggcgatgtattctgggctgcctcggatgtcggctgggtggtgggtcactcttatattgtgtatgccccactacttgcgggctgtactacagtgttgtacgaaggaaaaccagtgtttacgccggacgccagtgcattctggcgagtctgcgccgagcataaagtcaatgtgctttttgccgcgccaacggcctttcgtgctattcgcaaggaagatccagacgccacattacaaacttatgatttatcagcactgaagtatatttttatggctggcgagcgactggaccccgccacttaccattgggtggtcgataaaataggcaagccagtgatcgatcactggtggcaaactgaaaccggctggcctatcagcgccaatccagccgggcttgaattaatgcctgccgaagcaggttcatccacagtaccagtgccgggttttcatgtagaaattctggatgaaagtggcttacctgtgcctgccaatcagcaaggttatatagcgctgcaactgcctttaccaccaggctgtttaagcagtatctggggcaatgacgaacgttttgttgatgggtatttatccactttcccaggttactacgccagtggcgatggcggttatatagatgaggatggctatttatttgtgatgggccgcactgacgatgtaattaacgtagcgggccatcgtttatctacaggtgaaatggagcagatagttgccagccaccctgctgtggccgaatgttgtgtcataggtatttacgaggccattaagggccaacaacctttggctatggtgttggtgaaaaatggtgtggatatcagtgaaagccaactggaagcagaacttgtggccatggtacggcaagaaataggcgctttggcctgctttaaaaaagctattatcgtcaaacgtttacctaaaacccgctcaggcaaaattttacgtaaactgttaaggcaaatcgccaccggcagcgactattctgtgccatccactatagacgacccggcctgtttgcttgaattagccgaactgatgcagcagaaggatttaattggtaaagagcaatagc

SEQ ID NO: 309626 - DNA, 472 bp, Unknown
  Bacterial polypeptide expressing nucleotide sequence isolated from the Sargasso Sea
gatggaaaatattttacaggtgatggatgtaaaagagataaagacggatattattggattactggtagagttgacgatgtaataatagtgtctggacacaatttaggtactgcagaaatagaaagtgcttttgttgcacatcctaaagttgctgaggcagctgtagtaggatacccacatgatattaaaggaaatggtttatattgttacgttacacttaatgctggagaagaaccaaatggagaacttgaaagagatttaaaacattgggttagaagacaaataggaccaatagctacgccagattttattcaatttgccccaggattaccaaaaacaagatcaggaaaaattatgagaagaattttaagaaagattgcagcaaatcaacacgatcagttaggagatacaacaactcttgcagatccaagtgtagttaatagtttggttgataatagaaaaaatacttaaa

SEQ ID NO: 309627 - DNA, 1434 bp, Unknown
  Bacterial polypeptide expressing nucleotide sequence isolated from the Sargasso Sea
ttttagatgctgactgctcgttagtcatcactgctgaccaatcagtaaggggaggaaaaaaaactcatctcaagaaaaatgtagatactgcattagattcttgtcctggagttaaaaattgtatagttgttcaaaggacaggtgaaggcattgaaatggttgcgggcagggatcattactatacagaaatgattgcgcaatatgatccaacttgtgaatgtgtggcaacaaattcggaggatcctctttttattctctatacatctggatctacaggaaaacctaaaggagtcatgcatactgttggaggatatcttttgggagcacacttgagttttaaatttatctttggttatcagcaagatgatatctattggtgtaccgcagatgttggctggataactgggcatacttatattgtttatggaccgctaagcaattgtgcaaccagtgttatttttgaaggcgtgcctacctatccttcaccctcaagatgctgggagatatgtgataagcatcaagtaaatattttttatactgcaccaactgcgattcgagcattaatggctcaaggcaataaacctgtaaaggatacatctagaaaatctttaaaattgcttggtactgtaggtgagcccattaatcctgaggcctgggattggtattataaaattgttggagaatcgcgttgtcaaattattgatacctggtggcagacagagaccggctctgtattgatctcacccattgctggaattacacctgtaaaaccaggctcagcaacatttcctttttttggtgttaagccaggcttaatgaatgatgaaagtaatttaattgagggtgaaggctcaggaaatcttgtgatacaaaattcttggccaagccaaataagaacggtttatggagatcatcaaagaatgattgatacgtatttttctgagtatgaggatatttactttaccggagatggtgcaaagagggataaagatggttattactggataacaggaagggtggatgatgtcttgaatgtttcaggtcatagacttggaacagctgaaattgaaagtgcccttgtgcttcatccggttgttgctgaggctgcagttgttggatttgagcaccccatcaaagggcaaggaatctatgcatttgttaccctgatggttgggcaaaattcagacgatgatcttgctaatgaactttcaaagtttgttgccaatgaaataagtcccattgctaaacccgatctaattcaatggtcacccagtttgcctaaaacgcgttcaggaaaaataatgagaagaattttaagaaaaattgccgcgggtgaaactcatgatctgggagatacttctaccctagctgaaccagaggttgttaagaatttagttgagaataaactctctttaaatcaaaacagtgaataaa

SEQ ID NO: 309628 - DNA, 373 bp, Unknown
  Bacterial polypeptide expressing nucleotide sequence isolated from the Sargasso Sea
aacttaggcactgccgaaattgagagtgcatttgtagctcatccaaaggtagcagaagcagcagtcgtaggttatccacatgatattaaagggaatgggttatattgttatgtaacattaaatgcgggtgagagagaaactggtgaactggaaagagatctaaaactttgggttagaaaacaaattggtccacttgctacacctgacttaattcatttcactccaggacttccaaaaacaagatctggaaaaattatgagaagaattttaagaaaaatcgctgcaaatgaacatggtcaattaggagatacaactactttggctgatcctagcgttgttgacagtttggttgaaaacagaaaaaatatttaaa

SEQ ID NO: 309629 - DNA, 1477 bp, Unknown
  Bacterial polypeptide expressing nucleotide sequence isolated from the Sargasso Sea
agctgtacattctataatatttggtggtttctctcctgactcgatagcaacaagaatatatgactgcgagtcagattatctaataactgcagatgaaggtattagaggaggtaagataattccattaaaaaaaatagctgatgaggctttaactcaatgccctgaagttaagaaatgtgtggtaattcaaagaactggtaatcaagtcgattggaataacgaaagagatatttcttataaagaaatgatttctacagcttcgaacaaatgtgatcctgaagagatgaacgccgaagatccattgtttatactttatacttcaggttctactggaaaaccaaaaggtgttttacatacaactggtggatatatggtttatgcatctatgacccatcaatatatttttgattataaaagtaatgacatttattggtgtacggctgacattggatgggtaacaggacacagttatattatctatggtccattagctaatggagccacaactattatgtttgaaggaattccaaattatccggatagttctcgttggtggcaaatagttgataaatataaagtcaatatattttacacagcaccaactgcaataagagctttgatgagagaaggagataagcctgtaaaaaagacaagcagaaagtcattaaaattgttaggtacagtgggagaacctataaatccagaagcttggatgtggtattataaaactgttggagattctagatgtccaatagttgatacttggtggcagacggaaacaggaggtatactaattgctcctcagccaggagctatagatttaaaacctggatctgcaacaaagcctttttatggtattaagcctgtattagttgataaagatggaaaagtaataaagggagaaggaaaaggaagactatgcatggctcattcttggccaggtcaaatgcgtacagtgtatggtgatcatcaaagatttatagatacttatttctctcaatttgacggaaagtattttactggggatgggtgtagaagagataaagatggttactattggataactggaagagttgacgatgttataattgtttcgggacataatcttggtactgcagaaattgaaagtgcttttgttgcacatccaaaagttgcagaagcagcagttgtgggttttccacatagtataaaaggaaatggtttgtattgttatgtaactttgaatgttggagaaaaatcttcaggtgatttagaaagagatttaaaactttgggttagaaaacaaattggacctatagctacaccagatgttatccaattttctccgggcttaccgaaaacacgttctgggaaaataatgagaagaatattaaggaagatagcagcaaatgaaccgaataatctaggagacacaacaacactagctgatccaacagtagtagaatctcttatacaaaatcgacaaaataaaggttag

SEQ ID NO: 309630 - DNA, 1141 bp, Unknown
  Bacterial polypeptide expressing nucleotide sequence isolated from the Sargasso Sea
gaaacccaaaggtgttctgcacacaacggcaggatatcttgtttatacttctctgactcatcaatatgtgtttgattatcatgatggagacatatactggtgtacagctgacattgggtgggtgacaggacacagctatattctatatggtccactggctaatggtgccactacactgatgtttgaaggagttccaaattatcctgattttgggcgattttgggatatttgtgacaaacataaagttaatattttttacacagcgcccaccgcaattcgtgctattgctaaagaaggcgatgatttggtcaacaaacgggatttgagttccttacgattgttaggcactgtaggtgaacctattaaccctgaagcatggctttggtatcacagggtagttggacatggtaattgtccaatcgtagacacatggtggcagacagagacaggaggaattttgataactcctctcccaggagcgacacgaaccaagcctggttctgctacacgacctttttttgggatacaacctttattagtggacggggatgggaatgagcttgaaggagctgctagcggtaatctatgcattaaatttccttggcctggtcaaatgcggactgtatatggtgatcatgagagatttattcaaacatatttcagcacatacaaagggttatattttactggtgacggctgcaggagagacgaagatggttattactggatcacagggcgtgttgatgacgtattaaatgtttctggacaccgaatgggcactgctgaactggaatcagcactggttcttcatgaaaatgtggccgaagcagcagtggtcggattcccccatgaaattaagggacagggtatttatgcctttgtaacattaaactcgggagttgagcccacagatgaattacaaaaagaattagtacaactcgttcgcaaggagattggcccaattgcttcttttgatgtagtacaatgggcgccaggtcttccgaaaactcgttccggaaaaataatgcgccgtatattacgtaaaattgctgaaagtgatatggaaagcatcggcgatacgtccacacttgctgatccttctgtagtagatgatttaatttctaatcgtcctacaaattga

SEQ ID NO: 309631 - DNA, 829 bp, Unknown
  Bacterial polypeptide expressing nucleotide sequence isolated from the Sargasso Sea
agaactaagagaaaatctcttcgagttcttggaacagtaggagagcctattaaccctgaagcatgggattggtattacaaaattgttgggaatggttcatgtgacgtcattgatacatggtggcaaacagaaactggatcggttttaatatctccaatttcaggtataacttcagtaaagcccggttctgcaacattgcctttttttggtgtaaaacctgcagtttatgatgacgaaggtcattcattggaaggagcagcatcaggtaatttggtcattgagtcttcctggcccagtcagattagaagtgtatatggagaccacgaaagaatgatatccacatattttaaaacctttaaaaatatttactttacgggtgacggtgcaaaaagagatgaagatggttactactggattaccggcagagttgatgatgttcttaacgtctctggacacagactaggaactgctgaaattgaaagtgctctagtacttcatgactcagttgcagaagcggcagtggttggatttcaacatccaattaaaggacagggtatttatgcgtttgtaacattgatgaaagataaggtatttaatgatgatttagaaaaagacttaattggatttgtttcaaaagagattgggccaattgctaaacctgatcttattcaaaatgctcccggactacctaaaaccagatcaggcaaaattatgagaagaatactaagaaaaattgctgagggtgactttgaaaatcttggtgatacaactacacttgctgagccagctgtagttgagtctttgctagagaacagtaaaaaattatgaa

SEQ ID NO: 309632 - DNA, 811 bp, Unknown
  Bacterial polypeptide expressing nucleotide sequence isolated from the Sargasso Sea
ttaaaacttttaggtacagttggagaaccaataaatcctgaagcttgggaatggtattttaaaacagttggagatagtagatgtccaattgttgatacctggtggcaaactgagacaggaggaatattaattagtcctcagacaggtgcaatagatttaaaacctggctctgcgacaaaaccattttatggaattaagccagagatacttgataaggatggtaaggttataaaaggagaagcacaaggtagattatgtatagcacaatcttggccaggacaaatgagaacggtgtatggagaccaccagagatttattgatacatacttttcacaatttgatggaaaatattttacaggagatggatgtagaagagataaagatggttattattggatcactggtagggtggatgatgtcataatagtatccggacataacctaggtactgcagaaatagaaagtgcatttgtagctcatcctaaagttgcagaagcagcagtggttggctacccacacgatattaaagggaatggactttattgttatgtaactttaaatgcaggggaaaaaagtactcttgatttagaaagagatttaaaactttgggttagaaagcaaattggtccaattgctacacctgacttaatacagtttgctccaggacttccaaaaactagatctggaaaaataatgcgaagaattttgagaaaaatagctgcaaatgaacatggtcaattaggagatacaacgaccttagcagatccttcggttgttgatagtttggtagacaatagaaaaaatatttaga

SEQ ID NO: 309633 - DNA, 1402 bp, Unknown
  Bacterial polypeptide expressing nucleotide sequence isolated from the Sargasso Sea
ggcatacaaaaaggagatagagtaacaatatatttaactatgatacccgagctggctgttttgatgttagcttgcgcaagaataggtgccatacattccataatatttggcggattttcagcagagtctatttctggaagagtaaatgattgtaaatcagagtacattattacagctgatgagggagttagaggtggaaaaacaattccgctaaaagcaacaacagatgaagcactaagtaattgtcccaatgttaaaaaatgtattgttgttaaaagaacaggaaactatgtttattgggatgacgacagagatgtttggtatcatgaactaattaaagatgtcccaaatcattgtgaacctgaggaaatgaatgcggaagatcctttgtttattctttatacttctggatctactggtaaaccgaaaggtgttttacacacaacgggtgggtacatggtttatgcatccatgactcatcaatacatatttaactataagcctaaagatatttattggtgcactgcagatataggttgggtaacaggtcatagttatattatttatggacctttatctaatggagctactacaattatgtttgagggagtaccaaattatccagacagctcaagatggtggcagattgttgataaatataaagtaaatactttttacactgctccaacagctatcagagcccttatgcgagagggtgatgatccagtaaataaaacatctcgaaaatctcttaaattattaggaacagtaggagagcctataaatccagaggcttggatgtggtattacaaaaccgttggaaactctaaatgtccaatcgtagatacgtggtggcaaactgagacgggtggaattttaattgcacctcaaacaggagctatacctttaaaacctggatcagcaacaaaacctttttatggaattaaacctgttcttgtcgataaagatggaaaagaaattaaaggtgcaggagaaggaagactttgtatagctcagtcttggccaggccaaatgagaactgtttatggtgatcatcaaagatttattgatacttacttttctcaatttgatggaaaatactttactggggatggttgcagacgggacaaagatggatattactggatcactggacgagtagatgatgtaattattgtatcgggacacaacttgggtactgctgaaattgaaagtgcttttgttgctcatcctaaagttgctgaagctgctgtggttggttatccacatgacattaaaggaaatggactttattgttatgtaactcttaatgcaggtgagactgagacaggagatcttgaaagagaactaaaattatgggttagaaaacaaataggtccattagcaactcctgacttaattc

SEQ ID NO: 309634 - DNA, 1041 bp, Unknown
  Bacterial polypeptide expressing nucleotide sequence isolated from the Sargasso Sea
attttggtttaaaaagccaactaaaattttaaataaatctaaccctcctttttataaatggtttgaagatggaacaaccaatacatgttataatgctattgacttacatatagaccgaggaagaggagataaattagctttaatctatgacagtcctataacaggtaacaaagcaaaattcacttacaaacaattaaaagacaaagtttcaaaatttgccggtgctttggtcaatcaaggagtaaaaaaaggcgatagagttatcatctatatgccgatgataccagagtctgttgtagcaatgcttgcatgtgcaaggattggcgcgattcattctgttgtttttggaggttttgcttctaatgaacttgcaagcagaatagatgatagtaaagctaaattattaattacagcatcttgtggatttgaaccaggaagaactgttgaatatcgtccacttgtagacggagctttgaagcttgctaaacataaagttgaaaaagttattttttatcaacgtaaaaataatgaagtaaaattaaactcacctttagaaataagctgggaagattctttatcacatgcaaaagatatagattgtgttgaaatgggtgcaaatgaatacgcatatatactttatacctcaggtactacaggagtaccaaaaggtattgttcgagatatagggggtcatatagttgctctcaagtggactatgaaaaatatttataatgttgatgaaaatgatatttggtggtctgctagtgatattggttggattgttggtcactcctacattgtatatgcaccattgttcaagggatgtacaacaattctttttgaaggtaagcctgttggtacgcctgacgctggagctttttggaaaatcatatctgattataaagttaaatctttatttactgctccaacagccttcagagcaataaaaaaagaagatcctgaaggtaaatttttttctaagtatgatttaagttcatttgaatcactttttttagctggagaaagggctgatccagatac

SEQ ID NO: 309635 - DNA, 1343 bp, Unknown
  Bacterial polypeptide expressing nucleotide sequence isolated from the Sargasso Sea
catggctaaaaaactaataaaagctcaatcattgaatcctcatattaaggactttgatgaatataagcagctatatgatgaatcaataaataatcctcaaggtttttttaaaaaaatagctaaagaaaatctttcttggattaaagattttaatgaagtccacaataatgaatttgctgaaagcaaatggttttatgatggaaaaattaatgttagtgaaaactgcatagatcgtcatctaaaagattcatcagaaaagacagcattaatatgggaaggtgatgaaccaggtgattctaaaaaatatacatttaaagaattacatgaagaagtctgcaaatttgcaaatgtcttaaaagatttaaaggtttccaagggctcaagagtttgtatttatatgccaatgattcctgaagctgcatttgcaatgctggcatgtacaagaattggagcaattcattcagtagtttttggtggtttttcacctgaatcattaaaagatagaattcttgatgctgactgtgaaatagttatcactgctgatgaaggtatacgtggtgggaaaaaaataccattaaaattaaatgttgatgaagcattgagaaaatgtccaaatgtaaaacatactattgttattaaaagatctgggggttatgtaccttggaatcaagatagagatctatactatgaagatcttattaaaaatgtctcttcctcgtgtgatccagaaccaatggatgcagaagatcctttgtttattctttatacctcaggttctactggaaaaccaaaaggagtcctacatacaactgcaggatatcttcttggtgctcacatgagctttaaatatttgtttggcataaatgaatcagatatatattggtgtacagctgatgttggttggattactggtcatacatatattttgtatgggcctttatcaaatggaacaacttctataatgtttgagggtattcctacctatcctgattcatcaagatgctgggaaatatgtgataagtatgacgtgaatattttttatacagcaccgactgctataagagctttaatgtctcaaggtgatgagcccgtgcttaaaacttcaagaaaaagcttaagagttctggggactgtcggtgaaccaattaatcctgaagcttgggattggtattataaagtagtaggtaatggtgcttgtgacgttattgacacatggtggcaaacagaaactggctctgtgctaatttctccaattgcaggagtaactgaagttaagcctggttcagctacattaccatttttaggtgtaaaacctgcgatatacgatgatgaaggaatacctt

SEQ ID NO: 309636 - DNA, 1678 bp, Unknown
  Bacterial polypeptide expressing nucleotide sequence isolated from the Sargasso Sea
aaaaaaactcctgataaaattgctataatatgggagggggataatccatctcactcaaaaaaaatttcttacaaagaattactagataatgtttgcaaaactgcaaacgctcttaaatcacaaggtgttaaaaaaggagactgtgttactatttatcttactatggtacccgagcttgcttacacaatgcttgcttgtgctagaataggtgctatccattcaattatatttggaggattttcatctgactcaattgctaatagagttcaagattgcaattcatcatttatagtaactgccgatgaaggagtaaggggtggaaaacctatactactaaaaaaaactgtggatgctgccttattgtcatgccctagtgtaaaaaaatgtctaatttataaaaaaactaataatgatttaaaagaaaatcatattgatgttgtgttaaatgaacacattaataacgcttcttctgaatgtacgcctgaagaaatgaatgctgaagaccctttatttattttatatacttcgggctcaactggaaagcccaaaggagttatgcatacttcaggtggttacttagtttatgcatcttttactcatgaatatatttttaattataatgatggtgatatttactggtgtactgcagatatagggtgggtcactgggcatagttatataatttacggaccattatctaatggagcaactactctaatgtttgaaggtgttcctaattatccagatacatcaagattttggcaaattattgataaatataatgtaaatattttttatactgccccaactgctataagagcattaatgagagaaggtgatgagcctgtaacaaaaacttcaagaaaatctcttaaattacttggaaccgttggggaacctatcaatccagaagcttggaagtggtattatgaggtgcctggtaataaaaattgtccaatagttgatacatggtggcaaacagaaactgggggtattttaatttcacctcaaactggcgctatagatttaaaacctggttcagcttcaaaacctttctttggaattatgccagcaattttagataaaaatggaaatgagctgaaaggagagtgtgaaggaatgttatgcttaaaacattcatggccgggacaaatgagaacagtatttggtaaccatcaaagatttatagatacttatttttctcaattcgaaggtatgtattttactggtgatggatgtagaagagatagtgatggatattattggataacaggaagggttgatgatgttataattgtttcaggtcacaatttaggaactgcagaaattgaaagtgcattagttgctcatccaaaagtcgcagaggctgccgttgtcggttatcctcatgaaattaaaggaaatggtttatattgctatgtaactttatcagtgggtgaagctgaaagtgatgagcttaaaaaagaattaaaaaacttagtacgtaaaataattggccctattgcaactccagacataattcattttacagctggtcttcctaaaacaagatcgggaaaaattatgagaagaatactaagaaaaattgcagcaaatgaacatgaccaacttggagatattactactctagcagactcaactgttatagatagcttgatagaaaaaaagattaaataaa

SEQ ID NO: 309637 - DNA, 1311 bp, Unknown
  Bacterial polypeptide expressing nucleotide sequence isolated from the Sargasso Sea
attaaataaatctaatgctccattttataaatggtatgaagatggtgttacaaacacttgttataacgctttggactttcatattgataatggccgaggcgaaaaatctgctttaatctacgatagtccaattacaggtaataaaaaaaaattttcgtacaaagaattaagagaaaaagtttcaaaatttgctggggcattacaaaatcaaggagtaaaaaaaggagatagagttataatttatatgccaatgattcctgagtcagttattggaatgcttgcctgtgcaagaattggtgcaattcactctgtagtgtttggtggttttgcttcaaatgaattagcaagcagaatagatgatagcaaagcaaaagttttacttacagcttcgtgtggttttgaacctggaagaacggttcaatacaaacctcttgttgatgaagcactaaaattagcatctcataaaatagaaaagctaatattatttcaaaggccagataataaagttgaattaaattctccaagtgaaattagttgggaagatgcactatcgaacgcaaagaatgtagattgcgttgaaatgaatgcaaatgaatttgcatatatattatatacctctggaacaacaggtattccaaaagggattgtaagagatatcggaggccacattgctgctcttaagtggacaatgaaaaatatttataacattgatcaagatgatgtttggtggtcagcaagtgatatcggatggattgttggtcattcttatattgtttatgcaccgttatttaaaggatgcactactgtattattcgaaggcaaaccagttggaactccagatgctggagctttttggaaaataatttctgaatataaagtaaaatctctattcacagcaccaacggcttttagggcaattaaaaaagaagatcctgaaggtaagtttttttctaagtacgatctaagctcatttgaaagtttatttcttgcaggagaaagagcagatccagatacaatcaaatgggcagagtctcttttaaacgtacctgtaattgatcattggtggcaaactgaaactagctgggcaataagttctaattgtactggaattgaaatgatgaaaacgaagtatggttcagcttgtaaagctgtaccaggttatgatgtaaaagttattaaacctgacaacagtatagctaagccaaacgaaatgggtgatatagttgtaaaacttccattgccccctggaacattcccaactctatggaatgctgatgaaagatataaaaaaacggtatatgacaaactatg

SEQ ID NO: 309638 - DNA, 906 bp, Unknown
  Bacterial polypeptide expressing nucleotide sequence isolated from the Sargasso Sea
attgtcattaattaacattgattttacttattttttaaaattaaatgcaatttttaatttaaaaaccaacaaatttaacgaaatcgaatcaaaatctatgtctaaaaaattaagtgaaatttacgagcaatctttaaaaaatcctgaaaatttttggcaagaagcatcaaatgatatcttttggtttaaaaaacctactaaaattttaaataaatctaaccctcctttctataaatggttcgaagatggtgtaacaaatacttgttataacgccctagatatacacattgatcaaggtagaggtagaaaaactggtttaatatacgatagcccgataactggtaacaaaagtcaattcacatacgaagaacttagatcaaaagtttcaaaatttgcgggagcacttaaagttcaaggtgtaattaaaggtgatagagtaattatttacatgcccatgataccagaggcagtaatagctatgcttgcttgtgcaagaattggggcaattcactctgttgtctttggtggctttgcatcaaatgaacttgctagcaggattgacgatagtaaagcaaaaatattagtcactgcatcatgtggatttgagcctggaagaacagttgaatacaaaccattggtagatgaagcggttaaactagctaatcataaaattgagaaaatgatattatttcaaagatcgggtcatgaagtaaaattaaatgctccactagagattagttgggaagagtcaatttctaatgcaaaagatgctgactgtgttgagatgaattcaaatgaatttgcttatattctttatacctcaggaacaactggaacgcctaagggtattgtaaaagatattggtggtcacatagttgcactaaaatggactatgaaaaatatcta

SEQ ID NO: 309639 - DNA, 421 bp, Unknown
  Bacterial polypeptide expressing nucleotide sequence isolated from the Sargasso Sea
taccttaacaacgaagaagcaacaaaccagacgatcgatcctgaaggttggctaaaaaccggagatattgccgaagtggatgaggacggatatttcaaaattgtcgaccgtgttaaggaactgatcaaatataaagggtttcaggttgctcctgcagaattggaggcattgctgttgacccatccatcaattgcagattgtgctgtcgttccggctgaagatccggaagcaggagaaattcctgtagggtttgtcgtctacaaagaaaacatggtggaaaatcctgaaaccatcatggagttcattgctcaaaaggtttccccacaaaaaaagattcggcgaatcattcagattgagcaaatccccaaatctccctccggtaagattctgcgtaggcacttaagagatcagattgcatgat

SEQ ID NO: 309640 - DNA, 727 bp, Unknown
  Bacterial polypeptide expressing nucleotide sequence isolated from the Sargasso Sea
atggtggaaggttttgcttttcccaaactgaaaaccatcatgtccggagccgctccgcttggtccggaattggcgaaagattgtgcaaggcggctaggatgcacggtaaagcagggttatggcttaaccgaaacaagtccggtgacccatcttaatcctgaaccaccggggcgtgtggttccaggatccattggcatctgcattccaaatacagaatgcaggatcgtcgattatgaaaccggaaaggatttgggaaccggcaagcagggtgagctctggatccgcggaccccaggtgatgaaaggttacctgaacaacgaagaagcaacgaatcagacgattgatcctgaaggttggctaaaaaccggagatattgctgaagtggatgaggacggatatttcaaaattgtcgaccgtgttaaggaactgatcaaatataaagggtttcaggttgcacctgcagaattggaggcattgctgttgacccatccctcaattgcagattgtgctgtcgttcctgctgaagatccggaagcaggagaaattccggttgggttcgtcgtctacaaagaaaacatggtggaaaatcctgaaaccatcatggagttcattgctcaaaaggtttccccacaaaaaaagattcggcgaatcattcagattgagcaaatccccaaatctccctccggcaagattctgcgcaggcacttaagagatcatattgaatgat

SEQ ID NO: 309641 - DNA, 395 bp, Unknown
  Bacterial polypeptide expressing nucleotide sequence isolated from the Sargasso Sea
tcagacgatcgatcctgaaggttggctaaaaaccggagatattgccgaagtggatgaggacggatatttcaaaattgtcgaccgtgttaaggaactgatcaaatataaagggtttcaggttgcacctgcagaattggaggcattgctgttgacccatccctcaattgcagattgtgctgtcgttcctgctgaagatccggaagcaggagaaattccggtaggatttgttgtctacaaagaaaacatggtggaaaatcctgaaaccatcatggaattcattgctcaaaaagtttccccacaaaaaaagattcggcgaatcattcagattgaacaaatccccaaatctccctccggcaagattctgcgcaggcacttaagagataagattgcctgat

SEQ ID NO: 309642 - DNA, 736 bp, Unknown
  Bacterial polypeptide expressing nucleotide sequence isolated from the Sargasso Sea
ctgtcgtgtttctggatgtggcattgccggtgggaccgtaaccacggtaaatcctacatatggtgctgaagaagtcaggttccaattacttgatgcctcagctactatcctcgttactattgaagcagcaatgcccattgcccttgaagctattgagggcactgacgtgcaggaaatcatcgtcgtcggcgagcatgaaaatgcgacttccctttcagaggtccttgaagctaaacccattgaccaagttgaagttgaccttgccaatcaccatgttgtgctcccctactcttcaggtacgactggactacccaaaggggtaatgctcacacataggaaccttgttgcgaatctatgccaatgcgaatcagcgattccttacgatcaggattcatcaggtttagcagtcctaccatttttccatatctatggaatgcaggtattgatgaatggattacttgccaatggttgcactgtgatttctatgcctcggtttgatctcgtccaagcccttgaattaattcagaaacataagatcactcatttctttgctgttccgccgatgattctggctcttgcgaagcaacccatcattgataattatgatctgtcctctctcgagatggtcatgtcgggggctgcccctctgggtgcagaactatccgaggaagcagcagcacgtattcaatgtgacgtgatccaaggttatggaatgacagagctgagtcctgtctct

SEQ ID NO: 309643 - DNA, 856 bp, Unknown
  Bacterial polypeptide expressing nucleotide sequence isolated from the Sargasso Sea
ctgtgtcatggtgccacggtgttttgcatgtcccgtttcgatctggagcagtttctggttttgatgcagaagcataaggtaacccgagcccatctagtccctcccattgttcttgctctcgcaaaacatccgatggtggaaggttatgcttttcccaaactgaaaaccatcatgtccggagccgctccgcttggtccggaattggcggaagattgcgcaaggcggcttggatgcacggtaaagcagggttatggcttaaccgaaacaagtccggtgacccatcttaatcctgaacccccggggcgtgtggttccaggatccattggcatatgcattccaaacacagaatgcaggatcgtcgattatgaaaccggaaaggatttgggaaccggcaagcagggtgagctctggatccgtggacctcaggtgatgagaggttacctgaacaacgaagaagcaacaaaccagacgatcgatcctgaaggttggctaaaaaccggagatattgccgaagtggatgagaacggatatttcaaaattgtcgaccgtgttaaggaactaatcaaatataaagggtttcaggttgcacctgcagaattggaggcattgctgttgacccatccatcaattgcagattgtgctgtcgttcctgctgaagatccggaagcaggagaaattccggtaggttttgtcgtttacaaagaaaacatgatggaaaatcctgaaaccatcatggagttcattgctcaaaaggtttccccacaaaaaaagattcggcgaatcattgagattgagcaaatccccaaatctccctctggcaagattctgcgaaggtacttaagagatcagattgcct

SEQ ID NO: 309644 - DNA, 784 bp, Unknown
  Bacterial polypeptide expressing nucleotide sequence isolated from the Sargasso Sea
catggccgaggcgtcggactcactgtggaggaccggcagattgtcgtgttgccgctgttccacgcaaatgcgcagtactactcgttcgcgcctgccatctggtcgggcgccagcgtggccctgatgcacacctttagcgccagcaacttcctccctcagtgcgcccgtcacagcgcgacggccgcaagcctcttcgctgcgcccatccgcatgatcctggcgcgtggtgaggaagtcgacggggtacgtctgcgtcactgctggtacgcgcagaacgtgaccggtgagcagtacgagcagttgtcgagatggcttgggtgcagggcacggcagctctacgggatgacggagaccattccggccgtgcttaccgaagctgttgacaagccccgtcacgactcgatgggatcggtgaccgaaggctgcgagcttcaactccaggatgcagaaggccgacccgtcggagtaggggagattggggaaatcgccgtacgcggtgttcccggagagacaatcttcggtggttatctggacgaccctgttgcgaccactgccagtttccggaacggatggttcctctccggggaccgtgctcggcgagatgaagacggtcggcattacttcgacggtcgacactcggaggtgctgaaggtcgctggcgagaatgtctccaccgtcgaggtggagggcgtgttgagcacgcaccccgacgtgcatgaggcggcggtgttgggatcgccggacctgatacgggacgaggtgccagtcgccttcgtggtacctg

SEQ ID NO: 309645 - DNA, 796 bp, Unknown
  Bacterial polypeptide expressing nucleotide sequence isolated from the Sargasso Sea
gatgcagaagcatgaggtaacccgggcccatctagttcctcccatcgttcttgctctcgcaaaacatccgatggtggaggggtatgcttttcccaaactgaaaaccatcatgtccggagcagctccgcttggtccggaattggcggaagattgcgcaaggcggcttggatgcactgtaaagcagggttatggcttaaccgaaacaagtccggtgacccatcttaatcctgaacctccggggcgtgtggttccaggatcaattggcatctgcattccaaatacagaatgcaggatcattgattatgaaaccgggaaggatttgggaaccggtaagcagggtgagctctggatccgtggcccccaggtgatgagaggttacctgaacaacgaagaagcaacaaacgagacgatcgatcctgaaggttggctaaaaaccggagatattgccgaagtggatgaggacgggtatttcaaaattgtcgaccgtgttaaggaactgatcaaatataaaggttttcaggttgcaccggcagaattggaagcattgctgttgacccatccctcaattgctgattgtgctgtcgttcctgctgaagatccggaagcaggagaaattccggtagggtttgtcgtctacaaagaaaacatgatggaaaatcctgaaaccatcatggagttcattgctcaaaaagtttccccacaaaagaagattcggcgaatcattcagattgagcaaatccccaaatctccctccggtaagattctgcgcaggcacttaagagatcagattgcatga

SEQ ID NO: 309646 - DNA, 898 bp, Unknown
  Bacterial polypeptide expressing nucleotide sequence isolated from the Sargasso Sea
tatcatatttacgggatgaccgtgatcctcaactcagctctgagtcatggtgccacggtggtttgcatgtcccgattcgatctggagcagtttttggttttaatgcagaagcatgaggtaacccgggcccatctagtccctcccattgttcttgctctcgcaaaacatccgatggtggaaggttatgcatttccgaaattgaaaaccatcatgtccggagcagctccgcttggtccggaattggcggaagattgcgcaaggcggcttggatgcacggtaaagcagggttatggcttaaccgaaacaagcccggtaacccatcttaatcctgaacctccagggcgtgtggttccaggatccattggcatctgcatcccaaatacagaatgcaggatcgttgattatgaaaccgggaaggatttgggaaccggcaagcagggtgagctctggatcagtggaccccaggtgatgaaaggttacctgaacaacgaagaagcaacgaatcagacgatcgatcctgaaggttggctaaaaaccggagatattgccgaagtggatgaggacggatatttcaaaattgtcgaccgtgttaaggaactgatcaaatataaagggtttcaggttgcacccgcagaattggaggcattgctgttgatccatccatcaatagcagattgtgctgtcgttcctgctgaagatccggaagcaggagaaattccagtagggtttgttgtctacaaagaaaacatggtggaaaatcctgaaaccatcatggagttcattgcacaaaaagtgtccccacaaaaaaagattcggcgaatcattcagattgagcaaatccccaaatctccttcaggcaagattctgcgcaggtacttaagagatcagattgcatgat

SEQ ID NO: 309647 - DNA, 1045 bp, Unknown
  Bacterial polypeptide expressing nucleotide sequence isolated from the Sargasso Sea
atgatgctcgcctacacctcagggaccaccggacatcccaagggagttatccactgtcacaagccggtccgcaacacctacgaacgcgcaatgctccttgggcataaccgcaatgatgttcacctgagctatctgcctttgtttcacgcatatggatttagcgaagtcgcaatgatggtcgcgttaacgggaggaagccaagttctcttcgacgtgtttgagcccgatcaagttctggacgctgtcgaagaagaaggtggcacggtccttcatggcttcgacagccactgggcagaccttattcgagaacaacaacaacgagaacgcgacgtcaccagccttcgtgtagggaccctccctgcggggatggaatcaacagtcccaatagcgcgacaagtgcaagatattttctgtcccaccaccagtggctttggcatgagtgaaacctgggcattcattgcctcaagccatgtcaccaatacattggaacagagaaccgaagcttcgggataccccatgtacggcattgagttcgaagttcgtgaccttgatcagggtcacgtattaggtgaaaacgagcaaggggctttgtacgtcaggggttacacggttaccagcggatactggggaaagcccgaagccacagctgaagtactggatgacgacggctggttagatactggggacgtggccctgctcagatcagatggacatgtggtgtttataggacggcacaaagacatgttgaaagttggtggggaaaatgtctcacctgcagaggtcgaagggtacctcctcgaagttgagggggttgaagagatagctgttgttgggtaccccgacgatcgacttgtcgaagtacccgtggcgttcgtcgtcagctcaactgacctctcggctgaagctttaattgaacgttgtcgtggcaaaattgccagcttcaaaatacccagacacatcatcttcatagatgagatgccgtccaccccgtcggggaagatacgaaaaatagaacttagagagtgggctttacaaaaaatctaaa

SEQ ID NO: 309648 - DNA, 1450 bp, Unknown
  Bacterial polypeptide expressing nucleotide sequence isolated from the Sargasso Sea
aatgagtcattacgatataaatttagataaaaacgaggctaattatatacccttaacacccctaactttcttaaaaagagctaaagatatatatccagactacgaggcggttatttatgaggatcgtaaatactcttggaccgaagtctataagcgtactgtaaaatttgcaagtgctctcactaaaattggtgtcaaaaaaggtgacactgtctcatttttagcttttaacactccagaaatttttgaaggtcattactctgtgccaatgactggtgcagttttaaacacaatcaatattagattggatgctaagactattgcatacattttaaatcatagcgacgcaaaagtattagtcgttgatagacagcttcatggtgaagttaagaaagcattgaacacactaaataagaaaataatcattattgatattgtagataaatttgctgatcaatcaaagtgtgaaaaaattggagagttagaatatgaaagttttctaaatactggagatgaaaattttgattggaaaatgcccaaggatgagtggcaggcaatttcattaagttatacatctggaaccactggaaatccaaaaggtgttgtttatcatcacagaggatcttatttgatgtctactggaagtgcagttgcttgggatatgccaaataggttaaatttcttaactatcgtcccaatgtttcattgcaatggttggggttacccgtggaccgtacccatgttaaatggaagaactatttgtttaagaaatattgatgtgaagaagatatttgaattaatagataaatacaatataacccattttggtggagctccgattgtattaaacatgatcactagcgcacctgagtctgatagaaaaaaattaaaacaaaaagtctttgttttaactgctggggcccctccgcctagtataatatttaaaaaaatgaaagaacttggatttgaagttatgcacgtttatggattaactgaaacttatggtcatgtcactcaatgcgcatggaatgagtcttggaataaatttgatgaagaaaagcaaaatgaaattaaagcgaggcagggagttagatatccaaacaccgagggaatagctgttatggatcctaagaccatgaaagaagtatcaaaagatggaaaaactattggtgagattatgattaaaggaaatgttgtgatgaaagggtattttaaagataaagatgctactaacaaagcaatggatggaggatggtttcattctggtgatttagcagtcatgcactctgatggttacgtcaaaattcaagatagatctaaagacataattatttcgggaggagaaaatatatcgtcaatagaaatagaaaatactttagcaaagcacccttcggtttcaatcgctgcagttgtagctaaacctgaccaaaaatggggtgaggtcccttgc

SEQ ID NO: 309649 - DNA, 1642 bp, Unknown
  Bacterial polypeptide expressing nucleotide sequence isolated from the Sargasso Sea
tatggctacttcaaaagatataggtgcctcagatggaaagaaaaataaagctaattattgggctctaactcctatatcgtttttagaaagaacaaataaaatttggcccgaaaaaattgcatggattcatggatctaaaaataacacatataaagaattgcgatctagatgccttaatatagcaaacggtcttaaaattaaaggcattaaaaaaggagataccgtcgcggcacttcttccaaatgtgcccgctatgattgaatgtcatttttcggtaatgatggcaggtgccattttaaatacaataaatacaagactagattcaaaggcaattgcctttatccttaaacatggaaaagccaaaatgatttttgttgaccccgaattcaatgaagtaatcactgaagctattgaatatcttcctttaaaagaaaggcctttaattattaaatgtaaagatgaagagtttataaaaaactcaccaataaaaaatgaaatcactaatgatgatttagcagaaataggaaatattaaatctaccttagagtggccaaatgatgagtgggatgcatgtagccttaactatacatccggtacaacaggagaccccaaaggagttttgtatcatcatagaggggcttggctaacagctatgagtaatcaaatggtttggtctatgggtaaacacccagtttatttatggactctgcctatgtttcattgtaacggatggtgttttccttggactattacagctttagcaggaactcatatatgtcttagaactataagcgcaaaaaatatttatgaatctataacaaaacataatgtaacgcatatgtgtggagcgcccataatattatctatgataattaatgctgaaaaaaatgaaataatagaaattaaaaataaagttaatattatgactgcagctgcagctcctccacctgcaatactagcagaaattgaaaaaaaaggatttgaagttacccatgtttacggattaactgaagtttatggaccagccgtagtatgtgaatggaaagaagaatggaataatttaaaaactgagccaaaatccaaaaaaaaagcaagacaaggagtgcaatacccttctctggaagaactctcaataagagacccaaaaacaatgaaatctattccaaaagatggaaaaacaattggagaagttatgatgcgaggaaatatggtaatgaaaggttatcataataataaaaaggcaactaatgattcattttctggaaactggttccacactggagacctcggggttatgcatgaagatggttatatagaattaaaagataggtctaaagatataattatatctggtggagaaaacatttcatcaatcgaaatagaagaagccttatataaaaatagtaaagttctattagcagcggtagttgctaaaccagataaaaaatggggagaaactccttgtgcattcgtagaattaaaagatggagagaatgctactgaaaaagagataattgaattttgtaaagctcatatcgcaagctttaaatgtccaaaaacaattatatttcaaataattcctaaaacttcaacaggaaaaattcaaaaatttcaattaagagaaatagcaaaagagctttaa

SEQ ID NO: 309650 - DNA, 989 bp, Unknown
  Bacterial polypeptide expressing nucleotide sequence isolated from the Sargasso Sea
accaactataaaaaaagcacttagtatatgtggtaaaaaaataccaataattgatattcatgatgaacaagcaatatttaaggaaggtgaaggagagaaaattggcgaatggacttacgaagaatttctcgaaacaggtgatgataattttaattggtcattacctgaagatgaatggcaagcaatttcattaagttatacttctggaaccacaggaaaaccaaaaggtgtagtttatcatcatcgcggttcttacttaatgtctactggcagcgtaactgcttggaacatgccaaataaattgacttttctgtataccgtacccatgtttcattgtaatgggtggggctacccctggacagctgcattgatacatgccaaaattgtatgttgtcgatatattgtagctaaagatatttatagcttaattgataaacataaagttactcatttcggaggagcgcctatagttttaagcttaattgcaaatgcagatgaaaaggataaaaaagaaattaaacacaaagtgtttgttctaactgctggagcacccccaacaagcgctatattagaaaaaatggacaaccttggctttgaagtaatgcatgtatatggtttaaccgaaacatacggacatattcttcaatgcgcatggaatgaagattggaatcaactttcgaatactgaaaaagctgacattaatgctagacaaggagttcgttatccaaatactgaagaagtttgtgttgcagatcctgagacttatgagccagttccaatggatggaaaaacaataggtgaaattcttattcgaggaaacgttgtaatgaaagggtattataaaaataaagaagctacagagacatcaatgaaaaaaggatggtttcattcaggagatttagcagtggtgtatcctgatggatatattcaaattaaagatcgtttaaaagatataataatatctggaggtgaaaatatttcatcagtag

SEQ ID NO: 309651 - DNA, 1346 bp, Unknown
  Bacterial polypeptide expressing nucleotide sequence isolated from the Sargasso Sea
tacgatcaatactagacttgatgcagatacaattgcgtatattctagatcatagtgatgcaaaacttcttataactgatactcaattttcacctacaatgaaaaaagctttaaaaatatatgggaagaatattcctattattgacattcatgatgatcaggcagtttttaaagatggtgagggtgaacaaataggagaaatgacatatgaagaatttttacaaacaggtgatgacaattataattggtctttacctgaagatgaatggcaagcaatctcactaagctatacatcaggcacaactggtaaaccaaaaggtgttgtgtatcaccaccgtggatcatatttaatgtctacaggaagtgttacggcatggaacatgcctaataaattaacatttctttatactgttccaatgttccactgtaacggatggggctacccttggacagccgctttaatacatgcaaaaattatttgctgcaggtacattgttgcaaaagatatttataatttaatagataaatacaaagtaactcattttggaggcgctcctatagttttaagtttaattgctaatgctgatgaaaaagataaaaaagaaataaatcataaagtatatgtattaactgctggtgctccaccaacgagtgcaattcttgaaaagatggataacttaggttttgaagttatgcatgtatatggattaactgaaacatacggtcatatccttcagtgtgcttggaatgaagaatgggaatcacaatcaaaatctgaaaaagctgatattaaagcaagacaaggtgttcgttacccaaatactgaagaagtatgtgttgctgatccagagacctatgaaaaagttccgatggatggagaaaccatgggagagattttaattcgaggtaatgtagtaatgaaaggatattataaaaataaagaggcgactgaaacatccatgaataatggatggtttcactccggtgatttagcggttgtctatcctgatggatatattcaaataaaagatagatcgaaagatatcataatttctggaggagaaaatatttcatctgtggaagttgaaaatgttgttgctaaacacccagctgtttccttggttgcagtagttgccaagccagatgagaagtggggtgaaacaccatgtgcttttgtagaactagctcctggaaaaaatgccacagaagaggatataattcagttttgtaaagaaaatatggctggatttaaaagaccaaagcatgtaatctttggtgaattaccaaaaacatcaactgggaaaatacaaaagtttgaattaagaacaaaagcaaaggagttataaa

SEQ ID NO: 309652 - DNA, 1327 bp, Unknown
  Bacterial polypeptide expressing nucleotide sequence isolated from the Sargasso Sea
tgatgcagaaactattgcctatattttagatcatagtgatgctaagatattaattacagatactcagttttctccaactattaaaaaggcacttagtatttatggaaaaaaaattccaataattgatattcatgatgatcaagcaatctttaaagatggagaaggggaaaaaattggagattggacgtatgaagaatttttaaaaacaggtgaagataattttaactggtctttacccaaagatgaatggcaagcaatttctttaagttacacttcaggaacaacaggaaagccaaaaggtgttgtatatcatcacagaggctcctacttaatgtcaactggaagtgtgactgcttggaatatgaccaacaaacccacatatcttgcaactgttccaatgtttcattgtaatggatggggttatccttggaccgcagccttagtacatgccaaagtcgtgtgttgtagatatattgttgctaaagatatttataatttaattgataaacataaagtaactcattttggtggagcccctatagtattaaatttaatagcgaatgctgatgaaaaagataaaaaagaaataaatcataaaatttacgttctaactgcgggagcacctccaacaagtgccattttagaaaaaatggataatttaggatttgaagttatgcatgtttatggattaacagaaacatacggtcatgttttacaatgtgcatggaatgaagaatggaataatctttcaaatagtgaaaaagcagatttaaatgcaagacaaggagtacgatatccaaaccttgaagaagcaatagtcgcagatcctgagacacatatccccgttcctaaagatggaaaaacaatgggtgaaattcttattagaggaaatgttgtaatgaaagggtattataaaaacaaagaagcaactgaattatctatgcgaaatggctggtttcattctggcgatttagcggttgtttatccagacggatatattcaaatcaaagatcgttcaaaagatatcattatatctggtggggaaaacatttcatcggtagaggtagagaatgtagtggctaaacaccctgctgtctcattagtagctgttgtggcaaaacctgatgaaaaatggggagaaactccctgtgcttttgttgaattagctccgggaaaacaagctacttcagatgaaataatttcattttgtaaagaaaatatggctggatttaagagaccaaaatatgttatcttcggtgaactaccaaagacttcgacgggaaaaatacaaaaatttgaactaaggaaaaaggcaaaggagatttaa

SEQ ID NO: 309653 - DNA, 1412 bp, Unknown
  Bacterial polypeptide expressing nucleotide sequence isolated from the Sargasso Sea
ttgccgcaatacacctgaacttttagaagctcattattcaattccaatgacaggaggtgtagttaatacaatcaatacacgtctggacgctcaaacaattgcttatattttagagcatagtgatgctaaattattaatcactgatacacaattttcaccaactataaaaaaagccttgagcatttatggaaaaaaaatccccattattgatattcatgatgatcaggcaatttttaaagaaggtgaaggagaaaaaattggtgattggacttacgaagaatttttaaatacaggcgatgataattttaattggtcctttccagaagatgaatggcaagcaatatcacttagctatacttcaggcacaacaggaaaacctaaaggagtcgtttatcatcataggggttcatatcttatgtcaacaggtagtgtaacagcttggaacatgacaaacaaactaacttttcttgcaacagtacccatgtttcattgtaatggttgggggtacccttggacagcggcattagtccatgccaaagtggtctgctgtagatatattgttgctaaagatatttataatttaatagataaacataaagtaacacattttggtggagcaccaattgtattgaatttaattgcgaatgctgaagataaagacaaaaaggcaattaaacataaaatttatgtacttacagcaggagcaccaccaacaagtgcaattttagaaaaaatggataacttaggatttgaagtaatgcatgtatatggactaaccgaaacatatggtcatgtattacaatgtgcatggaatgaagaatggaataatttatctaatagtgaaaaagcagatttaaatgcaagacagggcgtgcgctatccaaatcttgaagaagctatagttgctgatcctgagacaaatactcctgttccaagagatggcaaaactatgggtgaaattttaatgcgtggaaatgtagtaatgaagggatattataaaaataaagaggcaactgaaacttcaatgagaaatggctggtttcattctggtgatttagcagttgtatatcctgatggatatattcaaataaaagatcgctctaaagatattataatttctggtggagaaaatatctcatcagtagaagtagaaaatgtaatagctaagcacccagcagtatcattagttgcagttgttgccaagccagatgaaaaatggggtgaaacaccatgcgcctttgtagaactagcgcctggaaaaaattccacagaagaggaaattattcagttttgtaaagaaaatatggctggatttaagaggccaaaaaatgtaatctttggtgaattaccgaaaacatcgacaggcaagatacaaaaatttgaactaaggaaaaaagcaaaggagatttaat

SEQ ID NO: 309654 - DNA, 1633 bp, Unknown
  Bacterial polypeptide expressing nucleotide sequence isolated from the Sargasso Sea
atgagtaattttgatacaaacttagataaaaattcagctaattttgttcctttatcaccattgagttttataactcgtgtaaaagatatttatccaaattacgactctttagtttatggcaataggagttatacttggcttcaaacttacaatcgatgcaccaagtttgctagtgcattagaaaaaaaaggaattacaaaagggagtaccgtttcaatcatagctgcaaacactccggaattattcgaagcacattattctattccaatgactggaggtgttataaatacgataaataccagacttgatgcagaaacaattgcatatattttagatcatagtgatgcaaaacttctaatatctgatactcaattttctgctataatgaagaaagctatgcaaatatatggaaaaaatattcctattattgatatacatgatgaacaagcaattttaaaagatggtgagggcgaacaaattggagaaatgacatatgaagaatttctaaaaacgggtgatgataattatagctggtctttacctgaagatgagtggcaggcaatctcattaagctacacatcaggcacaactggtaaaccaaaaggtgttgtttatcaccaccgtggatcatacttaatgtctactggaagtgttacggcatggaacatgcctaataaattaacatttctttatacagttccaatgttccactgtaatggatggggatacccttggacagctgctttaataaatgcaaagattatttgctgcaggtacattgttgcaaaagatatttataacttaatagataaatacaaagtaactcattttggaggcgctcctatagttttaagtttaattgctaacgctgatgaaaaagataaaaaagaaataaaccataaagtatatgtacttactgctggagctccgccaacgagcgcaattcttgaaaagatggataatttaggttttgaagttatgcatgtatatgggttaacagaaacgtacggccatattcttcaatgtgcttggaatcaagaatgggaatcacagtcaaaatctaaaaaagctgatattaaagcaagacaaggtgttcgttatccaaatactgaagaagtttgtgttgcagatccagagacttatgaaaaagttccaatggatggagaaaccatgggagagattttaattcgaggtaacgttgtaatgaaaggatattacaaaaacaaagaggcgactgaaacatccatgaaaaaaggatggtttcattctggtgatttagccgtcgtctatcccaatggatatattcaaataaaagatagatcgaaagatattataatttctggtggggaaaatatttcatctgtagaagttgaaaatgttgttgcaaaacatccagctgtttccttggttgcagtagttgccaaaccagatgagaagtggggtgaaacaccctgtgcttttgtagaattagcacctggtaaaaacgccacagaagatgatataattgagttttgtaaagaaaatatggctggatttaaaagaccaaagcatgtaatctttggtgaattaccaaaaacttcaactgggaagatacaaaagtttgaattaagaacaaaagcaaaggagttataaa

SEQ ID NO: 309655 - DNA, 1477 bp, Unknown
  Bacterial polypeptide expressing nucleotide sequence isolated from the Sargasso Sea
atggttgaaaagaaatcaatagaaaaagatgctataattttcaaagatcaacactggacattttcgcatttaaataaattaataaccaaaacatctttatttcttcaaaacgagtgccaactcaaagttggtgatagattttgttattatggcaccaataacccagaacaaatagttcttctttttgctgcatcaaaaatcggtgcaattatgttcccaattaattggagattagccaatccggaaattgaatatttgataaatcattcaaaccctaatgtgattttttttgatactaaatttgaggataaaatttctcagatacatattccaagaagtattaaaaccatcacagtaggtaattcagaaattaatcaaaaaagcttagaagctagaagattgtcttgtaatggaagaattaaaagatcgataaaaaataatttgccattattgttagtttatacatctggtactacagggaaaccaaaaggagctcttttgggacagaaagctataatcagtaatgccaaaatgagccatgatgcacattcattgaaatcttctgacaaagtattaatttcacttccattattccatgtgggtggaatcaatattctttttctaccagcccttttaaaaagtgcaacagttgttttacaggaaaaatttgaaccagatcaagccctagaaattataagaaaatttaaaattacaaaaatgataacagttcctacaattttagaccaaatgattaaaagtaaattttggattaaggctaattataaatatttgcaagttatatcaattggttctacgaatgtacctaaatatttaataaaacaacttcatttaataaatatacctgtaatccaaatatatggtgcaacagagacagggcctttagcaatttatcaaaaagttaaggatgcttttaaaactgaagggtctataggaaaggccggttcgctttgtaagataaaattagttgatgaagattttagtgaggtttcaattggccaacctggtcaaatacttgttaaaggggaaaatatacttgaatgctattggaatgacgaaactgcttctaatgagagtattaaagatggttggtttttttcaggagacatagctaagattgatgaagatggtaattactggtttatagatagaattaagaatgtaataatatccgggggtgaaaatatttatccagctgaactagaggttctattgtcaaacaataaagatttagttgaatactctattgttggcaaacatgatgttaaatggggagaagttcctgtaattgttgcggtgaaaaaaaataagtctgtaacatcggatcaaatattatatatatttaatgaaaaagttgctcaatataaaattccgaaagaagttatttttgtaaataatataccaaaaaatgcattaggaaaaattgagattgacaaagttaaacaattagtaaactgat

SEQ ID NO: 309656 - DNA, 1366 bp, Unknown
  Bacterial polypeptide expressing nucleotide sequence isolated from the Sargasso Sea
atgactggcggtgttattaatacgatcaataccagacttgatgcagaaacaattgcatatattttagatcatagtgatgcaaaacttcttataactgatactcaattttcacctacaatgaaaaaagctttaaaaatatatgggaagaatattcctatcattgacattcatgatgatcaggcggtttttaaagatggtgagggtgaaaaaattggagaaatgacatatgaagagtttttacaaactggtgatgacaattataattggtctttacctgaagatgaatggcaagcgatctcactaagctatacatcagggactactggtaaaccaaagggtgttgtgtatcatcaccgtggatcatatttaatgtcaacaggaagtgttacggcatggaacatgcctaataaattaacatttctttataccgttccaatgttccactgtaacggatggggctatccttggacagctgctttaatacatgcaaagattatttgctgcagatatattgttgcaaaagatatttataatttaatagataaatataaagtaactcattttggaggtgctcctatagttttaagtttaattgctaacgcagatgagagagataaaaaagaaataaatcataaagtatatgtattaactgctggagctccaccaacgagtgcaattcttgaaaagatggataacttaggttttgaagttatgcatgtatatgggttaactgaaacatacggtcatattcttcaatgcgcgtggaatgaagaatgggagtcacaatcaaaatctgaaaaagctgatattaaagcaagacaaggtgttcgttatccaaatactgaagaagtttgtgtcgcagatccagagacctatgaaaaagttccaatggatggagaaaccatgggagagattttaattcgaggaaatgttgtgatgaaaggatattacaaaaataaagaggcgactgaaacatccatgaaaaaaggatggtttcactctggtgatttagctgttgtctatcctgatggatatattcaaataaaagatagatcgaaagatattataatttctggtggagaaaatatttcatctgtggaagtggagaatgttgttgcaaaacatccagctgtttccttggttgcagtagtcgccaaaccagatgagaagtggggtgaaacaccttgtgcttttgtagaattagcacctggaaaaaatgccacagaagaggatataattcacttttgtaaagaaaatatggctggatttaaaagaccaaagcatgtaatctttggtgaattaccaaaaacttcaactgggaagatacaaaagtttgaattaagaacaaaagcaaaggagttataat

SEQ ID NO: 309657 - DNA, 928 bp, Unknown
  Bacterial polypeptide expressing nucleotide sequence isolated from the Sargasso Sea
gccatgctcacgcaccgcaacctggtggccaacgtggagcagttcaaggccttcgtgcccgatgccctgcgccccgcgcaagaggtcatcgtcacggccattccgctgtatcacatcttcgcgctgatggtgaacctgatcagctactttgcggtgggcgcacgcaactggctggtgcccaacccgcgtgacctggacgcgctgatcgatgtgttgaacgccgcgcgccccagcgtgttcatgggggtcaacacgctgtacgccgggctggcggcgcaccctggcacgcagggcgtggacttctccaacctgcggctggcgggcggcggcggcgctgccatcctgccctcggtctctgcccgctggcaggccatcaccggccagttcatccgcgaaggctacggcctgagcgagaccagtcccgttgtggccttcaaccccgcatcggtcacggctttcagcggcagcaccggcctgcccctgccttccaccgacgtgctgctgctggacgagcaggaccaccccgtgcctctgggccagcctggtgaggtctgcgtgaaaggcccccaggtcatgggcggctactggcagcagcccgaggccaacgccgcagcatttacccgcgacggatacttccgcaccggcgacatcggccaactggacgagcgcggcttcctcaagatcgtggaccgcaagaaggacatggtcatcgtctcaggcttcaacgtctttcccaacgaagtcgaagccgtggccaccgcctgccccggcgtgctggaatgcgcctgcatcggcgtgccggacgagaagacgggcgaggcgctgcggctgtatgtggtgcgcgcggcgggcactgcgccaccggtggatgcagaccagatcgcagcacattgccgcgccgcactcaccccctacaaggtgccccggc

SEQ ID NO: 309658 - DNA, 802 bp, Unknown
  Bacterial polypeptide expressing nucleotide sequence isolated from the Sargasso Sea
atgttatgggaaaaaaaatacccagaagatgtggattggaactcagatataaaagggcaacctctttattcagttttagataatacagtaaaaaattttggcaataggccatgtatagattttcttggaaaggaatttagctataaaaaaatatccaatatgatagataaagctgctcttggttttcaaaagttaggtgttgccaagggaacaaaagtaggactttttcttccaaattgccctcagtttgttgtttcttattttggtattttaaaagctggtggtgtagtagtaaattttagcccattgtatgctgaaaaagaaataattcatcagttagaagattctgatactgatattatggtaactttaaatttaaaggtgttgtatcctaaaatatttaacttgttaactaaaactcgattaaagaaaatagttgttgggactttagcagaagttattcctttcccaaaaaatatcctttttccactagtaaaaagaaaagaaatatcaaattttgaaattactactgatataattacttttgctgaacttttaaataatgatggagactacaaaagtattaccgtagagccggatgaagatattgctgtattgcaatatactggtggaacaactggggtttcaaaaggagcaatgcttactcactcgaatctttatgcaaacttgattcaagaaagattatggttcccaggttttaatatgggagaagaaagtgttatggcagtcttacctttttttcatgtttttgctatgactgtagttatgaatatgtctgttc

SEQ ID NO: 309659 - DNA, 737 bp, Unknown
  Bacterial polypeptide expressing nucleotide sequence isolated from the Sargasso Sea
ttacctctttttcatatattttcttttactgtaaattgtctaacctttttaaaaatcggagcagagaatgttctaatagcaaacccaagagacctaaaatcttttcttaaggttcttaaaaagaaaaaatttacagtcatgactgccgtaaatactttattcaatcttctcttaacaagtaaaaaatttaaagagttagacttctcaggatttaaattttctgttggtggaggtatggctgttatgagtgagactgcaaaaaattggaaaaaagttacagggactaatattactcaaggatatggattaacagaaacatcacctgttgtttcaatcaataaaattgataacccttttaatggaagtataggactccctgtacagtcaacgaatataaaaattatagatgaaagtggaaagaatgtagatgatgagcagcctggcgaattatgcgttaaggggcctcaggttatgtcaggttactggaaatataaagaagatcaggagaacccatttacagatgatggtttttttaaaacaggagatattgcagcaattagcaaagatggatacctcactatcgttgatagaaaaaaggatatgataatttcatcaggatataatgtttttccaaatgagttagaggatttcttatcaactcaccctgatattcttgaagctggcgttattggtgtacctgataaaaatagaggggaatatatcaaagtatttattgt

SEQ ID NO: 309660 - DNA, 865 bp, Unknown
  Bacterial polypeptide expressing nucleotide sequence isolated from the Sargasso Sea
tctgtcaattttgcttattaacctagagaaagtaataaaagatactaatatagaacacgtgataatctccgacatgggagatatgcttggtgttttgaagggtacacttgtgaactttgttgtaaagtatgttaagaaaatggtaccaagttattctattgataatttttatacttttaaggatgcaatatctaagggtaaatcatacacatataatcaggttaaggttgagtcaaatgatatagcttttcttcagtatacaggcggaacaacaggtgtgtcaaaaggtgctatgttatctcataaaaatgttatatctaatgtaattcaagtttcatcttggatggatattatgttagaagaaaagaaagaaattgtgattacagcattaccactatatcatattttcgctttagtatgtaatgctttagttatgttcaagtatggcgcaagaaatatactcattacaaatccaagagatatggatggttttattaaagaattatcaaagtataatttttctattattactggcgtaaatacactctttaatggattgctaaataactcaaaattttcaaatttggattttaataatttaaaagtagcatttggaggtggaatggctgtccaagatattgttgcaaataaatggaaatcggttacgggttgtcctttggttgagggttatggattaacagaaacttcgccagttgtgacaattaatccattggacggaacaaataagattggtacaattggattaccaattcctcaaactgatgtgaaatttattgatgatgcaggaaaagaagttcctcatggtgaaagaggagaaatttgtgtttatggacctcaggttatg

SEQ ID NO: 309661 - DNA, 641 bp, Unknown
  Bacterial polypeptide expressing nucleotide sequence isolated from the Sargasso Sea
aatgaacttagccgctctattggagaagtctgcccgccgttttggcgaccgtcctgcgatcgcactggggcacgaacttttttcatcctatcaaaatacagcagaacgggtcgcgcgactggcgggcggtttgttgagaagaggcctcaggcccggggaccgcatcgccattgccatgaagaattgcccacaatatagcgatattctattcgcctcctggcacgccggcgccaccgccgttccaatgaatgccaaattgcacagccgggaatttgcctacatgcttgatcattcgagcgcacgtctctgcttcgtaaccgaagacctggaacccgtgatccgagccgccgcgatggagacacaatctggtgtcgaaatcattgtggccaacagtcaagagtatgacgcactgctgaaaaacaacctagcgccgctcgcccagctggagccggacgcgacagcctggatattttataccagtggcacaacgggccgacccaagggggccatgctcacgcaccgtaacttattaatgatgacggttagctattttggtgacgtcgatgccatagacgagaccgagagcctactccacgcagctccgatgtctcatggttccggcctttatatcttgccgtatg

SEQ ID NO: 309662 - DNA, 906 bp, Unknown
  Bacterial polypeptide expressing nucleotide sequence isolated from the Sargasso Sea
ctgtgcctgccgaactgcccctatttcgcgatattgtacttcgcggcgctgcgcgtgggtgcgatcgtggtcaacttcaacccgctctacacggagcgcgaactggagcatcagatccgggactcgggaacgcgcatgatggcggtaccggacgtccggataatccacgagaaagtgcaagccgtcgcgccacgtgccgggctggacaagatcgtgttgtgcggcatgagggatatgctgccctggctgcaaggcctgggctttgcgctattcaagcgaaaagaccacgcgcggatactcgacgaaggccttcatgtccggctcaaggcgcttctcgcccatgatgccgaacctgacgcggtagaacgtcaccctgatgatgtcgcggtccttcaatataccggaggcacaaccggcgtgcccaagggcgcaatgctgacccacgccaacctcacggcgaacagcgcccagatggtggtgcatgtgggaggacttcgcccgcagcaggagagaactctcggcgtcctgcccatgtttcacgtcttcgcactcacgacggtgctcaacttctcagtcgaaatcggcgccgaaatcgtcctgctgccacggtttgagatgaagcaggttctcaacacgatgaagcgcaagccgccgacacagttcttcggcgtgcctacgatctatgttgccctgaacgcgcttccggacgacgagatacccgatctctcggccgtgcgcgcctgtatatccggcggcgcaccgctcccgctcgaggtacgcgaggagttcgaggcacgcacgcgtgccagggtcgtggaaggatatgggctctccgaaaccgccccgatcatcgcctgcaacccgttgtttgggacggtgaaggacaatagctgcggcccaagtttc

SEQ ID NO: 309663 - DNA, 933 bp, Unknown
  Bacterial polypeptide expressing nucleotide sequence isolated from the Sargasso Sea
tttgcattttaaaacgggtttgattgttgataatattaacccgctttttacttcaagagaattaaaagctcaactaaatgactctggttctgaaacgattataattgcagaaaattttgcattcaatttacagaagataattcatgaaacatcaataaagaacataattattacttctttgggggactttattggctttaaaggtcaaattataaactttattattaagcatataaaaaaaatggttcccaaatataatcttccaaatgcaaaaaattttaagaaagtacttaatgaaggttctaaatataattttgaagaacaaaaaattaatagtgaagatatagcatttcttcaatatactggtggaacaacagggggtattaaagctgcaattttatcccataggaatattttagctaatgcaattcaagtaagagaatggctgggaaagcaacttaggtttggagaagatattgccatatgtgccttgccattatatcatattttctctttgacttgtaactctattgtttttttctattttggatcaaataatattcttatcactaacccaagggatattaggggttttgtaaaagaattaaagaaataccaatttacatttataagtggtgttaacactttatttaataaattactcgaagaaccaaaattctccagctgtgatttttcaaaattaaatatttcaattgctggggggatgcctgttcagaagtccgtaggtgatcgttggcaaaaagttacaggatgtttgttagttgttggatatggtttgtcagagactgctcccgctgcttctatagaccctataaatggtaaagcttttagcgatactattggtctacccttaccttccacagaaatgagtattcagaataaaaaaggggaaattttatctgcaggagaggt

SEQ ID NO: 309664 - DNA, 892 bp, Unknown
  Bacterial polypeptide expressing nucleotide sequence isolated from the Sargasso Sea
ctgcccaatacgccggtcaaacacatcgtggtggccagcatgggcgacttgctgggcgggctgaagggcatgctggtcaatttcgtcgtgcgcagcgtcaagaagatggtgccggcgtgggaactgcccaactgcatccgcttcaacaccgcgctggaagaaggcgccaagcagacgctcaagccgacttccgtcggccccgacgacgtggccttcctgcaatacacgggcggcacgaccggcgtgtcgaagggtgcgacgctgctgcatcggaacatcgtcgcgaacgtgttgcaatcggaagcctggatgaacccggcgctcaccaagcctggtcgcgatggccgcatgctggccgccgacgaagagatcgtcacgatcaccgcgctgccgctgtatcacatcttcgcgctgacggtgtgctgcctgctgtcgatgcgcaagggcgggctggccgtgctgatcccgaatccgcgggacatcccgggcttcatcaaggtgctcaagcagtaccgcttccacatgttcccggccgtgaacacgctgtacaacgcgctgctgaacaaccccgaattcaaggatgtggactgctcgaacctgcgtgtggccaacggtggcggcatggcggtgcaggaggccgtggccaagaagtggctcgaggtgacggggtgcccgatcatcgaaggctatggtctgtcggaaacctcgccgtcggccatctgcaaccccacggataccgataagttctcgggtaccgtcggcctgccgattcctggcacggaaatcgccattcgcgacgacgaaggccgcgacttgccgatcggccagccgggcgaaatctgcatccgcggcccgcaagtcatggctggttactggaagcgcccggacgaga

SEQ ID NO: 309665 - DNA, 196 bp, Unknown
  Bacterial polypeptide expressing nucleotide sequence isolated from the Sargasso Sea
aaaaatgacagggaacttgtaaaattgtttgtatctgtagtagagggtgaaactataactgaagacgagattttagaacattgcagaaataaccttacagcttataaagttccaaaattacttgaaattgttgatgaaatacctaagtcgaatgtaggcaaaattttaagaagagaattaagggagaaaaattaaa

SEQ ID NO: 309666 - DNA, 151 bp, Unknown
  Bacterial polypeptide expressing nucleotide sequence isolated from the Sargasso Sea
ggatacgttaacagaacaggatattattgcagcttgccgcaaacatttaacaaactataagattcccaaggccatagaatttagggcgacgcttcctaaatctaatgttggaaaaatactacgacgtgagctcaggcatcagtcatcatga

SEQ ID NO: 309667 - DNA, 919 bp, Unknown
  Bacterial polypeptide expressing nucleotide sequence isolated from the Sargasso Sea
attacttttgatgaatatagttcattagtagatatgtttgataaaacttgtgatagatttcaatccaaaaaagcatttactaactttggtaaatcaatttcttttaatgaaatttatattaaatctcaaaatctagcaaaatttcttcaaaatgacttaaaactagaaaaaggatccagggtagcaattatgatgcctaatcttttacaatatcctataagtacttttggtattttaaaagcaggtttaattgttgaaaatattaatcccttgtacacagaaagagaactagaaattcaattatcaaactctcaatcagaaactataatcatattagataattttgctcacttaattgaaaaaatattacataaaaccaatattaaaaatattatcattacttctgtcggagaattacttggtctcaaaggttatcttatgaattttgttttaaaaaaaataaaaaagatggtgccaaattataatttacttaaattgtataggtttaaagatattattaataataaagataatatttcgctacaatcagtttcaattcatttagatgatgtagcttttttgcaatacactgggggtacgacaggctctgtaaaagctgctatgcttacacataaaaatatattgtctaatgtttttcaagtcaaagaatggttgggctcgcaattaaaatatggtgaagatattgctatttgtgctttacctctctatcatatttttgctttaacttgtaattctcttacttttttcaattttggagcaaataatattttaattacaaatccaagagacataccttcatttattaaagaattaaaaaagcataagtttacttttattagtggagtgaacacattatttaataagttattattagaaaatgaatttagtaaatgtgatt

SEQ ID NO: 309668 - DNA, 1492 bp, Unknown
  Bacterial polypeptide expressing nucleotide sequence isolated from the Sargasso Sea
ctgtttcttaagagagtgcttgagcacggtgacaaggttgctttacgcgaaaaggactttggactgtggaacgaatatagctggagtgattggggagactttgccaaatgggtgggtttaggcctggcgtctttgggtttttctcgaggagatgtttgttccattgcctctgaagtaaataaagagtggatgttcgccgatttgggcgtgattacaatgggcggggtgaccaacggcgtataccccacagatgctcctaaccaggttgagtatctaatcactgatagtggcacccgtttttattttgccgaagatgaggaacaactcgataaagtgctcgaggtgcgagaacgcacaccgaccttagagaaaataatcatttttgacatggaaggcctgcgtaattttgatgaccctcagtgtctgagcttcacaaaattaattgagctgggacaacaatacgagttggatcaccctcgactatggtcggaagaggttggtaaggcaggtcccgatgacttgatgatccttacttacacttctggaacaaccggtccgccgaagggggcgatgattagtcaacaaaacatgatgtacatgatgaaaaatctgcaatctgtctacggaatttatccggaggatgagcagctagggtttttgccgttggctcatattgctgggcgtatgttctatacttttgctgtaatagaggcttgctcgaccattaatctgattgaagaaccagaaaccgcggttagagatcaacaagaaattgctcctactattcactttgctgtccccagggtttgggagaaacagtactcgctagtgaccatcaaagtaaaggaggccacgtggattggtcgttggtcatacgagtttgcaattaaccttggcgctagagtagctgaacaacgaaaaaagggattggtcgcgagatggtggttaagggttgcgcactttctagcggattttttggtactaaaaaatattcgtatcttattgggtattgatcgttgtcgatggttatctaccgcagctgctccaatagcgcccgacctgatcgactggttctgggctctgggtaagccgatgtacgaagtgtacggtcagacagagtgcactggtattgctacagccaatacgtccaaagataaccgcgtgggatctgtgggcagagcgacatacgggaccgaagttgtcttgtcggaagacagggagattctgatcaaaggaccaggcgtcatccagggatattggaataaacctgaaaagacagctgagacctttgttggcgactggttacacacgggtgatgtgggccgaattgatgaagacgggtacatctacattgtcgacaggatgaaagatattatcataactgcgggcggaaagaacattacgccaagcgagatagagaaccagcttaaattttctccctttgtttctgatgcggtggttgtgggagataagagaccttatttgacttgcc

SEQ ID NO: 309669 - DNA, 990 bp, Unknown
  Bacterial polypeptide expressing nucleotide sequence isolated from the Sargasso Sea
tatgaataataaatggacagaacaatacccaaataatctcaatagcgaaattgactgtatagatgatagtacagttactgatttgttggagtctgctgttaacaaattttcttccaatacagcattctactcacttaatacatcaatagattataaaatgacgagcttgctatccaagagaatagccgcttaccttcaatatttaggtgtaaccaaagatactaaagttgcaataatgctcccaaatttactgacatatcccataacactttttggttcttattactgtggagctacggttgttaatatcaaccctatgtacaaatcacgtgagatcaatgacatccttattgactctgaagcagaatacatatttgttttagataaattttatcaggaactccaaccatgcatacctacctcaaagttaaaaaaaatcattgtttgtaagataaccgatcttttaagcccgtttatgagaatagtaattccaatagtaatgctctacaaaaagcagtcagtgagcataaaaaaacaaaataacattgtcttttttaaagatattatatccaataacttttcattcgaagacatattaattgatgaaaatgatatagcacttcttcagtacacgggtgggacaactggaaaatctaaagcagcaatattgacacataagaatcttttaagtaatgttcagcaagtctctaattggatcgaaccacatataaagcaaggccaagagatcattatcactgcattacctttgttccatattttctcattcactgtcaactgtctcacgtttcttaagcttggctcggagaatgttttaatagcaaatccaagagatctagattctttcatcaaagtattaagtaaaaaaaagttcacagtaattactgctgtgaatacattatttaatcttcttcttacaagtagaaaatttagggacctagacttctcaaattttaaattttcagttggtgg

SEQ ID NO: 309670 - DNA, 1374 bp, Unknown
  Bacterial polypeptide expressing nucleotide sequence isolated from the Sargasso Sea
aatgacagcgaatagaaataagccatggttaaagagttacccagagggtacaccagaatttattaccttggattcaagaaaaaccatcgtcaaattattagatgaggctgagtcgaactatccagataatgatgctttcgtcaattttggagtttcattgagttacaaagatgttcaaaccaaatcaaagaaattcgcagcttatttgcagaatgttttaggtttaaaaaagggggatagaattgcaatgatgatgccaaatttattgcaatatcccgttgctattttcggtgcattgcgagcaggactcattgttgttaatgtcaatccactctacacacctagagaactagagcatcagttgagagactctggctcaaaggcaatattgatttttgaaaactccgcacatgtcttgagcgctgttatcgaaaatactgaaatcgagcatgtcattattaccaagattggtgatttcttaggtcccattaaaggatcgctcatgaactttgtggtgaaatatctaaaaagaatggttcctaaatattctttgcctggaaatattgatttcaaatcaacactgggaaggccagtaacagatttagacgaagcaccaatttcaattgatgatttggcatttttgcaatatacaggcgcaaccactggactttcaaagggcgcaatgctctcgcatggtaatgtgattgcaagtcttgagcagcttgaagcaatgttggttgatgtgattgaagaggatgggagcgatatttatatcaatgcactgcccatctatcatatctattcgttgtctgttctggttttggcaggttatacgaatggaggcctcaatgtgctgatcacaaaccctagagatactgatgggtttgttaaagaaatcaggaagtggcgctttactttctttaatggtgtaaacactctatatgaaagcctgctgaaccatccagaaattaaaagtgtcaattttgactctatgaaactctctggcacaggcggttcagcttgcagaaaatcaactgcagaaaggtggcaagagctgaccggcaatgttttactcgagggttacggactctctgagacatcgccaagtgtttctgtttctccatcatatttaacaaaatttaatggatttgttggactgcctgtacccagtactgaaatttcaattcgtgatgaaactggcaaacaagtcagaagaggtgccccaggagagatttgtgttaagggacctcaagtgatgcagggatactggaataatgaagaggcgacaaaggaggccattgatgaagagggtttctttaaaacgggagacattgggacattaaacagtgatggtttcatcaagatagtggatcg

SEQ ID NO: 309671 - DNA, 1672 bp, Unknown
  Bacterial polypeptide expressing nucleotide sequence isolated from the Sargasso Sea
aatgacagcgaatagaaataagccatggttaaagagttacccagagggtacaccagaatttattaccttggatccaagaaaaaccatcgtcaaattattagatgaggcagagtcaaactatccagataatgatgctttcgtcaattttggagtttcattgagttacaaggatgttcaaaccaaatcaaagaaatttgcagcttatttacaaaatgttttaggtttaaaaaagggagatagaattgcaatgatgatgccaaatttattgcaatatcccgttgctattttcggtgctttgcgagcagggctaattgttgttaatgtcaatccactctacacacctcgagaactagagcatcagttgagagactctggctcaaaggcaatattgatttttgaaaactccgcacatgtattgagtgctgtcattgaaaatactgaaattgagcatgtcattattaccaagattggtgatttcttaggtcccataaaaggatcactcatgaactttgtggtgaaatatctaaaaagaatggttccgaaatattctttgcctggaaaaattgattttaaatcaacactgggaaggccagtaacagatttagatgatgctccaatctcaattgatgatttggcatttttacaatatacaggtgcaaccactggactttcaaagggtgcaatgctctcacatggaaatgtgattgcaagtcttgaacagcttgaagcaatgttggttgatgtgattgatgaggatggcagtgatatttatatcaatgcactgccgatctatcatatctattcgttgtctgttctggttttagcaggctatacgaatggaggcctcaatgttctgatcacaaaccctagagatactgatgggtttgttaaagaaatcaggaagtggcgttttacattctttaatggtgtgaacactttatatgaaagcttgctgaaccacccagaaattaaaagtgtcaatttcgactttatgaaactctctggcacaggcggttctgcttgcagacaatcaactgcagaaaggtggcaagagctgaccggcaatgttttactcgagggttacggactctctgagacatcgccaagcgtttctgtttctccatcatatttaacaaaattcaatggatttgtcggactgcctgtacccagtactgaaatttcaattcgcgatgaaactggcaaacaagtcagaagaggtgccccaggagagatctgtgttaagggacctcaagtgatgcagggatactggaataatcaagaggcgacaaaggaggccattgatgaagagggtttctttaaaacgggagatattgggacactaaacagtgatggtttcatcaagatagtggatcggaaaaaagacatgatattggtttcgggattcaacgtatatcccaatgaaattgaggatgtagtaagccttcatccagagattattgaagctgcatgtattggtgttgatgatgaaaaaacaggtgaagcagtgaagttattcgttgttaaaaataatccaagtttgagtgctgatgaagtgatggactattgcagagataatttcacaggctacaaggttccaaagcacattgagttcattgatgagttaccaaagtcaaatgttggaaaagtattgaggcgatcacttagagagtaa

SEQ ID NO: 309672 - DNA, 1153 bp, Unknown
  Bacterial polypeptide expressing nucleotide sequence isolated from the Sargasso Sea
agtgaaaccctaggcagtatagacaatgatactataattgatctactgaatcattcagctagaaaatatgaatctaaaatcgcatattacagtttaaatagttcattaaattacaaaatgactagcctattagccaagaggctagcagcttacttacagtatcttggtgttagaaaaaatacaaaaatagcaataatgctcccaaacctgctcacatatccaatatcactatttggttcatactactgcggagctactgtaataaatgtaaatcctatgtataaatctagagagatacaacacctcttagaggattcagaggcagaatatatatttgtattagataagttttacaatgagctccaaccatgtattaaaaattctaagcttaaaaaaatcatcatttgtaaagttaatgatttattaaacccattaatgaagtttgtcgttcccatggtaatgctttgtaaaaagcaaacagttaatattgagaagaataataaaaatatttattttaaagatattatttctaataattttgggtttgaagatgttcatgtagaacaggatgatatagctcttcttcaatatacaggtggaaccacaggtaaatcaaaagctgctgtcctcacacataaaaatcttttatctaatgttcaacaagtatcaaactggatagaaccacatataaaatctggtgaagaaataataattacagctttacctctttttcatatattttcttttactgtaaattgtctaacctttttaaaaatcggagcagagaatgttctaatagcaaacccaagagacctaaaatcttttcttaaggttcttaaaaagaaaaaatttacagtcatgactgccgtaaatactttattcaatcttctcttaacaagtaaaaaatttaaagagttagacttctcaggatttaaattttctgttggtggaggtatggctgttatgagtgagactgcaaaaaattggaaaaaagttacagggactaatattactcaaggatatggattaacagaaacatcacctgttgtttcaatcaataaaattgataacccttttaatggaagtataggactccctgtacagtcaacgaatataaaaattatagatgaaagtggaaagaatgtagatgatg

SEQ ID NO: 309673 - DNA, 1621 bp, Unknown
  Bacterial polypeptide expressing nucleotide sequence isolated from the Sargasso Sea
catgcttgatctcggccgaacctatctgcaaagcgttgagcgcagcccgaacgcgctcgctctggtcgatggcgacatgacgctgacctacgcgcagtggcatcgcatcattgagaatgtcgccgaaggcctgcgcgaattgggtctcgcgcacggggaccggctgctcgtcgtactgcaaaaccgctgggaaatggccaccttgcactgggcctgccagttcgccggtatcgtgatcgtgccgttgaactggcgtgcgaagcctgaggagctcgattactgcgtgaccgatgcgggcgtgaaggccatcgtctatgaaccggtcagtgccgaagcggtcacgcaaagtccggctgcgcaaactctgccgcgcatcgggctcgacgacgcgcaaggccgcaccgccggtttcgcaacactcctcgccgagcgctcgcgtgatgccggtatccagaccactcgcgcgaatgcggacgactactcgctgattctttacacgtcgggcaccacgggcaaggccaaaggcgtgccgcgccgtcaccgtcatgaacgggccgccgcgctcgcccatgtcgcgcagaatctgtaccggcatggcgaacgcacgctcggggtgatgccgctgtatcacacgatgggcgtgcgctcgctgctctcgatggccatggtcgacggcgtcttcgtttgcgcacgccgttggaacgcccgtttcgcgctcgattcgatcgcgcagtatcggatcagctgtctttatctggtgccgacgctttatcacgatctgctcgccgatccggctttcgccgcaatcgacacgacctcggtgaaaaagctcggctttgccggcgcgccgatgaacgacggcttgctcaagcggctctcggctgctttcaaaccggaactgttcgtcaatcattacggctcgtcggaggtgtacaccttcagcatcgatcaggacgcgacgcgcaaaccgggcagcgcagggcgcgccggcatcaatacgcgcctgcgcgtcgtgaagctcgatgcgcaaacgccggaggatcttgcacaggttggcgaagaaggccagatcatcgcggacctgctcggcgacgaagctttcgaaggctactggaaccgcccggacgccaacgccaaatcattgcgcgacggctggtatttcaccggcgacaccggcttcttcgacctcgacggcgacctgtacgtgtccggacgcgtcgacgacatgatcatcagcggcggcgagaacatctcgccggtcgatatcgaatcggtgctgtctctgcatcccgccgtcgacgaggtggcggtcgcgggcgtgaaagacgagcggtggggccagcgggtcgtcgccttcgtcaaacgccgcgaatacgtcgatgccgaaacgctcgatgcgtattgccgaacgtccaatctcgtcaacttcaagcggccgcgcgattacgtcttcgtcgacgacattccgaagtcgccggtggggaagatcttgcgccgcaagctgtccgcgggcgagtacgaacgcgacggccgtgatcagcctgatgacgccaatgacggcgaccgcagccgcgccagcggcgcattcattgccacacacacggaaactaccaaggagtaa

SEQ ID NO: 309674 - DNA, 1672 bp, Unknown
  Bacterial polypeptide expressing nucleotide sequence isolated from the Sargasso Sea
aatggcaacgaacagaaataaaccttggttaaagagctacccggaaggcacgcccgaatttattaccttggatccaagaaaaacgatcgttaaattattggatgaggccgaatcaagttacccgcagaacaatgcttttgtgaattttggggtatcaatgagctatcaggatgttcaaaccaaatcgaaaaaatttgctgcttatttgcaaaatgtattgggccttaagaagggagatagaattgcaatgatgatgccaaatttattgcaatatccagttgcaatttttggcgctcttcgagcaggcttaatcgttgtgaatgttaatcctctctacaccccgagagagctggagcatcaactaagagattcaggcgcaaaggcgatattgatttttgaaaactcagcacacgtcctgagtgctgtaatagagaacacagaaattgagcatgtgatcataaccaagattggggatttcttgggtcctataaaagggtcgttgatgaactttgtagtgaaatatctaaaaaggatggtgccaagatattcattgcctggaaagattgatttcaaatcaacacttggaaggccggtgactgatttggatgagtcaccaatttcgatcgatgatttggcatttttgcaatacacaggcgcaacgactggcctttcaaaaggggcaatgctatcccacggcaatgtgattgcaagtctagaacagcttgaatccatgttggttgatttaatcgatgaagagggcagtgatatctatatcaatgcgcttcctatttaccatatctattcgctttcagtgatcgttctggcgggttatacgaacgggggcctcaatgttctgatcacaaaccctagggacaccgacggatttattaaggaaatcaagaaatggcgtttcaccttcttcaatggcgtaaacactttgtacgagagtctgcttaatcatccggagataaaaaatgtcaattttgattccatgaagttatcaggtaccggaggctcagcttgcagacagtcaaccgcagaaagatggcaagaactcactggcaatgttttgcttgagggttatggactctccgagacatcaccgagtgtttctgtttctcctgcatatttgacaaagtttaatggctttgttggtttgcctgttccgagcactgagatttcaatccgcgatgaaactggcaaacaggtaagaagaggtgatccaggtgagatctgtgttaaagggcctcaagtcatgcaaggatattgggaaaatgaagaggcaacaaatgaagccattgacgaagagggtttctttaaaactggagacattgggactttaaacagcgatggcttcattaagatcgtcgatcgaaagaaagacatgatattggtctcaggatttaatgtttatcccaatgaaatcgaagacgttgtgagtcttcatccagatattatcgaagctgcatgcattggcgttgatgatgaaaagactggtgaagcggttaagctctttgtagtaaaaagcaattccagtttgagcattgatgaagtgatggattattgtaaggacaatttcacaggctataaagtacccaagcacatcgagttcatcgatgagcttccgaaatcaaatgttggaaaagtattgagacgatcacttcgagagtaa

SEQ ID NO: 309675 - DNA, 562 bp, Unknown
  Bacterial polypeptide expressing nucleotide sequence isolated from the Sargasso Sea
aatgacccaaacagtcgacattgaaaacacggataacgtgctgagtcgccgagattcaaatgctgaaacccagcaaatgttgcgacaacgatttgaaactcaaccagatttaatgcctgcacaattggccagtgagttagggattgccgagcttgaggtggttaccgccttacctcaagcgcagcgagtgtttttacctttggcccatatggacgagttactacaaagcttacccgagtggggttcgttaaccaccatagtgatgctttcgggcagtgtatttgaatttaaaggcgattttccccaaggaaaatttgcccatggctactacaacctctacagcaaaggggatggcttacatggtcatcttaaattggatggcatgcgggcgatagccttgatcagcagaccttttaggggcagcgagagccattccattaacttttttggacctcatggggaagtggtatttaaagtttatttaggacgtgacaagcaaagagtgctttttcccgaccaagtgcgccgttttaaagcgctggccgccacctttgctgattaa

SEQ ID NO: 309676 - DNA, 931 bp, Unknown
  Bacterial polypeptide expressing nucleotide sequence isolated from the Sargasso Sea
ataactgaaggaaaggagatgataatcactgctttgcctctttatcatattttttcatttacagttaatttcttatatttttatagcattggctcaaacaatgtgcttattgctaatcctcgtgatcttaagagctttgtaaaagaattaacaaaacataggtttactgtgataactgctgtaaataccttatttaacttattactaacgagttcaaaatttagaaaaattgacttttcatcacttaaattttctgttggaggtggaatggcagtactaagtagtactgcaaaaagatggaagaaaattacaggcacagaaataactcaaggctatggtttaacagaaacatcgcccattgtttctataaaccctataaataataaattcaatggatctataggactgcccgtaccctcaactgacatatcaatcagagatgatactggaaaccaattgggctatgaagagccaggcgagttgtgtgtaaagggaccacaagttatgtctgagtactggaataagaagcatgattcattgagttcttttacaaaggatggcttttttaaaacaggagatatagcgtcaattgataagaatgggttcctcacaatagtagatcgaaaaaaagatatgattatttcatctggatttaatgtttaccctaatgaaattgaagaatatgtttctcaacatccaaatgtaaatgagtgcggcgttataggtattgatgactcaaatagaggagagagtatacatttgtttattgtgagatcctccgacacccttacagaaatagatattatagaattttgtaaagagggtcttactatttataaagtaccaaagaaggttcattttataaatgagattcctaaaaacaatgttggaaaaattctacgaagaaaacttagagaattaaaatattaat

SEQ ID NO: 309677 - DNA, 287 bp, Unknown
  Bacterial polypeptide expressing nucleotide sequence isolated from the Sargasso Sea
gatcctagtttcaggctttaacgtgtttcctaacgagattgaagaagtggctgcaatgcatgaaaacattgttgaagcagctgcggttggggttcctcatgaagtcagtggtgaagttgtgaaattattcgtagttcgaaatagcgactcacttactgaaaaagacgttatcgcgcattgccgtaatcacttaacgggttacaaagtgcctaagcaagttgttttcaaagacgacttaccaaaaaccaatgtaggtaaaatactgcgtcgggagcttcgagactaat

SEQ ID NO: 309678 - DNA, 841 bp, Unknown
  Bacterial polypeptide expressing nucleotide sequence isolated from the Sargasso Sea
atgaatatagcgtctttacttattaaaacgagtatacttcatcggaataggtgggctattgctattggaagtgagtttaagtcaacgtaccttgataaggcaaaccgagttgctcgtttagctggcgggttaaaggatagagttaaggttaaggccggtgatcgcgtagctttagctatgaaaaattgtgcagagtatagtgatatactttttgcttcctggcaaattggtgcaatcactgttccgatgaatgcaaaacttcatgcaaaggagtttgcttatgctattgaagattctggtgctcgtatatgctttgttacggaagatttgtttgaggctatacagggctcaataaggagtctaagtgatccaccacaaattatagttgtggggagtgaaaaatatgctggtttattagaagcaaacccagctgaactaacagaggtgaagccagatgatgttgcttggctattttatacaagcggaacaacgggacgctccaagggagctatgcttactcatcgaaatctattaatgatgaccattggttattatggtgatgtggataatgtagttgcgaccgatacattattgcattgcgcacccatgtcccatgggtctgggctctatattttgccttatgtggcaaaaggagcgtgtcaagttttgccgctaagtggagggtttgaacctacggagtttcttgatttggtatctgcacatgagagtgtcaactgctttctggctcctacaatgattaaaagaattttagatatttaccaagatagttttggcaaccttaaaaatttaaaaactataatttatggaggtggccccatgt

SEQ ID NO: 309679 - DNA, 848 bp, Unknown
  Bacterial polypeptide expressing nucleotide sequence isolated from the Sargasso Sea
agttaaagctgcaattttgtcccatagaaatgttttagctaatgctatccaggtaagggaatggttaggtgaaaatttaaaatttggtgaagatttagctatttgtgcacttccactttaccacatatttgcattgacttgtaattcagtagtctatttttactttggcgcaaataatattttaataacaaatccaagagacattccaggttttattaaaattttgaaaaaatataagtttacgttcattagtggtgtaaacacattatttaataagttattggaggataaaaattttaaggagtgcgacttttcaaagctcaatataacaattgcaggtggaatgcctgtacaaaaatctgttggtgatcgttggcaaaaaaccactggttgcttaatggtagttggttatggtctctctgaaactgcaccagcggcgtctatagatccaattgatggcaaaacttttagtgacactatagggctgcctttaccttcaactgaaatgtctattcaagatgataaagggaaaattttatcagctgaaaaagagggtgaaatttgtattagaggtcctcaagtcatgagaggttactggaataacgaaaaagactccaaaaatgctcttactaaagacggttggtttaaaactggtgatataggcaaaatgagaaaagatggacactttcaaatagttgatagaaaaaaagacatgataattgtttcaggatttaatgtttatccaagtgatgttgaggaagttgcaatgcagcatcaaaaaatcttagaggctggttgtattggagtatctggaaaaaatggacaggaacttgtaaaattgtttgtat

SEQ ID NO: 309680 - DNA, 631 bp, Unknown
  Bacterial polypeptide expressing nucleotide sequence isolated from the Sargasso Sea
agaaggggtgcccgccgagatcaatccagaccaatacagctccctggtcgaaatgtttgaagagtcggtgaacgaattcgccgaccagcctgccttcgtcaacatggggcagaccattacctaccgtcgcctcgaagagcagtcccgcgcctttgccgcctacctgcaaaacgagctcaagctcagccagggtgacagggtcgctgtgatgatgcccaacctgctgcagtaccccatcgcggtgttcggcatcctgcgtgccggcatgatagtggtcaacgtcaacccgctctacaccccgcgcgagctggaacatcagctcaaggactccggtgccaaggccatcgtcatcgtctccaactttgcccataccctggaaaaagtggtctacgataccccggtcaagcacgtgatcctgacccgcatgggggacaacctgggtctggccaagggcaccctggtcaacttcgtggtgaaatacgtcaagaagctggtgcccaaatacaatctgccccacgccagcaccatgcgccaggcgctggccaagggccgctatctgcagtacatcaagcccgagatcaataacgacgatctggccttcctgcagtacaccggcggtaccaccggcctc

SEQ ID NO: 309681 - DNA, 751 bp, Unknown
  Bacterial polypeptide expressing nucleotide sequence isolated from the Sargasso Sea
cacaccgacctcaagccgggcgaccgcatcgccgtgcagatgcccaacgtgctgcagtacccgatcgccgtgttcggtgccatgcgcgccggcctcatcgtggtcaacaccaatccgctgtacactgcgcgcgagatgcgccaccagttcaaggatgccggcgtgcgtgcgctggtgtacctgaacatgttcggcaagctggtgcaggaagtgctgccggacaccgagatcgagtacctgatcgaagcgcggatgggtgacctgctgccaagcctcaagggctggctggtcaacaccgtggtgaagaaggtcaagaagatggtgcccgactaccacctgccgcaggccatcgccttcaagcaggtgctcaggcaggggcatggccaggcgctggcgccggtcaccgccagccacgaggatgtcgccgtgctgcagtacaccggtggcaccaccggcgtggccaagggcgcgatgctcacgcacggcaacctggtggcgaacatgctgcaggtcgatgcctgcctgtcgcagctcggcccggacggtacgccgctgatgaagcagggccaggagatcatgatcgcgccgctgccgctgtaccacatctatgccttcaccgcgaactgcatgtgcatgatggtcaacggcaaccataacgtgctgatcaccaacccgcgcgacatccccggtttcgtcaaggaactgggcaaatggaagttctccgccctgctgggcctgaataccctgttcg

SEQ ID NO: 309682 - DNA, 835 bp, Unknown
  Bacterial polypeptide expressing nucleotide sequence isolated from the Sargasso Sea
ggctcgaacaatattcttattgcaaatcctcgtgacctaaagagctttgtaaaagaattaacaaaacatagatttactgtgataactgctgtaaatacattgtttaacttattactaacgagttctaaatttagaaaaattaacttttcatcactcaaattttctgttggaggtggaatgtcagtattaagtagcactgcaaaaaaatggaagaaaattacaggtacagaaataacccaaggctatggtttaacggaaacatcacccatagtttctataaatcctataaatgataaatataatggatctataggactgcccgtcccctctaccgatatattaattatagatgattctggaaaaccattaggttatgaagaaccaggcgagctgtgtgtaaagggaccacaggttatgtctaaatactggaacaaggaagatgatactttaagttctttcacaaaggatggtttttttaaaacaggagatatagctgtaattaataagaatggatttctaagaatagtagatcgaaaaaaagatatgattatttcatcaggattcaatgtttatcctaatgaaattgaagattatgtttctcagcatccagatgtaattgagtgtggtgtaataggaatcgatgattcaaatagaggagagagcatacatttatttattgtgagatcctccgataacctgacagaaatagatattatagaattttgcaaaaagggtcttactatatataaagtgccaaagaaagtgcattttataaatgaaattcctaaaaacaatgttggaaagattctacgaagaaaactcagagaattataat

SEQ ID NO: 309683 - DNA, 829 bp, Unknown
  Bacterial polypeptide expressing nucleotide sequence isolated from the Sargasso Sea
gatgcttgaaaatttttggaaggataaatatccggaaggcgtttcttcagagatcaatcccgattcataccccaatgttctcgcggttctgaaagactcctgtcaacgtttcgccaacaagcctgccttttccaacctcggcaagactctgacctacggtgagctgtacaccctgtcaggtcagtttgctgcctacctgcaacagcacagtggcctgcaaccgggcgaccgcatcgccattcagatgcccaacgtgctgcagtacccgattgccgtctttggcgccatgcgcgccggctttgtggtggttaacaccaacccgctgtataccaagcgtgagatggaacaccagttcaacgactccggtgccaaggcgctggtgtgtctggccaacatggctcatctggctgaagacgttgtgcccaagaccggcgtcaagcacgtgatcgtgaccgaagtgggcgacatgctgccgccgctcaagcgtctgctgatcaatgcggctgtcaagtatgtgaagaagatggtgccggcttacaacatccccggcatggtgcgtttcaacgacgccatggcaaagggccgtggccagaactttactgatgccaaccccaagagcgaagacattgccgtgctgcaatacaccggcggcacgaccggcgtagccaagggcgccatgctgacccaccgcaacctggtggccaacatgctgcaggccaaggagctgatggcctccaacatgaccgacggcgaagaagtgatcatctgtccgctgccgctgtaccacatctacgccttcaccttccattgcatggccatgatggtgagc

SEQ ID NO: 309684 - DNA, 520 bp, Unknown
  Bacterial polypeptide expressing nucleotide sequence isolated from the Sargasso Sea
gcccctgcccagcacctatgtgaagctggtcgacaacgatggccgggatgtgaacgaactcggccagcccggcgaagtcgccgtgctgggcccgcaggtcatggccggctactggcagcgtcccgacgaaaccgccaaggtcatgacagcggacggctacttcctgaccggtgacatcggcaccatggacgagcgcggctttgtgaagatcgtggatcgtaaaaaggacatggtcatcgtcagcggcttcaacgtctatcccaacgaggtggaggacgtggtctccaactgtcccggcgtgctcgagtgcgcggtggtcggtgtgcccgacgagaagtccggcgaggccatcaagctcatcgtcgtcaaaaaggatccggcattgaccgagcaggccatccgcgattactgccaagccaatctgaccggctacaagcgtccgcgccacatcgtcttccgcgccgatctgcccaagacacccgtgggcaagatcctgcgcagggagctgcgcgacgcctga

SEQ ID NO: 309685 - DNA, 553 bp, Unknown
  Bacterial polypeptide expressing nucleotide sequence isolated from the Sargasso Sea
gtgatcagcaccaccttcagcggcaacatcggcctgccgctgccgggtatcgacattgccatcaaggacgacgaaggcaacagcctgccccagggcgagtcaggcgagatctgcatccgcggccccaatgtgatggtgggctactacaaccagcccgaagaaaacgccaaggccttcacgcccgacggcttcatgcgcacgggcgacatcggcatcatggacccgcagggctacacccgcatcatcgaccgcaagaaggacatgatcctggtgagcggcttcaacgtgttccccaacgagctggaacaggtcatcagcctgtgccccggcgtggtcgaatgcgcagccattggtgttcccgatgagaagcagggcgaggccatcaaggtgttcatcatcaagaacgacccggccctgaccgaggacgaggtggccaactactgccaccagaacctcaccggctacaagcgccccaagtacatcgagttccgcgacgagctgcccaagagcaatgtgggcaagatcctgcgccgagagctgcgcaaggcctgag

SEQ ID NO: 309686 - DNA, 631 bp, Unknown
  Bacterial polypeptide expressing nucleotide sequence isolated from the Sargasso Sea
gcgttggcagaaagtcacctcaacccgtctggttgagggatatggtttaactgaatgtgcgcctttagtcacagtaagcccctacaatttgcccgcttataacggcagtataggttttcctgcgccttcgactgacattaaactggtgaacgatgcaggcgttgaagtggctgctggtgaagccggtgaaatgtgggtgaaaggcccgcaagtgatgaaaggttattacaacagaccagacgaaacagctaaagtgttaaatgctgaaggctggttagccactggtgatatagctcgtgttgatgacgatggtttcttctacatagtcgatcgcaaaaaagatatgattttagtctcaggctttaatgtctatccaaatgagatagaagaagtcgtagcaatgaacgataaagtattggaagttgcagccattggtgtgccgaacgaatctacaggcgaagccgtgaagatttttgtcgtgaaaaaagatcaaagcttaactgatattgaactcatacaacattgtaaggaacgtttgacgggctataaagtgccgaagctggtagaatttcgcaccgaactgccaaaaactaacgtaggtaaaatcttaaggcgagagctgaaaggttaa

SEQ ID NO: 309687 - DNA, 1624 bp, Unknown
  Bacterial polypeptide expressing nucleotide sequence isolated from the Sargasso Sea
tatggagaagatctggcttgatgcctatccgccgggggttccggcagagattgattccggcgagtatcgaaacatcagtgcattgatcgaacgaagcttcagcaggtttcacgcgaatccggcgtttgcgtgcgatggaaagcagatcacctatggcgagctcgacgtgatgtctggagcactcgccgcgtggctgcagtcacgcggcctcgaacgtggtgcgcgggtcgccatcatgatgccgaatgtgctgcagtacccgatctcgatttgtgccgtgttgcgcgccggctacgttgtcgtcaacgtcaacccgctctatacgccccgcgagctgcaacatcagctgaatgacagtggcgccgaggcgatcgtcattctcgacggctgcacggcaacgctggatgcaatccttgcacacacgcaggtgaagcatgttctggttgccgcgcagggcaatgcttccggcgcggaacagaagccgagcccgtatgcggcatttgacgacgcgatcgaggagggaagtcggagcaaattcataccggcttcccagtcgccggacgatgtcgcttttctccaatatacgggcgggacaaccggggtgtcgaaaggcgcgacgctgttgcatcggaacatcgtcgcgaatgtattgcagtcggacgtctggctcaaaccggctcgcgatttgcgccctgacgtgacgcagttcatcacggtggcggcacttccgctttatcacatctttgcgctcaatgtttgctgcctgttgacgattcacatgggtgcgctttccgtactggtgccgaatccgcgggacatcggggggatgatcaagtcgctcgccggatacaaaatcacgaactttccgggcgtcaacacgctcttcaacgcgatgctccatcatcctgaatttccgcgcctcgatttctccaatctgctggtggccagcggtggcgggatggccacgcaagaggccgtcgcaaggcgctggaaggagatgaccggcgcgccgatcatcgacggatacgggctgtccgagacatcaccatgcgtcgcgatcaatcccgtgaccggtagtgagttcaacggcaccatcggcttgccgttgccctccacggaagtgtcgatccgggacgacgacggcaacgaattgccggccggcgaagccggagagctgtgcattcgtggtccgcaggtgatggcgggttactggcagcggccggacgagaccgcgaaggtgatgaccgcggacggcttcttcagatcgggtgacatcgcgtcgatctccgaagcgggcttcgtgcgaatcgtcgaccgcaagaaggacatgattctcgtgtccggtttcaacgtctacccgaacgagatcgaagaggtcgtcgccaaccaccccggcgtatacgaggtcgcggcgatcggcgtgcccgacgagcattccggagaggccgtcaagctgttcgtggtcaggaaagatccggcgctgacgttcgaagacctgatggcgttctgtaaaggccagctgaccggttacaagcgcccgaaaagcatcgagtttcgcgacagcctgccaaagagcaacgtcgggaagatccttcggcgcgagttgcgggtgtcgaaccattga

SEQ ID NO: 309688 - DNA, 1636 bp, Unknown
  Bacterial polypeptide expressing nucleotide sequence isolated from the Sargasso Sea
catgacgaagagacactggaccgggtcgtatggctcgatccccgccgagatcgatcccgatcgctttccttccgtaagcgcgctgctggacgacgcgatgcgccgattcgccgatcgcccggcgttccactcgtatggccgcacgctgacctatgccgacgtcgaccgcctgtcgaccgcgctggccgcctatctgcagcaggtcgtgggcgtgcgcaagggtgatcgcgtggccgtgatgctgcccaacgtgctcgcgtttccggtcgcgttcgtcgcggtcgcgaagatcggcgcgatccaggtcaacgtgaacccgctctacacggcgcgcgaactcgagcatcagctcgacgacgcgggcgtcgaggtcgcgctggtgtgcggcgggtcgatgggcacgttcgccgaagtggtcggcggcacgcgcgtgcgcaccgtgctgagcgtcgggcgcggcgatctcggcgtcgtcgatgcgccggccgggacctgcgacgcgctgccgcccggttcgatcccgctcgcggatgccattgccgccggcgaatcgctcacgttcgaaccggttgcgctcggcggcgaggacctgctgctgctgcagtacacgggcggcacgaccggcctgtcgaagggcgccgcgctgtcgcaccgcaacctcgtcgcgaacatcgagcagttcggcgcgatcgtgccggccgcgcgcgagccgggcgaggaggtcgtcgtcacggcgatcccgatgtatcacatcttcgcgctgacggtgaacttcctgtcctacttcgcgatcggcgcgcagaactggctgatcgcgaacccgcgcgacatggacggcttcatcgacgtgctgaaggccgcgcggccgacggtgttcgtcggcgtgaacacgctgtacgcagggctcgccggccatccgcgcctgacggaagtcgactggtcgcggctgaagctgtcggccggcggcggcgcggccgtgatcgacgtgatctcgtcgcgctggaaggcggtgacgggcaacttcatccgcgagggctacgggctgtcggaaacgtcgccggtcgtgtcgttcaacccgcagtcgatcgactcgttcacgggcaccacgggcctgccgctgccgtcgaccgacgtgaagctgctcgacgagcaggacaacgaggtggcgatcggcggcgcgggcgagatctgcgtgaaggggccgcaggtgatgggcggctactggcagaaaccggacgcgaatgcggccgcgttcacggccgacggctatttccgcaccggcgacgtcggcgtgttcgacgaagccggtttcctgcggatcgtcgaccgcaagaaggacatgatcatcgtgtcgggcttcaacgtgtacccgaacgaggtggaagcggtcgcgaccgccgtgccgggcgtggccgagtgcgcgtgcatcggcgtgccggacgcgcgcacgggcgaggccgtgaaactgttcgtggtgctggcgcaggacgccgatgtgacggacgcgcaactcgtcgcgcattgccgcgagagcctcgcggcctacaaggtaccgaagctgattcgcttcgtcgaccggctgccgaagtcgaccgtcggcaagatcctgcgccgggaactcagccgcaccgactga

SEQ ID NO: 309689 - DNA, 1606 bp, Unknown
  Bacterial polypeptide expressing nucleotide sequence isolated from the Sargasso Sea
atggcatacgatcaagagtcacaactcgaacttggcaaatactcttcactcatagacttaatcgaacgcactagccaacgctttggcgataaaaccgcatatgcttgcttaggtaaaagcagtagcttcaatgagatagagcgcgattcacgttattttgctgcttatttacaaaataacactcacttaaaacctggcgatcggatcgcgattcaattacccaatattacccaattcgtcatcgccgcctatggcgcactacgagcaggcctgattctcgtcaacactaacccactttatactgaacgtgagcttatccatcagtttaatgactcaggcgctaaggccttagtggtattgtcagatctgttgccaaccctcgccaaagtggttgcaaccacaccaattgaattggtgatttcgacccacccgttagatcttatcgatccgcaagttcagcccaaaacggggcttaaaaatgtcgaattctgtcacgtattaaaacaaggtgcagagctaccgtttacgcgctttatgcccgccttaggcgatttagcggcgctgcaatataccggtggcacaacgggcctctccaagggagccatgctgacccacggtaatatgctcgccaatgcggcgcaggtaaaatcccgcatcggcagtgttatcaccgaaggtgaagatatttttgtcgcgccactgccgatttaccatatctacgcctttatggtgaacttggtactgtattttgaatgtggtggttgctcggtattaatccctaacccccgtgatattaatggcttaatcaagacgctggcgaaataccccttcaccggttttgcagggcttaacaccttatttgtcgccttgtgtcatcaaccagaatttaaggcactggatttcagtcatttaaaaatcactatttctggaggtacagcgctgaccgctgccgcagccaatctatggcagcaaaccacaggcaataccatcagtgaaggttatggcttatccgagacctcgccagtgatctcgctcaatgcaccgggatatcaaaagattggcactatcggtaagcccgttctcggcactgaggtcaaactgttagacgaaaacggtaatgaagtcgcgcaaggggaagccggtgagctcgccgcccgtggcccacaggtgatgctaggttattggaataatccccaagaaacggctaatgtgatgacggctgatggtttctttaaaacgggggatattgcgattctgaacgaggaaggcttccatcaaatcgttgatcgtaaaaaggatatgattattgtctctggctttaacgtctatcctaatgaagtcgaaaacgtgcttgctagccacccaaatatcatcgaatgcgccgtagttggcgtaaaggatgagcactctggagaagcagtcaaagcctgtatcgtgctcaaggatgacagccaagaccctgaactgatgaaaaccaccatcatcaacttctgccgcgagcaactcactgcctacaaactgcctaagttaattgaatttatgccgcagttgcctaagagtactgtgggtaagattctgcgtagagaactcaaaaatcagccttaaa

SEQ ID NO: 309690 - DNA, 555 bp, Unknown
  Bacterial polypeptide expressing nucleotide sequence isolated from the Sargasso Sea
actacaacggctccatcggcctgccggtctgctccaccgatattcgtctggtggatgatgcaggtcaggtgatccacgagcttggcaaacccggcgagatgcaggtgcgcggcccgcaggtgatgagcggctactggcagcggccggaagccaccgccgaggtgatgcaggatggctggctctgtaccggtgacatcgcggtgtgcgacgagcagggcttcttcaagatcgtcgatcgcaagaaggacatgatcctggtctccggcttcaacgtttatccgaacgaaattgaagacgtggtagcgctgcacccgaaagtgctggaagtggccgccgtcggcgtgccgcacaaggtctctggcgagctggtgaagatcttcgtggtcaagaaagatgcaaagctgcaggaagacgagattattgctcactgccgcaaacatctgactgcctataaggtaccgaaactggtagaatttcgtgacgaacttcccaagaccaatgtgggcaagatcctgcgccgcgtgctgcgtgacgaggagattgccaagcagtaac

SEQ ID NO: 309691 - DNA, 1339 bp, Unknown
  Bacterial polypeptide expressing nucleotide sequence isolated from the Sargasso Sea
gctgtatacgccgcgagagctggagcatcagttgatcgatagcggcgcgcaagcaatcgtgctgctcgacacgttcgcgaagacgcttgaggcggtgcaggcgcgcacgtcggtcaggcatgttgtgctgacttcgatcggcgagatgctcggcgcggggagccccgtgatcgcgggcgatctgccgccagcttcgtgtatcgcgctggacgatgcaatcgcccgcggtgcggaggcgggcttcacgccggtcgcgctcacgcaaaacgatgtggccgtgctccaatataccggcggcacgaccggcgtttcgaaaggcgccacgttgctgcatggcaatctgatcgccaacgtgctgcaatcggcgttgtggcgcgagccggtttatcgcgagcgcagcgatatcaagcagtacatcacggtcgtcgcgctgccgctttatcacatcttcgggctgacgatctgcggtttgctgacgatgcgttgcggcggcctaggcatcctgattccgaatccgcgcgatctgcccgggatgatcaaagccttgcaaggcttcgcgctcaactcgttccccggcgtgaacacgatgtacaacgcgctgttgaacgaacccgacttcaggacgctcgacttctcgaagctggtgcaatcgaacggcggcggcatggcggtgcagcaagccgttgcgcaacgctggcaagcgctgactggcgtgccgattgtcgaaggttatgggctctcggaaacctcgccgtgcgccactaccaatctgccgacgtccaccgcattcaccgggaccgtcggcttgccgttgccgtccacggatatttcgattcgcgacgacgccgggcgcgaagtgccgctcggcgagcgcggcgaaatctgcattcgcggaccgcaggtgatggccggctattggaaccgtcccgatgaaaccgcgaaggtgatgacgccggatggcttcttcaaatccggtgacattggcctgatgacggaagaaggtttcgtgaaaatcgtcgatcgcaagaaagacatgattctggtgtcgggcttcaacgtctatccgaacgaaatcgaggacgtggtggcaaagcatccgggcgtgttcgaagtggtcgcggtcggcgtgccggacgccgaggcgggtgaggtggtgaagctttatgtggtcaagaaagacccagcgctcaccgaagcggagattctcgctttctgcaaggagcagctgacgggttacaagcgccccaaaatcatcgagtttcgcagcgaactgccaaagactaacgtcggcaagattttgcggcgcgtattgcgcgacgaggtgaaaagcgcgggctga

SEQ ID NO: 309692 - DNA, 1606 bp, Unknown
  Bacterial polypeptide expressing nucleotide sequence isolated from the Sargasso Sea
atggcatacgatcaagagtcacaactcgaacttggcaaatactcatcactcatagacttaatcgaacgcactagccaacgctttggtgataaaacggcatatgcttgtttggggaaaaccagcagcttcaatgatatagagcgcgattcacgctattttgccgcctatttgcagaataacactaacctaaaacccggcgatcgaatcgcgattcaattacccaatattacccagttcgttatcgccgcctatggtgcgctgcgggcgggacttattctagtaaatactaacccgctctacaccgaaagagagcttattcatcagtttaatgactcgggtgctaaggccttagtggtgctgtcggatctgctgccaaccctcgccaaagtggttgcgaccacaccgattgaattagtgatttcgacacacccgttagatcttatcgacccgcaagtgcagcccaaaacggggcttaaaaatgtcgaattctgccaagtgctaaaacaaggggcagagttgccctttagccgttttgttcccgctgcaaatgatttagcggcgctgcaatatacaggtggaacaacgggcctctccaagggcgctatgctgacccacggtaatatgctcgccaatgcggcgcaggtaaaatcccgtattggtagtgttatcaccgaaggggaagatatttttgtcgcgccactgccgatttaccatatctacgcctttatggtgaacttagtactgtattttgaatgcggtggttgctcggtattaatccccaatccccgtgatattagtggcttaatcaagacgctggcgaaatacccttttaccggttttgcagggcttaacaccctctttgtcgctttgtgtcatcagcccgaatttaaggcgctggatttcagtcatttaaaaattactatttcgggcggtacagcactcaccgctgccgctgccaatatctggcagcaaaccacgggcaataccatcagtgaaggttatgggttatccgaaacctcaccggtgatttcactcaatgcccccggatatcagaagattggcactatcggtaagcccgttctcggcactgaggtcaaactgttagacgaaaacggcaatgaagtcgcgcaaggagaagcgggtgaactcgccgcccgtgggccacaagtgatgcgaggttattggaataatccccaagaaacggccaatgtgatgactgccgatggtttctttaaaaccggggatattgcgattttgaacgaggaaggattccaccaaatcgttgaccgcaaaaaggatatgattattgtctccggctttaacgtctatccgaatgaggtcgaaaacgtgctcgccagccatccgaatatcattgaatgtgctgtggttggcgtaaaggatgaacactcgggagaagcggtcaaagcctttgttgtgctaaaagatgacagccaagatcatgagcaaatgaaaaccgctattcttaacttctgccgcgagcaactcaccgcctacaagctgcccaagttgattgaatttatgccgcagctacctaagagtaccgtgggcaaaattctgcgcagagaactgaaacatcaggcttaaa

SEQ ID NO: 309693 - DNA, 1606 bp, Unknown
  Bacterial polypeptide expressing nucleotide sequence isolated from the Sargasso Sea
catggcatacgatcaagagtcacaactcgaacttggcaaatactcatcactcatagacttaatcgaacgcactagccaacgctttggtgataaaacggcatatgcttgtttggggaaaaccagcagcttcaatgacatagaacgcgattcacgctattttgccgcctatttgcagaataacactaacctaaaaccaggcgatcggatcgcgattcaattacccaatattacccagttcgttatcgcggcctatggtgcgctgcgggcgggccttatcctagttaacactaacccgctctacaccgaacgagagcttattcatcagtttaatgactctggtgctaaggccttagtggtgctgtcagatctattgccaaccctcgccaaagtggttgcgaccacgccaattgaattagtgatatcgacccacccgttagatcttatcgacccgcaagtgcagcccaaaacggggcttaaaaatgtcgaattctgccaagtgctaaaacaaggggcagagttgccctttagccgttttgtccctgctgcaggtgacttagcggcgctgcaatatactggtggaacaacgggcctctccaagggcgctatgctgacccacggtaatatgctcgccaatgcggcgcaggtaaaatctcgtattggcagtgttatcaccgaaggcgaagatatttttgtcgcgccactgccgatttaccatatctatgcctttatggtgaacttagtgctgtattttgaatgtggtggttgctcggtattaatccccaatccccgtgatattagtggcttaatcaagacactggcgaaatacccttttactggttttgcagggcttaacactctctttgtcggtttatgccatcagcccgaatttaaggcgctagatttcagtcatttaaaaatcactatttcgggtggtactgcactcaccgctgccgcagccaatatctggcagcaaaccacgggcaataccatcagtgaaggttatgggttatccgaaacctcgccggtaatttcactcaatgcccccggatatcagaagattggcactatcggtaagcccgttctcggcacagaggtcaaactgttagacgaaaacggcaatgaagtcgcacaaggggaagccggtgaactcgccgcccgcggcccacaagtgatgctaggttattggaataatccccaagaaacggccaatgtgatgactgccgatggtttctttaaaaccggggatattgcgattttgaacgaggaaggattccaccaaatcgttgatcgcaaaaaggatatgattattgtctccggctttaacgtctatccgaatgaggtcgaaaacgtgctcgcaagccatccaaatatcactgaatgtgccgtggttggcgtaaaggatgaacactcaggagaagcggtcaaagcctttgttgtgctaaaagatgacagccaagatcatgagcagatgaaaaccgctattcttaacttctgccgcgagcaactcaccgcctacaagctgcccaagttgattgaatttatgccgcagctacctaagagtaccgtgggtaaaattctgcgcagagaactcaaaaatcacgcttaa

SEQ ID NO: 309694 - DNA, 1180 bp, Unknown
  Bacterial polypeptide expressing nucleotide sequence isolated from the Sargasso Sea
tatgagagtgataattccaatagtaatgctctacaagaagcagtcagtgagtataaaaaaacaaaataatattgtcttttttaaagatattatatccaataacttttcattcgaagacatattaattgatgaaaatgatatagcgcttcttcaatacacaggtgggacaactggaaaatctaaagcagcaatactgacacataagaatcttttaagtaatgttcagcaagtctcgaattggatcgagccacatattaagcagggtcaggagattattatcactgcattacctttgttccatatcttctcatttacagtcaactgtctcacgtttcttaaatttggctcagagaatgttttaatagcaaatccaagagatctagattcttttatcaaagtattatataaaaaaaagtttacagtaattactgctgtaaacacattattcaatcttcttcttacaagcagaaaatttagggacctagacttctcaaatttcaaattttcagttggtggaggtatggcggtactcagcgatacagcacaaaagtggagagatgtaacaggcacaaatataactcaaggatatggcctgaccgagacatcgccagtagtagctatcaatcgaattgacgatccttttaatggatatatcggcttacctgttcaatcaacaaaaataaaaataatagatgatgatgaaaatatactaggttgtaatcaagccggtgaactgtgtgttcgtggcccccaagttatgtctgggtattggaaaatttcaaatgaaaaaaataaatactttactgatgatggttttttcaagacgggagatattgccacaatgagtgatgagggttacctcaagattgtggatagaaaaaaggatatgattatatcttctggatataatgtttatccgaacgaacttgaggattatttagctacccatcctgatattctcgaggccggagtaattggagttgatgataaaaatagaggagagtatataaaagcatttgttgttacaaaaaacgagcatctttcatcctcagatataatagctttttgtaaaaatggactaactgaatataaagttccaaaaagaattgtttttataaaagagctacctaaaactaatgtcggaaaaattctaagaagagagttaagagagctaaattaa

SEQ ID NO: 309695 - DNA, 1570 bp, Unknown
  Bacterial polypeptide expressing nucleotide sequence isolated from the Sargasso Sea
atgacccagcccacgcaagcccagttctcgtccgccgcagtatccgcagcgcccgcgcacacggcggatcagccgtccggtcagacacccggacagccggcaaatcatgcgcccaacaccgacggcatctggtacgagtcgtatccggccgacgtgcctcatgagatcgacgtcaaccagtacgaatccgtcgtgcaattcttcgacgaatgcattgcgcagttccgcgagcgcgtcgcgtacgtgagcgtcggcgcgaacatgacgtatggcgaactcggccgcaaggcggcggcgttcgccgcgtatctgcaaagcatcggcgtgaaagccggcgagcgcgtcgcgatcatgctgccgaacacgtttcagtatccggtgtcgctgttcggcgtgctgaaggccggcggcgtggtcgtcaacgtcaatccgctctatacggttcgcgagcttgcgcatcagttgaaggacagcggcgcgcaaaccatcatcgtgttcgagaacttcgcgaagaccgttgaagacgcgttgcccggcaccagggtccagaacgtgatcgtgacgggtctgggcgacctgctcgccgacggtctgaatctgaagggacgtctgctcaatttcatgctgcgccacgtcaagaagatggtgccgccgtacaacctgccgcaagcggtgccgctgctcgacgcgctttcgatcggttacacgcggccgctgacacccgtgcgtcccactcacaacgacatcgccttcctgcaatacaccggcggcaccaccggcgtggccaaaggcgcgatgctcacgcacaagaacatcatcgccaacctgttgcaggcaaaagcgtggtccgaaggccagttgagcggcgagatcgaaacggtgctcacaccgctgccgctctatcacatctattcgctgaccgtgaacgcgttgatcttcatgggactcggcgggcgcaatattctgatcgccaatccgcgcgacatgaagcgcgtgatgatgatcatccgtcacgagaaattcaccggcatgacggccgtcaacacgctctacaacgcgttcctcgataacgaggagttctgcaaacgggatttctcgaacctgaagctcgcgatggccggcggcatggccacgcagaagtcggtcgccgatcgattcaaggcggtcaccggcaagccgatcatcgaaggctacgggctgaccgagtgttcgccgatcgtctcgatgaatcccgtggatctcaccaatttgcgcgacttcgaaggctcgatcggtctgcccgcgccgtccacccaggtgcgcttcaggaaagacgacggcacgtgggccaacatcggcgaagcgggtgaattgtgcgtgaaggggccacaggtcatgaaaggctactggaatcgcccggaagaaaccgccaaggtgatcgacgacgacggctggctcgccaccggcgacatcggtgtgatggattcgcgcggcttcatccgtttgatcgacaggaagaaagacatgatcctggtgtcgggcttcaacgtctatccgaacgaagtcgaagacgtgatcgcggccctgccgg

SEQ ID NO: 309696 - DNA, 579 bp, Unknown
  Bacterial polypeptide expressing nucleotide sequence isolated from the Sargasso Sea
cgttcagcgccatccagctggcacccatcggcattccgctgccttcgaccctgtgcaagaccatcaacgacgaagccagggatctggccatcggcgagatcggcgagctgtgcgtgaaagggccgcaggtgatgaagggctactggcagcgccaggaagcgaccgacgagatcctcgatgccgacggctggctgaagaccggtgacatcggcctgatccaggaagacggctacctgcgtatcgtcgaccgcaagaaggacatgattctggtgtccggcttcaacgtctatccgaacgaactggaagacgtcctggcgaccctgccgggcgtgctgcagtgcgcggccatcggcgtgccggacgagaagtccggtgaggcgatcaaggtgttcgtggtggtcaagccgggcgagagtctgaccaaggaacaggtgatggagcacatgcgcgccaacctgaccggctacaaggtgcccaaggccgtggagttccgcgacgtgctgcccaccaccaacgtcggcaagatcctgcgccgcgagctgcgtgacgaagagctgaagaaactgggcaagaagtgac

SEQ ID NO: 309697 - DNA, 1675 bp, Unknown
  Bacterial polypeptide expressing nucleotide sequence isolated from the Sargasso Sea
tatggataaaatttggctgaaatcgtacccacccggcgttccagccgaaatcgacgcgtctccttatccctccgtccccgacctgctcgacgaaagcttccggcagtatcgtgaccgcacggcattcgtctgcatgggcaagggcatcacgtacggcgaactcgacaagctgtcgcgccagttcggcgcgtggctgcaatcgcgcgggcttgcgcgcggggcgcgtgtcgcgatcatgatgccgaacgtgctgcagtaccccgtggcgatcgccgcgatactgcgcgcgggctacaccgtcgtcaacgtcaatccgctctatacgccgcgcgagctcgagcatcagctgaaggacagcggtgcggaggcgatcgtcatcctcgagaatttcgcatcgacgctgcaggccgtcatcgcgaatacggacgtcaagcacgtcgtcgtcgcatcgatgggcgatctgctgggcatcaagggatggctcgtcaactacgtcgtgcgcaacgtgaaaaagatggtgcctgcctggcagctgccgtcgttcacgcgcttcaaggccgcactggccgaaggtgcgcgccaggcattcaaggcgcagaaaatcggccctgatgacgtcgcgttcctgcaatacacgggcggtacgaccggcgtggcgaagggggcgacgctactgcaccggaacattgtgtctaacgtgttgcaggcgggcgcctggcatcatccggctcacgagaagttcccggaagtgaaacagttcgtgactgttgtcgcgctgccgctgtatcacgtgttcgcgctgaccgtttgcgggttcctgacgatgcgtaccggtgggatgggcatcctgatcccgaatccgcgcgacatcgccggcatgatcaaggaactgaagggctaccagatctcgacgatcccggcggtcaacacgctgtacaacgcactgctgaaccacccggaattcagtcagctcgacctgtcgaagctcgtgatcgccaacggcggcggcatggcgatccaggagggcgtcgcgaaacgctggtatgaaaagacccacaccgcgatcatcgaaggttacgggttgtccgaaacgtcgccggtggcgacctgcaaccccgtgaccgcgaccgagtacagcgggacgatcggcttgccgctgccgtcgaccgaagtggcgattcgcgacgacgcgggcaacgacgtcgcgctcggcgaacccggcgagatctgcatacgcgggccgcaggtgatggccggctactggaaccggccggacgaaaccgcaaaggtcatgttcgcggacggcttcttcaagacgggtgacgtcggcgtgatggatgcgcgaggttacgtgaagatcgtcgaccggaagaaggacatgatcctcgtgtcgggcttcaacgtgtacccgaacgaagtcgaggacgtggtggcgtcgcatccgggcgtgttcgaggtggcggcggtcggtgtgcccgacgagcattccggcgaagccgtgaagctgtttgtcgtgaagaaggacccggcgctcaccgacaaggacatccttgcctactgcaaggagcggctcaccggctacaagcggccgaagctggtcgagttccgcacggagctgccgaaaacgaacgtcggcaagatcctgcggcgcgaactgcgcgacggacgcgcgtaa

SEQ ID NO: 309698 - DNA, 1741 bp, Unknown
  Bacterial polypeptide expressing nucleotide sequence isolated from the Sargasso Sea
atgaacaccgttgccgaccgcagcgatctgaccgatcgcatctggctgaagtcgtaccccgagggcgtgcccgcggagatcaatcccgatcgttatcactcgctggtcgaggtgtttcgggaatcggtggagaagtaccgtacccgcgtcgcctacgtgagtgtcggcaccgaaatgacgtacggcgagtgcgagcgccaggccaagcagtttgcggcgtggctgcagtcgcgcggtgtaaagaaaggcgatcgggtggcgatcatgctgcccaacagcctgcagtaccccgtgtgcctgttcggcacgctgctggccggcgccatcgtcgtcaacgtcaacccgttgtacacggtgccggagctggcccatcagttgcgcgattccggcgcacaaacgatcgtggtgctggagaacttcgcgcgcacgctggagcaggcgctgcccggcagccaggtgcgcaacatcgtcatcacgggcatcggcgacctgatgggcggggcgctcaacctcaagggccgcgcgctgaacttcgtgatgcgccacgtgcagaagcaggtgccgccgtacaagctgccctcgccggtctggctgcgcgatgcgctggccgcaggaggctcacggacactgcagtcagtgcagctggcgccggaagatctggccttcctgcaatacacgggcggcaccacgggcgtggccaagggcgcaatgctcacgcaccgcaatatcatcgccaacctgctgcaggccgaagagtggtccaagagcatgctcaacggcggcgtggaaaccaacgtcacgctgctgccgctgtatcacatcttctcgctcacggtgaacctgctgatgttcatgacactgggcggccgcaatatcctgatcgccaatccgcgtgacaccaagcgcgtgatcttcatcctgcgcaacgaacggttctccggcattgcgggggtgaacacgctcttcaacgcactgctggaagacccggacttcgccaagcgggatttctcggccatgaagatcaccatcggtggcggcatggcggtgcagcgcgccattgcgcagcgctggaaggaagtcacgggccacaccatcgttgaaggctacgggctaacggaatgctcgccggtcgtgtcgatgaacccgccgcacgtgaccgaattcagcggcacgatcgggctgcccgcgccgtccacggaagtgcgcttcaagcgcgacgacggcacgatcgcgccgctcggcgaacccggcgaactgcaggtgcgtgggccgcaggtcatgcgcgggtactggcagcgccccgatgagaccgccaagtccatcgacgccgaagggtggttctccaccggcgatatcggtgtgatggatgccaacggctacatccgcctgatcgaccgcaagaaggacatgatcctcgtgtcgggcttcaatgtgtatccgaacgagatcgaagacgtggtggcactgcaccccgacgtgctggaggtggcggccattggcgtgcccgatccggtggccggcgagcgcgtgaagatcatcgtggtgccgcgcaccggcgcgctgaccgagcccgccctgctcgaacactgccgcgcccacctgaccggctacaagatgccgcgcatcgtcgagttccgccacgaagagctgcccaagtcgaccgtgggcaagatcctgcgccgcgaactgcgcgatgccgatccggacatcaagcgcgcccgcgcgcaagctcagcaatgac

SEQ ID NO: 309699 - DNA, 1675 bp, Unknown
  Bacterial polypeptide expressing nucleotide sequence isolated from the Sargasso Sea
atggacaaaatctggctgaaatcttatccacccggcgttcccgcagagattgacccgactcgctattcgtccgtcgccgaactgctcgaagaagcgttccgcgagcaccgcgccaaaccggcgttcgtgtgcatgggcaaggagatcagctacggcgaactcgacgcgctttcgcgcaagctggcagcgtggtttcagtcgaagggcctggcgcgcggtgcgcgcgtcgcgatcatgatgccgaacgtgctgcaatatcccgtcgcgatcgcggcgatcttgcgcgcgggctacgtggtggtgaacgtgaatccgctttacaccccgcgcgagctcgagcatcaactcaaggacagcggcgcggaagcgatcattctgctcgaaaacttcgccgttacgctgcaggcgatcgtgcgcaatacgtcgatcaagcacatcgtcgtcgctgcaatgggtgacctgatgggcatgaagggcacgctggtgaacttcgtcgtgcgtcgggtgaagaagatggtgccggcgtggtgcctgcccggtcacgtcaaattcaacgcggcgatcgccgagggcggccatcagaatttcaagccggtccagcaaggaccggacgacgtcgcgtttctccagtacacgggcggcacgaccggcgtggccaagggcgcgacgctcctgcatcggaacctgatcgccaacgtgctgcagtcggaaatctggctcgatccggttcgtgctaaccgtacggacatcgatcagttcatcaccgtggtcgcgctgccgctctatcacgtcttcgcgctgacggtctgcggactgctgacgatccgcaccggcggcctcggcgtgctgatcccgaatccacgcgacatcccgggcatgatcaaggcgctggaaggttacccgatcacgacgattcccgccgtcaacacgctgtacaacgcaatgctcaacagcccggacttccataagctcgatttttcgaagctgatcgcagccaatggtggcggtatggcggtccaggaagctgtcgccaagcgctggttcgagttgacgcatacgccgatcattgagggctatggtctgtcggagacgtcgccgtgcgtcacctgcaatccggttaccgttacggaatatagcggcacgatcggtttgccgttgccgtcgacggaaatctcgattcgcgacgacgaaggcaacgaggtaccgcttggccagccgggcgaaatctgcatccgcggcccgcaggtgatggcgggctactggaaccgtccggacgaaacggccaaggtcatgacgcccgacggcttcttcaaatcaggcgatgtcggcttgatgaacgaaaagggcttcgtcaagatcgtcgaccggaagaaggacatgattctggtctccggcttcaacgtctatccgaatgaaatcgaagatgttgtggccaaaatgcctggcgtattcgaagtcgccgcggtcggcgtgccggatcagcactcgggcgaagcggtgaagctgttcatcgtgaagaaagaccaggccctgacagatgcggacattttcgcttactgcaaaacgcagttgaccggctacaagcggccgaagatcgtcgaattccggactgaattgcccaagagcaatgtcggtaagatcctgcgtcgcgagttgcgcgacggccgggcttaag

SEQ ID NO: 309700 - DNA, 1468 bp, Unknown
  Bacterial polypeptide expressing nucleotide sequence isolated from the Sargasso Sea
tttgcaacaacagttaggtctgaaaaaaggtgatgctgttgccgtgatgatgccaaacctgctgcaatacccagtctgtattttaggtattctgcgtgctggttgcgtagtggtgaacgtcaacccactgtacactccacgtgaattggagcatcagttactcgactcacaagccaaggctatcgtcattgttgagaacttcgctcataccttgtctgatgtgcaggataaagtgaagctgaaccacgtgatcctgacccatatgggcgatatgttgggcctggtcaaaggcactatcgtcaacttggtcgttaagcatgttaaaaagctgatccctgcgcataatctgaaaaaatacgtcacgtacaagcaggttattgccactggtaatgccgctgcgtacaaaaagcctgtagtcgttggagaagacttagcttttctgcagtacacaggtggcactacaggcgtatccaaaggcgctatgctgacgcatcgcaacatggtggctaacctggagcaggctgacggctgcatcggtcctctgctgactcatggtaaggaattcgtagttaccgcactgccgctttatcatatctttgctttaacggctaatttcctggtctttatgaagtatggtggtacgaatctattgatcaccaacccaagggatatgcctaactttgtcaaagaactggagaagtatccgttttcagttattacaggtgtgaacacgctgtttaatggcttactgaatacaccaggttttgcccagctggattttagcaatatgaagctggcgttgggtggtggtatggcagtgcagcgccccgtggccgagcgctggcagaaagtcactagtactcgtctggtggaaggttatggtttaactgaatgtgcgcctttggtcacagttagcccttataacctgccagcgtataatggcagcattggtttccctgcgccttctacagacatcaagctggtcaatgatgatggcgttgaagttgctgctggcgaagccggtgaaatgtgggtcaaaggtccgcaagtaatgaaaggctattacaacagacatgatgaaacgttaaaggtactgaatgcagatggctggttagcaacaggggatatagcccgtgttgatgacgagggcttcttctacatagtcgatcgcaaaaaagacatgattttagtctcaggttttaatgtgtatccaaacgagattgaagaagtggttgcgatgaacgacaaagtccttgaagttgctgccatcggtgtacccaatgaatctactggcgaagcggtgaagatttttgtcgtgaaaaaagaccagagcctgacagatgctgaattaattcaacactgtaaggaacgtttgacgggctataaggtaccgaagctggtagaattccgcactgaattgccaaaaacgaacgtgggtaaaatcttaaggcgggagctgaaaggttaa

SEQ ID NO: 309701 - DNA, 1267 bp, Unknown
  Bacterial polypeptide expressing nucleotide sequence isolated from the Sargasso Sea
aatctacaatcaatactaaaagaaacatcaattaaaaatgttttaattacatctgttggtgaatttttaggattaaaagggattatgattaattttgtcctaagaaaaattaggaaaatggttccaaaatactctttgccaaatgctgtaaattttaaagatgcaattaacattggttcaaaacataaattccaagagcaaaaaattgataaagaagatattgcttttcttcagtatacgggaggaacaacaggtggagttaaagctgcaatcttgtcccatagaaatgttttagctaatgctattcaggtaagggaatggttaggtgaaaagttaaaatttggtgaagatttagctatttgtgcactgccactttaccatatatttgcattgacttgtaattcagtagtctatttttattttggtgcaaataatattctaataacaaatccaagggacattccggggtttgttaaaattttgaaaaaatacaagtttacgttcatcagtggtgttaacactttatttaataagttattggaggataaaaattttcaggattgcaacttttcaaagctcaatataacaattgctggtggaatgcctgtacaaaaatctgttggtaatcgttggcaaaaaatcactggttgtttgatggtagtcggttatggtctttctgaaactgcaccagcggcatctattgatcctgttgatgggaaaacttttagcgacactattggtctccctttaccttccactgaaatgtctattcaagatgataaagggaaaattttatcagctgaaaaagagggtgaaatttgtattagaggtcctcaagtcatgagaggctattggaacaacgaaaaagacaccaaaattgctctaacaaaagacggatggtttaaaactggtgatattggaaaaatgagaaaggatggatactttcaaattgttgatagaaaaaaagacatgattattgtttctggatttaacgtttatccaagtgatatagaagaagttgcaatgcagcatcaaaaaatcttagaggctggctgtattggagtatctggaaataatggacaagagctagtaaaattatttgtatcagttgttgagggtgaaactattactaaagaagagattttagaacattgtagaaataatcttactgcttataaggttccaaaactacttgaaattgttgatgaaatacctaagtcgaatgtaggtaaaatattaagaagagaactaagggagaaaaaataaa

SEQ ID NO: 309702 - DNA, 726 bp, Unknown
  Bacterial polypeptide expressing nucleotide sequence isolated from the Sargasso Sea
aatgtcaataattgttaataaagatactaaagtcatttgtcagggattcacaggctcccaaggcacttttcattcagagcaagcaataaaatatggaacccaacttgttggaggtgtgacaccaaaaaaggggggaacgacacatcttgggttgccagtatttgatacagtaagtgaagcaaaagaaaaaactgatgctaatgcttctgtgatttatgttccaccgccatttgcagctgcagcaattgttgaagcaattgaaagtcagatagaattaataatatgtattacagaaggtatcccagtaatagatatgatgatggttaaagataaattaaaatcatctaagtcacgtttaataggaccaaactgtcctggtataattacacctgacgagtgtaagattggcattatgcctgcacacattcataaaaaaggtagtgttggaattgtttcgcgatctggaacattaacatatgaagctgtttttcaaacaacagttgctggcatgggccaatcaacttgtgttggaattggtggcgatccaatcaatggaactaattttatagactgcttagatttattcttaaaagatgatgaaactgagtcaattattatgattggcgaaattgggggctctgctgaggaagaagcagctgaatttattaaaaaacaatcaataaagaagcctatggttggctttattgctggaacttcagcacctcc

SEQ ID NO: 309703 - DNA, 770 bp, Unknown
  Bacterial polypeptide expressing nucleotide sequence isolated from the Sargasso Sea
aatgtcagtattaataagtaaagaaacaaaagtaatttgccagggaataacaggaagccaaggtacttttcatactgaacaagcaatagaatatggtactaagatggttggtggtgttacaccaggtaagggtggtacaacccatcttaatctacctgtttttaacaatgtttcagaggccgtgaatgagaccggtgcaaatgtttcagttatatatgtccctccaccctttgcagctgcagcaatattagaggcaattgaagccaatatagaattggttgtttgcattaccgagggtattccagttttggatatggttaaggtaaaagaagctctaataaattctaatacacgtcttattggaccaaattgcccaggaataattactcctggggaatgtaaaattggtattatgcctggtcatattcatcaaaaggggaatgttggtattgtatctagatcaggaaccttaacttatgaagcagttggacaaacaaccgcatgtgggttgggtcagtctacttgcataggcattggtggagaccctgtaaatggtactaattttatagactgtcttgatttatttcttaatgatgatcaaacagagtcaataataatgataggtgaaattggtggttcagctgaggaagaggctgcagagtttttaatgtcgtcctctataaaaaaaccaacagttggttttattgctggtctgacggcacccccgggaaggagaatgggccacgcaggtgctataatttctggtggta

SEQ ID NO: 309704 - DNA, 625 bp, Unknown
  Bacterial polypeptide expressing nucleotide sequence isolated from the Sargasso Sea
aatgaatattcacgaacaccaagcaaaacaaattctaaaaaaatatggagcgaatgtacccgagggagtatttgcatataatgtatccgatcttttgcaaaaaactaaagaattgaaaactgataagtatgttcttaaagctcaaattcatgctggtggaagaggtaaggctggcggagtaaaaattgttgataatttagaaaatttagaaaaagaagcaaatattttgcttggcaaaaacttaattactcatcaaacaggacccttaggtagagaagtaaaaagactatatgtcgaagaagtatctaatattagtaaagaattttatctttcttgcctagttgatagagcaagttcaaaaattgcatttatttcaagtgatcaaggaggaatgaacattgaagaagttgcccaaaatacacctgaaaaaattttaacaactaaagtcgattttaaccaagaaatttccgaggctgattgtaagaaaattattaaggtttttgaattagatgataattctggttcagaagctataagcttaataaaagcaatttataaattgttcatagaaaatgatgcaaatttagtagaaattaatccacttattttaacgaaagaaaataaa

SEQ ID NO: 309705 - DNA, 496 bp, Unknown
  Bacterial polypeptide expressing nucleotide sequence isolated from the Sargasso Sea
atgaatattcacgagcaccaagcaaaacaaattctaaaaaagtatggagcgaatgtgcccgagggagtatttgcatttaatgtatccgatcttttgcaaaaaactaaagaattgaaaactgataagtatgttcttaaagctcaaattcatgctggtggaagaggtaaggctggcggagtaaaaattgttgataatttagaaaatttagaaaaagaagcaaatattttgcttggcaaaaacctaattactcatcaaacaggaccgttaggtagagaagtaaaaagactatatgttgaggaggtatctaatattagtaaagaattttatctctcttgcctagttgatagagtaagttcaaaaattgcatttatttcaagtgatcaaggaggaatgaacattgaagaagttgcccaaaatacacctgaaaaaattttaacaactaaagtcgattttaaccaagaaatttccgagattgattgtaagaaaattattaagg

SEQ ID NO: 309706 - DNA, 422 bp, Unknown
  Bacterial polypeptide expressing nucleotide sequence isolated from the Sargasso Sea
aatgaaccttcacgaatatcaaggcaaagccttatttgcagaatataatttacctgtttcaaagggaaaaattatatatagtgctgatgaagtaacggatgcatgcaatgaaataggtggcacaagttgggtagtaaaggctcaggttcatgcaggaggcagaggaaagtctggcggagttcaattaattaacactcctgaggatggcataaaatttgcagaaaagtggcttggaaataacctcgttacttatcagactgacgccaagggacaacctgtcaattcaattttaattgaagaatgtacaaatatttctaaagaactttatttaagtgctgttattgacagagatttacaaaaaatagtgtttattggctccagcgaaggaggtgtaaatattgaagatgtcgcaaaaaatatgc

SEQ ID NO: 309707 - DNA, 763 bp, Unknown
  Bacterial polypeptide expressing nucleotide sequence isolated from the Sargasso Sea
atgaatttacatgaataccaatccaagaagctatttttggatcatggcataccggtattgaaaggagaaatagccaattcaccggatgaagcgaagtcagcagcagagaaacttcagtcaggtatttgggtggttaaagctcaagttcatgcaggcggacgcggaaaagccggtggagtgaaaattgcgaagagtatagctgaggtaggagaaatggctgctgaaatgcttgggaccaatttgataacaaaacaaacagatcatctaggactgctagtaagtaaggtctatatagagtcaggcacatcaattcaaagcgaatattatctcagcttgctggttgatcgtactaaagaatcatggacattcattgcatcaaaagagggtggagttgatattgaagctgttgctgaagaatcaccagataagatcatcaactatacgatcgacccattaaaaggtttggaaatagaatctttaaaagaaatggcagaccgaatggggtttattgatgacattcagtctcaatttatttcaatcacaaagaagatgtttgagattgcgaaagaaaaagatgtaaatctgatagaggtgaatcctcttattttggacgatgagaatcaactgattgctttggatgcaaaaataacaatcgaaagcaatgcattgttcagacaaaaagaactcttattactcaaagatgactctcaagaaaatgaacttgaagtcaaagcttcacaacatgatttaagctatgtttctt

SEQ ID NO: 309708 - DNA, 241 bp, Unknown
  Bacterial polypeptide expressing nucleotide sequence isolated from the Sargasso Sea
atgaatattcacgagcatcaagctaaacaaatattaaaaaaatatggagctgtagttcccgaaggagtatttgcgcttaatgttgctgaacttattcaaaaagcaaaagcactcaaaactgagaaatatgtgcttaaagcacaaatccatgctggaggtagaggaaaagctggtggtgtaaaaattttaaactctattgaggaactaacattagcagctaaagaattactaggaaaaacac

SEQ ID NO: 309709 - DNA, 197 bp, Unknown
  Bacterial polypeptide expressing nucleotide sequence isolated from the Sargasso Sea
aatgaatattcacgagcaccaagccaaacaaattttaaaaaaatatggtgcggctgtgccaaaaggagtttttggtttttcagttgatgatattgttaaaaaagccaaggaattaaatactcaaaaatatgtacttaaagcacaaattcatgcaggtggacgcggaaaagctggaggtgtaaaaatattagataata

SEQ ID NO: 309710 - DNA, 433 bp, Unknown
  Bacterial polypeptide expressing nucleotide sequence isolated from the Sargasso Sea
atgaaccttcatgaatatcaaggcaaagccttatttgcagaatataatttacctgtttcaaagggaaaaattatatatagtgctgatgaagttgcagatgcatgcaatgaaataggtggcacaagctgggtagtcaaggctcaggttcatgcaggaggcagaggaaagtctggtggagttcaattaattaacactcctgaggatggcataaaatttgcagaaaagtggcttggaaataaccttgtaacctatcagactgatgccaagggacaacctgtcaattcaattctaatagaagaatgtacaaatatttctcaagaactttatttaagtgctgttattgacagagattcacaaaaaatagtgtttattggttcaagcgaaggaggtgtaaatattgaagatgtagcaaaaaacatgcctgaaaagatta

SEQ ID NO: 309711 - DNA, 308 bp, Unknown
  Bacterial polypeptide expressing nucleotide sequence isolated from the Sargasso Sea
aatgaatattcacgagcatcaagctaaagaaattttaaaaaaatatggtgcaattgtgcctgaaggtgttttttcacactcagttgaagaattattgcaaaaggcaaaatcattaaaaacggaaaaatttgttttaaaagcgcagattcacgcggggggacgaggaaaggcaggagggataaaaattgtaaatacaatagaagagttaaattcagcagctaaagaaatgttaggaaaaaaattgataactcaccagacgggaccccaaggaagagaagtaaaaagactatatgttgaatcatcttcag

SEQ ID NO: 309712 - DNA, 262 bp, Unknown
  Bacterial polypeptide expressing nucleotide sequence isolated from the Sargasso Sea
tatgaacatccacgaacatcaagcaaaagaaatacttaaagagttcggagcccctgtatcaaatggaactgttatcttgaacccagaagaacttgatgcaaaaattaaaatttttaaatctaataaaatagttattaaagctcaaatccatgcaggaggaaggggaaaagctggtggggttaagttagtaaataaatcagattgtaaaaaagaaactgaaaaaatgttcggaaaaactcttataacccatcaaactggtcct

SEQ ID NO: 309713 - DNA, 259 bp, Unknown
  Bacterial polypeptide expressing nucleotide sequence isolated from the Sargasso Sea
tgattggcgaataggcggtacagctgaagaggaagctgcagaatttttaaaaaaagaaaaaattaaaaaacctatggttggttttattgcagggctaacagcacctcctggaagacgaatgggacatgctggagcaattatttcaggaggaaaaggtggagcagaggataaaattgaaactatgaaatcagcgggaattaccatttcaaaatcaccggcagacataggtaagacactttatcaaaaactaaatggttga

SEQ ID NO: 309714 - DNA, 229 bp, Unknown
  Bacterial polypeptide expressing nucleotide sequence isolated from the Sargasso Sea
aatgaatattcacgagcatcaggctaaacaaatcttaaaaaaatatggtatcgctgtaccaaatggagtattcagcttttcagctgatgacattgcagaaaaggctaagaaactaaatacaaacaaatatgttcttaaagcacaaattcatgcaggaggtagaggaaaagctggaggtattaaaataatagacaatattaatgaattaactgaagcctcaaaaaaaatg

SEQ ID NO: 309715 - DNA, 185 bp, Unknown
  Bacterial polypeptide expressing nucleotide sequence isolated from the Sargasso Sea
aatgaatattcatgaacatcaagctaaagaaattttaagagaatttgatttaccagtttctaaaggagaaataattctttcaataagtgaaataaaggaaaaaatatctaagcttaaagatcaagaatttgtcttaaaagctcaaattcatgccggagggagaggtaaagcaggaggagtaaagc

SEQ ID NO: 309716 - DNA, 445 bp, Unknown
  Bacterial polypeptide expressing nucleotide sequence isolated from the Sargasso Sea
aatgaatattcacgagcatcaggcaaagcaaatcttgaaaaaatatggagcaattgtccccgaaggtgtatttgcatttaatgttccagatcttctaaaaaaaattaagactttaaaaactgataaatacgttttaaaggcacaaattcatgcaggtggtaggggtaaagctggaggagttaaaattgttgacaatattaaaaacttggaagaagaagcgaataatctgcttggtaaaattttaattactcatcagacaggtccatctggcagagaagttaaaagattatatgttgaggcagcatccaacataagtaaagaattttatctttcttgtttaattgatagagcaagttccagaatagcatttatttcgagtgatcaaggaggaatgaatattgaagaggttgcacaaaatgcaccagaaaaaattttaaccactaaa

SEQ ID NO: 309717 - DNA, 387 bp, Unknown
  Bacterial polypeptide expressing nucleotide sequence isolated from the Sargasso Sea
aatgaaccttcacgaatatcaaggcaaagccctatttgcagaatataatttacctgtttctaaagggaaaattatatatagtgcagataaaataacagatgcatgcaatgaaataggtggcacaagttgggtagtaaaggctcaagttcatgcaggaggcagaggaaaatctggtggagttgaattaattaacactcctgaggatggcataaaatttgcagaaaagtggcttggaaataaccttgtaacataccagactgatgctaagggacaacctgtcaattcaattttggtagaagaatgtaccaatatttctcaagaactttatcttagtgcagttattgacagagattcacaaaaaatcgtgtttattggctcaagcgaggg

SEQ ID NO: 309718 - DNA, 242 bp, Unknown
  Bacterial polypeptide expressing nucleotide sequence isolated from the Sargasso Sea
aatgaatattcatgagcatcaagctaaacaaattttaagggaatttggtatagaggttccaaatggtgtatttgctctttcagttgaggatcttataaaaaaagctaagcaattaaatactgaaaaatatgtgcttaaagcacaaatccatgctggaggaagaggtaaagctggaggtgtaaaaatacttaataacattgatgaattaaccaaagcatcaaaagaattattggggcaaaaaa

SEQ ID NO: 309719 - DNA, 139 bp, Unknown
  Bacterial polypeptide expressing nucleotide sequence isolated from the Sargasso Sea
atggatattcacgagtaccaggcaaaaaaaatactttcaggctttggcgttacaattcctagaggcggcattgcttacagtcctgaaaatgctgagaataaagcaagagagttaggtggatctaagtgggtagtaaaag

SEQ ID NO: 309720 - DNA, 805 bp, Unknown
  Bacterial polypeptide expressing nucleotide sequence isolated from the Sargasso Sea
atgaatttacatgaataccagtcaaagaaactattttctgatcatggaataccagtactagaaggaaatatagcaagctctccagatgaagctaaatcctcagcagagaagcttaagggagacatttgggtagtaaaagcacaagttcatgctggtggacgcggtaaagcgggtggagtaaagattgctagaagcattgcagaagttcatgaaatggcctctgagatgcttggcactaatctcataacaaagcaaacagacgaaaagggattgcctgtgaatcaggtctatattgagtctggtacatcgattcagagtgaatattatttgagcttgttggttgatcgaacaaaagagtcatggacatacatcgcatcaatagaaggtggagttgatattgaagccgttgctgaagagtctccagaaaagatcattaattacaccattgacccattgaaggggctagaattgtcctctttgaaacaaatggcagaccggatgggttttactgatgatgttcactctcaatttgtttcaatcacaaaaaagatgttcgaaatcgccaaagagaaggatgccaacctcattgaggtcaacccccttattttggatgatcacaatcagctgattgccttggatgcaaaaatatcaattgaaagtaacgcattattcagacaagaggagcttctatctttcaaagataactctcaagaaaatgaactggaagtaaaggcttcagagcatgatctgagttatgtatctttggatggaaatattgcatgcatggttaacggcgctggacttg

SEQ ID NO: 309721 - DNA, 511 bp, Unknown
  Bacterial polypeptide expressing nucleotide sequence isolated from the Sargasso Sea
aatggatattcacgagtatcaagctaaaaaaatattatcagacttcggagtaaagataccaactggtggaatagtatatagtcctgaaaatgcagagaataaagctagagagattggcggttctaaatgggttgttaaagctcaagtacattcaggagcgagaggtaaagctggaggaatcattgtatgtaactctcctttagaagtagcagatgcgactgataaattattaggaaaaaaacttgttacaaatcaaacaggactagaaggtaaaataattaacagaatatatattgaagaagctacagatattaaacatgaattatatttagggttagtatttgatagatcatctgaaagtataatggttgttgcttcaactgaaggtggaatgagtgttgaggaaatttcaaaagaaaaacctgaaacaataattagaagtaaaattgaggttgcagttggcattcaacagtttcaagctagagaaattgccttttggtttaggtattga

SEQ ID NO: 309722 - DNA, 334 bp, Unknown
  Bacterial polypeptide expressing nucleotide sequence isolated from the Sargasso Sea
atgaatattcatgaacaccaagccaaagaattgttaaaagaattcggagcccctgtctcaaaaggtgttgtaatctacagcttaagtgaaattgataaaaaaataaaagagttaacatccaacaaatttgttttaaaagcacaaattcatgctgggggcagaggcaaggcaggcggcgtgaaattagtaaaagatattgacgaattaaaaaaagaagcaaaaattctattaggaaaaaaattagttacaccacaaacaggtcctaacggcaaagaagtcaaaagactttatattgaagaagcttctgaaatatcaaaagaattttatctatcat

SEQ ID NO: 309723 - DNA, 481 bp, Unknown
  Bacterial polypeptide expressing nucleotide sequence isolated from the Sargasso Sea
aatgaatcttcatgaatttcaatctaaagacctcttcaggaaatatgggattcctgttcctaaaggtgctattgcaacaactccgaatgaggcaaaatcagtagcccacgaactgggtggagaaaaatgggttgttaaggcacaaattcatagtggtggtcgaggtaaagcgggaggcgtcaaaatagcaaaaaatcaagatgaagttacgaaatttgcgaaggagatgctaggaaagacatttgttacaaaacagacaggatcctcaggcctgccatcaaattcagtttatatagaaagtgctaccgattatgaaaaagaattatatatcagcctacttgttgatcgtgaagatgagtgtatttcagttatatcctcccaatctggtggcggcaatattgaggaagtcgctgaagaagatccgaacagtgttttcaaaattcctatcaattctgctctcgggatatgccctatcaattga

SEQ ID NO: 309724 - DNA, 181 bp, Unknown
  Bacterial polypeptide expressing nucleotide sequence isolated from the Sargasso Sea
atgaatttacatgaataccaatccaagaagctatttttggatcatggcataccggtattgaaaggagaaatagccaattctccggatgaagcaaagtcagcagcagagaaacttcagtcaggtatttgggtggttaaagctcaagttcatgccggcggacgcggaaaagctgggggagtga

SEQ ID NO: 309725 - DNA, 226 bp, Unknown
  Bacterial polypeptide expressing nucleotide sequence isolated from the Sargasso Sea
aatgaatattcacgagcatcaagccaaagtaattttaaaaaaatatggtgcaattgtacccgagggtgttttttcacactcagttgaagaattattgcagagggcaaaatcattaaaaactgaaaaatttgttttaaaagcgcagattcacgctggtgggcgaggaaaggcaggagggataaaaattgtaaatacaatagaagaattaaattctgctgcaaaagaa

SEQ ID NO: 309726 - DNA, 663 bp, Unknown
  Bacterial polypeptide expressing nucleotide sequence isolated from the Sargasso Sea
catggtcgaaacaccctttcgctggacttttacctcaattccccccctagtatggcgaatttgtagggcaacctcacactcgaacccgccccgacaggagacccaagtggacctcttcgaataccaaggcaaacagttcttcaaacagtttggaatgccagtctctgacggcgaagtcgccttcaccgttcaagaggccgtagatgccgctgagcgtctaggcacacccgtaatggtgaaagcccaagtccacaccggtggacgaggcaaagcaggcggcgtcaaatttgcggcgaccgtagaagacgtccaagaacatgcgagcaatatccttggcctcgatatcaacggacatatcgttcaacgcctctggatagaaaaagcgagcgatatttcagaggagtactacgcaagcttcaccctcgaccgctcagcaaaacaacaccttggcatgctctccgctgaaggtggcgtcgaaatcgaaaccgttgcagcagaaaacccagacgcaatcagcaaagtccacgtcgacccagcaattgggctcacaagagaagcagctcaagcatgggttgaaggagccaaactgaatccggtcgcagtcgaaggcgcaatcgacattgtccctcacctctatgaagcctatgtcaatggcgatgccga

SEQ ID NO: 309727 - DNA, 382 bp, Unknown
  Bacterial polypeptide expressing nucleotide sequence isolated from the Sargasso Sea
aatgaatattcacgagcaccaggcaaagataattttaaaaaattacggcgcaaaagttcctaatggtatttttgcttctaatgtaaaagatttattagaaaaagccaaaactttagaaacagaaaaatatgttttaaaagctcaaattcactcaggaggcagaggaaaggcaggaggcataaaattagtaaataatttagaggaattagaaaaagaagcaaaaaatttaataggaaaaatcttggtaacacatcaaacaggtcctaacggaagaaaggtccaaaggctttatgtagaagaagcatcattaatcaataaagagttttatctgtcatgtttggttgatagagagagctctaaaattgcatttatatcaagcgat

SEQ ID NO: 309728 - DNA, 187 bp, Unknown
  Bacterial polypeptide expressing nucleotide sequence isolated from the Sargasso Sea
atgaatattcacgaacatcaagctaaacaaatactgaaaaaatttggtataccagttccaaaaggtgattttggatttagtgctgaagaaatagtcgaaaaagccaagaaattaaacttaaatcaatatgttttaaaagctcagattcatgctggaggcagaggtaaagcaggtgggataaaaattt

SEQ ID NO: 309729 - DNA, 240 bp, Unknown
  Bacterial polypeptide expressing nucleotide sequence isolated from the Sargasso Sea
aatgaatatccacgagcaccaggcaaaagaaatacttaaaaagtatggcgcggttgtacccgaaggcgtttatgcttttaatgtaaatgaattaattgaaaaagtaaaaaatctcaaagccgataagtatgtattaaaagcccaaattcatgcaggaggtagaggaaaggctggaggagttaaaattgttgataatattgctcttttggaagaggaagcgaaaaaattgtttggtaaaac

SEQ ID NO: 309730 - DNA, 450 bp, Unknown
  Bacterial polypeptide expressing nucleotide sequence isolated from the Sargasso Sea
tatgaatttacatgaataccagtcgaagaagttatttttggatcatggcataccggtgttgaaaggagaaatagccaattctcctgatgaagcgaagtcagcagcagagaaaatccagtccagtatttgggtggttaaagctcaagttcatgccggcggacgcggaaaagctgggggagtgaaaattgcgaagagcatagctgaggtaggagaaagggctgctgaaatgcttggcatcaatttgataacaaaacaaacagatgatctaggactgccagtgagaaaggtctatatagagtcaggcacatcaattcaaagcgaatattatctcagcttgctggttgatcgtaccaaagaatcatggacattcattgcatcaaaagagggcggagtcgatattgaagctgttgctgaagaatcaccagataagatcatcaactatacgatcga

SEQ ID NO: 309731 - DNA, 204 bp, Unknown
  Bacterial polypeptide expressing nucleotide sequence isolated from the Sargasso Sea
gatggatatacatgagtaccaagcaaaaaaaattttatctgactttggaattggaattccaaggggaggtatcgcctatagtcctgaaaatgcagaatataaggcaaaagaaattggtggttctcgttgggttgtaaaagcacaggttcactctggcgcaagaggcaaagctggcggaataatcgttttgcacgatgctctaga

SEQ ID NO: 309732 - DNA, 298 bp, Unknown
  Bacterial polypeptide expressing nucleotide sequence isolated from the Sargasso Sea
tatggatatacacgagtatcaagcaaaaaaaatcttatctgattttgggataggcataccaaaaggaggcattgcttatagtcctgaaaatgcagaatacaaagcgaaagaaattggtggatcaaaatgggttgttaaagctcaagtccattcgggtgctcgaggaaaagcaggtggcattatagtttgcaacgatgcattggaagttgctcaagctacagataaattattaggaaaaaaattaataactaatcaaacaggtccagccggcaaaatcattaatcgagtttatatcgaa

SEQ ID NO: 309733 - DNA, 343 bp, Unknown
  Bacterial polypeptide expressing nucleotide sequence isolated from the Sargasso Sea
aatgaatatacacgagcaccaagcaaaacaaattctaaaaaagtatggagcgaatgtacctaagggagtatttgcatttaatgtatccgatcttttgcaaaaaactaaagaattgaaaactgataagtatgttctcaaagctcaaattcatgctggtggaagaggtaaggctggcggagtaaaaattgttgataatttagaaaatttagaaaaagaagcaaatattttgcttggcaaaaacctaattactcatcaaacaggacccttaggtagagaagtaaaaagactatatgttgaggaggtatctaatattagtaaagaattttatctttcttgcctagtt

SEQ ID NO: 309734 - DNA, 307 bp, Unknown
  Bacterial polypeptide expressing nucleotide sequence isolated from the Sargasso Sea
atgaatctccacgaatatcaagctaaggagttattgttaaaatttaaacttccaatattaaaaggcaaaatttattttaataaaattgaaaatttggatgaagatcttgaaaattttagaggtcctccttgggttgttaaagcacaaattcatgctggaggtaggggcgctgggcattttaaaaattcatccaatcagagtaaaaaacaagcaggggttcaaattgtaaaaaataaagatgatttaattaacatagcaaattcaatgctggggaatacactaatcacaaaacaaactggtgaaatgg

SEQ ID NO: 309735 - DNA, 759 bp, Unknown
  Bacterial polypeptide expressing nucleotide sequence isolated from the Sargasso Sea
aagattatgaacctatttgaatatcaaggcaaagatttatataaaaaatattctataacaacacccaaatcaatttttataaactctatttctgatttaacagaaaatcatggtttgagttttccattggttgtaaaagcccaagtccaagttggtggaagaggaaaggcaggcggaataaaggttgcaaaaaaccatcaagaactagaagagcatatagatgcaattttaggtatggacataaaaggtcataaagttgaaagcttattgattgaggaggcttctgaaatcataagcgaatattatatatcatttactttggacagatctgaaaaaaaatatttgatgatgttgagctctaaaggtggaatggatattgaagaagttgcagctaatagtccagaagatttaataaaaatttatatatctccatcattaggacttgaaagtaaaataattacacaagcaataaaagatgcaaatctcaatcttgattacattgatgaattacatgaaataatttctaaactttacaagctttttactgaaggagactgtgatcttgttgaagtgaacccactggcaataacaaatcagggtgtttctgctctagattctaaagtttcactagatatgaatgcaatctatcgacatgatgattttaaaaaatatgaagaagaaattcccattccagaatctgaaaagtctgccagaagcaaaggcttaaattttatcaagctggatggaagtgttggaatt

SEQ ID NO: 309736 - DNA, 392 bp, Unknown
  Bacterial polypeptide expressing nucleotide sequence isolated from the Sargasso Sea
tatggatatacacgagtatcaggcaaaaaaaattttatcagattttggcattggcattccaaagggtggtattgcctacagtccagaaaatgcagaatataaagcaaaagaaataggtggatccaaatgggttgttaaagctcaagtccattcgggtgctcgaggaaaagcgggtggtatcattgtttgcaatgatgctttagaggttgctcaggctacagacaaattattaggaaaaaaattagtaaccaatcaaacaggtccagccggtaaaattattaatcgagtttatattgaagaagcatccgacatagaaaaagagttataccttggtcttgtttttgatcgtgggtcagagtgtataatggttgttgcttcaactgaaggtggta

SEQ ID NO: 309737 - DNA, 394 bp, Unknown
  Bacterial polypeptide expressing nucleotide sequence isolated from the Sargasso Sea
ttttgtgggcatcattgcaacggagcaggtttagtaatgtcaactcttgatgttgtagctgaacacggagggagtgcatccaactttttagatataggtggtggtgccaagtccgaaacagtaagtgctgcactagaagtattagaaactgactcaaatgttaaaagtgttttaataaatatttttggaggaattacaagatgtgatttagttgcagatgggatagttgaagcaactagtggtaaaaaattaaaatggccaataataatccgtcttgatggaacaaattctaaagaaggtctagaaatattgaaaaataaccctaacgataatatttttatctcagaaaacatggacgaagcagcaaaattagctgttgagagcggaatataat

SEQ ID NO: 309738 - DNA, 449 bp, Unknown
  Bacterial polypeptide expressing nucleotide sequence isolated from the Sargasso Sea
aggcaaaagacttgtcacgtatcagacagacgagacaggtcaaccggtctcgcggatactagttgaagcatgtattgggatctctgaggagctgtatttgggcgctgtggtggacagggccagtagacgcatcgttttcatggcgtctaccgaggggggtgtagaaataaagaaagttgcgcgtgaaacacccgaaaagattataagaacgaccatcgatccgcttactggtgctcagtcgtatcagggtcgagagcttgcttttcgcctgggtctatcgggggttcagataaatcaatttgtgaatatttttcttggccttgcaagattatttcaagagaaagacttgtcccttatagaggtaaacccactaattgttacttatgagggtgatctaaagtgtcttgatgcgaaggtggttgcagattctaatgcactttaccgacacc

SEQ ID NO: 309739 - DNA, 330 bp, Unknown
  Bacterial polypeptide expressing nucleotide sequence isolated from the Sargasso Sea
aatgaacttacacgagtatcaaggcaaagaaatttttgcaaaatatgatttacccgtttcaaaaggaaaagttgttacaagtcttgatgaggttgagcaagcatgtactgatattggaggaagtagatgggtagcaaaagcacaggttcatgcaggcggtagaggtaaatcaggaggtgttgctttatgtgacaccattgaggaggtagcgaattttacaaaaaaatggctaggtaaaagacttgtaacatatcaaactgataaagaggggcagctggtaagctgtattcttgttgaggaatgtaccaatatcgcagacgagctttacta

SEQ ID NO: 309740 - DNA, 415 bp, Unknown
  Bacterial polypeptide expressing nucleotide sequence isolated from the Sargasso Sea
atgaacattcacgagcatcaggctaaacaaatactaaaaaaatatggggtaaaagttccaaatggtatttttggatttacagtagatgaagtaatcacaaaagcaaaatctttaaaaacaaataggtatgttcttaaggcgcaaattcactcaggaggtcgaggtaaagcaggaggtgtaaaaatcctaaataatataaatgaattgaataaagaagcaaaacagttgctgggaaaagtacttgttacaaatcaaactggaagccaaggaaaaaaagtaaatagattgtatgtggaagagtcatcgaatattgaaaaagaattttatttgtcttgtttggttgatagatctagttcaaaaatagcatttatttcaagtgatcaaggaggaatggatatagaggaggggccaaaca

SEQ ID NO: 309741 - DNA, 634 bp, Unknown
  Bacterial polypeptide expressing nucleotide sequence isolated from the Sargasso Sea
atggacattcacgaataccaggcaaaaaaaatactatcaggttttggagtaacaattccaagaggtggaattgcttatagtcctgaaaacgcagaaaataaagcaagagaacttggtggttcgaagtgggtagtaaaagcacaagttcactctggtgctagaggaaaagcaggaggtatagttttatgtaattcacctttagaagttgcacaagcaacagataaattacttggaaaaaaattagtaacaaatcaaactggcccaagtggaaaaattattaatagagtttatattgaagaagcaacagatattaaaaaagagctctaccttggtttagtatttgatagaagttctgaaagcattatggttgtggcttctacagaaggtggaatgagcgttgaggagatttcaaaagaaaaacctgaaacaattataagatctaaaattgaagttgcagtaggaatgcaacaatttcaagctagagaaatagcatttggtctaggtattgatccaaaacttatatcaagaatggccgacaccattattggatgttatagagctttcagcgaacttgatgctactatggttgaggtcaatccaatggtaatatctaaccacaggtcaaaattttagc

SEQ ID NO: 309742 - DNA, 628 bp, Unknown
  Bacterial polypeptide expressing nucleotide sequence isolated from the Sargasso Sea
atgaatttacatgaataccagtcgaaaaagttatttttggatcatggcataccggtattgaaaggagaaatagccaattcgcctgatgaagcgaagtcagcagcagagaaacttcagtcaggtatttgggtggttaaagctcaagttcatgccggcggacgcggaaaagctggtggagtgaaaattgcgaagagcatagctgaggtaggagaaaaggctgctgaaatgcttgggaccaatttgataacaaaacaaacggatgatttagggctgccaataagcaaggtctatatagagtcaggcacttcaattcaaagcgaatattatcttagcttgctggttgatcgcactaaagaatcatggacattcattgcatcaaaagagggcggagtcgatattgaagctgtcgctgaagaatcaccagataagatcatcaactatacgatcgacccattcaaaggtttggaaatagaatctttaaaagaaatggcagacacaatgggctttattgatgacattcagtctcaatttatttcgatcacaaagaagatgtttgagattgcgaaagaaaaagatgcaaatctgatagaggtgaatcctcttattttggacgatgagaatcagctga

SEQ ID NO: 309743 - DNA, 253 bp, Unknown
  Bacterial polypeptide expressing nucleotide sequence isolated from the Sargasso Sea
gaaattggaggaactgcagaggaagaagcagcagaatttattaagaatcataaaattaaaaagccaattgttggatttattgctggagtaacagctcctcctggtcgaagaatgggtcacgcaggagctataatttctggaggtaaaggtggagccaaagataaaataaaaaaaatggaggattgtggaataattattgcaaactcaccatcaaaaattggaaaaacattatttaataaattgtccaattgaa

SEQ ID NO: 309744 - DNA, 741 bp, Unknown
  Bacterial polypeptide expressing nucleotide sequence isolated from the Sargasso Sea
tatgaatttacatgaataccagtcaaagaaactattttttgatcatggaataccagtacttgatggagatatagcaagctctccagatgaagccaaatccgcagcagagaaacttaagggagacatttgggtagtaaaagcacaagttcatgctggtggacgcggaaaagcgggtggagtaaagatagctagtagcattactgaagttcatgaaagtgcctctgagatgcttggcactaatctcataacaaaacaaacagacgaaaagggattgcccgtgaatcaggtttatgtcgaatctggtacatcgattcagagtgaatattatttgagcttgttggttgatcgaacaaaagagtcatggacatacattgcatcaatagaaggtggagttgatattgaggccgttgctgaggagtctccagaaaagatcatcaattacaccattgacccattgaaggggctagaattgtcctctttgaaacaaatggcagaccgtatgggtttcaccgatgatgttcactctcaatttgtttcaatcacaaaaaagatgtttgaaatcgccaaagagaaggatgccaacctcattgaggtcaatccccttattttggatgatcacaatcagctgattgcattggatgcaaaaatatcaattgaaagtaacgcattattcagacaagaagaactcctatctttcaaagataactctcaagaaaataaactggaagtaaaggcttcaga

SEQ ID NO: 309745 - DNA, 550 bp, Unknown
  Bacterial polypeptide expressing nucleotide sequence isolated from the Sargasso Sea
aatgaatattcacgagcaccaggcaaagcaaatcttgaaaaagtacggagcagctgtacccgaaggtgtatttgcatttaatgttccagatcttctaaaaaaaattacaactttaaaaactgataaatacgttctaaaggcacaaattcatgcaggtggcagaggtaaagccggaggtgttaaaattgttgataatattaaaaatttggaagaagaagcgaataatttactaggtaaaattttaattacccatcaaacaggtccatctggtaaagaggttaaaagattatacgttgaatcagcatctaacataagtaaagaattttatctttcctgtttagttgatagagcaagttctaaaatagcttttatttctagtgatcaaggaggaatgaatatcgaagaggttgcaaaagatacaccagaaaaaattataactactaaagttgattttgttcaagaaatttcagatgaagattgtaaaaaaattattaaagtttttaatttggacaaagattctaaggtgagcaagcttataaatttaattaaa

SEQ ID NO: 309746 - DNA, 331 bp, Unknown
  Bacterial polypeptide expressing nucleotide sequence isolated from the Sargasso Sea
gtaatttcagaatctggttcacaacccgctaactttttagacataggcggtggagcagatgaagataaagttgctgaagctatgaaaataatttgttcagatactgatgttgataaaatattcgtaaatctttttggaggtatcctgcggtgtgatgtagcagcccgaggaattgttcaagcgagtaaagaaacaacaataccaccaattattgtaagaatgctgggtacaaatgctgatgaaggagcacaaatattactagattcatcattagaggttaaattaattcatgatttacatgatgctaggaaagagtttttaaaatcatgag

SEQ ID NO: 309747 - DNA, 441 bp, Unknown
  Bacterial polypeptide expressing nucleotide sequence isolated from the Sargasso Sea
aatgaatttacatgagtatcagggcaaagctctctttgctgaatacaatttacctgtttcaaaagggaaaattatttttaaagctgaagatgtaatagaagcttgtaatgagataggtggatcaaaatgggttgtaaaagcacaagttcatgctggtggaagaggaaaggcaggtggagttgaattaatagatgatcccaatgagggagttaaatttgctaataaatggcttggcaaaaatttaatcacatatcaaactgataaagacggacaaccagtgaactcaattctcatagaagagtgtactgaaattgtaaaagaactttatctaagtgcagtcattgatagagaatcacaaaaaatagtttttattggctcttatgagggcggagtaaatatcgaagaagtagctaagaatgcaccagaaaaaaatatttatca

SEQ ID NO: 309748 - DNA, 197 bp, Unknown
  Bacterial polypeptide expressing nucleotide sequence isolated from the Sargasso Sea
gatggatatacatgagtaccaggcaaaaaaaattttatctgactttggaattggaattccaaggggaggtattgcctatagtcctgaaaatgcggaatataaggcgaaagagattggtggttcgcgttgggttgtaaaggcacaggttcattcaggcgcaagaggtaaagctggcgggataatcatttgcaacgatg

SEQ ID NO: 309749 - DNA, 369 bp, Unknown
  Bacterial polypeptide expressing nucleotide sequence isolated from the Sargasso Sea
aatgaatattcacgagcaccaagctaaaaaaattttaaaaaaatatggagcatcggtaccagatggtgttttttcagattcagttgaagaattgttagaaaagtcaaaatcattaaaaacagaaaaatttgttttaaaagcccagattcatgctggtggaagaggtaaagctggaggaataaaaattgtaaacacaattgaagagctaagtttagcagccaaggaaatgatgggaaaaaaattgataactcatcaaacaggagccgaaggaaaagaagttaaaagactttatgttgagtcttcttcagaaattagtaaagaattttatctttcatgtttagttgatagagcaagttctaagattgcatt

SEQ ID NO: 309750 - DNA, 238 bp, Unknown
  Bacterial polypeptide expressing nucleotide sequence isolated from the Sargasso Sea
gatgaatctacacgaatatcaagctaagaagttatttaaggattatgacatatccgtttcagaaggcttgccggcttcctctagccaagaggctgaaaagatagctttatctctaaatgttgataagtgggtagtaaaagcacaagtccatgctggaggaagaggtaagtctggaggagttgaattagttgatagcattgagaaagttaaagcttttgctgataaatggcttggaaaa

SEQ ID NO: 309751 - DNA, 431 bp, Unknown
  Bacterial polypeptide expressing nucleotide sequence isolated from the Sargasso Sea
aatgaatattcacgagcatcaagctaaacaaattttaaaaaaatatggagtaattgtacctaatggagtttttgcattttctactgaagaattaataacaaaagcaaaatcattaaaaacagaaaaatttgtattaaaagctcaaatccacgccggtggaagaggaaaagctggaggagtaaaaatattaaatacaatagaagagttaaatattgcagcaaaagaaatgttgggtaaaacacttattacccaccaaacaggacctgatggaagaaaagttaaaagattgtatgttgaagaatcttccaatattgataaagaattttacttatcttgtttgattgatagggctagttctaaaatcgcatttatatctagtgatcaaggtggagtagatatcgaaaaggtggcaaaagaaacaccaaacaaaa

SEQ ID NO: 309752 - DNA, 655 bp, Unknown
  Bacterial polypeptide expressing nucleotide sequence isolated from the Sargasso Sea
aatgaatctccacgaatatcaatcgaaagctttatttattgaatacggtattaatgtcccgagagggattgctgttgaatcttcagttgaagctcttaaagcagtagaggaaatttctgcagatatttgggtagttaaagcacaagcgcatacaggcggacggggtaaagctggtggtgtaaaactggcccattctcttgatgaagtatgtaaatatactgatgaaatgttaggtatgaccttggttacctatcagacaggtccagaagggcttccagtaaataaagtttatatcgaagaggcctctgaaattgaacgagagctttatttaagcatactagtagatagagataatggtcggatatcatttgttgcttcagcagaaggcggagtggatattgagagcgttgccgcaaaaactccagaaaagatatttacaatctcaatctccccagatgttggattacaagattatcagataagacaattagcttttaaattagattttaataaagaacaaattaaacaattttctctacttctgaataatttatatcaattatatttagaaaaagatgcaagtttaatagaaattaatccacttattatcaataagttaggaaatttagttgcattagatggaaaaatcaatatt

SEQ ID NO: 309753 - DNA, 400 bp, Unknown
  Bacterial polypeptide expressing nucleotide sequence isolated from the Sargasso Sea
tttggatatacacgaatatcaagcgaaagaaatattatcaaattatggagttcaaattttagcaggtgagctagtacataacaccacagaagctgttgatgcatttaaaaaattaaatacagatttatgtgttgtaaaagcacaagttcactctggtgcaagaggtaaagctggaggtatagttctctgtaaatctaatgaggaagttaaagctgcatctgagaaactttttggcacttatttaaaaactattcagactggtgacgaagggaagttaattgaaaaactctatattgaatccggttgtgatatcgacagggagatttatttagcatttgtaatggaccgagcatcacagagaattgttattgtcgcttctgccgaaggtggtatgtcaata

SEQ ID NO: 309754 - DNA, 715 bp, Unknown
  Bacterial polypeptide expressing nucleotide sequence isolated from the Sargasso Sea
tatgaatattcacgaacatcaggcaaaagaaattttaaaagaattcggtgcaccaactacagaaggcgtagtgatctatgatactaataatttaattgagaaaatcaaagttttggactcagaagaattagttttaaaggctcaaattcatgcaggaggtagagggaaggctggaggagtaaaacttgtaaaaagatcaaaaattttggatgaagcaaaaaagctttttggaaaagttttagttacacaacaaactggcaaagagggtaaagaggtgaagagaatttatgttcaaaaagcctatgatatttcaaaagaactatacttatcttgtttggtagatagacaaagtggaaaaattgcctttatcagtagcactgaaggaggtgtagatattgaacttgtagcaaaaaatactcctaaaaaaatagtaactactaaagtagattttaaaaaatctcttagtgagcaagatatcaaaaatgtaattaaaatatttgattttgatagtgaacaaaaaaaagatggctcaaaattagtaaatgcaatttataatattatgatttctaaagatgcatctttaattgaaataaaccctttaattattactaaagataaaaaaatactttgtttagatgcaaaaatgaattttgatgataattctatttttagacatccagaaatttctcaattaagagatttaaatgaagaagat

SEQ ID NO: 309755 - DNA, 478 bp, Unknown
  Bacterial polypeptide expressing nucleotide sequence isolated from the Sargasso Sea
aatgaatatacacgagcaccaagcaaaacaaattcttaaaaaatacggagcaaacatccctgaaggagtatttgcatttaatgtatccgatcttttacaaaaaactaaggaattgaaaactgataagtatgttcttaaagctcaaattcatgctggtggaagaggtaaagctggtggagtaaaaattgttgataatttagaaaatttagaaaaagaagcaaaaattttgcttggcaaaaacctaattactcatcaaacaggaccattaggtagagaagtaaaaagactatatgtcgaggaagtatctaatattagtaaagaattttatctttcttgcctagttgatagagcaagttcaaaaattgcatttatttcaagcgatcaaggaggaatgaacattgaagaagttgcccaaaatacacctgaaaaaattttaacaaccaaagtcgattttaaccaagaaatttccgaggttgat

SEQ ID NO: 309756 - DNA, 499 bp, Unknown
  Bacterial polypeptide expressing nucleotide sequence isolated from the Sargasso Sea
aatgaatattcacgagcaccaagcaaaagaaattttaaaaaaatacggtgcaaaagttccaagaggtgtttttgcttttaaagttgaagatttattagaaaaagccaataatttaaaaaaagaaaagtacgttttaaaagcgcaaattcactccggtggaagaggaaaggctgggggtataaaattagtcaataatttagacgaattagaaaaagaagcagaaaatttaattggtaaaacactcgtaacaaatcagactggagcaaatggaagaaaagttagtaggctttatgtagaagaagtatctgaaattaataaggaattttatttatcatgtttggtagatagagctagttctaaaattacatttatttcaagcgatcaagggggaatggatatagaggaagttgcaaaaaaaaatcctgaaaaaattataacaacaaaagttgaatttcgtagtcaaatttctgaagacgattgtaaaaaaattataaatata

SEQ ID NO: 309757 - DNA, 340 bp, Unknown
  Bacterial polypeptide expressing nucleotide sequence isolated from the Sargasso Sea
aatgaatattcacgaacatcaagcaaaagcgttgttaaaaaaatttggggccccagttcctaatggaatatcaggaaaatcagtagaagaagttttagaaaaagccaaagatttaaaaaccgataaatttgttcttaaagtacaaattcatgccggtggaagaggtaaagctggaggtgttaaaatccttgataacattgaagaattgggcaaagagtctagaaaattactaggaaaaaaattagtgacacatcaaacgggttcagaaggaaaagtagtaaaaaggttgtatgtagaagaatcctctaacattgaaaagaattttatttatcatgtgtga

SEQ ID NO: 309758 - DNA, 805 bp, Unknown
  Bacterial polypeptide expressing nucleotide sequence isolated from the Sargasso Sea
atgaatttacatgaataccagtcaaagaaactattttttgatcatgggatacctgtattaaatggagatattgcgagttctccagatgaagccaaatcggcagcagagaaaattgagggagacatttgggtagtaaaagcacaagttcatgctggtgggcgcggaaaagctggtggagtaaagattgccaaaagtatcactgaagttcatgaaatggcctctaagatgcttggcatcaatctgataacaaaacaaacagacgaaaatggattgcctgtgaaccaggtctatatcgagtctggcacatcgattcagagtgaatattatttaagcttaattgttgatcgaacaaaagagtcatggacatacattgcatcaaaagaaggcggagttgatatagaggcagttgctgaagagtctcccgaaaagatcatcaattacaccatcgacccattgagtggactagaattgtcctctttgaacaaaatggcagaacgaatgggtttcaccgatgaagttcatactcaatttgtttcaatcacaaaaaagatgttcgaaattgccaaagacaaggatgctaacctcattgaagtaaaccctcttattttggatgatcataataaactcattgccttagatgcaaaaatatcaattgaaagcaatgcattattcagacaagaagagcttcttttgttcaaagatgattctcaagaaaatgaacttgaagtaaaagcttcagagcatgatctcagctatgtatccttggatggaaatattgcatgcatggttaatggggctggacttg

SEQ ID NO: 309759 - DNA, 202 bp, Unknown
  Bacterial polypeptide expressing nucleotide sequence isolated from the Sargasso Sea
aatgaatatacacgaacaccaagctaaacaaattttaaaacaatttggtgcagcagttcccgaaggagtttttggttttacagttgaggagctgctagaaaaatgtaagggacttcaaactgacaaatatgttttaaaagctcaaattcacgctggcggtagaggaaaggcgggtggagtaaaaattttagataatttgaag

SEQ ID NO: 309760 - DNA, 530 bp, Unknown
  Bacterial polypeptide expressing nucleotide sequence isolated from the Sargasso Sea
gatggatatacatgaataccaagcaaaaaaaattttatctgactttggaattggaatcccaaggggaggtattgcctatagtcctgaaaatgcagaatataaggcgaaagaaattggtggttcgcgttgggttgtaaaagcacaggttcattcaggcgcaagaggtaaagctggcggaataatcatttgcaacgatgctttagaagttgcacgtgctgcagataagctacttggaaaaaaacttattacaaatcaaacaggcccttcaggaaaaattatcaatagagtttatatagaagaagcctctgatatagaaagagaactttatttaggtcttgtttttgatagaggctctgaatgtataatggttgttgcgtctactgaaggtggaatgagtgttgaagagatatcaaataaaaaaccagaaacaataataaggtcaaaaatagaagccgcggttggtatacaggaatttcaagcaagggaaattgcaaataaccttggtgttgaaacaggtcttatctcaagaa

SEQ ID NO: 309761 - DNA, 244 bp, Unknown
  Bacterial polypeptide expressing nucleotide sequence isolated from the Sargasso Sea
attggtggtacagctgaggaagaggctgctgaatacattaaagataatgtatctaaaccagttatttcatatatagctggccaaacagctccggctggaaagaggatgggtcatgctggggcaattattgctggcggcaaaggaacggctgctgataaaattaagaagttaaaggaatgtggtgtgcatattgcagaaaatttgcttcaaattggaactaaaactaaggaagttctcggatagg

SEQ ID NO: 309762 - DNA, 574 bp, Unknown
  Bacterial polypeptide expressing nucleotide sequence isolated from the Sargasso Sea
atgaatttacatgaataccagtcaaagaaactattttctgatcatggaataccagtactagaaggaaatatagcaagctctccagatgaagctaaatcctcagcagagaagcttaagggagacatttgggtagtaaaagcacaagttcatgctggtggacgcggtaaagcgggtggagtaaagattgctagaagcattgcagaagttcatgaaatggcctctgagatgcttggtactaatctcataacaaagcaaacagacgaaaagggattgcctgtgaatcaggtctatattgagtctggtacatcgattcagagtgaatattatttgagcttgttggttgatcgaacaaaagagtcatggacatacattgcatcaatagaaggtggagttgatattgaagccgttgctgaagagtctccagaaaagatcattaattacaccattgacccattgaaggggctagaattgtcctctttgaaacaaatggcagaccggatgggttttactgatgatgttcactctcaatttgtttcaatcacaaaaaagatgttcgaaatcgccaaagagaagg

SEQ ID NO: 309763 - DNA, 234 bp, Unknown
  Bacterial polypeptide expressing nucleotide sequence isolated from the Sargasso Sea
tatgaatttacatgaataccaatccaagaagctatttttggatcatggcataccggtattgaaaggagaaatagccaattctccaaatgaagcgaagtcagcagcagagaaaattcagtctggtatttgggtggttaaagcccaagttcatgctggtggacgcggaaaagctgggggagtgaaaattgcgaagagcctagctgaggtaggagaaaaagctgctgaaatgcttgg

SEQ ID NO: 309764 - DNA, 118 bp, Unknown
  Bacterial polypeptide expressing nucleotide sequence isolated from the Sargasso Sea
tatgaaaattcacgaataccaagcaaaacagatcctaacaaaatatggagtccccgttccgaaagggaacgtagcgttttctgtagatgaagctttaatggtagcagaggatttaaaa

SEQ ID NO: 309765 - DNA, 584 bp, Unknown
  Bacterial polypeptide expressing nucleotide sequence isolated from the Sargasso Sea
aatgaatatacacgagcaccaagcaaaacaaattctaaaaaagtatggagcgaatgtacccgagggagtatttgcatttaatgtatccgatcttttgcaaaaaactaaagaattgaaaactgataagtatgttcttaaagcccaaattcatgctggtggaagaggtaaggctggtggagtaaaaattgttgataatttagaaaatttagaaaaagaagcaaatattttgcttggcaaaaacctaattactcatcaaacaggacccttaggtagagaagtaaaaagactatatgttgaggaagtatctaatattagtaaagaattttatctttcttgcctagttgatagaggaagttcaaaaattgcatttatttcaagtgatcaaggaggaatgaacattgaagaagttgcccaaaatacacctgataaaattttaacaactaaagtcgattttaaccaagaaatttccgaggttgattgtaagaaaattattaaggtttttgaattagacgataattctggttcagaggctataagcttaataaaagcaatttataaattattcatagaaaatgatgcaaatt

SEQ ID NO: 309766 - DNA, 631 bp, Unknown
  Bacterial polypeptide expressing nucleotide sequence isolated from the Sargasso Sea
tatggatttatttgaatatcaaggaaaatcgctttatcaagactttgacataagccatcctaaatcatccttggtaaaagaccctaaagaacttcaagaattaaaggggttgagttatccagtagttgttaaagcgcaagttcaagtaggtggtagaggtaaagctggaggaatcaaagtagcaaacaaccatgatgagctgattgaattaggaaaccagatatatggaatggacataaaaggtcacaaagtagaggttctattaattgaagaagcttcagaaattttagaagaatactatctttcgtttacgcttgataggtcggctaaaaaatacttaatgatgctcagtgccaagggtggtatggatattgagcaagtagcaaaagataatccaaaagatttggtaaaacttcatatatcaccttcacagggcttagacaaaaaagatttagataaatcaataattgaagctaatttaaatcaaaaatttaaaaatgaattatcagaaataattattaaattatatgaactatttgatgaaggagattgcgatttagttgaagtaaatcctttagctattaccaaagaaggagtaagggcacttgattcaaaagttgcattagaaatg

SEQ ID NO: 309767 - DNA, 241 bp, Unknown
  Bacterial polypeptide expressing nucleotide sequence isolated from the Sargasso Sea
atgaatcttcacgaatatcagggcaaagctttatttgctgaatttaatttacctgtttcaaaaggtaaggttgttttcgatgcagatgaaattattgatgcatgtaacgaaataggtggttcaaaatgggtagtgaaagcccaagttcatgctggaggacgaggaaaagcagggggtgtagagttgattgataaccctcaagatggagtagaatttgcaaaaaaatggcttggtaaaaatt

SEQ ID NO: 309768 - DNA, 281 bp, Unknown
  Bacterial polypeptide expressing nucleotide sequence isolated from the Sargasso Sea
tatgaatttacatgaataccagtcgaagaagttatttttggatcatggcataccggtattgaaaggagaaatagccagttcccctgatgaagcgaagtcagcagcagagaaacttcagtcaggtatttgggtggttaaagctcaagttcatgccggcggacgcggaaaagctgggggagtgaaaattgcgaagagcatagctgaggtaggagagagggctgctgaaatgcttgggaccaatttgataacaaaacaaacggatgatctaggactgcgagtaa

SEQ ID NO: 309769 - DNA, 481 bp, Unknown
  Bacterial polypeptide expressing nucleotide sequence isolated from the Sargasso Sea
atgaatttacatgaataccagtcgaagaagttattttcggatcacggcataccggtattgaaaggagaaatagccaattctccagatgaagcgaggtcagcagcagagaaactccagtccagtatttgggtggttaaagctcaagttcatgctggtggacggggaaaagctgggggagtgaaaattgcaaagagcatagctgaggtagaagaaagagctgctgaaatgcttgggaccaacttgataacaaaacaaacggatgatctgggactcccagttagaaaggtctatattgagtcaggcacatcaattcaaagcgaatattatctaagcttgctggtcgatcgaacaaaagaatcatggacgttcattgcatcaaaagagggtggagttgatattgaagctgttgctgaagaatctccagataagatcgtcaactatacgatagacccattgaagggtctagaaataggctgttaga

SEQ ID NO: 309770 - DNA, 272 bp, Unknown
  Bacterial polypeptide expressing nucleotide sequence isolated from the Sargasso Sea
tatggatattcacgaataccaagcgaaaaaaatactttcagactttggggttagtattccaagaggaggaattgcatatagtccagaaaatgctgaaaataaagcaagagagataggtggaaataagtgggtagtaaaagcacaaattcactcgggggcaaggggtaaagcaggtggaataattttatgtgatacacctttagcggttgctcaagctacagataaacttttaggaaaaaaattagttactaaccagacaggaccagagggaa

SEQ ID NO: 309771 - DNA, 598 bp, Unknown
  Bacterial polypeptide expressing nucleotide sequence isolated from the Sargasso Sea
atggatatccatgaatatcaggcgaaagaaatattagcaaagtttggtgtaggcgtaccaccaggagctcttgcatacagtccagagcaagcagcatatcgagcaagagagattggaggtgatacctgggttgttaaagcgcaggtacacgcaggtggtcgtggaaaagctggaggtgttaaagtatgtcatagcgacaccgagattgtagaaacatgcgaaaacttatttggaagtaaattagttactcatcaaacagactcaaacggtaaaggcgtttaccgagtttatgtagaaggtggtgtgccaattgatagagaaatatacctagggtttgttttagatagatcctctcaaagagtgatgatcgtagcctctgctgaaggaggtatggagatcgaagacatctctgcagacaaacctgaaagcattgtgcgttcgacggttgaaccggcagttggattacaagattttcaatgtaggcaaattgcttttaaacttggtattgagccagttttaacgcagagcatggtaaggactttgcaaggttgctatcgtgcattcagagaacatgatgcaactatggtgaagttaaccc

SEQ ID NO: 309772 - DNA, 349 bp, Unknown
  Bacterial polypeptide expressing nucleotide sequence isolated from the Sargasso Sea
gtttccgaactaagagataaaacacaagaagactcaaaggaaatttttgcatcagacagaggtttaaactatgtcagtttagatggaaatataggtaatattataaatggcgcaggacttgcaatggcatcaatggacatgattaaattagctggaggagcccccgcaaattttttagatgtaggaggtggtgcaacgccagaaaaaatagttaaagcttttaaattagttacaatggatgaaaaagttaaagtaattcttgtaaatatttttgctggtatcaacagatgtgattgggttgcagaaggaattgtagatgcattaaaaaaaattgaaattaaagttccat

SEQ ID NO: 309773 - DNA, 484 bp, Unknown
  Bacterial polypeptide expressing nucleotide sequence isolated from the Sargasso Sea
aatgagtgtgctaattagttcaaaaactaaagcgatttttcaaggttttacaggttcacaagcaactatgcatgccgaacaatgtattgcatatggaacaaatgttgttgggggcgtaacacctggaaaaggtggccaagaacatttaaacttgcctgtttttaactcagtaaaagaggcagtttcagaaactaatgcaaatacttcagtaatatttgtaccggcaagattcgcaaaagcggcaataatagaagcagcagagaatggggttgaattaattatttgcatcactgaaggcgtgccagtcttagatatgatcgatgtcattgatgttttaaatcataatcctaatgttcgtcttattggtcctaattgtcctggggttataactccaggcgaagcaaaacttggaataatgcctgcctctattcatacaaaaggatcagtagggattgtttctagatcagggactttgacatatgaa

SEQ ID NO: 309774 - DNA, 729 bp, Unknown
  Bacterial polypeptide expressing nucleotide sequence isolated from the Sargasso Sea
aatggacatacacgaatatcaagcaaaaaaaatattgtccgattttggtgtaaaaattccgactggcggaattgtttatagtccagaaaatgcagaaaacaaagcgagagaaattggcggttctaaatgggttgtaaaagcacaagttcactctggtgctagaggtaaagcgggtggaattataatatgtaattctccgttagaagttgctgatgcaactgataaattattaggtaaaaaattaattacaaaccaaactggtccagagggtaagataataaatagaatttatattgaagaagcaactgatatcaaacatgaattatatttaggtttagtgtttgatagatcttcggaaagtataatggttgtagcctcaacagaaggtggaatgagtgtcgaagaaatttcaaaagaaaaacctgaaacaattatacgatctaaaatagaagtagcagttggtattcaacaatttcaagcaagagaaatagcttttggtttaggaattgaatcaaaattgatctcaagagctgcaaatacaattattggttgttataaagcttttagtgagcttgatgcaacaatggttgaagttaacccattagttgtatcacaccaagatgaaatattagcattagattgtaaaatgagttttgataataatgcaatgtttagaagagatgaaattgcagaacttagagataaaacacaagaaaattcaaatgaagt

SEQ ID NO: 309775 - DNA, 547 bp, Unknown
  Bacterial polypeptide expressing nucleotide sequence isolated from the Sargasso Sea
aatgaatattcacgagcatcaagctaaagaaattttaaaaaaatatggtgccattgtacccgaaggtgttttttcacactcagttgaagaattattacaaaaggcaaaatcattaaaaacagaaaagtatgttttaaaagcacagattcacgctggaggacggggaaaggcaggagggataaaaattgtaaatacaatagaagagttaaattcagcagctaaagaaatgttaggaaaaaaattgataactcaccagacaggaccccaaggaagagaagttaaaagattatatgttgaatcatcttcagaaattgaaaaagaattttatctttcatgtttagttgatagagcaagttctaagatagcatttatttcaagcgatcaaggtggaatggatattgaggatgtttcaaaaaataacccaaaaaaaattgtaaccacaaaaattaatttagatgaaaaaatattagataaagattgtgaaaaaattatagaaatatttaatttaagtctagaagcaaaaaagcaaagctttaaatttgattaa

SEQ ID NO: 309776 - DNA, 499 bp, Unknown
  Bacterial polypeptide expressing nucleotide sequence isolated from the Sargasso Sea
tatgtttaggaggagtccagtttcagtattaagagatctcactcaggaggatagccaagagatttttgcttcagatagaggtttgaattatgttagcctagatggggatattggaaacttaataaatggtgctggtcttgccatggcttcaatggacatgattaaattagcaggaggaagtccagcaaattttttagatgttggaggaggagcaacaccagaaaaaatagtcaaagcatttaaattaataacgatggacgaaaaggttaaagtaatattggtaaacatttttgctggaataaataggtgtgattgggttgcggaggggatagttgaagcattaaaaaaaattgaaattaaagtacctttaataattagacttgctggaacaaatgtcgaaaaaggtaataaaattttaaaagacagtaaaattaattatatcgaagcaaatactcttgaagatgctgcaaataaagctgttgcagctttaaaaaaataa

SEQ ID NO: 309777 - DNA, 802 bp, Unknown
  Bacterial polypeptide expressing nucleotide sequence isolated from the Sargasso Sea
atggatatccacgaataccaagcaaaaaaattattagcagattttggagtaattattcctagaggaggaattgcatatagtccagaaaatgctgaaaataaagctagagaaattgggggatctaaatgggttgtaaaagcacaaattcactcaggtgcaagaggaaaggcggggggaattatattatgtaattcaccattagaagtcgcgcaagcaaccgataagctattaggaaaaaagttagtcacaaatcaaacaggaccccaaggaaaaatagtaaatagaatatatgtagaggaagccactgatattaaaaaagaattttatttaggattagtttttgacagaagttcagaaagtataatggttgtagcatccacagagggcggtatgagtgttgaagaaatttcaaaagaaaaacctgaaagcattataagatctaaaatagaagtagctgtaggaatgcaaaaatttcaagcgagagagatagcgtttggtctgggggttgcacctgaattaattaatagaacagccgagactatcattggttgttacagagcatttagtgagttagatgcaactatggttgaaattaaccctctagctgtttcaggacaaggtcaaatactagccttagattgtaaaatgagttttgacaataatgctctatttagaaggaaccaaatatctgaattaagagataaaacacaagaaaatcctagcgaggtttatgcatctgatagaggtttaaattatgtaagcttagacggaaatattggaaacataattaaatggagcagga

SEQ ID NO: 309778 - DNA, 535 bp, Unknown
  Bacterial polypeptide expressing nucleotide sequence isolated from the Sargasso Sea
aatgaatattcacgaacatcaagccaaaaaaattcttaaaaagtacggtgcacccgttcctgaaggtgtttatggtttttctgttgcggagatagttgataaagcaaaaaatttaaatactaaaaaatttgttctaaaagcacagatacatgcaggaggtagaggtaaagcaggaggcataaagatactaaacaatattgatgaactaaaagttgcatctgcagaattactaggaaaaaaactaattacacctcaaacaggaatagacggtaaagaggttaaaagaatatatgtagaggagtcttcagaaatatctaaagaattttatctttcatgtatagtcgatagagcaacttcaaaaatagcatttatttcgagtgaccaaggtggcatggatattgaagaggtagcaaaaaacaatcctgaaaagattattactacaagaatagattttcaaacagaaattaagcatgaggattgtgaagaagtaattaaaatatttaaattaaattcagatgcaaataatcaagcaatt

SEQ ID NO: 309779 - DNA, 433 bp, Unknown
  Bacterial polypeptide expressing nucleotide sequence isolated from the Sargasso Sea
aatgaacatacacgaataccaggcaaaagaaattcttaaaaattttggcttacctgttcttaatgggaaagcatataataaaaatcttgataatcttgaggctgatttaattaatttaaatggccctccatgggttgtaaaatcacaaattcatgcaggaggacgaggcgcgggacactttaaggatccttttaatgacaaggggggagttcaagttatttttgaaaaagaacaagtatttcctgttgcaaaatcaatgatgggaaatgtattgataacaaaacaaacaggggagaatggcaaaactgtaaatcgcatttttattgaagaaggctgtaatatcgaaagggaattctatctaagtctgctcattgataggaataattcaaaagtaatgctcatgatttctgctgctggaggtatggacattgaa

SEQ ID NO: 309780 - DNA, 454 bp, Unknown
  Bacterial polypeptide expressing nucleotide sequence isolated from the Sargasso Sea
catgggaattctgatcaacaataatactaaactgctggttcaggggatcactggatcccagggacaactccacacccgtggttgccgggattatggaaccaacatcgttgccggtgtcacccccggaaaaggcggtcaggattttgaaggaatcccgatattcaataccgtccaggaagctgtaaatgctaccggggccaatgcgagtatgatctttgtcccgcccccttttgctgctgatgcagtcatggaagctgcaggagcaaaaattcctctgattgttgccatcaccgaaggggttccagtgaccgacatggtccgcgccgtcgattttgtcaggcgacagggggtcaggctggtagggccaaattgcccgggggtgatcacgccgggacagtgtaaaatcggaatcatgcccggaccgatccatgaacccggaaaagttggggtggtt

SEQ ID NO: 309781 - DNA, 164 bp, Unknown
  Bacterial polypeptide expressing nucleotide sequence isolated from the Sargasso Sea
tatggacattcacgaatatcaggcaaaaaaaatactctccaactttggagtaacaattcctagaggtggaattgtttacagtccagagaatgctgagaataaagcgagagaaattggtggatcaagatgggttgttaaagctcaaatccattctggtgcgagag

SEQ ID NO: 309782 - DNA, 127 bp, Unknown
  Bacterial polypeptide expressing nucleotide sequence isolated from the Sargasso Sea
aatgaatattcatgaataccaggccaaggctctgctcaagagctacggcgcgccggtggccgatggcgtcgccatcctgaccaaggatgaagtcgacgccgccgggccaagcttcccggcccgcttt

SEQ ID NO: 309783 - DNA, 360 bp, Unknown
  Bacterial polypeptide expressing nucleotide sequence isolated from the Sargasso Sea
tatgaatattcacgaacatcaagcaaaagaactttttagagagtacaatattcctgtttcgactggatcagtggctttttcaaaagaccaaatagagcaatcagtaaatgaagtatcaggtcctacttgggttgttaaagcccaaattcatgctggaggtagaggaaaaggaggaggagttaaagtagtttcatcatctgaagacgcagttagttcagcagaaaagatgtttggtatgaatttaataaccccgcaaacaggaaaaaaaggaaaaattgtaaatcgagtttatattgaaaatggatctgatattgaaaaagagttgtatctatcatgtttagtagatcgagccacaagcaa

SEQ ID NO: 309784 - DNA, 475 bp, Unknown
  Bacterial polypeptide expressing nucleotide sequence isolated from the Sargasso Sea
atgaaggtacatgaatatcaaggaaaagaattatttcgtaaatatcaaataccaactccaaatggagtaccagtctttagtgtagaagaagcactaaaagcatatgatgaattagctacagatacggtagttgttaaagctcaaattcatgcaggaggtcgtggaaaaggtggtggagtaaagttagctcacagcaaagaagaagtagaatctctatcaaaagaaatactaggcatgacactggtaacgcatcaaaccgggccagatggtaaggaggtgcaaaggttattgattgagtccggtgcgaatattgaaaaagaattctatgctgctattaccctagacaggagcaaggaaatggatgtgtttatggtatcaattgaaggtggagtagatattgagaaagtcgcagatgaaaccccagaaaaaattgtaaaaacctggatcgacccaatgctgggaatgaactccttcc

SEQ ID NO: 309785 - DNA, 225 bp, Unknown
  Bacterial polypeptide expressing nucleotide sequence isolated from the Sargasso Sea
tatggacattcacgaatatcaagcaaagaaaatactttcaaactttggggtaacaattcctagaggtggaattgtttacagtccagaaaatgctgagaataaagctagagaaattggtggatcaaggtgggtcgtgaaagctcaaattcattctggtgctagaggaaaagctggagggataattgtttgcaatacaccatttagaagtttgctcagcaacagata

SEQ ID NO: 309786 - DNA, 481 bp, Unknown
  Bacterial polypeptide expressing nucleotide sequence isolated from the Sargasso Sea
tatggatatacacgagtatcaggcaaaaaaaatactttcaggttttggcgttacaatacctagaggcggaattgcttacagtcctgaaaatgctgagaataaagctagagagttaggtggatctaagtgggtagtaaaagcgcaagttcattctggagccagaggaaaagcaggaggtataattatttgcaatagttctttagaagttgctcaagcagctgacaagcttcttggaaaaaaattggttacaaaccaaactggtccggaagggaaaataactaatagagtttatattgaagaagcaacagatattaaaaaagaattatatttgggtttagtatttgatcgaagttcagaaagtataatggttgtagcatctacagaaggaggaatgagtgttgaagaaatttctaaaaagaaacctgaaactataattagatctaaaattgaagtggctgttggaatgcaaaaatttcaagct

SEQ ID NO: 309787 - DNA, 359 bp, Unknown
  Bacterial polypeptide expressing nucleotide sequence isolated from the Sargasso Sea
gacctgtataggaattggtggcgatcctattaatggaacaaactttacagattgtttagatttatttttaaaagatgaagaaacaaaatctatattaattataggtgaaataggaggaacagctgaagaagaagcggcagaattttataaaaatcataaaataaaaaaacctatggttggatttgtagcaggtattacagctccaccaggaagaagaatgggtcatgcaggagcaataatttccggaggaaaaggcggagcagaagataaaataaaaaaaatggaagattgtggtataacaattgcaaaatcgccagcagaaattggaaaaactctattaaacaaattgtctaattgaa

SEQ ID NO: 309788 - DNA, 337 bp, Unknown
  Bacterial polypeptide expressing nucleotide sequence isolated from the Sargasso Sea
tgatcctatcaatggtacaaattttatagattgtctagatctatttttaaacgacgcggatactcaatcaattttaatgattggtgaaattggagggacagctgaggaagaggctgcagatttcattaaaaatcataaaataaaaaaaccaattgttggatttatagcaggtgttactgccccaccaggacgaagaatgggtcatgcaggagccataatttcaggtggcaaaggtggcgcaaaggaaaagattaaaaaaatggaggattgtggaataaccatggccgactctccatcaaagattggaaaaacattattaaataaattgtctaattga

SEQ ID NO: 309789 - DNA, 487 bp, Unknown
  Bacterial polypeptide expressing nucleotide sequence isolated from the Sargasso Sea
gcaggaactgtatgtcagcctcgtcgtcgaccgcatctcgcagaagatcgtgctgatgggttcgagcgaaggcggcatggacatcgaagaagtcgccgaaaagcacccggaactgatccacaaggtcatcgtcgagccgtcgacgggcctgctcgacgcgcaggcagacgacctcgccgcgaagatcggcgtgccggctgcttcgattccgcaagcgcgcgcgatcctgcaaggcctgtacaaggcattctgggaaaccgacgcatcgctggctgaaatcaacccgctgaacgtttccggcgacggcaaggtcatcgcactcgacgcgaagttcaacttcgactcgaacgcgctgttccgccacccggaaatcgtcgcgtaccgcgatctggacgaagaagatccggctgaaatcgaagcgtcgaagttcgacctcgcgtacatctcgctcgacggcaacattggctgtctcgtgaacggcgcaggc

SEQ ID NO: 309790 - DNA, 475 bp, Unknown
  Bacterial polypeptide expressing nucleotide sequence isolated from the Sargasso Sea
aatggatattcatgagtaccaagcaaaaaaaattctagcaggatttggagttgcagtaccaagaggtggaatagtttacagtccagaaaatgcggaaaataaagctagagagcttggaggatctaagtgggttgtaaaagcacaaattcactcaggagcaagaggaaaagctggggggataattgtctgtaaaaccgaattagaagttgcacaagcaacagataaacttttaggaaaaaaactagtaaccaaccaaactggacctgaaggaaaaattgttaatagagtttatattgaagaagcaaccgatattaaaaaagaattatatcttggacttgtttttgatagaagctcagagtctataatggtagtagcttccactgaaggaggcatgagtgttgaggaaatttcaaaacaaaaaccagaaacaattattagatcaaaaattgaggtggcagttggtatgcaacaattt

SEQ ID NO: 309791 - DNA, 388 bp, Unknown
  Bacterial polypeptide expressing nucleotide sequence isolated from the Sargasso Sea
caacattattaatggggctggtcttgcaatggcatctatggacatgattaaattagctggaggagctcctgcaaattttttagatgtaggaggtggagcaacaccagaaaaaatagttaaagctttcaaattagttacaatggatgaaaaagttaaagtaattcttgtgaatatttttgctggcatcaacagatgtgactgggttgcagaaggaattgtagacgccctaaagaaaatagaaattaaagtgccattagtcattcgtttagcaggtactaatgttgaaaaaggaaataaaatcttaaaagagagtaagataaattatatagaagcaaatactttagaggatgcagcaaataaagcggttgcagcactaaataaatcatga

SEQ ID NO: 309792 - DNA, 751 bp, Unknown
  Bacterial polypeptide expressing nucleotide sequence isolated from the Sargasso Sea
tatggacatacacgaatatcaagcaaaagaaattttggcaagtttcggggttacaattccaagaggagggattgtttatagtcctgagactgcagagaataaagctagagaaattggtggatcaaagtgggttgttaaagcacaaattcactccggtgcaagaggaaaggctggcggagtaatagtttgtaattctcctctcgaagttgctcaagcaacagacaagcttttaggaaagaaattaattactaatcaaacaggtcctgagggcaaaatagtaaatagaatttatattgaagaggcaacagatattgaaaaagaattatatttaggcttagtttttgacagaagctctgaaagtataatggttgtagcttcaacagagggtggaatgagtgtagaagaaattgctaaagataagccagaatcgataattagatcaaaaatagaagttgcagttggtatacaaaactttcaggcaagagagttggcatttggattaggaatagaaccagaactaataagaagggcttcagaaactatagtaggctgcgctaaagcttttagtgagttagacgcgaccatggttgaagtaaatccattagtaatttcaaaacaaaaacaaatattggcattagactgcaaaatgagttttgacaataatgccatgtttagaagagataaagtttctgaattaagagaccaaacgcaagaggatgaaaaagaatttacgcttcagatagaggtttaa

SEQ ID NO: 309793 - DNA, 517 bp, Unknown
  Bacterial polypeptide expressing nucleotide sequence isolated from the Sargasso Sea
aatgaatctccatgagtatcaaggtaaagagcttttggcaaaatttggtttaccagtctcaaataatgcagttgttacatctccagatgatgtcttgagtgcatgtagagatattggtggagataaatgggtagtgaaagcacaggtacatgccggaggtagaggtaaggccggaggcgtaaagttagttgtttctcctgaagaggcaatagaatttgctaatcattggcttggaaatagactagtcacatatcagactgattctaatgggcaactagtaagctccattttagtagaagagtgtaccgatattgcaaaagagctttatctgagcgcagttattgacagaggtactcaaagaattgtctttattggctcgagtgaaggtggagtcaatattgaagaggttgctgaaaaaacacctgagaaaattatttatgaacccattgatcctcttacaggggccatgggatttcaggcaagaaaaatttcaaaagtgttagggtttgggatatga

SEQ ID NO: 309794 - DNA, 586 bp, Unknown
  Bacterial polypeptide expressing nucleotide sequence isolated from the Sargasso Sea
aatgaatctccatgagtatcaaggtaaagagctttttgcaaaatttggtttaccagtttcaaggaatacagttattacatctccagatgatattttgagtgcctgtagggatattggtggagataaatgggtagtaaaagcacaggtgcatgctggaggaagaggtaaggcaggaggcgtaaagttagttgatacgcctgaagaagcaatagatttcgcaaagcattggcttggcaagaggctagtcacatatcagactgactctaatggacagctggtaagctccatcttagttgaagaatgcactgatattactaaggagctttatcttagcgctgtcattgataggggtactcagagaattgtttttattggctcgagtgagggtggtgtcaacattgaagaggttgctgaaaaaacacctgagaaaatcatttatgaacccattgatcctctaacagggccaatgggttttcaagcaagaaaaatttcaaaagtactaggtttagatagtgaacagacaaaacagttttcaaaaatgctatcgcaattaactgagttatttatttcttatgacctcagcttg

SEQ ID NO: 309795 - DNA, 721 bp, Unknown
  Bacterial polypeptide expressing nucleotide sequence isolated from the Sargasso Sea
tatgaatattcacgaacatcaggctaaagaaattttaaaagagtttgaagctccagtttcgaacggagttgtaatttattccaaagatgaaattgaagataaaatttcaattcttaaaagcaaacagtatgttttgaaggcccaaatccacgcaggaggaagaggtaaagctggtggggtaaaacttattaaaaatttatctgacttagtgtcagaggcaaaaaaaatgatgggaaaaattttgatcacccaccaaacaggacttgaaggcaaggaagtcaaaaggctctatattgaagaagcgtcagatatttcaaaagaattttatctttcatgtttaattgatcgggagtcatcgaaaatagcttttattagtagcactgagggagggatggatatagaaaaagtagctgaagaaacacctaataaaataattacaactaaaatcgatctaaaaagcgaaggtccaagtaaagaggaaattgaaaatattatttcaatatttaattttgatgcattacaaaaaaatgttgccacaaaattagtgaaatcgctttataaaattttaattgagaaggatgctagtcttatagaaattaatccacttataattacaaaagataataagattatttgtttagatgcaaaaatgaatttcgatgataatgcaatttttagaagaccagagatcttaaaattaagagaccttaacgaagaggat

SEQ ID NO: 309796 - DNA, 418 bp, Unknown
  Bacterial polypeptide expressing nucleotide sequence isolated from the Sargasso Sea
atggatatccacgagtatcaagcaaaaaaaatactttcaaattttggggttacaattccaagaggtggaattgtatatagcccagaaaatgcagagaataaagcaagggaaattggcggatctaaatgggtggttaaggcacaaattcattctggtgccagaggaaaagctggtggaattattgtttgtgaaactccattagaagttgcacaagcaacagataaattattaggaaaaaaattagttactaaccaaactggaccacaaggaaaaattgtgaacagaatttatatagaggaagccacagagatagaaaaagaattatatctaggattagtatttgatagaagttcggagagtataatggttgttgcatcaacagaaggaggaatgagtgttgaagagatttcaaaatgaa

SEQ ID NO: 309797 - DNA, 354 bp, Unknown
  Bacterial polypeptide expressing nucleotide sequence isolated from the Sargasso Sea
aatgaatattcacgagcatcaagctaaacaaatattaaaaaaatatggagctgaagtacctgaaggagtatttgcgcttgaagtcgatgaactaattgaaaaagcaaaagctctaaaaactgagaaatatgtactcaaagcacaaatccatgctggaggtagaggaaaagctggtggtgtaaaaattttaaactctattgaggaactgactgttgcagctaaagaattactaggcaaaacactagttactcatcaaactggtcctgaaggtagagaggtaaaaagattatacgtagaagaatcgtcaaatatagaaaaagaattttacttatcgtgcctgggtgatagggcaag

SEQ ID NO: 309798 - DNA, 574 bp, Unknown
  Bacterial polypeptide expressing nucleotide sequence isolated from the Sargasso Sea
tcatgaatttgcaagtctatggctaggaaaaaacttagtaacttatcagacaaacgaaaatgggcaacccgtttcaaagattctagtagaaacctgcacagatatagaaaatgaactatatctaggagcagtgatagatcgagaatctcaaaggttaatttttatggcttcagaagagggtggagttaatattgaagaagtagcagaaaaaacccctgaaaagatttttaaggcacctattgatccaattaaaggagctaaccaagaacaggctgtttatttggcagagaatctaaatttgagtgaaagtcagactgagcaatttgtggatttattccttaagctttcaaaactatttcttgataaagatttatctttattagaaataaaccctcttgttattaatgcagatcaaaatttaatctgtttagatgcaaagataaacatagattcaaatgccttgtatagacaagaagaattacatcaaataaatgatgaatctcaagaagatgcgagagaagtagaagcttcaaaatgggatctgaattacgtagctttagatggaaacataggg

SEQ ID NO: 309799 - DNA, 278 bp, Unknown
  Bacterial polypeptide expressing nucleotide sequence isolated from the Sargasso Sea
tatggatatacacgaatatcaagcaaaagaaattttagctagctttggagttacaattccaagaggagggattgtctacggtcctgagaccgcagagaataaagcaagagaaattggcggatcaaagtgggttgtaaaagcacaaattcattccggcgcaaggggaaaggctggaggagtaattgtttgcaactctcccctcgaagttgctcaagcaacagacaagcttttaggagaaaaattagttactaatcaaacaggaccagagggcaaaattg

SEQ ID NO: 309800 - DNA, 337 bp, Unknown
  Bacterial polypeptide expressing nucleotide sequence isolated from the Sargasso Sea
attaaattagcaggcggtgaacccgcaaacttcttagatgttggaggaggagccactccagaaaaaattgtaaaagcattcaaattaatttcaatggacgaaaaagttaaagttattttagttaacatatttgctggtattaacagatgtgattgggtagcagagggaatagttcaagctttagataaaattgaaataaaagttccacttgtgattagattagcaggtacaaatgtagataaaggaaataaaattttaagagagagtaaaattaaatatattgaggcaaattcacttgaggatgcagcaaataaagctgtaaaaattttaaaataat

SEQ ID NO: 309801 - DNA, 802 bp, Unknown
  Bacterial polypeptide expressing nucleotide sequence isolated from the Sargasso Sea
tttgttcgataaaaaaaacacaagtaaagttgcagattcgttggttttagaaaccggcactgagtggtttgttattaaggctcaaattcacgccggaggaagaggtaaggggggtggagtaaaaattgctaaaaacaggaaggaattagacaaagtagtctccgaaattttaggaatgcgactggtaactcctcaaacctcaagagaaggtaagttagttaatcaggttttgttatcagaggatgtttattatcctgggcaatctgaaaaatccgagttttacgtatctgtcttattgaacagaaaaacaggaaaaaatatgatcatgtattcgacagaagggggtgttgatattgaatctgtagcagagaaaacacccgaattgattttttatgaagaaatagacccattaattggcattgttccttttcaagccagaaaggttgcttttaatctaggtttgaacggaaatgcatacaaagaaatggtaaagtttattactctactatacaaatgttatgtttcatccgatgcttcattatttgaaattaatcctgtattaaaaacctccgacgacaaaatcatagctgtggatgcaaaggtaagtttagatgataattctttgttcagacacaagaattatgagtcactcagagattttaaagaggaaaacccatccgaaactgaagcaagagctgttggtttaaactatgtggacttagatggaaatgtgggttgtatggttaatggtgccggtcttgccatggctactatggatttgattaagcaatcaggtggtgaa

SEQ ID NO: 309802 - DNA, 690 bp, Unknown
  Bacterial polypeptide expressing nucleotide sequence isolated from the Sargasso Sea
aatccatgaatttcaagccaaagaactcttacgggccgcgggtgtaccggtcttgaacggaaaggttgtccggactcctgacgacgcagcagatgcatttgaatcccttggaacaccagtttgtgcagtgaaagcgcagattcatgcaggcggtcgtgggaagggtcacgtagaggggtcggagcaacgtggtgtcgaacttgccaagtcggcagacgatgcttcccgaattgcacgaggtctcttaaacaaaacacttgtgactattcagacagggccagaaggtcaaattgttcggcaagtatttgttgagagtggttgtgatattcagcaagaactttactgtgccattcttgttgatcgagcagccggatcaccggtactcatcgcaagcactgctggagggatggatattgaagaagtagccgtaaagacaccggaattgattctgtcagaaccatttgatccggaccgagggctcggtgcctaccaggctcgtctcatggcgtcgaagcttggcctgccgacagctagctggcgatacgcagtgcaattttttcaggctctttgcaaagcgtttgtttcacttgatgcatcattactggagatcaacccattcgttctcactggagagggaactctggtagctctcgatgcaaaaatgacattcgatgataatgcgatgtttcg

SEQ ID NO: 309803 - DNA, 542 bp, Unknown
  Bacterial polypeptide expressing nucleotide sequence isolated from the Sargasso Sea
catgaaggtacatgaatatcaaggaaaagagttatttcgtaaatatcaaataccaactccaaatggagtaccagtctttagtgtagaagaagcactaaaagcatatgatgaattagctacagacacggtagttgttaaagctcaaattcatgcaggaggtcgtggaaaaggtggtggagtaaagttagctcacagcaaagaagaagtagaatctctatcaaaagaaatattaggcatgacactggtgacgcatcaaaccgggccagatggtaaggaggtgcaaaggctattgattgagtccggtgcgaatattgaaaaagaattctatgctgctattaccctagacaggggcaaggaaatggatgtgtttatggtatcaattgaaggtggagtagatattgagaaagttgcagatgaaaccccagaaaaaattgtaaaaacctggattgaccctatgctgggaatgaactccttccaagctcgaaagctggcgtttggtcttaatctaagcggaagtgcttttaaagaagcttgctccattt

SEQ ID NO: 309804 - DNA, 625 bp, Unknown
  Bacterial polypeptide expressing nucleotide sequence isolated from the Sargasso Sea
atgaatattcatgaacaccaagcaaaagatattttaaaagattttggagctcccacaacagaaggagtaattatatttaattctgagggtattattgataagattaaagatcttaatactgaccaattggttttaaaagctcaaatacatgctggtggaagaggaaaagccggaggggtaaaattagtaaaaaaaaaagatatagtagatgaagcaaaaaagctatttggaaaagttttagtaacaccacaaacaggccctgatggacgagtagtaaagagaatatacatacaaaaagcttatgatataaaaaaagaattatacttatcatgtcttgtagatagacaaagttctaagattgctttcataagtagcactgagggcggtgttgacatagaagcagtagcaaaaaaaacccctgaaaaaattattacaacaaaagtagatttaaaacagaatttaagtcctgaagaaattaaaaatatattacaaatttaccaattagacaaaaaccaaatgaacagcgcagtaaaattagtgaatgcaatgtatagcgcattaattaaaaaagatgcatccttaattgaaataaatccattagtaataacaaaaaataacgaaatat

SEQ ID NO: 309805 - DNA, 613 bp, Unknown
  Bacterial polypeptide expressing nucleotide sequence isolated from the Sargasso Sea
atgaaccttcacgaatatcaaggcaaagccttatttgcagaatataatttacctgtttcaaagggaaaaattatatatagtgctgatgaagttacagatgcatgcaatgaaataggtggcacaagttgggtagtcaaggctcaggttcatgcaggaggcagaggaaaatctggcggagttcaattaattaatactcctgaggatggcataaaatttgcagaaaagtggcttggaaataaccttgtaacctatcagactgacgccaagggacaacctgtcaattcaattctaatagaagaatgcacaaatatttctcaagaactttatttaagtgctgttattgatagagattcacaaaaaatagtttttattggctcaagcgaaggtggtgtaaatattgaagaagtcgcaaaaaatatgcctgaaaagattatttatcaaggtgtagtttatggcgataaatctttacctgataacgcttcaaatattgcaaaagttttaaaattaaatgatattcaaactattcaatttatttcaatgatagacaatcttctaagattatttgtagaaaaaaatataagcttattagaaattaatccacttgtcataactg

SEQ ID NO: 309806 - DNA, 730 bp, Unknown
  Bacterial polypeptide expressing nucleotide sequence isolated from the Sargasso Sea
atgaatattcatgaacatcaagcaaaacagcttttaaaggaatttggagttcctgttccaaatggtgtctatggttttagtgttaatgagataattaaaaaatcaaaaattcttaatactgaaaaatatgttttaaaagctcaaatacatgcaggcggcagaggtaaagctggaggaatcacaattgcaagcaacataaatgaattagaacaagctgcaaatcagcttttaggtaaaatcttgattacacatcaaacaggacctaaaggaaaaaaagtagagagactttacgttgaagaggcctccaatatagcaaaagaattttatttatcttgtttagttgatagaaaaagttccaaaatggcttttatttctagcgttcaaggtggaatggatattgaggaaactgcattaaaaaatccagaaaaaattataactactaaagtagattttgaagaggatatatcagaaactgattgcgaaaaaattataaaggtttttaatcttgagtatgacgctagggatcaaggaattgaattaataaaatctctttataaaatgtttagagaaaaagatgctagtttaattgaaattaaccctttaattttaactaaagaaaataatatagtgtgtcttgatgctaaagttattttagatgataatgcaatttttaaacatcctgaacatcttgagcttagagatttaaaagaggaagatccaacggagatag

SEQ ID NO: 309807 - DNA, 380 bp, Unknown
  Bacterial polypeptide expressing nucleotide sequence isolated from the Sargasso Sea
gatgaatattcatgaataccaagcaaaagaattattaaaaaaatttggcgctccagttccaaatggagttcacggctatacatctgaagatctattaaataaatcaaagttactcaagactgaaaaatacgttttaaaagcccaaattcactctggtggaagaggaaaagctggaggtattaaaattactaattccttagaggaattaaagcaagctgctgatccaatgctaggtaaaactttagtcactaatcaatcaggaccaaaaggcaaaaaagttaaaaaattatatgtagaggagtcatctacaatagataaagaattttacttatcgtgcttggtagatagagcaaaatcaaagattgcatttatttcttggt

SEQ ID NO: 309808 - DNA, 463 bp, Unknown
  Bacterial polypeptide expressing nucleotide sequence isolated from the Sargasso Sea
atggacattcacgaataccaagcaaaaaaaatactttcaaattttggagtaacaattcctagaggtggaattgtttacagcccagagaatgctgagaataaagcaagagaaattggaggatcaaaatgggttgtaaaagcccaaattcattctggtgctagaggaaaagctggagggataattgtttgtaataccccattagaagttgcacaagcaacagataaattattaggaaaaaaattagtaacaaaccaaacagggcccgaaggaaaaatagtaaatagaatttatattgaagaagcgacagatattgaaaaggaattatatttgggattagtctttgatagaagctcagaaagtattatggttgttgcatctaccgaaggtggaatgagtgtagaggaaatttcaaaggaaaaaccggaaacaattataagatctaaaatcgaagttgcagttggta

SEQ ID NO: 309809 - DNA, 724 bp, Unknown
  Bacterial polypeptide expressing nucleotide sequence isolated from the Sargasso Sea
atgaaaatacatgaatttcaagccaaacaaatattaaaaaaaaacggagtcgcagtgcctcgaggcgatgtagctttttcagttgatgaggctttaaagattagtcaaaaaattgataagaatgaatcatgtgttattaaagctcaaatacacgcaggtggtagaggaaaaggtgggggagtcagaatttgtgaagggaaaaacatgataagacaaaatgctcaagaaattcttggaatgcatttgattactaatcagactgatgctaaaggacaaaaagttaaacaattgctggtagaagaaagcatagatattaagaaagaactatattgctcagttttggttgatagggcaaaaaaaagtattgtgctaattgcttctacagaaggaggtatggatattgaggaagttgcaagaaaaaatccatcaaagatatttaaaatatacgcttatccaggaatgggattgaacaaatatcaggtaaatgaattagttttccttttaaaaataaatgaaataaatcataatttgattcagccatgcacagaattttttttgaaaatttttgaaacatttatcaaagaagactgttccttactggaaataaatcctcttgttgtaactaaagataatcaaattattgctctagatgcaaaaatgacttttgatgaaaatgcaacatttcgccaaataggacataacaaacttagagatttagatgaag

SEQ ID NO: 309810 - DNA, 659 bp, Unknown
  Bacterial polypeptide expressing nucleotide sequence isolated from the Sargasso Sea
cgaccaagaactgattgcaagagcatcagatacaataattggatgtgctaaagcttttagtgaacttgatgcaactatggttgaggtaaatccattagtcatttcaaaacaaaaacaaattttagcattagattgtaaaatgagttttgacaataatgctatgtttagaagaaataaagtttcagagctaagagataaaactcaagaagatgagaaggaagtttttgcatcagatagaggtttgaattatgtgagcttagagggaaatattggaaatattattaatggagcaggactagcaatggcttcaatggatatgattaaattagcaggcggacaaccagcaaactttttagatgttggaggaggtgcaactcccgataaaattgtaaaagcatttcgattaattacaatggatgagaaggtcaaggtaattttagttaatatatttgctgggattaacagatgtgattgggttgccgaaggaattgttcaagcattagagaaaatagaaattaaagttccattagttattagactagcagggactaatgtggaaaaaggcaatgaaattttaaaaaatagtaatatcaattacattgcagctgatactttagaggaagccgcaaataaagctgttgaggctctaaaaggttaat

SEQ ID NO: 309811 - DNA, 326 bp, Unknown
  Bacterial polypeptide expressing nucleotide sequence isolated from the Sargasso Sea
aggagctcctgcaaattttttagatgtaggaggtggagcaacgccagaaaaaatagttaaggcttttaaattagttacaatggatgaaaaagttaaagtaattcttataaatatttttgctggtatcaatagatgtgattgggttgcagaaggaattgtagatgcgttaaaaaaaattgaaattaaagttccattagttatccgtttagcaggtacaaatgttgaaaaaggaaataaaatcttaaaagagagtaaaataaattatatagaggcaaatactttagaggatgcagctaataaagcagttgcagcactaaataaataaa

SEQ ID NO: 309812 - DNA, 644 bp, Unknown
  Bacterial polypeptide expressing nucleotide sequence isolated from the Sargasso Sea
aatgaatattcacgaacaccaggctaaacaattattaaaaaaatttggcgcaattgttcctaatggagaagcttgttttactgttcaagaagttttagaaaaagcaaaaaaactcaatcttaaaaaatatgttctaaaagcacaaatacatgcaggtgggagaggtaaagcgggcggagttaaaatattagacaatttatctgatctagaaaaagctgcaaaggatttgttaggaaaaaaattaattacacatcagacagggccaagtggcaaagaagttaaaagactttatctagaggagccatccaacataaaaaaagaattctatttatcttgtcttattgatagggcaagttctaaaattgcttttatttctagcgatcagggcgggatggacatcgaagaggttgcaaaaagcaatcctaataaaatcaatactgtaaaaattagtttcaaggcagatattgaagatgaggattgtaaaaaaattattcgtaatttcaatctagatgatgatgctaatctaaaatgtatcaagattattaaatcaatttacaaaacatttgtttctaccgatgcaagcttaattgaaatcaatccactaatacttacaaaggaaaacaatattgtgtgtctggatgcaa

SEQ ID NO: 309813 - DNA, 670 bp, Unknown
  Bacterial polypeptide expressing nucleotide sequence isolated from the Sargasso Sea
aatgaatatacacgagcatcaagcaaaacagattttgaaaaaatatggtgcagctgtgccaaatggagtttttggattttcaacagacgaaattattgaaaaagccaaaaaactaaatacagaaaaatatgttctaaaagctcaaatccatgccggaggaagaggaaaagctggaggagttaagatactagataatattcaagatttaacctcagcctcaaaagaaatgttggggaaagttttgattactcaccaaacaggacctgctgggaaggaagtaaaaagactttacgttgaagagtcttcaaatataaaaaaagagttttatctttcttgtttagttgatcgtgtgagttcaaaaattgcatttatatcaagtgatcaaggaggaatggatattgaagaagttgcaaaatctaatccaaaaaaaattataactacaaaagtagatttttttgaagatataaaagatgtggattgtaaaaaaataattgaaatatttaatttagatgaaaaagcatctctccaaggaattaaattgataaaatctatatataaaatgtttgtttcaacagatgcaaacctagttgagatcaatccactaattttgacagaagaaaatattttactttgtttagatgctaaaatgaatttcgatgataattcaata

SEQ ID NO: 309814 - DNA, 148 bp, Unknown
  Bacterial polypeptide expressing nucleotide sequence isolated from the Sargasso Sea
gaatccataatagaatatgctgaagctggtattaaattaattgtttgtattactgagggcattcatacacttgatatgcttgaagtaaaaaaaagaattgatgatttaggagtaagattaattggaccaaattgtccaggtgtaatta

SEQ ID NO: 309815 - DNA, 694 bp, Unknown
  Bacterial polypeptide expressing nucleotide sequence isolated from the Sargasso Sea
ttttcaagctagagaattagcatttggtcttggtatagagccagacttaattagaagagcttctgatactattattggatgttataaagcttttagtgaattagatgcaacaatggttgaagtaaatccattggtcatttcaaaacaaaaacaaattttagcgttggattgtaaaatgagttttgataacaacgcaatgtttagaagaagtcaagtttctgagctaagagacaaaactcaagaggactcaaaagaaatttttgcatcagacagaggcttaaattatgtcagtttagatggaaatataggtaacattattaatggcgctggtcttgcgatggcatccatggacatgattaaattagctggaggagctcctgcaaattttttagatgtaggaggtggagcaacgccagaaaaaatagttaaagcctttaaattagttacaatggatgaaaaagttaaagtaattcttgtaaatatttttgctggtatcaatagatgtgattgggttgcagaaggaattgtagatgcattaaaaaaaattgaaattaaagttccattagttatccgtttagcaggtactaatgtcgaaaaaggaaataaaatcttaaaagagagtaaaataaattatatagaggcaaatactttagaggatgcagctaataaagcagttgcagcactaaataaataa

SEQ ID NO: 309816 - DNA, 671 bp, Unknown
  Bacterial polypeptide expressing nucleotide sequence isolated from the Sargasso Sea
aatgaatatccacgagcaccaggcaaaagaaatacttaaaaagtatggagcggttgtacctgaaggcgtctatgctctaaatgtaaatgaattaatccaaaaagtaaaaaatctaaatgctgataagtatgtattaaaagctcaaattcatgctggcggtagaggaaaggctggaggagtaaaaattgttgataatctagctcttttggaagaggaagctaataaactgtttggcaaaacattagttactcatcaaactggaccgtcaggaagagaggtaaaaagattgtatgttgaaactgcatcggaaatagaaaaagaattctatctgtcttgtcttgttgatagagcttctgcaaaaattgcttttatttccagtgatcagggtggaatgaatattgaggaagttgctataaaatcaccagagaaaataatcactactaaagtagattttaatgaaagtatttcagaggaagactgcagcaaaattattaaaatttttgatttagataacgatgcaagtaaacaagcaatcaatttaataaagtcaatatacaaaatgttcattgatacagatgcaaatttagtagagataaatcctcttattttaacaaaaaaaaataaaattgtatgtttggatgcaaagatgacttttgatgaaaatgcattat

SEQ ID NO: 309817 - DNA, 442 bp, Unknown
  Bacterial polypeptide expressing nucleotide sequence isolated from the Sargasso Sea
aatgaacttacacgagtatcaaggcaaagaaatttttgcaaaatatgatttacccgtttcaaaaggaaaagttgttacaagtcttgatgaggttgagcaagcatgtactgatattggaggaagtagatgggtagcaaaagcacaggttcatgcaggcggtagaggtaaatcaggaggtgttgctttatgtgacaccattgaggaggtagcgaattttacaaaaaaatggctaggtaaaagacttgtaacatatcaaactgataaagaggggcagctggtaagctgtattcttattgaggaatgtaccaatatcgtagatgagctttactatagtgcagttgttgatagatcttcacgtgaggttgcaataattgcatcctcggaggggggagtaaatatagaaaaagttgccgaggaaactccggaaaagatcgcctccata

SEQ ID NO: 309818 - DNA, 340 bp, Unknown
  Bacterial polypeptide expressing nucleotide sequence isolated from the Sargasso Sea
attattaaattagcaggaggatttccagcaaattttcttgatgtaggtggggctgtgaataaagaaagtgtaactgaggccttcaaaataatcatttcagactcaaaagttaaatcaattttgattaatgtttttggcggaattgtgagatgtgatgtcgttgcagaaggaataatttccgctatcaaagatgttggtatcaagataccagttgttgttcgtttaaaaggcaataactcagaaattgcaaagacccttctcgagaagagcaaattgaatgtcttcacagaattagatttatctaaagcagcaaaaaaagctgtggaactatctgaatgag

SEQ ID NO: 309819 - DNA, 493 bp, Unknown
  Bacterial polypeptide expressing nucleotide sequence isolated from the Sargasso Sea
atggatatacatgagtatcaggcaaaaaaaatcctttcaggctttggtgttacaatacccagaggcggaattgcttacagtcctgaaaatgccgagaataaagctagagagttaggtggatctaagtgggtagtaaaagcgcaagttcattctggagctagaggaaaagcaggtggcataattatttgcaatagctctttagaagttgcacaggcagctgacaaacttcttggaaaaaaattagttacaaaccaaacaggtccagaagggaaaataactaatagagtttatattgaagaagcaacagatattaaaaaagaattatatttgggtttagtttttgatcgaagctcagaaagtataatggttgtagcatctacagaaggaggaatgagtgttgaagaaatttctaaaaaaaaacctgaaactataattagatctaaaattgaagtagctgttggaatgcaaaagtttcaagctagagaaatagcat

SEQ ID NO: 309820 - DNA, 660 bp, Unknown
  Bacterial polypeptide expressing nucleotide sequence isolated from the Sargasso Sea
tatggatatacacgaatatcaagcaaaggaaattttatctagttttggagttacaattccaagaggagggattgtttatagtccagagaatgcagaaaataaagcaagagaaataggtggatctaaatgggttgtaaaagcacaaattcactccggcgcaagaggaaaggctggaggaatcatagtgtgtaattcacctttagaagtagcccaggcgacagacaaactattaggaaaaaaattagttacaaatcaaacaggaccagagggaaaaattgtaaatagaatttatatcgaagaagcaactgatatagaaaaggaactttatttgggtttggtgtttgatagaagctcagagagcataatggttgtagcttcaacagaaggaggaatgagtgttgaagaaattgctaaagaaaaacctgaaacaattataagatctaaaattgaagtagcagttggaattcaaagttttcaagcaagagaacttgcattcggattaggaattgattctgatttaattgctagagcatctgatacaattattggatgtgccaaagcgtttagcgagttagatgctacaatggttgaagttaatccattagtcatttcaaaacaaaaacaaatattagctttagattgtaaaatgagcttcgataa

SEQ ID NO: 309821 - DNA, 565 bp, Unknown
  Bacterial polypeptide expressing nucleotide sequence isolated from the Sargasso Sea
atggatatacacgaatatcaagcaaaaaaaatattgtccgattttggtgttaaaattcccactggtggtattgtttatagtccagaaaatgcagaaaataaagcgagagaaattggtggttctaaatgggttgtaaaagcgcaagttcactctggtgctagaggtaaagcgggaggaattataatatgtaattctccgttagaagttgctgatgcaactgataaattgttgggtaaaaaattaattacaaaccaaactggtccagaggggaagataataaatagaatttatattgaagaagcaactgatatcaaacatgagttatatttaggtttagtgttcgatagatcttcagaaagtataatggttgtagcctcaacagaaggtggaatgagtgtcgaagaaatttcaaaagataaacctgaaacaattatacgatctaaaatagaagtagcagttggtattcaacaatttcaagcaagagaaatagcttttggtttaaaaattgaatccaaattgatctcaagagctgcaaatacaattatcggttgttataaagctttta

SEQ ID NO: 309822 - DNA, 322 bp, Unknown
  Bacterial polypeptide expressing nucleotide sequence isolated from the Sargasso Sea
atgaatattcatgaatatcaagcaaaagaattattaaaaaaatttggtgctccagttccaaatggagttcacggcgagacctctaaagatttattaaataaatcaaaattacttaagactgaaaaatacgttttaaaagcccaaattcactctggaggaagaggaaaagctggaggtattaaaattactaattcattagaggaattaaaacaagctgttgatcaaatgttaggtaaaacgttagtcactaatcaaacaggaccaaaaggtaaaaaagttaaaaaactatatgtagaggaatcatctaacatagataaagaat

SEQ ID NO: 309823 - DNA, 285 bp, Unknown
  Bacterial polypeptide expressing nucleotide sequence isolated from the Sargasso Sea
gatgaatattcatgaatatcaagcaaaagaattattaaaaaaatttggtgctccagttccaaatggagttcacggcgagacttctaaagatttattaaataaatcaaaattacttaagactgaaaaatacgttttaaaagcccaaattcactctggaggaagaggaaaagctggaggtattaaaattactaattccttagaggaattaaaacaagctgctgatcaaatgttaggtaaaacgttagtcactaatcaaacaggaccaaaaggtaaaaaagttaaaaa

SEQ ID NO: 309824 - DNA, 400 bp, Unknown
  Bacterial polypeptide expressing nucleotide sequence isolated from the Sargasso Sea
atggatatacacgaatatcaggcaaaaaaaattttatcaggatttggcgtaactattcctagaggtggaattgtctatagccctgaaaatgcagaaaataaagcaagggaacttggaggatctagatgggttgttaaagcccagatacactcaggtgctcgaggaaaagcaggaggtattattgtttgtaatagtgcgttagaggttgcccaagcagcagataaacttttaggaaaaaaactggttacaaatcagactggccctgaaggcaaaattacaaatagagtttacattgaagaagccactgaaattaaaaaagaattatatttaggattagtttttgataggagctcagaaagcataatggttgttgcttctacagaaggaggaatgagcgtga

SEQ ID NO: 309825 - DNA, 739 bp, Unknown
  Bacterial polypeptide expressing nucleotide sequence isolated from the Sargasso Sea
atgaatattcacgaacatcaggcaaaagagattttgaaaagatatggggcaaaggttcctgagggtatatttgcattcaatgtaaaagatttaataaataaggcaaaatttcttaaaactgaaaagtttgtattaaaagctcaaattcatgctggaggaagaggaaaagctggaggtataaaaatagtagataatttatcagatttagagagagaatcagatcttttgcttggaaaaaaattaattactcatcaaacaggacaaaatggtaaagaggtcaagagactttatgttgagacctcctcaaaaataaaaaaagaattttatctttcatgtgtagtagatagagcaagttctaaaattgcattcatttcaagtgcacagggtggaatggatattgaggaaattgcaaaaaatacaccagaaaaaattttgacaacacgactagagcataagaatgaaatttctgaggaagactgtaaaaaaattatagatatatttgagttagaagaaaatgctcaaaaagaggcaattagtttagttaaatcaatttataaaatgtttcttgaaaaagatgctagtctagtagagataaatcctctaattcttacagaagaaaataatatagtttgtcttgatgcaaaaattaattttgatgaaaatgctttgtttaagcatcccgatattttaaatttgagggacccaagcgaagaggacgagattgagacagaagcaagca

SEQ ID NO: 309826 - DNA, 213 bp, Unknown
  Bacterial polypeptide expressing nucleotide sequence isolated from the Sargasso Sea
aatggacattcacgagtaccaagcaaaaaaaattcttgcaggctttggagttgcagttccaagaggtggaatagtttacagtccagaaaatgcagaaaacaaagctagagaactcggtggatctaagtgggttgtaaaagcacaaattcattcaggggcaagaggcaaggccggtggaattattgttttgtacagcgagctagaagttgctca

SEQ ID NO: 309827 - DNA, 568 bp, Unknown
  Bacterial polypeptide expressing nucleotide sequence isolated from the Sargasso Sea
aatccattaattcaaaataaatcaggtgaaatattagccctagatgcaaaaattacatttgatgaagatgctttattcaggcaaaatttaataaaagaattaagagatttgtctcaagaaaatccagttgaaattgagactgcaaaattgggtataaaatatatacaattacaaggaaatgttggatgcatagtgaatggggcaggattagctatggctaccatggatgtgattaatgtatcaggattaaagccagcaaattttttagatataggcggtggtgcagatgagaataaagtttcagaggcaatgttagctgtattatctgaccaaaatgtagaattagtattaataaatttgtttggaggaattttaagatgtgatgttgctgccagaggttttttatctgcacttgataaatataataaaaaagctcccgaacttatcattagaatgctaggtactaatagtgatgaaggcaaagaaattttaagtgcaagtaaatataagatttcttttgctgataatttaaatgaaatttcaaaaatattacttactaagaggtagt

SEQ ID NO: 309828 - DNA, 802 bp, Unknown
  Bacterial polypeptide expressing nucleotide sequence isolated from the Sargasso Sea
attagtattcgatagatcctcagaaagcataatggttgtagcttctacagaaggtggcatgagtgttgaagaaatttcaaaagaaaaacctgaaacaattatcagaagtaaaattgaagttgcagttggaattcaacaatttcaagctagagagattgcatttggtttaggaattgaacctaagttaatctcaagggccgcaaatactattataggttgctataaagcatttagtgaacttgatgcaacaatggttgaggttaatcctttagttgtatctcaacaaaatgaaatttttgctttagattgtaaaatgagttttgataataatgcgatgtttagaagggatgaaatttcagaacttagagataaaactcaagaaaattctaatgaagtttatgcctctgatagaggtatgaattatgtaagcttagatggaaatattggtaatattattaatggtgcaggcttagcaatggcatcaatggacatgataaaacttgctggtggtgcacctgcaaattttttagatgttggtggaggtgcaacacctgagaaaatagttaaagcttttaaattaatctctatggacacaaaagttaaggtaattttggttaatatctttgcaggaattaacagatgtgattgggttgcagaaggaattgttcaagctttatcaaaaattgaaattaaacatcctttagttattcgtttagctggaactaacgttgaaaaaggaaatgaaatacttaaaaaaagtaatattaattatattgaagcatcaactttagaagatgcagca

SEQ ID NO: 309829 - DNA, 754 bp, Unknown
  Bacterial polypeptide expressing nucleotide sequence isolated from the Sargasso Sea
atgagcattcttgtcgatcgcaatacacgtgttatctgtcagggcatcaccggaaaagttggtgagtttcatactcgaggctgccttgagtatggaacaagaatggtaggaggtgttactcccggtaagggaggagaaacaattgccgatcttcctgtctttaatacagttgctgaagcacgtgatgcgacgggtgcgaatgcgacgatgatttttgtcccgccaccatttgcagcggatgcgattcttgaggctgtggcagcggaagtcgaacttgtcatagcggtaacagagggcataccggtgctcgatatggcacgagttttaccagcttttgaaaattccaagagtcgacttattggcccaaattgtcccggtgttattacaccaggacaatgtaaaattggaattatgcccggctatattcatacaccaggaaatgtcggtgtcatgagtcgttccggtacgctgacgtatgaagcggtgtggcagttaacgcagctcggtcacggacagagtacatgtgttggccttggtggtgatccgcttgttggatcaagctttatcaatatcttggaactttttgaacaagatgatgatacgcacgccattttaatgatgggggagataggcggctcagctgaagaagaagctgcagcatatgtaaagaagcatgtcacaaagccagttgcagcttttatagcgggccgtacggctcctcctgggaaacgcatggggcacgcggcgcgatatt

SEQ ID NO: 309830 - DNA, 454 bp, Unknown
  Bacterial polypeptide expressing nucleotide sequence isolated from the Sargasso Sea
ggaaaatgaaaaagaagtttttgcatcagataggggacttagttatgtaagtttagatggaaatattggcaatataattaatggtgctggattagcgatggcttctatggatatgatccaattagctggtggtcagcctgcaaactttttagatgttggaggaggtgcaacaccagataaaatagttaaagcatttaagttaattacaatggatgaaaaggttgaggtcattttagttaatatttttgcaggaataaatagatgtgattgggttgcagaaggaatagttcaagctttagaaaaaatagaagtaaagataccattagtaattagattagctggtacaaatgttgaaaaaggaaataaaattcttaaagaaagtaaaataaaatatatagaagcaaatactttagaggatgcagcaaataaagctgttgcagcattaaaaaaataa

SEQ ID NO: 309831 - DNA, 496 bp, Unknown
  Bacterial polypeptide expressing nucleotide sequence isolated from the Sargasso Sea
aatgaatattcacgaacaccaagctaaacaaatcttaaaagagtttggcgcagttgtcccagagggagtttttgcatttactgttaaagatttaattgaaaaatgcaaaaaactaaaaactgataaatatgtcttaaaagcccaaattcatgcaggtggaagagggaaagcgggaggagtaaaaatcttgaataatttagatgaattagaaaaatcggctaacgaacttcttgggaaaaaattaatcacgcatcaaactgggccagaaggtcgagaagtaaaaagactttatgttgaaacttcctctaatatagagaaagaattttatttatcatgtttaattgatagagccacgtctaaaattgcatttatttctagcaatgaaggagggatggatattgaagaggtagcagtaaaatctccagacaaaattttaacgaacaaaattgatcttacagaggaaatttctgataaagagtgtgaaaagataattaaa

SEQ ID NO: 309832 - DNA, 115 bp, Unknown
  Bacterial polypeptide expressing nucleotide sequence isolated from the Sargasso Sea
atgaatattcatgaatatcaagccaaagaaattttgaaagaatttggagcgccggtttctaatgggattgtaattaattctattgatgaaattaaggaaaaaatatcaaaattaa

SEQ ID NO: 309833 - DNA, 280 bp, Unknown
  Bacterial polypeptide expressing nucleotide sequence isolated from the Sargasso Sea
cccggcgacagaagccattgtgatgattggtgaaattggtggcactgctgaggaagaggccgcggaatttattagccagaatgtgacaaagccggtcgtttcttatatcgcgggcgtcactgctcctaaaggcaagcgcatgggccacgccggcgcgattatctccggtggaaaaggcactgccgacgagaaatttgccgcgttggaggcagcaggggtggggaccgtgcgttcactggcagatattggttcggcccttcaggagatcactggttggtag

SEQ ID NO: 309834 - DNA, 262 bp, Unknown
  Bacterial polypeptide expressing nucleotide sequence isolated from the Sargasso Sea
atggacattcacgaatatcaggcaaagaaaatactttcaaactttggggtaacaattcctagaggtggaattgtttacagtccagaaaatgctgagaataaagctagagaaattggtggatcaagatgggttgtgaaagcgcaaattcactctggtgctagaggaaaagctggaggaataattgtttgcaatactccattagaagttgctcaagcaacagataagttattaggaaaaaaattagttacaaatcaaacaggac

SEQ ID NO: 309835 - DNA, 545 bp, Unknown
  Bacterial polypeptide expressing nucleotide sequence isolated from the Sargasso Sea
aatgaatattcacgaacaccaagcaaagaatatacttagaaaatatggagctaaagttccggatggagtttatgctctagatgtaaatgaattattggaaaaagctaaaaatcttaaaactgataaatatgtgttgaaagcacaaattcatgctggaggcagaggtaaagctggtggagttaaaatagtaaatgatttaaaaagtcttgaaactgaggcaaaatccttgcttggaaaaaaattaatcacacatcagacaggtcctagtggaagaattgttaaaagattatatgtcgaagtttcatctaacattgataaagaattttatttgtcttgtgttgtagatcgtgcaagttcaaagatagcttttatctcaagtgatcaagggggtatggatatagaagaagtcgcaatgaaatctcctgagaaaattttaacaacaaaagtagatttagataacgaaatatctgatgaaaattgtaataaaataataagtatttttaatttagatgaagaaacaaaagagcaaggaattagtctaatca

SEQ ID NO: 309836 - DNA, 495 bp, Unknown
  Bacterial polypeptide expressing nucleotide sequence isolated from the Sargasso Sea
tatggatatccacgaataccaggcaaaaaaaatactttcagattttggagttactataccaagaggggggatagcatacagtccagagaatgctgaaaataaagcaagagaaataggtggaaataagtgggtggtaaaagcacaaattcattcaggggcaagaggaaaagcaggcggaataattgtatgtgatacgcctttagcggttgctcaagcaacagataaacttttgggaaaaaaattagttactaatcagacaggaccagagggaaagatagtaaatagaatttatattgaagaagcaactgagattaaaaaagaattatatttagggcttgtttttgatcgaagttccgaaagcatcatggttgtagcatctacagaaggcggtatgagtgttgaagagatagcaaaacaaaaacctgaaactataattagatcaaaaattgaagttgctgttggaatgcaacaatttcaagcaagagaaattgcttt

SEQ ID NO: 309837 - DNA, 541 bp, Unknown
  Bacterial polypeptide expressing nucleotide sequence isolated from the Sargasso Sea
aatggacatacacgaatatcaagcaaaaaaaatattagcaggctttggagtaacaattccaagaggcggaattgcttatagtccagaaaatgctgaaaacaaagctcgtgaactaggcggatctaaatgggtagttaaagcgcaagttcattctggagctagaggaaaagcaggaggtatcgttgtttgtaaaactgcattagaagttgctcaagcatccgataaactccttggaaaaaagttagttacaaatcaaacaggtcctgaaggaaaaattataaatagagtttatatagaagaagcaactgatattaaaaaagaactttatttaggattagtttttgatcgaagttcagaaagtataatggttgtagcttctacagaaggaggaatgagcgttgaagaaatttccaaggaaaaaccagaaactattattagatctaaaattgaagtagctgtaggtatgcaaaaatttcaagcaagagagatagcttttggattgggaattgaatcaaagcttattgcaagagcagcagatacg

SEQ ID NO: 309838 - DNA, 725 bp, Unknown
  Bacterial polypeptide expressing nucleotide sequence isolated from the Sargasso Sea
tatggacattcatgagtatcaagcgaaacaaattctagtgagcttcggagtttcaattccaaggggaggcatcgtttacagcccagagactgcagaaaataaagcaagagagatcggtggtttaaaatgggttgtaaaagcacaaatccattctggagcaagaggtaaagctggaggaattattgtttgtaactctccattagaagttgctcaagcgacagataaacttttaggaaaaaaactggtgacaaaccaaactggaccaggaggtaaaatagttaatagaatttatatagaggaagccacagatatagataaagaattatatctaggactagtttttgatagaagctcagaaagtataatggttgttgcttctacagagggtggaatgagtgtagaagaaatctcaaaagaaaaacctgaaacaatcataagatcaaaaattgaggttgccgtgggcattcaaagttttcaggctagagagttagcatttggtctaggtatagacccagaattaattacaagagcttcggatactatcattggatgtgccaaggcatttagtgaattagatgcaacgatggtcgaagtaaatcctctagtgatttcaaaacaaaaacaaattttagcattagattgtaaaatgagttttgataataatgctatgtttagaagaaataaagtttcggaattaaagataaaacacaagaagatgataaaga

SEQ ID NO: 309839 - DNA, 244 bp, Unknown
  Bacterial polypeptide expressing nucleotide sequence isolated from the Sargasso Sea
atgattctcaagcggttgtgtcggagtgttcaaagagcgactttcagtcgaaccgctatgaacattcacgagtatcagggcaaacagctattccgagatgctggcttgtccgtacaagacggtgtgcattgtacatcgatagaacaagccttggcagcatatgacaaattgggtagcaaggttgttgccgtgaaaagtcaaatccacgcaggcggaagaggaaaaggaacactgtatgatccag

SEQ ID NO: 309840 - DNA, 457 bp, Unknown
  Bacterial polypeptide expressing nucleotide sequence isolated from the Sargasso Sea
tatggatattcacgaataccaggcaaaaaaattattagcagattttggagtaattattccaagaggcggaattgcttatagtccagagaatgcagagaacaaagcaagagaaattggtggatcaaagtgggttgttaaagctcaaatacattctggagcaagaggtaaggctggtggaataattttatgtaattcccctttagaagtagctcaagcaactgataaactattagggaaaaagttagttacaaatcaaacaggcccccaaggaaaaattgtaaatagaatttacgttgaggaagcaacagatattaaaaaagaattttatttaggattagtgtttgatcgaagttctgaaagcataatggttgtagcgtctaccgaaggaggaatgagtgttgaggaaatttcaaaagaaaaaccagaaagtataattagatcaaaaattgaggttgct

SEQ ID NO: 309841 - DNA, 598 bp, Unknown
  Bacterial polypeptide expressing nucleotide sequence isolated from the Sargasso Sea
aatgaacatacacgaataccaagctaaagaaattcttaaacaatttggtttacctgtgcttaatggaaaagcatataataaaaatcttgatacaattgattcagatttaattgatttaaaaggccctccatgggtagtaaaatcacaaattcatgctggaggtcgaggcgcgggacactttaaagattcctttaataacaaggggggagtacaagttatttttgaaaaaaaccaagtatcttctattgcaaaatctatgatgggcaatgtcttaattacaaaacaaacaggagagatgggcaaaaccgtaaatcgtatttttattgaagaagggtgtgatattgaaagggaattttatttaagtgttcttgttgataggaataattcaaaagtcatggctatgatttcagctgctggcggcatggacattgaagaggttgcattaactaatcctgaaaaaattataaatattcattttgaaaagcatcaagatatttcactaaataaaagtctgcaaaaaaaacttgcaatttctaatgatcaatttgatgaattaaacttaattattaatcaattattacatacctttatttctatt

SEQ ID NO: 309842 - DNA, 859 bp, Unknown
  Bacterial polypeptide expressing nucleotide sequence isolated from the Sargasso Sea
attggtatgaatataatcacgcctcagacttcagatagcggaaaaattgtaagaagagtttacctagaaaaaggctacgaaatcaagaatgaactatatatttgtattactgttgatagagaaacaggaggcaatactatcatctattcccaaaaaggtggtgtgaacattgaagatgtttctgaaaaaaatccagaagaaatccacaacatgaaaatctctccaggttcagatcttttaacgcatcatgctagaacaatagtatataatttaggtcttaaaggaacggtggctaagaaagctcaaaaaaatattctttccatttacaaagctttcgtggccctagatgcagcaatgattgaagtaaatccttttgcgattacaaaacaagatgatgttgtgataatcgattgcaaggcctcatttgatgataatgctttatatagacaaagagctgtagcagaaatgaaagatgaaaatgaatacgatccgttggagttagaggcagcaagacacgatttaaattatgttaagttagacggtaatattgggctcatggtcaacggagctggtctatcgatggcgactatggacatagttaaatactatggtggagaggctgctaattttatggatgttgcgggagcagccactccagaaagagttgcagcagcattcaaactcatatacaaggacccggacgttaaaggaatcttgataaatatttttggaggaatgatgagatgtaatgatatagctaccggtttagttaatgcgtctaaggaagttggattaaaaaaaccgttggttgtaagactcgaaggtacaaatgttgatatgggtaaagaaaatattagca

SEQ ID NO: 309843 - DNA, 262 bp, Unknown
  Bacterial polypeptide expressing nucleotide sequence isolated from the Sargasso Sea
atgattggcgaaataggtggtactgctgaagaggaagcatcagagtttatcaaaaaatcaaaaattaaaaaacctatggttggttttgttgctggtttaaccgccccccctggaaggagaatgggtcatgctggagctattatatctggtggcaaaggtggcgctcaagataagatcgaagtaatgaaatccgccggcataactatttctaaatctccagcagacataggcaaaacacttttcgaaaaactaaaggcttgat

SEQ ID NO: 309844 - DNA, 343 bp, Unknown
  Bacterial polypeptide expressing nucleotide sequence isolated from the Sargasso Sea
cggcggtgacccgatacctggtagtcactttatagatatcctttcgttgtttcaggaagattcaagtactgaagcgatcgtcatggtgggagaaataggtggtacggctgaagaagaggcggcagcctatattaagtcgaacgtgacaaaacctgttgtcagctatatagccggagttacggctccacctgggaaaaggatgggtcatgctggagcaatcatagcgggcggtaaaggcacggcggacgaaaagtttgccgctctggaggatgctggtgtaaagacagttcgtagccttggagagattggggatgcattgtctgagatgacaggttggccctag

SEQ ID NO: 309845 - DNA, 664 bp, Unknown
  Bacterial polypeptide expressing nucleotide sequence isolated from the Sargasso Sea
atggatattcacgagtatcaagctaaaaaaatattatccgattttggagttaaaatacccacaggtggaatagtatacagtcctgagaatgcagaaaacaaagccagagaaattggtggttctaaatgggtcgttaaagcacaagtacattctggagcgagaggcaaagcaggcggtataattgtttgtaactcacctttagaagttgcagatgctacagataaattattaggaaaaaaacttattactaatcaaacaggacctgagggtaaaattattaatagaatctatattgaggaagctactgatattaaacatgaattatatttaggattagtatttgatagatcatcagaaagtataatggttgttgcttctacagagggaggtatgagtgttgaagaaatatcaaaagaaaaacctgaaacaattattagaagtaaaattgaagttgcagttggcattcaacaatttcaagctagagagatcgcatttggtttaggtattgagccaaaactaatttcaagagctgcaaatactattattggttgttataaagcatttagtgaacttgacgcaacaatggttgaggttaatcctttagttgtatctcaacaagatgaaatttttgctttagattgtaagatgagttttgataataacg

SEQ ID NO: 309846 - DNA, 487 bp, Unknown
  Bacterial polypeptide expressing nucleotide sequence isolated from the Sargasso Sea
aatgaaaattcacgaatatcaaggcaaagagatctttagatctttcaacataccagttccaattggatatgctgttactaacttagacgatgttgaaaaagttatcaaaaaagttcaaaatgaatcaaaaaaagaagctgttgttgtaaaagctcaaattcatgcaggtggcagaggaaaaggaggtggtgttaagttttcatcagatttatcgatagctatgaataatgctaaagatatatttggaatgaatcttattactcatcaaactggagaaagtggtcagaaagttaggaaaattctcattgaggaggcatctaacatttcaaaagaattttattgcgcaataactcttgaccgtacattggggcaatttgtttttatggtctcaactgaaggcggtgtggaaattgaaaaagttgctgaagaaaaaccagaaaaaataataaaggtgtggattgaccccattgatgggtatgaaaacttt

SEQ ID NO: 309847 - DNA, 208 bp, Unknown
  Bacterial polypeptide expressing nucleotide sequence isolated from the Sargasso Sea
tatggacattcacgaatatcaagcaaagaaaatactttcaaactttggagtaacaattcctagaggtggaattgtttacagtccagaaaatgctgagaataaagctagagaaattggtggatcaagatgggttgtcaaagctcaaatccattctggtgctagaggaaaagctggagggataattgtttgcaataccccattagaagtt

SEQ ID NO: 309848 - DNA, 454 bp, Unknown
  Bacterial polypeptide expressing nucleotide sequence isolated from the Sargasso Sea
atggatatccacgaatatcaagcaaaagaaatactggcaaactttggtgtcggcgttcctccgggagctctcgcatacagtccagaacaagctgcataccgcgcccgagagcttggaggcgatacttgggttgtaaaggcgcaggtgcacgcaggaggtcgcggcaaagccggcggtgttaaggtttgtcacagcgacacggaaattgtagaaacatgtgaaaacctatttggaagcaaattagtcactcaccaaacagactctaacggtaaaggtgtttaccgtgtgtacgtagaaggtggtgtgccaattgatagggaaatttatctcggatttgttctagaccggtcatcccaaagagtgatgatcgtagcctctgcagaaggcggcatggaaattgaagatatatcggcggaaaaacctgatagcattgtgcgttcaaccgtgagccagc

SEQ ID NO: 309849 - DNA, 243 bp, Unknown
  Bacterial polypeptide expressing nucleotide sequence isolated from the Sargasso Sea
tatgcagctgcatgaatatcaagccaaggaaattttaaaagaaaataatatccctgtcccagatggtaatattgctgctacaagcaaggcatctgaagaaatagcaatctctttgggtggaaagtgtgttattaaagcgcaagtccatgccggcggaagaggtaaggcaggtggaatcaaaatagctaaagaccctaaagaagcatttcaatttgcagatcaaatggtggggttcgtcgctaa

SEQ ID NO: 309850 - DNA, 646 bp, Unknown
  Bacterial polypeptide expressing nucleotide sequence isolated from the Sargasso Sea
ttataaagctgaattaagtgatgttatttcaaaattatacaaattatttgtagaaggtgattgtgatttagttgaggttaatccactagcaattacagacaatggagtttctgctttagattcaaaagtttcactagatatgaatgctatttatagacacgaaaattttaaagattttgaaaatgaaatacctattccagtttctgaacaatttgccaaagaaaaaaaccttaattttataaagcttgaggggagtgttggaattattggtaatggtgcaggattagtgatgtccacgcttgatgttgtatctgaacatggcggtatggcagcaaactttttagatataggcggtggggcaaaagcagagactgttacggcagctctagaagttttggaatcagaagataatgttaaaagtgtactaattaatatctttgggggaattacaaggtgcgacctagtagccaatggcatagttgaagccactaaaggtaaagaacttaaatggccgataattgtaaggcttgatggaactaactcaaaagaaggattatctattttggaacaaaatacaaatgaaaaaattacaatttctagctctatggatgaagcagctaagttagcagttgaaggagcaaattaa

SEQ ID NO: 309851 - DNA, 579 bp, Unknown
  Bacterial polypeptide expressing nucleotide sequence isolated from the Sargasso Sea
tatggatatacacgagtatcaggcaaaaaaaatactttcaggttttggtgttacaataccaagaggtggaattgtttatagcccagaaaatgcagagaacaaagctcgagaacttggcggatctaaatgggtggttaaagcacaagttcattctggagcaagaggaaaagcaggcggaattgttgtttgcaacactgtattagaagttgctcaagcggctgataagcttcttggaaaaaaactaattacaaaccaaacaggtcctgaaggaaaaattatcaatagagtttatatagaagaagcaactgaaattaaaaaagaattatatttaggtttagtttttgatcgaagctcagaaagtataatggttgtggcttctaccgaaggaggaatgagtgttgaagaaatttcaaagaagaaaccagaaactataatcagatccaaaatagaagttgctgttggaatgcaaaaatttcaagcaagagaaatagcttttggattgaaaattgagccaaaattaatagcaagagcagcagatacaattattggatgttatcgtgcatttagtgaattagatgc

SEQ ID NO: 309852 - DNA, 400 bp, Unknown
  Bacterial polypeptide expressing nucleotide sequence isolated from the Sargasso Sea
gatggaaatattggtaacattataaatggtgctggtttagcaatggcatcaatggacatgataaaactagctggtggaagccctgctaattttttagatgtgggtggtggtgctactccagaaaaaatagttaaagcatttaagctagttacaatggatgaaaaagtaaaagtaattttagtaaatatttttgctggtataaacagatgtgattgggtagcggaaggaatagtagaggcactaaaaaaaattgaagttaatgttccattggttattagattagcaggcacaaatgttgaaaaaggaaaccaaatattaaaagagagtaaaataaattacattgaagcaaacactttagaggatgcagctaataaagcggttgcagcactgaaaaaataga

SEQ ID NO: 309853 - DNA, 456 bp, Unknown
  Bacterial polypeptide expressing nucleotide sequence isolated from the Sargasso Sea
tatgtcaattttagttaataaagaatcaaaagtcattgttcagggaattactgggtcagaaggacaatttcatactactcaaatgcttgaatatggaacaaatattgtagcaggtgttactcctggtaaaggaggaacaaaggttattgatgataaaatagatgtttttaattctgttgaagaagcacgaaaagatactaaagcaaatgtatcaattatttttgtacctccaccctttgcagctgaggcaataattgaggcttcagaggctggaattgaagtagtggtatgtatatctgaaggaatacctgtaagagacatggtcgtcgttaagaaaatagttaatcaaaataaaactcggttaattggccccaattgtccaggtgtgattacggttgatgagtgtaagttgggtattatgcctggttttatttgtaaaaaaggtgatattggtgt

SEQ ID NO: 309854 - DNA, 117 bp, Unknown
  Bacterial polypeptide expressing nucleotide sequence isolated from the Sargasso Sea
taatggaactaatttcattgattgccttgatttatttttaaatgacgaccagacagagtctattttaatgattggagaaataggtggaactgctgaagaagaagcagttccacctat

SEQ ID NO: 309855 - DNA, 269 bp, Unknown
  Bacterial polypeptide expressing nucleotide sequence isolated from the Sargasso Sea
aattttgatgattggtgaaatcggaggtactgctgaagaagaggcagctgaatttgtcaaaaatcataaaattaagaaaccaatggttggatttattgcgggtgttacagctccacccggaagaagaatgggacatgcgggagctattatttcaggtggaaaaggtggtgcaaaagataagataaaaaaaatggaagattgtggtattactattgctagctcaccctcaaaaattggcaaaactctttttaataaattgtctaattgaa

SEQ ID NO: 309856 - DNA, 448 bp, Unknown
  Bacterial polypeptide expressing nucleotide sequence isolated from the Sargasso Sea
ttgcaattacacgaatatcaagcaaaagaaattctaaattgtagcaaagttcctattccggatggcaaagtagcaaaatccggaattgaagcaaaagaaatagcctcatcatttggtggaaattgcgttgttaaagcacaggttcatgcaggtggaagagggaaagctggcggtataaagcttgcaaataatcctgatgaagcattacatcatgcagataatatgattggctcaactttaaaaacttttcaatctggtgacactgaatttcctataaacgaagtgtatattgaggaggcttctagtattttaaaagagtattatttagctgtaacaatggattttgattttaaatgccccgtaatcattttttctagtgaaggaggaatgaacattgaagaagttgctgaaaaatatcctgacaagataataaaaattcatgttgacc

SEQ ID NO: 309857 - DNA, 530 bp, Unknown
  Bacterial polypeptide expressing nucleotide sequence isolated from the Sargasso Sea
aatgaatatacacgagcatcaagctaagcaaattttaaaacagtttggtgcggttgtgccagaaggagtatttggttttactgttgaggaacttttagaaaaatgtaaatcattaaaaacagataaatatgtcttaaaggcccaaatacatgcaggtggtagaggaaaagctggtggtgtaaaaattttaaataatctaaatgaattagaaaagtcagcaaaagaacttttaggaaaaaaattaattactcatcaaacaggaccagaaggaagagaagtaaaaagactttacgtggaagtatcatcaaacattgaaaaagaattctatctgtcttgtttagtggatagagcttcttcaaaaattgcatttattacaagcgatcaagggggaatggatattgaagaagtagctgccaaatctccaaataaaattttgacgactaaagttgaattaaatgaagaaatttcagacgaagattgcgaaaaaataatcaaaatttttaatttagaagatagttctaaaaaagaag

SEQ ID NO: 309858 - DNA, 596 bp, Unknown
  Bacterial polypeptide expressing nucleotide sequence isolated from the Sargasso Sea
aatgaatatccatgagcatcaggcaaaaaaaatattaaaaaattatggcgcaaaagttccaaaaggtatttttgcttttgaagttcaagacttactagaaaaagcaaaaactttagaaaccgataaatatgtcttaaaagctcaaattcactcaggaggaagaggaaaagctggaggtgtaaaattagttaataatttagatgaattacagaaagaagcaaaaaatttaattggcaaaacattagtaactcatcaaactggtccaaacggaagaaaggttaaaaggctttatgttgaagagtcttcaaaaattaataaagaattttatttgtcatgcctcgtagatagagaaagctctaaaattgcttttatatcaagtgatcaaggaggaatggatatagaggaagtagcaaaaaataatccaaaaaaaattttaacaacaaaagttgaatttagagataaaatttcggaagaagattgtcaaaaaataacagaagtatttaaattagacaaatcagcaaatgaagaagcaagcaaactaattaaatcaatttataaaatgtttattgaaaaagatgcaagtttagttgagataa

SEQ ID NO: 309859 - DNA, 463 bp, Unknown
  Bacterial polypeptide expressing nucleotide sequence isolated from the Sargasso Sea
tatgaatatccatgaatttcaagcaaaaaaactctttgcagattactccatacctgttccagaaggttctgtcgccacaactcctcaggaagcaattgaaatttcaagtatccataataataacgtcgttgttaaagcacaaattcatgcaggtggaagaggaaaggctggcggcgtaaaattattttctgattcaaaagaaattgaatccttttcagctaatttattaggatctaatttaattactgcccaaactggtaaatcaggggttccagtcaataaactattagtagaaaagatttatgatattcatcgtgagatttatttagcaataattattgatgctgtgacaaaatcgataatttgtgttgctagtgaatttggtggggtcaatattgaagaagttgcagagagcaatccagataaaatatttacagttgttgcagacccaatattaggattg

SEQ ID NO: 309860 - DNA, 403 bp, Unknown
  Bacterial polypeptide expressing nucleotide sequence isolated from the Sargasso Sea
atgaatattcacgaacaccaagccaaaacaattcttaaagagttcggggttcctgtttctaatggggtagttattttatcactagacaacattaaagaggagataacaaagcttaagagcaaagaatttgttttaaaagcacaaattcacgctggaggtagaggtaaagctggaggagttaaattagtaaagaacatttctgaattagaggcagaagcaaaaaaaatgatgggaaaaaaacttgttacccatcaaaccggtcctgaaggaaaagaagtcaaaaggctttatattgaagaagcttctgaaatttcaaaagaatattatttgtcttgtttaatagatagagaaacttcaaaaattgcttttattagcagtacagaaggtgggatggatatgagaa

SEQ ID NO: 309861 - DNA, 450 bp, Unknown
  Bacterial polypeptide expressing nucleotide sequence isolated from the Sargasso Sea
ctcaaaaagaagtttttgcctctgacagaggattaaattatgtaagtttagacggaaacattggtaacattataaatggagctggtttagccatggcatcaatggatatgataaaactagctggtggaagtcctgctaattttttagatgtgggtggtggagcaacacctgaaaaaatagttaaagcatttaaactagttacaatggatgaaaaagtgaaagttattcttgtaaatatttttgctggtataaacagatgtgattgggtagcagaaggaatagtagaagctctaaaaaaaatagaagttaatgttccattggttataagattagcaggaacaaatgttgaaaaaggcaatcaaattttaaaagagagtaagataaattatattgaagcaaacactttagaggatgcagctaataaagcggttgcagccttgaataaataga

SEQ ID NO: 309862 - DNA, 698 bp, Unknown
  Bacterial polypeptide expressing nucleotide sequence isolated from the Sargasso Sea
aatggacatacacgaatatcaagcaaaaaaaatattgtcggattttggtgtaaaaattcccactggtggtattgtttatagtccagaaaatgcagaaaataaagccagagaaattggtggttctaaatgggttgtaaaagcgcaagttcactctggtgctagaggtaaagcgggtggaattataatatgtaattctccgttagaagttgctgatgcaactgataaattgttaggtaaaaaattaattacaaaccaaactggtccagaggggaagataataaatagaatttatattgaagaagcaactgatatcaaacatgaattatatttaggtttagtgtttgatagatcttcagaaagtataatggttgtggcctcaacagaaggtggaatgagtgttgaagaaatttcaaaagaaaaacctgaaacaattatacgatctaaaatagaagtagcagttggtattcaacaatttcaagcaagagaaatagcttttggtttaggaattgaatccaaattgatctcgagagctgcaaatactattattggttgttataaagcttttagtgagcttgatgcaacaatggttgaagttaacccattagttgtatcacaccaagatgaaatattagcattagattgtaaaatgagttttgataataatgcaatgtttagaagagacgaaattgcagaactta

SEQ ID NO: 309863 - DNA, 574 bp, Unknown
  Bacterial polypeptide expressing nucleotide sequence isolated from the Sargasso Sea
atgaatatacacgaacatcaagcaaaagaaattttaaaagaatttggcgcacccgtgtcaaatgggtttgttatactggatacaaatgaattggataaaataattcaaaaaattaagtctcagaaaatagttataaaagcacaaattcatgcaggtggaagaggaaaagcgggcggtgtaaagctagttgataaattagactgtaaaacagaaattaaaaaaatgtttggtaaaattttggtaacacatcaaacaggaccagagggaaaagtggttaaaagaatatatttacaagaagcatatgatattgaaaaagagttttatttatcatgcttaatagatagacaaagttcaaaaattgccttcataagtagtacagaaggtggtgttgatatagagtctgtagcaaaaaaaagtccagaaaaaataataactaccaaaatcgatttaaaaaaaaatcttaatgaaacagatatcaatgatatagtaaaaatctttcaactagataaaaatcaaaaagaagacgcaataagattagtaaatgctctttataatattttaatacataaagacg

SEQ ID NO: 309864 - DNA, 319 bp, Unknown
  Bacterial polypeptide expressing nucleotide sequence isolated from the Sargasso Sea
atgaatatacatgagcatcaagctaaaggattactaagaaaatttggtgttccagtaccagatggatacccagctttctcagttgaagaggccgttaacaatgcaaaaaaactacctggtcctgtatatgttgttaaagcgcaaatccatgcaggaggcagaggtaaagctggaggcgttaaagttgtacaaaatatcgaagaagttgaaaatgcctctgaagaaattttaggaaaagttttagttacacctcaaaccggttccaaaggaaaaaaagttcaaagattatacattgaagatggatgtcaaattgataaag

SEQ ID NO: 309865 - DNA, 640 bp, Unknown
  Bacterial polypeptide expressing nucleotide sequence isolated from the Sargasso Sea
aaaatcattaaaaacggaaaaatttgttttaaaagcgcagattcacgcggggggacgaggaaaggcaggagggataaaaattgtaaatacaatagaagagttaaattcagcagctaaagaaatgttaggaaaaaaattgataactcaccagacgggaccccaaggaagagaagtaaaaagactatatgttgaatcatcttcagaaattgaaaaagaattttatctttcatgtttagttgacagagcaagttctaagatagcatttatttcaagtgatcaaggtggaatggatattgaagatgttgcaaaaaataatccaaaaaaaattgtaaccacaaaaattaatttagacgacaaaatatcagataaagattgtgaaaaaattgtagaaatatttaatttaagtccagatgcaaaaaaacaagcaataaatttaattaaatcaatatacaaaatgtttattgatatagatgctaatcttgttgaaataaatcccttgattttaactaaagaaaataaaattatttgtctggatgcaaaaatgagctttgatgacaatgcattatttagaaatccagaaattttaaatttaagagatttaaatgaggaagaagaaattgagatagaagcaaataaacat

SEQ ID NO: 309866 - DNA, 442 bp, Unknown
  Bacterial polypeptide expressing nucleotide sequence isolated from the Sargasso Sea
aatgagtattatagtaaataaagactctaaagttttagttcagggtttcacaggaagtgagggaacttttcattctgaacaaatgttagagtatggaacaaatatagttgcaggagtaactcctggaaaaggagggatgactcatcttggtatcccagtttttaactcagtttctgaagcagtgaataaattagagataaatacatcgataatatttgttcctcctatgtttgctgctgatgctataatggaggcagttgaatctgatattaaaacaattgttgctataactgaaggaattccgacagctgatatgattaaagtaaaagcttatataaggaataaaggtgttattctaataggtccaaactgtcccggtgttataactccagaagaggctaagattggtattatgcctggatttatatttaaaaaaggtaga

SEQ ID NO: 309867 - DNA, 148 bp, Unknown
  Bacterial polypeptide expressing nucleotide sequence isolated from the Sargasso Sea
tatggatatacacgagtatcaagcaaaagaaattttatctagttttggagtaacaataccaagaggtggaattgtttatagtccggagactgcagaaaataaagctagagaaatcggtggatctaagtgggttgttaaagcacaaatt

SEQ ID NO: 309868 - DNA, 297 bp, Unknown
  Bacterial polypeptide expressing nucleotide sequence isolated from the Sargasso Sea
attgaatattcatgagcatcaggctaaagaattgctaaacaagtttggagtacctgttccagaggggttccctgcctttagtgttaatgaagctgtaaattgtgcaaaaaatttaccaggtcctgtgtatgttgtaaaagctcagattcatgctggtggtagaggaaaggctggaggagtcaaagttgttaatagtatagatcaagtaaaaacttcagcagaagaaattttaggtaaaattttggtgaccccgcaaactggagaaaaaggaaaaaaagtacaaagactttatataga

SEQ ID NO: 309869 - DNA, 547 bp, Unknown
  Bacterial polypeptide expressing nucleotide sequence isolated from the Sargasso Sea
aatgaatattcacgagcatcaagctaaacaaatattaaaaaaatatggagctgtagttccagaaggagtatttgcgcttaatgttggtgaacttattcaaaaagcaaaagcactcaaaactgagaaatatgtgcttaaagcacaaatccatgctggaggtagaggaaaagctggtggtgtaaaaattttaaactctatcgaggaactaacggtagcagctaaagaattattaggaaaaacactagttactcatcaaactggccctgatggtagagaggtaaaaagattatacgtagaagaatcatcaaatatagataaagaattttacttatcgtgtttggttgatagggcaagttctaaaattgcatttatatcaagtgaccaaggagggatggacattgaagaagttgcaagcagttcacctgaaaaaattataactaccaaagttgatatgagtgatgaaatttccgagtcagattgtgaaaaaataattaatatttttaatttaaatgaagacgcaaaaaaacaagcaataacattaattaaa

SEQ ID NO: 309870 - DNA, 742 bp, Unknown
  Bacterial polypeptide expressing nucleotide sequence isolated from the Sargasso Sea
aatgaatattcacgaacaccaggcaaaaaaaattttaaaaaaatacggtataattgtacccgaaggtgtattttcttattccgttgaagaattattacaaaaggcgaaatcattaaaaacagaaaaatttgttttaaaagctcagattcatgcaggtgggcgaggaaaggcaggaggaattaaaattttaaatacaatagatgagttaaatttagcagctaaagaaatgttgggaaaaaaattgataacacatcaaacaggacccaaaggaagagaagttaaaagattatatgttgagtcatctatagaaattgaaaaagaattttatctttcctgcttggttgatagagcaagttctaaaattgcttttatctcaagtgatcaaggtggaatggatatagaggatgttgcaaaaaatagtccaaaaaaaattctaactactaaagttaatttagatgataaaatatcagattttgattgtgaaaaaattgttgaaatatttaatttaagccaagaagtaaaaaaacatgcaataaatttagtcaaatctatatacaaaatgtttattgatatagatgctaaccttgttgaaataaatcctttgattttaactaaagaaaataaaattatttgcttagatgcaaaaatgagctttgatgacaatgctttatttagaaatccagacattttaaatttaagagacttaaatgaggaagaagaaactgagattgaagcaagcaag

SEQ ID NO: 309871 - DNA, 205 bp, Unknown
  Bacterial polypeptide expressing nucleotide sequence isolated from the Sargasso Sea
tatgaacttacacgagtatcaggcaaaagaaatcttaagtggatttggggtaaggattcaaagaggatacgttgcttcaaccccagaaaatgctgttgcatttgcaaataaactaaacgaaaaaacaggctcagatttttttgttataaaagcccaagtacatgctggaggtagaggaaaaggcggtggtgtaaagcttgcaaaa

SEQ ID NO: 309872 - DNA, 436 bp, Unknown
  Bacterial polypeptide expressing nucleotide sequence isolated from the Sargasso Sea
tatggacattcacgaatatcaggcaaagaaaatactttcaaactttggagtaacaattcctagaggtggaattgtatacagtccagaaaatgctgagaataaagctagagaaattggtggatcaagatgggtggtgaaagctcaaattcattctggtgctagaggaaaagctggaggtataattgtttgtaatactccattagaggttgctcaagcaactgataaattattaggaaaaaagttagttacaaatcaaacaggacctgaaggaaaaattgtaaacagaatttatatagaagaagctacagatattgaaaaggaattatatttagggttggtttttgatagaagctcagaaagcattatggttgttgcatcgacagaaggtggaatgagtgttgaagaatttcaaaagaaaacccagaacaattattag

SEQ ID NO: 309873 - DNA, 388 bp, Unknown
  Bacterial polypeptide expressing nucleotide sequence isolated from the Sargasso Sea
tggtaatataataaatggtgcaggtctagcaatggcatcgatggatatgattaaattagctggaggaagtcctgctaactttttagatgttggaggcggtgctacgccagaaaaaatagttaaagcatttaaattagttacaatggatgaaaaagttaaagtaattcttgtaaatatttttgctggtataaatagatgtgattgggttgcggaaggaatagtagaagcccttaaaaaaattgaggttaacgttccattggtaattagattagcaggtacaaatgtagaaaaaggaaacaaaattttaaaggaaagtaagattaactatatagaagcaaacacgcttgaagatgcagctaacaaagcggttgcagctctaaagggttag

SEQ ID NO: 309874 - DNA, 210 bp, Unknown
  Bacterial polypeptide expressing nucleotide sequence isolated from the Sargasso Sea
tggagatccaatacatggtacaaattttattgattgtctagatctgtttttaaatgatgaaaaaactgagtctatagtaatgattggtgagatcggagggactgctgaagaagaagctgctgaatttataaaaaatcataagataaaaaaaccaatggttggatttgtagctggaattacagcaccacctggcagacgaatgggtcatgc

SEQ ID NO: 309875 - DNA, 298 bp, Unknown
  Bacterial polypeptide expressing nucleotide sequence isolated from the Sargasso Sea
atgaatatacatgaacatcaagccaaggaacttctaaaagaatttaaaattccagttccaaaaggtaatgtaatttttagtttaaatgaaatcgataaaaaaattaaaaacttaaatacaaacaatctagtagtaaaggcccaaattcatgcaggaggcaggggtaaagctggaggcattaaattagttaaaaataaagatgatttattaaaagaaacttctgcaatgtttggaaaaactttggttacgcaccaaacaggaaaaaaaggtaagaaagttaaaagaatttatatgaaga

SEQ ID NO: 309876 - DNA, 613 bp, Unknown
  Bacterial polypeptide expressing nucleotide sequence isolated from the Sargasso Sea
aatgaatattcacgaacaccaggctaaacagttattaaaaaaatttggcgccattgttcctaatggagaagcttgttttactgtacaggaagttttagaaaatgcaaaaaaactcaatcttaaaaaatatgttctaaaagcacaaatacatgcaggcgggagaggtaaggcaggcggagttaaaatattagataatttatctgatctagaaaaagctgcaaaggatttgttaggaaaaaaattaattacacatcagacaggaccaattggtaaagaagttaaaagactttatctagaggagccatccaacataaaaaaagaattctatttatcctgtcttattgatagggcaagttctaaaattgcttttatttctagcgatcagggtgggatggacatcgaagaagttgcaaaaagtgatcctaataaaattaatactgtaaaaattagttttaaggaagatattgaagatgaggattgtaaaaaaattattcataatttcaatctagatgatgatgccaatcttaaatgtatcaagattattaaatcaatttacaaaacatttgtctctaccgatgcaagcttaattgaaatcaatccactaatacttaca

SEQ ID NO: 309877 - DNA, 825 bp, Unknown
  Bacterial polypeptide expressing nucleotide sequence isolated from the Sargasso Sea
aggaaaggcaggtggaataaaagttgcaaaaaatcatcaagaactagaagagcatatagatgcaattttaggtatggacattaaaggtcataaagttgaaagcttattgattgaggaggcttctgaaatcataagcgaatattatatatcatttacattggaaagatctgaaaagaaatatttgatgatgttgagctccaaaggtggaatggatattgaagaagttgcagctaatagtccagaggacttaataaaaatttatatatctccatcattgggacttgaaagtaaaataattacacaagcaataaaagatgcaaatctcaatcttgattacattgatgaattacatgaaataatttctaaactttacaagctttttactgaaggagactgtgatcttgttgaagtaaacccattagcaataacaaatcagggtgtttctgctctagattctaaagtttcactagatatgaatgcaatctatcgacatgatgattttaaaaaatatgaagaagaaattcccattccagaatccgaaaagtttgccaaaagcaaaggcttaaattttatcaagttggatggaagtgttggaattattggcaatggtgcaggattagttatgtcaactctagatgtcgtagctgagcatggtggaaaagcggcaaatttttgcgatattggtgggggagcaaaagctgaaaccgttacagcagctttagaagttttagaatcagaagaagaggtaacaagtgttttaattaatattttcggaggcattacaagatgcgatttagtagctgaaggaattgttgaggcaacaaa

SEQ ID NO: 309878 - DNA, 337 bp, Unknown
  Bacterial polypeptide expressing nucleotide sequence isolated from the Sargasso Sea
tatgaatatacacgagtatcaggcaaaaaaaattttaaaggaatttggattaacagtgccagcaggtattataattttcagtgaaaatgaaataaaagaaaaaattaaaaaatttaataaaaaaaattttgttttaaaggcacaaattcattctggaggcagaggaaaggctggaggaataaaattagttaataacattcatgttcttttcaaagaaatcaaaaatatgttgggtaaaaaattaattactaatcaaacaggtcccaaaggcaaaactgttaaaagagtttatgtagaggaagcaactgaaattgataaagaaatttatctttcgtgg

SEQ ID NO: 309879 - DNA, 706 bp, Unknown
  Bacterial polypeptide expressing nucleotide sequence isolated from the Sargasso Sea
atgaatatacacgagcatcaagctaaacaaattttaaaacaatttggtgtagttgtgccagaaggcgtatttggctttacagttaaggaactcattgaaaaatgtaagtcgttaaaaacagataaatatgttttaaaggcacaaattcatgctggcggtagaggaaaagctggtggtgtaaagattttagataatttagatgaacttgaaaaatcagctaaagatctactaggaaaaaaattggttacccatcaaactggttcagctggaagagaagtaaaaagactttatgttgaggtttcatccaatattgaaaaagagttttatttatcttgcttggtagacagagcttcatcaaaaattgcatttatttctagtgatcaaggaggaatggatattgaaaaagtagcaacagagtctccaaataaaattataactactaaagttgaattgttagatgaaatttcagttgaagaatgcgaaaaaattataaagatattcaatttagaagacggtactaaaggtgaagcgatttctttaataaaatcaatttataaaatgtttattaaaactgatgcaaatatggttgagataaatccattaatattgacaaaagaaaaaaagattatttgtttagatgcaaaagtaaattttgatagtaacgctttatttagacaccctgaaattttagaactcagagattaaa

SEQ ID NO: 309880 - DNA, 380 bp, Unknown
  Bacterial polypeptide expressing nucleotide sequence isolated from the Sargasso Sea
tattcacgagcaccaggcaaaagaaatactcaaaaagtatggcgcggttgttcctgaaggcgtttatgcttttaatgtaaatgaattaattgaaaaagtaaaaaatcttaaagctgataaatatgtattaaaagcccaaattcatgcaggaggcagaggaaaggctggaggtgtaaaaattgttgataatttaactcttttggaagaggaagcgaataaattgtttggaaaaacattagttacacatcaaactggaccgtcaggaagtgaggtgaaaagattgtatgtcgaaactgcatcagaaatagaaaaagaattttatctgtcttgtcttgttgatagagcttctgctaaaattgcatttatttccagtgatcagg

SEQ ID NO: 309881 - DNA, 276 bp, Unknown
  Bacterial polypeptide expressing nucleotide sequence isolated from the Sargasso Sea
tatggatatacacgaatatcaagcaaaacagcttttgtctaaatttggtgtagttgttccaccaggcgaggtggtttatcagacacatgaagctgaaaatattgtttcatggttgaatgaagaaaaaataatcgtgaaagcacaagttcatgcaggcggtcgggggaaagcaggtggagtaaagttgtgtaagaacaatgaagaagttgtagaaacagttgataaaatgatagggatgaaaattgttacccctcagacaagtgaagagggaaaaat

SEQ ID NO: 309882 - DNA, 451 bp, Unknown
  Bacterial polypeptide expressing nucleotide sequence isolated from the Sargasso Sea
atgaatctccatgagtatcaaggtaaagagctttttgcaaaatttggtttaccagtttcaaggaatgcagttattacatctccagatgatattttgagtgcctgtagggatattggtggagataaatgggtagtaaaagcacaggcgcatgctggaggaagaggtaaggcaggaggcgtaaagttagttgatacgcctgaagaagcaatagattttgcaaagcattggcttgggaatagattagtcacttatcagactgattctaatggacagctagtaagctccatcttagttgaagaatgcactgatattgcaaaggagctttatcttagcgctgttattgatagaggtactcagagaattgtttttattggctcgagtgaaggtggtgtcaacattgaagaggttgctgaaaaaacacctgagaaaatcatttatgaaccccattgat

SEQ ID NO: 309883 - DNA, 364 bp, Unknown
  Bacterial polypeptide expressing nucleotide sequence isolated from the Sargasso Sea
atgaatattcacgagcatcaagctaaacaaattttgaaaaaatatggcgcagtaattcccgatggagtatttgcccattcagtagaagaactagttgaaaaggcaaagaccttaaaatccaaaaaattggtattaaaagctcagattcatgcgggaggtagaggcaaagctggaggtgttaaaattttaaattctatcgatgaactccatattgcagctcaagaaatgttaggaaaaaaactaataactcatcaaacaggacctgaaggaaaagaagttaaaagactttatgttgaatcatcatcaaatatagataaagaattttatctgtcgtgtttagttgatagaacaagctcaaagatag

SEQ ID NO: 309884 - DNA, 272 bp, Unknown
  Bacterial polypeptide expressing nucleotide sequence isolated from the Sargasso Sea
tatggacattcacgaatatcaggcaaaaaaaattctctcaaactttggagtaacaattcctagaggtggaattgtttacagtccagagaatgctgagaataaagcgagagaaattggtggatcaagatgggttgttaaagctcaaatccattctggtgcgagaggaaaagctggagggataattgtttgtaataccccattagaagttgcacaagcaactgacaaattattgggaaaaaaattagttacaaatcaaacaggacctgaaggta

SEQ ID NO: 309885 - DNA, 556 bp, Unknown
  Bacterial polypeptide expressing nucleotide sequence isolated from the Sargasso Sea
cgatgatcacgttcttgcgcttgattgcaagatgtcatttgatgataatgcgctttttagaaatccgcaattatcggagctaagagataagtcacaagaggatccaaaagaaacatatgccgcagatcgcggtttaaattatatcccattagatggagatataggcaatattattaatggtgctggattagcaatggcgtcaatggatatgatacaacttgccggcggtcaacctgctaactttttagatgttggtggaggcgcaacgccagaaaaatttgtaaaggcattcaaattaatttcgggtgatcccaatgtaaaagttatattgattaatatttttgcaggtataaatagatgcgactgggtggctcaaggtatagttgatgcccttgctcaaataaaaattgaacaacctcttgtaataagacttgcaggtacaaatgtagatgagggtattaaaattttaaaggatagtaaaatagattatatagaagcatttactttagaggatgctgctaataaagcagtaaaagctttaaaagagttaggataa

SEQ ID NO: 309886 - DNA, 564 bp, Unknown
  Bacterial polypeptide expressing nucleotide sequence isolated from the Sargasso Sea
tatggacattcacgaatatcaagcaaagaaaatactttcaaactttggagtaacaattcctagaggtggaattgtttacagtccagaaaatgctgagaataaagctagagaaattggtggatcaagatgggtagtaaaagcacaaattcattctggtgctagaggaaaagcaggagggataatcgtttgtaatactccgttagaagtcgctcaagcaacagataaattattagggaaaaaattagttacaaatcaaacaggacctgaaggaaaaattgtaaacagaatttatattgaagaagccacagatattgaaaaggaattatatttaggattggtttttgatagaagctcagaaagtattatggttgttgcatcgacagaaggaggaatgagtgttgaagaaatttcaaaggaaaaaccagaaacaattattagatctaaaattgaagttgcagttggaatgcaaaattttcaagctagagaattagcatttggtcttggtatagagccagacttaattaggagagcttccgatactattattggatgctataaagcttt

SEQ ID NO: 309887 - DNA, 463 bp, Unknown
  Bacterial polypeptide expressing nucleotide sequence isolated from the Sargasso Sea
atgaatattcacgaataccagggtaaacaggtgttggcagagtacggcgtcgccgtgccacgcggccatgtggccttcaccgtcgacgaggccgtcaaggcggcggaggaactgggcggagatgtcttcgtcgtcaaatcacagatccatgccggcggccggggcgccgggcggttcaaggacaaaccagacggcaatggcggcgtgcgtgtcgtcaagacagtcgacgaggtccgcgagaacgccgccgagatgctgaaccacgttttagtcaccaagcagaccggcccagacggcaaggaagttaagcggctctacattgaagagggctgcgacatcgcccgcgaactctacatgggcatgctgctggatcggcaatcgtctcggcttttgatcatggcgtccacggagggtggaatggagatcgaggaagtcgcagaagcgacccccgagaaaatcctaa

SEQ ID NO: 309888 - DNA, 502 bp, Unknown
  Bacterial polypeptide expressing nucleotide sequence isolated from the Sargasso Sea
gtaaaaattttaaactctattgaggaactaacagtagcagctaaagaattactaggaaaaacattagttactcatcaaactggccctgaaggtagagaggtaaaaagattatacgttgaagaatcatcaaatatagataaagaattttacttatcatgtttggttgatagggcaagttctaaaattgtatttatatcaagtgaccaaggagggatggacattgaagaagttgcaagcagttcagctgaaaaaattataactacaaaagttgatatgggtgatgaaatttctgattcagattgtgaaaaaataattaatatttttaatttaaatgaagacgcaaaaaaacaagcaataacattaattaaatcaatatatacaatgtttgtaggtactgatgcaaacatggttgaagtaaatccattaattttgacaaaagaggaaaaaattgtttgtttagatgcaaaagttaatttcgactctaacgctttattcaggcatc

SEQ ID NO: 309889 - DNA, 749 bp, Unknown
  Bacterial polypeptide expressing nucleotide sequence isolated from the Sargasso Sea
aaaaccagaaacaattattagatctaaaattgaagttgcagttggaatgcaaaattttcaagctagagaattagcatttggtttagggattgaaccagatttaataagaagagcatctgatactattattggatgttataaagctttcagtgaattagatgcaacgatggtggaagttaatccattagttatttcaaaacaaaaacaaattttagcactagactgtaaaatgagttttgataacaacgcaatgtttagaagaagtcaagtttctgagctaagagataaaactcaagaagactcaaaagaaatttttgcatcagatagaggtttaaactatgtaagtttagatggtaacataggtaatattattaatggtgctggccttgcaatggcatctatggatatgattaaattagctggaggtgctcctgcaaactttttagatgtaggaggtggagcgacaccagaaaaaatagttaaagcttttaaattagttacaatggacgaaaaagttaaagtaatcctggtaaatatttttgctggtatcaatagatgtgattgggttgcagaaggaattgtagatgcattaaaaaaaattgaaattaaagtcccattagttatccgtttagcaggcaccaatgttgaaaaaggaaataaaattttaaaagaaagtaaaataaattatatagaagcaaatactttagaggatgcagctaataaagcagttgcagcactaaataaataaa

SEQ ID NO: 309890 - DNA, 550 bp, Unknown
  Bacterial polypeptide expressing nucleotide sequence isolated from the Sargasso Sea
atgaatattcacgagcaccaggcaaaaaaaatattaaaaaattatggcgcaaaagttcctaatggtatttttgcttctgatgtaagcgatctattagaaaaagccaaaactttggatacagaaaaatatgttttaaaagctcaaattcattcaggaggcagaggaaaggcaggaggcataaaattagtaaataatttagaggaattagaaaaagaagcaaaaaatttaataggaaaaattttggtaacacatcaaacaggtcctaatggaagaaaggtgcagagactttatgtagaagaatcatcattaatcaataaagagttttatttgtcatgtctggtagatagagagagttctaaaattgcatttatatcaagtgatcaaggtggaatggacatagaagaagtagcaaaaaataatccagaaaaaattttaacaacaaaagttgaatttaaagatcaaatttctgatgaagactgtaaacaaattatagaaatatttaatttagatcaggaagcatatgaagaagcacaaaaactgatcaaatcaa

SEQ ID NO: 309891 - DNA, 790 bp, Unknown
  Bacterial polypeptide expressing nucleotide sequence isolated from the Sargasso Sea
aatgaatattcacgagcatcaggcaaaaaaaatattaaaaagttatggcgcaaaagttcctaatggtatttttgcttctaatgtaaaagatttattggaaaaagctaaaactttggaaacagaaaaatttgttttaaaagctcaaattcattcaggaggtagaggaaaggcaggaggtataaaattagtaaataatttagaggaattagaaaaagaagcaaaaaatttaataggaaaaactttggtaacacaccaaacaggtcctaatggaagaaaagttcaaaggctttatgtagaagaagcatcatcaatcaataaagagttttacttgtcatgtctggtagatagagagagttctaaaattgcatttatatcaagcgatcaaggaggaatggacatagaagaagtggcaaaaaataatccagaaaaaattttaacgacaaaagttgaatttaaagatcaaatttctaatgaggattgtaaaaaaattatagaaatatttgatttagatcaggaagcatatgaagaagcgcaaaaactaattaaatcaatttataaaatgtatattgaaaaagatgcaagtctagtagagattaatccgcttatcttaactaaagataacaaaattgtctgtttagatgcaaaaatgaagtttgatgataatgcactttttaaacatccagaaataatagatcttagagatttaaatgaagaagaagaaacagaaatagaagcaagcaaatatgatctagcctatattaagttagatggaaaaataggatgcatggta

SEQ ID NO: 309892 - DNA, 514 bp, Unknown
  Bacterial polypeptide expressing nucleotide sequence isolated from the Sargasso Sea
atgaatatacacgagcatcaagctaaacaaattttaaaaaaatatggtgcaactgtaccaaatggaatttatggattttcagttgatgatattgttgaaaaagctaaaaaattaaaaacaagaaaatatgttttgaaggcacaaatccatgcggggggaagaggaaaggctggaggagtaaaaatacttgataatattgaagatctagccaaagcctcaaaagaaatgttaggaaaagttttgataacacatcaaactggacctgctggaaaagaagtaaaaagactttatgttgaagagtcatcaaatattaaaaaagaactttacctttcctgcctagttgaccgtgcaagttcaaaaattgcatttatatctagcgaccaaggaggaatggatatcgaagaagttgcaaaatctaatccagaaaaaattataacaacaaaaatagatttattagacgatatcaaagatgaagactgtaaaaaaattataaaaatatttaatttagatcaag

SEQ ID NO: 309893 - DNA, 760 bp, Unknown
  Bacterial polypeptide expressing nucleotide sequence isolated from the Sargasso Sea
atggatattcacgagtatcaagcaaaagaaattttatctagttttggagttacaatacctagaggtggtattgtttacagtccagagactgctgaaaataaagctagagaaattggtggatcaaaatgggtagttaaagcacaaattcactcaggcgccaggggaaaagcaggagggataattctttgcaattctcctttagaagttgctcaagcaacagataaattgttaggtaagaagcttataacaaatcaaacaggacctgaaggcaaaatagtaaatagaatttacattgaggaagcaactgatatcgaaaaagaattatacttaggattagtttttgatagaagttcagaaagcataatggtcgtagcttcaactgagggagggatgagtgttgaagaaattgctaatgataaacctgaaacaattataagatcaaaaattgaggttgctgttggtattcaaaatttccaagcaagagagttagcctttggattaggaatagactcagaattgattagaagagcatcagacacaataattggatgtgcaaaagcatttcatgaattagacgcaacaatggttgaggtaaacccacttgtcatttctaaacaaaaacaaattttagccttagattgtaaaatgagttttgacaacaatgcaatgttcagaagagataaagtttctgagttaagagacaaaactcaagaggatgagaaagaagtttatgcttctgatagaggtttaattatgtaaa

SEQ ID NO: 309894 - DNA, 839 bp, Unknown
  Bacterial polypeptide expressing nucleotide sequence isolated from the Sargasso Sea
ttacatttcatttactttagacagatcagaaaaaaattatctaatcatgttgagctccaaagggggaatggacattgaaaaagttgcagaggataatcctgatgatttgataaagtaccacattggagcatctgaagagcttactgaagatattattcatgaaattattggtaaagcaaaattaaatcaagaatatacaaaaagtattactgatataatacaaaatctatttttaatgtttgtcaaaggagattgtgaccttgttgaagtaaatccattagctattaccgatgctggcgttatggcccttgattcaaaagtagcactagacatgaatgcaaagtttaaacattcatattttgaagattttgaaaaagaaatcccaattccagaatcagaaaaaaatgcaaaagaaaaaggtctaaatttcataaaacttgatggatcagtaggaataattggaaatggtgctggcttagttatgtcgactctcgatgttgttgctgaaaatggtggaaatgctgcaaactttttagatattggtggtggtgcaaaagctgagacagttagtgcagctttagaagtgcttgaagctgataaaaatgtaaagtcagtgttaatcaatatttttgggggaattacaaggtgtgatcttgtagctgaaggcatcgtagaagcaacaaaagggaaagatcttgtctggccaattgtaatcagattagatggtacaaattcatctgaaggtttagaaattcttaaaaataatccaaatgagaaaatttttattgaagaatcaatggattctgcggcaagattagctgttgaaagaggagcttaaa

SEQ ID NO: 309895 - DNA, 1108 bp, Unknown
  Bacterial polypeptide expressing nucleotide sequence isolated from the Sargasso Sea
tatgcgtcttttagaataccaagcaaaagagcttttcaaggaattcgggataagaactccacctagtatttcatcaaaagacatcgaaaaaggaagaaaagatgctaaagagttaggatatccatttgtcataaaagttcaggttccagtaggaggaagaggaaaagcaggtggaattcagaaatgtagcagtgatgacgaatttgaactcaaatatcctcaattactaaacatgtccataaaaggagagaaaactcgtgccatcctacttgaaaaaatggcagatattgaaaaagaactgtacttgtcattgtttttgaatagaagtaaaagatgctacacaatcatagcctcatcagaaggaggagtggaaatagaatcagtaaagaatcaaactatccgtgaagttggactcggagatgttgatgcacaaacagcaaaagaagttgcaaatgaaattggactaaaagattcacaagaggaacaatttgtagaaatgttacaaaaattatcaaaattaactattgaaaaagaagcagagttggcagaaatcaatccacttgcaattctaaaagatggcacactaatggcactcgatggaaaagtgatgaccgatgataattcaaactttagacatgacgaattacaacaatatcaagaaaaatcagctttagaagagcaggcagagaagagtggattttcacttgttgaactagatggaaatattgctgttataggaaacggtgcaggattagtaatgtcaacatttgatcttgttacagataatggtggaaaacctgcaacatttctagatgttgggggaggagctacaacagaatcagtgtatgaagcattaactttgattagtaaaatgagtagagttaaaggaattctagttaatctttacggcggaattgtaaaaacaacaacagttgcagaagctttcattcaagcatataataataatttaattgatcttccggtctttgcaagattaatgggaacagaatcagacaaagcaaaagaaatgctaaaagatacaaaaacaaaaatgtttgattccattgaagaagcaataaacggagtagtaatggagacaaacaaatga

SEQ ID NO: 309896 - DNA, 655 bp, Unknown
  Bacterial polypeptide expressing nucleotide sequence isolated from the Sargasso Sea
tatgaatttacacgaatatcaatctagagatttattatctaaatataatattaaatttcctgaaggaaatttaggtactgatcctgatgaaatatatgaaatttcaaaaaaaattcaaggacaagtcgttgtaaaagctcaaatacattcaggaggtagaggaaaagcgggcggcgtaaaattatgtaattctcctgaagaagctaaaacttttgcaaaagggattctgggtaaaaagatagttaccgagcaaactgattcagaaggtgtgattgtagaaaagttgttagttacagaattaactaatataaaaaaagaattgtacttatctataatcattgatccagatgtagaaggaccgtctttgattatctcttcagagggaggcacagatattgaaaaaacagcagaaaataatcctgaaaagatcaagaaaataaactttgatcctatagttggattaaagccttatcaaattagacaaatagcttcggaattagatattccaaaatcatctacgatatcgttttataacctactaaataacttacaaacagcatttagtgatatagatagtactttaattgagatcaatcctttggtaattgatgataatgataatttaataccattagattgcaaaaataaatattga

SEQ ID NO: 309897 - DNA, 299 bp, Unknown
  Bacterial polypeptide expressing nucleotide sequence isolated from the Sargasso Sea
tatgaatcttcatgaatatcaagcaaaacaactttttcgcgaatatgggatagccgtatcagatggcattgctgcctcttcagctgaacaggctgaaaaagctgcactttctttaggtgtatctaaatgggttgttaaggctcaagtccatgctggaggaagaggaaaagctggaggggttgaggtggttcataaaattgaaaaagttagagaatttgctgataaatggctaggaactaacttagttacatttcaaaccgacgcagatggtcagcccgtaaatcagattttagttgaaa

SEQ ID NO: 309898 - DNA, 331 bp, Unknown
  Bacterial polypeptide expressing nucleotide sequence isolated from the Sargasso Sea
attaatggaacaaacttcatagattgtttagatttattcttaaaagatgagaaaacaaaatctatcttaatgattggagaaataggtggaacagcagaagaagaagcggcagaatttgcaaaaaatcatactataaaaaagccaattgttggctttattgcaggtttagctgccccttcaggaagaagaatgggacatgcaggagctataatttcaggtggaaaaggaggagctaaagaaaaaatcaaaaaaatggaagaatgtggtattacagtcgcaaaatcaccttcagaaattggaaaaacattatttaataaattgtccaattgaa

SEQ ID NO: 309899 - DNA, 512 bp, Unknown
  Bacterial polypeptide expressing nucleotide sequence isolated from the Sargasso Sea
aatgagcatcttagtaaataaagatacaagattaattgttcaaggatttactggatctcaaggtactttgcactcggagcaatctatagagtatggaacgaatattgttggaggagtaactccaggaaaaggtggaaaaattcatcttaacaaaccagtatataattcagttgaagaagcagttaaagaagttagtccaaatgcgtcaattatttttgtacctgctaaattttgcaaggcatctattcttgaggcagctgaagcaggaattaaattaataatttgtattactgaaggagttccaacattagatatgcttgaagtaaagaaaaaagtagacgaacttggcgtaagactaattggaccaaattgtccaggagttattactcctggagaggcaaaacttggaataatgccaggtagtattcatttaccaggttcgatcggaataatatctcgttcaggaaacgttacttatgaagctgtaaaacaaacaactgatttaggttttg

SEQ ID NO: 309900 - DNA, 448 bp, Unknown
  Bacterial polypeptide expressing nucleotide sequence isolated from the Sargasso Sea
aatgaatatccacgagcatcaggcaaaaaaaattttaaaaaaatatggtgcaactgttcctgatggtgtcttttcttttgatgtaaaagatcttatagaaaaagcaaaaatacttaaaacagataaatatgttctaaaagcccagatacatgccggtggtagaggaaaagctggtggagttaaaatagtagaaaatattcaaaatttagaagcagaagctcgaaaattgctaggaaaaacattaataactcatcaaactggcccaagtggtcgtgaagtaaagagactttatgtagaagcatcatctcagattagcaaagaattttatctttcatgccttgtggatagagcaagttcgaaaattgcttttatctcaagcgaccaaggtggaatggatatagaggaggtagccaacaaaacaccagaaaaaattattacaaccaaggta

SEQ ID NO: 309901 - DNA, 313 bp, Unknown
  Bacterial polypeptide expressing nucleotide sequence isolated from the Sargasso Sea
tttggatgttggcggtggtgctactaaggaaaaggtttccaaagcgtttcaaataattctctctgatgaaaatgttgaaggtattctagtaaatatatttggcggtattatgaggtgcgatattattgcagaaggtattatagctgctgcaaaagaggtctcattaaatgtcccgttggttgttaggttggagggaactaatgttgatatgggtaaaaatattttagagcaatccgggttaccaattatttctgcggaagacctagacgatgcagccaataaaattgtcttagcaacaactgaggtatcctaa

SEQ ID NO: 309902 - DNA, 841 bp, Unknown
  Bacterial polypeptide expressing nucleotide sequence isolated from the Sargasso Sea
tatttaggattggtttttgatagaagctcagaaagtattatggttgttgcatcgacagaaggaggaatgagtgttgaagaaatttcaaaggaaaaaccagaaacaattattagatctaaaattgaagttgcagttggaatgcaaaattttcaagctagagaattagcatttggtcttggtatagagccagacttaattaggagagcttccgatactattattggatgctataaagcttttagtgaattagatgcaacaatggttgaagttaatccattggttatttcaaaacaaaaacaaattttagcattggactgtaaaatgagttttgataacaatgcaatgtttagaagaagtcaagtttctgagctaagagataaaacacaagaagattcaaaagaaatttttgcatcggatagaggtttaaactatgtcagtttagatggaaatataggtaacattattaacggtgctggtcttgcaatggcatctatggacatgattaaacttgctggaggagctcctgcaaattttttagatgtaggaggtggagcaacacctgaaaaaatagttaaggcctttaaattagtaacaatggatgaaaaagttaaagtaattcttgtaaatatttttgctggtatcaatagatgtgattgggttgcagaaggaattgtagatgcattaaaaaaaattgaaattaaagttccattagttattcgtttagcaggtactaatgtcgaaaaaggaaataaaattttaaaagagagtaaaataaattatatagaggcaaatactttagaggatgcagctaataaagcagttgcagcgctaaataaataaa

SEQ ID NO: 309903 - DNA, 265 bp, Unknown
  Bacterial polypeptide expressing nucleotide sequence isolated from the Sargasso Sea
atggacattcacgaatatcaagcaaagaaaatactttcaaactttggagtaacaatacctagaggtggaattgtttatagccctgagaatgctgagaataaagcaagagaaattggtggatcaagatgggtagtaaaggcacaaattcattctggtgcaagagggaaagccggaggaataattgtttgtaatactccattagaagttgctcaagcaacagataagttattaggaaaaaaattagttacaaatcaaacaggacaag

SEQ ID NO: 309904 - DNA, 583 bp, Unknown
  Bacterial polypeptide expressing nucleotide sequence isolated from the Sargasso Sea
atgaacatccacgaacatcaggcaaaacagattttaaaaaaatatggcgcaactgttccagagggagtcttttcttttgatgttaaagaacttatagaaaaagcaaagtttcttaaaacagataaatatgtacttaaagcccaaatacatgcaggtggtagaggtaaagctggaggagttaaaatagttgatactctaaaaaaattagagcaggaagccattcaattactgggcaaaacattgataaccaatcaaactggtcataatggtagaaaagtaaagaggctttatgttgaagcgtcttctgaaattagtaaagaattttatctttcttgccttattgatagagctagttcaaagatcgcttttatttcaagtgatcagggtggaatggatatagaagaagtagcactcaaaacaccagataaaataattactaccaaggtagatttatatgacgaaatttctgatgaggattgtaaagatataattaaaatttttaatttaaacgaatctgataacaatcaagctgtaaatttaattaaatcaatttataaaaagtttgtagaaaccagatgctaat

SEQ ID NO: 309905 - DNA, 1108 bp, Unknown
  Bacterial polypeptide expressing nucleotide sequence isolated from the Sargasso Sea
tatgcgtcttttagaataccaagcaaaagagcttttcaaagaatttggcataagaaccccacctagtatttcatcaaaagacattgaaaaaggaagaaaagacgctaaagaattaggatatccatttgtcataaaagttcaggttccagtaggaggaagaggaaaagcaggcggaattcaaaaatgtaatagcgatgacgaatttgagctcaaataccctcaattactaaacatgtcaataaagggagaaaaaacccgtgccattttacttgaaaaaatggccgatattgaaaaagaactgtatctatcattgtttttgaatagaagtaaacgatgttacacaatcattgcctcatcagaaggaggagtagaaatagaatcagtgaagaatcagaccattcgtgaagttggattaggagatgttgatgcacagactgcaaaagaagttgcaaacgaaattggtttaaaagattcacaagaagagcaatttgttgaaatgttacaaaaattatcaaaattaactattgaaaaagaagcagagttagcagaaatcaatccacttgctattctaaaagatggaacattgatggcacttgatggaaaagtaatgacagatgataactcaaactttagacatgaagaattacaaaaatatcaagaaaaatctgcattagaagaacaagcagaaaagagtggattttcacttgtagagcttgatggaaatattgctgttataggaaatggtgcaggattagtaatgtcaacatttgatcttgttacagataacggaggaaaacctgcaacatttttagatgttggaggaggtgctacaacagaatcagtatacgaagcattaactttgattagtaagatgagtagagttaaaggaattttagttaatctttatggcggaattgtaaaaacaacaacagttgcagaagcattcattcaagcatataataataatttaattgatcttccagtttttgcaagattaatgggtacagaatcagataaagcaaaagaaatgttaaaagatacaaaaaccaaaatgtttgattccattgaagaagcaattaacggagtagtaatggaggcaaacaaatga

SEQ ID NO: 309906 - DNA, 615 bp, Unknown
  Bacterial polypeptide expressing nucleotide sequence isolated from the Sargasso Sea
aatgaatctacacgaatatcaagcaaaagaattattgagtttaaatggagttcccactcagagaggaaaaatggtgaataacataaaagatgttgatacagctgctaatcaacttaaaaatgatacgagcactgatttttttgttgttaaagcacaaattcatgctggtggcagaggcaaaggtggaggagtaaaggttgcaaaaaatcttacagaacttaaagactattcttcatctattttaggcatgatgttaaaaactccgcaaacccctaaagaaggtaaattggtaaaaaaaattctaattgctgaggatgtttactatccaggccctagtgaacatagtgagttttatgtttcagttttattaaatagatcaacttcaaaattgatgatcatgtattcaactgagggtggtgtagatattgagtcagttgctgaaaatacccctcacttaattttttatgaggaagttgatccatctgttggtttaatgccaaatcaagctaggaaagtagcatttaatttgggtttatcgggtgattcttataaaaacatggttcgatttatttctagtctatatactgcatatgttaagtgtgacgcctcactgtt

SEQ ID NO: 309907 - DNA, 511 bp, Unknown
  Bacterial polypeptide expressing nucleotide sequence isolated from the Sargasso Sea
tatggatatccacgaatatcaggcaaaaaaaatactttcagattttggagttactattccaagaggagggatagcatacagtcctgagaatgctgaaaataaagcaagagaaattggtggaaacaagtgggtggtaaaagcacaaattcattcaggggcaagaggaaaagcaggtggaataattgtatgtgatacgcctttagcagttgctcaagcaacagataaacttttaggaaaaaaattaattactaatcagacaggaccagagggaaagatagtaaatagaatttatattgaagaggcaactgagattaaaaaagaattatatttaggtcttgtttttgatcgaagttctgaaagcatcatggttgtagcttcaacagaaggtggaatgagtgttgaagagatagcaaaacaaaaacctgaaactataattagatcaaaaattgaagttgctgttggaatgcaacaatttcaagcaagagaaatagctttttggtttaggtattga

SEQ ID NO: 309908 - DNA, 585 bp, Unknown
  Bacterial polypeptide expressing nucleotide sequence isolated from the Sargasso Sea
aatgaatattcatgaacatcaagctaaacaaattttaaaaaaatatggtgcggttgtaccagatggtgttttttcacactccgttgaagaattggtagaaaaggcaaagtcattaaaaacagaaaaattagttttaaaagcacagattcatgccggtggaagaggaaaggcaggaggaataaaaattgtaaatacaatagaagaattgaactcagcagctaatgaaatgttaggaaaaaatttaataactaatcaaacaggacctcaaggaagagaggttaaaagtctctatgttgagtcgtcttcaaatattgataaagagttttatctttcatgtttagttgatagagcaagttctaagattgcattcatttctagcgatcaaggtggaatggacattgaagaggttgcaaaaaataatccaaaaaaaattataactacaaatgttaatttagaggaaaaaatttcagatgaagattgtgagaaaattgtagaaatatttaatttagattttgatacaaaaaaaaaggcaataaatttagttaaatcaatatataaaatgtttattgatatagatgctaatct

SEQ ID NO: 309909 - DNA, 450 bp, Unknown
  Bacterial polypeptide expressing nucleotide sequence isolated from the Sargasso Sea
agacttatgctgctgatagaggtctaaattatattcctttagacggtgatattggaaatataataaatggtgccggtcttgcaatggcttctatggatatgattcaactagcaggaggacaacccgctaactttttggatgtcggcggaggtgctacacctgagaaatttgtaaaagcatttaaacttatctctggtgatcctaaagttaaagttatcttgatcaatatcttcgctggtataaataggtgtgattgggtagctcagggtattgtagatgcacttaatcagatcaatatttctcaacctctagtaataagacttgctggcaccaatgttgatgaaggaataaaaatactaaaagatagtaaaataaaatatattgaggcatacactctggaagatgcagccaacaaagctgttaaagcactgaaagagctagaagaataaa

SEQ ID NO: 309910 - DNA, 127 bp, Unknown
  Bacterial polypeptide expressing nucleotide sequence isolated from the Sargasso Sea
atgaatatacatgaatatcaagcaaaagaaatattaacaaaatatggagttgaaacacctaagggtggaaatgcctatagtccagaaaatgccaaagacatggcaactgaactcggcggagatatgt

SEQ ID NO: 309911 - DNA, 271 bp, Unknown
  Bacterial polypeptide expressing nucleotide sequence isolated from the Sargasso Sea
atgaatctgcatgagtatcaagccaagcaattatttagagaatataaaatttccgtctccgaaggtcttgccgcagaaactagtgaagaagcagtaagcatagctaagtctctagatgtagataaatgggtcgttaaggcccaagtacatgcaggaggaagaggtaaggcaggaggagtagaggtagtcgatagcgttgatcaggttaaagattttgctgagaaatggttagggcaaaatttagttacatttcaaacggagagaaaggcca

SEQ ID NO: 309912 - DNA, 433 bp, Unknown
  Bacterial polypeptide expressing nucleotide sequence isolated from the Sargasso Sea
attgaatttacacgaatatcaagcaaagtctttatttaaaagttacagtcttccagtttcaaaatcagaattgattttttcgattgatgacattgaacaagccactacaaacttaaaagcaaaagaatatgttgtaaaagctcaagttcatgccggaggtagagggaaagcaggaggggttttgcttaccaaatcacccgaagaaataagagagttttgtaaaaaatggttaggaaaaaatctagtaacttatcaaactgatgctaaaggacaaccagtttcttgcatccttttagaagaatgtaccgatatagaaaaagagctttatttaggattagtgattgatagaacgacaagatctattgctttgatcgcgtcacctgaaggaggagtagatattgaaacagttgcaacaaacagccctgaaaaaata

SEQ ID NO: 309913 - DNA, 334 bp, Unknown
  Bacterial polypeptide expressing nucleotide sequence isolated from the Sargasso Sea
caacctgcaaatttcttagatgttggtggtggtgccacccctgaaaaatttgttaaggcatttaaacttatttctggagatcctaaggtaaaagtcattttaattaatatttttgcgggaataaatagatgcgattgggtcgcgcaaggcatcgttgatgctttgaatcaaattacgattgaccaacctttagttataagattagcaggcactaatgttaatgaaggcatgaaaatcttaaaagacagcaagattgattatattgaggcatcgacacttgaagaggcagccaataaggctgttgctgcacttaaagatatggagaataaataag

SEQ ID NO: 309914 - DNA, 595 bp, Unknown
  Bacterial polypeptide expressing nucleotide sequence isolated from the Sargasso Sea
gttagatgcaacaatggtcgaggtaaatcctatgtaatatcaaatcaagaccaaatacttgctttggattgtaaaatgagttttgataataacgctctatttagaagaaaccaagtttcagaactaagagataaaactcaagaaaacgctaatgaagtttatgcatccgatagagggctaaactatgtaaatttagagggaaatatagggaatataattaacggtgcaggactggcaatggcatcaatggacatgattaaactagccggtggagaaccagctaattttttagatataggtggaggagccactcctgaaaagattgttaaggcattcaaattaatatcaatggacaaaaaagttaaagttattttaataaatatatttgctgggataaatagatgtgactgggtagctgaaggaattgtgcaagcattacaaaaaattgatattaaagttccattagtaataagattagctggtacgaatgtagataaaggaaatcagattctaaaagagagtaaaattaattatatagaagcaaatactttagaggaagctgctaacaaagctgtaaaagctttagaaagttaaa

SEQ ID NO: 309915 - DNA, 679 bp, Unknown
  Bacterial polypeptide expressing nucleotide sequence isolated from the Sargasso Sea
aatgaatattcacgagcatcaagctaaacaaatattaaaaaaatatggtgcagtggtcccagaaggagtatttgcactaaatgttgatgatttacttgataaggtaaagtcactcaaaactgaaaaatatgtcctaaaagcacaaatacatgctggtggaagaggaaaagctggaggtgtaaaaattttaaatacaattgaggagctggaattagcagctaaagagttgtttggaaaaatacttataactcatcaaactggcccagagggaagagaagttaaaagattgtacgttgaagagtcctcaaatatagaaaaagaattttatttatcatgccttgtagatagagctagttcaaaaattgcttttatatcaagtgatcaaggaggtatggatattgaagaggtagcgagcaaaacgccagaaaaaattataaccacaaaagttgctattaatgatgaaatttcaaacaatgattgtgaaaaaattataaaaatttttaatttaaataatgatgcaaaaaaccaagcaataactttaattaaatcaatttataaaatgtttattagtacagatgcaaatatggttgaggtcaatcctttaattttaactaaagaagaaaaaatagtttgtttagatgcaaaagtaaattttgactcaaatgctttggttagacat

SEQ ID NO: 309916 - DNA, 646 bp, Unknown
  Bacterial polypeptide expressing nucleotide sequence isolated from the Sargasso Sea
atggatattcacgagtatcaggcaaaaaaaatactttcaggctttggcgttacaatacctagaggtggaattgcttacagtcctgaaaatgctgagaataaagctagagagctaggtggatctaagtgggtagtaaaagcacaagttcattctggagctagagggaaagcaggtggaataattatttgtaatagctctttagaagttgcacaggcagcggataaactccttggaaaaaaattaatcacaaaccaaactggtcctgaaggtaaaataactaatagagtttatattgaagaagcaacagatattaaaaaagaattatatctgggcttagtttttgatcgaagctcagaaagtataatggttgtagcatctacagaaggaggaatgagtgttgaagaaatttctaaaaagaaacccgaaactataattagatctaaaattgaagtagctgttggaatgcaaaagttccaagctagagaaatagcatttggactaaaaattgaacctaatttaatagcaagagctgcagatactattattggatgttatagagcatttagtgagttagatgcaactatggttgaagtaaatccattaagaaatatcaaatcaagatcaaatattagctttagattgtaaa

SEQ ID NO: 309917 - DNA, 589 bp, Unknown
  Bacterial polypeptide expressing nucleotide sequence isolated from the Sargasso Sea
atggacattcatgaataccaagctaaaaaaattttgtcaggttttggcgtcacaataccaagagggggaattgcatatagtcctgaaaatgcagaaaataaagctagagaattaggtggatctaaatgggttgttaaagctcaagttcattctggagccagaggtaaagctggaggaataattatttgtaatagtccactagaagtagctcaagcagcagataaacttcttggaaaaaaattagttaccaatcaaacaggccctgaaggcaaaataactaatagagtttatatagaagaagcgacagaaatcaaaaaagaattatacctaggcttagtttttgacagaagttcagaaagcattatggttgttgcttcaactgagggaggaatgagcgtagaagaaatttctaaaaataaacctgaaactataattagatcaaaaattgaagttgccgtaggtatgcaaaaatttcaagcaagagagattgcttttggattaggaattgaagcaaaattaattgcaagagcagcagacacaattattggatgttaccgtgcatttagtgagttagatgcaacaatggtcg

SEQ ID NO: 309918 - DNA, 842 bp, Unknown
  Bacterial polypeptide expressing nucleotide sequence isolated from the Sargasso Sea
aatggatatacacgaatatcaagcaaaaaaaatattgtccgattttggcgttaaaattccgactggtggtattgtttatagtccagaaaatgcagaaaataaagcaagagaaattggtggttcaaaatgggttgtaaaagcgcaagttcactcaggtgctagaggtaaagcgggaggaattataatatgtaattctccgttagaagttgctgatgcaactgataaattgttaggtaaaaaattaattacaaaccaaactggtccagagggtaagataataaatagaatttatattgaagaagcaactgatatcaaacacgaattatatttaggtttagtgtttgatagatcttcagaaagtatcatggttgtagcctcaacagaaggtggaatgagtgtcgaagaaatttcaaaagaaaaacctgaaacaattataagatctaaaatagaagttgcagttggtattcaacaatttcaagcaagagaaatagcttttggtttaggaattgaatccaaattgatctcaagagctgcaaatacaattattggttgttataaagcttttagtgagcttgatgcaacaatggttgaagttaacccattagttgtatcacaccaagatgaaatactagcattagattgtaaaatgagttttgataataatgcaatgtttagaagagacgaaattgcagaacttagagataaaacacaagaaaattcaaatgaagtttatgcttctgacagaggaatgaattatgtaagtttagatgggaatattggtaatattattaatggtgcaggcttagcaatggcttcaatggatatgatcaaacttgctggtg

SEQ ID NO: 309919 - DNA, 529 bp, Unknown
  Bacterial polypeptide expressing nucleotide sequence isolated from the Sargasso Sea
aatgaatatccacgagcaccaagcaaaagaaatacttaaaaagtatggcgcggttgtgcccgagggtttttatgctcttaatgtaaatgaattaattgaaaaagtaaaaaacctcagagctaagaagtatgtattaaaagcccaaattcacgcaggaggtagaggaaaggctggaggagtaatagttgttgataatattgctcttttggaagaggaagcgaataaattgtttggaaaaactttggttactcatcaaactggaccatcaggaagagaggtgaaaagattgtatgttgaaactgcatcagacatagaaaaagaattctatctgtcatgtcttgtcgatagagcttctgcaaaaattgcatttatttccagtgatcagggtggaatgaatattgaggaagttgccataaaatcaccagagaaaataatcactacaaaagtagattttaatgaaagtatttcagaggaagactgtggcaaaattattaaaatttttgatttagataacgatgcaagtaaacaa

SEQ ID NO: 309920 - DNA, 380 bp, Unknown
  Bacterial polypeptide expressing nucleotide sequence isolated from the Sargasso Sea
attgcaattacacgaatatcaagcaaaagaaattttaaataatagtgaagttccaattcctgatggaaaggttgcaaaatctggtaaagaggcacaagaaatagctttttccttaggtggaaattgtgttgtgaaagcacaagttcatgcgggtggaaggggaaaggctggaggtataaagctcgctaataatcctcatgaagcttctgagcatgccgacaatatgataggctcatccttaaaaacttttcaatctggtgatactgaattccctatcaacgaagtatatattgaaaaggcctccagcattctaaaagaatactatttagctgtcacaatggattttgatttcaagtgcccagtaattattttttctactg

SEQ ID NO: 309921 - DNA, 613 bp, Unknown
  Bacterial polypeptide expressing nucleotide sequence isolated from the Sargasso Sea
tatggacattcacgaataccaggcaaaaaaaatactttcagactttggagttaatattccaagagggggaattgcatatagtccagaaaatgctgaaaataaagcaagagagataggtggcaataagtgggtagtaaaagcacaaattcattcaggagcaagaggtaaagcaggaggaataattttatgcgaaacacctttggcggttgctcaagctactgacaaacttttaggaaaaaaattagtcacaaaccagacaggaccagagggaaagatagttaatagaatttatattgaagaagcaacagcgattaaaaaggaattatatttaggtcttgtttttgatcgaagttctgaaagtattatggttgtagcgtcaacagagggtggaatgagtgttgaagaaatagcaaaacaaaaacctgaaactataattagatcaaaaattgaagttgctgttggaatgcaacaatttcaagcaagagaaattgcatttggtttaggtattgaaccacagttaatcagaagagctgccgaaacaatcactggatgttatcgtgcatttagtgaacttgacgcaactatggttgaagtaaatccacttgtgatttcc

SEQ ID NO: 309922 - DNA, 346 bp, Unknown
  Bacterial polypeptide expressing nucleotide sequence isolated from the Sargasso Sea
tatggggggggatcctattaatggaacaaattttatagattgtttggatttatttttaaatgacgaggaaacaaaatctatcttaatgattggagaaataggtggaacagcagaagaagaagcagcagaatttgtaaagaatcatagtataaaaaagccaattgttggttttattgcaggtttagcggcccctccaggaagaaggatgggacatgcaggagctataatttcaggtggaaaaggaggagctgaggaaaaaatcaaaaaaatggaagaatgtggtattacagttgcaaaatcaccctccgaaattggaaaaacattatttaataaattgtccaattga

SEQ ID NO: 309923 - DNA, 743 bp, Unknown
  Bacterial polypeptide expressing nucleotide sequence isolated from the Sargasso Sea
aatgaatattcacgagcaccaggcaaaggaaatacttaaaaagtatggcgcgattgttcccgagggcgtttatgctcttaatgtaaatgagttaattgaaaaagtaaaaaatcttaaagctgacaagtatgtattaaaagcccaaattcatgcaggaggcagaggaaaggctggaggagtaaaaattgttgataatattactcttttggaagatgaagcgaataaattgtttggaaaaacattagttactcatcaaactggaccatcaggaagagaggtaaaaagattgtatgttgaaactgtatcagaaatagaaaaagaattctatctgtcctgtcttattgatagagcttctgcgaaaattgcatttatttccagtgatcagggtggaatgaatatagaggaagttgccataaaatcaccagagaaaataatcactactaaagtagattttaatgaaagtatttcagagggagactgtagcaaaatcattaaaatttttgatttagacaacaatgcaagcaaacaagcaattaatctaataaaatcaatttacaaaatgttcattgatacagatgcaaacttagtagagataaatcctcttattttaacaaaaaaaaataaaattgtatgtttagatgcaaagatgacgtttgatgataatgcattatttaaacatccagaaattcaaaaacttagagattttaatgaagaagaagaaacagaaatgaagcaagcaaaca

SEQ ID NO: 309924 - DNA, 404 bp, Unknown
  Bacterial polypeptide expressing nucleotide sequence isolated from the Sargasso Sea
tatggatattcacgaataccaagcaaaaaaactattagcggattttggagttattattccaagaggtggaattgcctatagtccagaaaatgctgaaaataaagctcgagaaattggtggatctaaatgggttgttaaagcacaaatacattcaggagcaagaggtaaggctggtggaattattttatgcaactctcctttagaggttgctcaagcaactgataagcttttaggaaaaaaattagttacaaatcagactgggcctcaaggaaaaatagtaaatagaatttatgttgaagaagcaacagatatcaaaaaggagttttatttaggcttagtttttgacagaagttctgaaagtataatggtcgtagcttccacagaaggagggatgagtgtgaaga

SEQ ID NO: 309925 - DNA, 451 bp, Unknown
  Bacterial polypeptide expressing nucleotide sequence isolated from the Sargasso Sea
aatgaatattcacgaacatcaagctaaacaaattttaaaaaaatatggagcaatagtacctgaaggtgttttttcgcactcagttgaagaattattacaaaaggcgagatcattaaaaacagataaatttgttttaaaagcacagattcatgctggtggacgaggaaaggctggaggaataaaaattttaaatacaatagaagagctaaattcagctgccaaagaaatgttagggaagaaattgataactcaccagacaggaccacagggaagagaggttaaaagactatatgttgagtcatcttcagaaattgaaaaagaattttatctctcctgtctagttgatagagcaagttctaagattgcgtttatttcaagtgatcaaggtgggatggatatcgaagatgttgcaaaaaataaaccaaaaaaaaattgtaactacaaaaattaa

SEQ ID NO: 309926 - DNA, 437 bp, Unknown
  Bacterial polypeptide expressing nucleotide sequence isolated from the Sargasso Sea
aatgaacttacacgagtatcaaggcaaagaaatttttgcaaaatatgatttacccgtttcaaaaggaaaagttatcacaagccttgatgaggttgagcaagcatgcactgatattggaggaagtcgatgggtagcaaaagcacaggttcatgcaggcggtagaggtaaatccggaggtgttgctctatgtgacaccattgaggaggtagcggattttacaaaaaaatggttgggtaaaagactcgtaacatatcaaactgataaagaggggcagctggtaagttgtattcttgttgaggaatgtaccaatatcgcagacgagctttactatagtgcagttgttgatagatcttcacgcgaggttgcaataattgcatcttcggagggaggagtaaacatagaaaaagttgccgaggaaactcctgaaaagatcgcct

SEQ ID NO: 309927 - DNA, 715 bp, Unknown
  Bacterial polypeptide expressing nucleotide sequence isolated from the Sargasso Sea
tatggatattcacgagtatcaggcaaaaaaaatactttcaggatttggagttacaattcctagaggtggaattgcttacagccctgaaaatgccgagaacaaagctagagagctcggaggatctaaatgggtagtaaaagcacaagttcattctggagccagagggaaagcaggtggaataattatttgtaatagctctttagaagttgcacaggcagctgataaacttcttggaaaaaaattagttactaaccaaactggtcctgaaggtaaaataaccaatagagtttatattgaagaagcaacagatattaaaaaagaattatatttgggtttagtttttgatcgaagttcagaaagtataatggttgtagcatctacagaaggaggaatgagtgttgaagaaatttctaaaaagaaacccaaaactataattagatctaaaattgaagtagctgttggaatgcaaaagtttcaagctagagaaatagcatttggactaaaaattgaacctaatttaatagcaagagctgcagatactattattggatgttatagagcatttagtgagctagatgcaactatggttgaagtaaatccattagtaatatcaaatcaagatcaaatattagctttagattgtaaaatgagttttgataacaatgctttattcagaagaaatcaagtttccgaattaagagacaaaactcaagag

SEQ ID NO: 309928 - DNA, 451 bp, Unknown
  Bacterial polypeptide expressing nucleotide sequence isolated from the Sargasso Sea
aatgaatattcacgaacaccaggctaaacagttattaaaaaaatttggcgccattgttcctaatggagaagcttgttttactgtacaggaagttttagaaaatgcaaaaaaactcaatcttaaaaaatatgttttaaaagcacaaatacatgcaggcgggagaggtaaggcaggcggagttaaaatattagataatttatctgatctagaaaaagctgcaaaggatttgttaggaaaaaaattaattacacatcagacaggaccaattggtaaagaagttaaaagactttatctagaggagccatccaacataaaaaaagaattctatttatcctgtcttattgatagggcaagttctaaaattgcttttatttctagcgatcagggtgggatggacatcgaagaagttgcaaaaagtgatcctaataaaattaatactgtaaaaattagt

SEQ ID NO: 309929 - DNA, 968 bp, Unknown
  Bacterial polypeptide expressing nucleotide sequence isolated from the Sargasso Sea
tggtggatcaagtagcaacaatcctgatgagcttattgagttaggaaaccagatatatggaatggatataaaaggacacaaagtagaggttttattaattgaagaagcttcagaaattttagaagaatactatctttcgtttactcttgataggtcagctaaaaaatacctaatgatgcttagtgcaaagggtggtatggatattgagcaagtagcaaaagataatccaaaagatttggtaaaacttcatatatcaccttcagaagggctagataaaaaagatttagataaatcaataattgaagctaatttaaatcaaaaatataaaaatgaattatcagagataattagtaaattatatgaactatttgaagaaggagattgtgatttagtcgaagtaaatcctttagctattacaaatgaaggagtaatggcacttgattcaaaagttgcattagatatgaatgcaaaatttaaacatgaaaattttcaaattcttgaagatgaaataccaattcccgaagaagaaaaatttgcaaaagaaaaaggtcttaattttataaagctagaaggttttgtaggaatcattggcaatggagcaggcttagtgatgtcaactcttgatgttgtagctgagcatggaggaagtgcatccaactttttagatatcggtggtggtgcaaagtctgaaacagtaagtgctgcactagaagtattagaaactgacccaaatgttaaaagtgttttaataaatatttttggaggaattacaagatgtgatttagttgcagatgggatagttgaagcaactagtggtaaaaaattaaaatggccaataataatccgtcttgatggaacaaattctaaagaaggtctagaaatattgaaaaataaccctaacgataatatttttatctcagaaaacatggacgaagcagcaaaattagctgttgagagcggagtataat

SEQ ID NO: 309930 - DNA, 895 bp, Unknown
  Bacterial polypeptide expressing nucleotide sequence isolated from the Sargasso Sea
aatgatatttcacgaacaccaagctaaacaaatcttaaaagagtttggtgcagttgtcccagagggggtttttgcgtttactgtaaaagatttaattgaaaaatgtaaaaaattaaaaactgataaatatgtcctaaaagcacaaatccatgcaggtggaagagggaaagcgggaggagtaaaaatcttaaataatttagatgaattagaaaaatcggccaatgaacttcttgggaaaaaattaatcacgcatcaaactgggccagaaggtagagaggtaaaaagactttatgttgaaacttcctctaatatagagaaagaattttatttatcatgtttaattgatagagccacatctaaaattgcatttatttctagcaatgagggagggatggatattgaagaagtagcagcaaaatccccagacaaaattttgactaacaaagttgattttacagaagaaatttctgatgcagagtgtgaaaagataatcaaaattttcgatctagaggatagttcaaaaatggaggctatttctttgattaaatctatttataaaatgtttgttaaaacggacgcaaatatggttgaagttaatccattaattttaacaaaagaaaaaaaaattgtttgtctagacgcaaaaataaattttgacagcaatgctttatttagacatccggagattttaaatcttagagatctaaatgaggaagaccctatagagatcgaagctagtaaacacgatttagcttatataaaattagatggaagtattggttgtatggtaaatggagctggtttagcaatggctacaatggatataataaagttatacggagaagagccagcgaattttctagatgttggtggaggagcgtcaaaggagaaagtt

SEQ ID NO: 309931 - DNA, 866 bp, Unknown
  Bacterial polypeptide expressing nucleotide sequence isolated from the Sargasso Sea
gaagcaactggatatcaaacatgaattatatttaggtttagtgtttgacagatcttcagaaagtataatggttgtagcctcaacagaaggcggaatgagtgtcgaagaaatttcaaaagaaaaacctgaaacaattatacgatctaaaatagaagtagcagttggtattcaacaatttcaagcaagagaaatagcttttggtttaggaattgaaaccaagttgatatcaagagctgcaaatacaattattggctgttataaagcttttagtgagcttgatgcaacaatggttgaagtcaatccattagttgtatcacaccaagatgaaatattagcattagattgtaaaatgagttttgataataatgcaatgtttagaagagatgaaattgcagaacttagagataaaacacaggaaaattcaaatgaagtttatgcttctgacagaggaatgaattatgtaagcttagatggaaatattggtaatattattaacggtgcaggcttagcaatggcttcaatggacatgattaaacttgctggcggtgaacctgcaaattttttagatgttggcggcggtgcaacaccagaaaaaatagttaaagcttttaaattaatctccatggacacaaaagttaaggtaattttagtaaatatctttgcagggattaacagatgtgattgggttgcagaaggaattgttcaagctttatcaaaaattgaaattaaacatcctttagttatacgcttagctggaactaacgttgaaaagggaaatgaaatacttaaaaaaagcaatattaattatattgaagcatcaactttagaagatgcagcaaataaagcagtaaaggctcttggataat

SEQ ID NO: 309932 - DNA, 552 bp, Unknown
  Bacterial polypeptide expressing nucleotide sequence isolated from the Sargasso Sea
caaaagagaaaaaaattgtttgtttagatgcaaaagttaatttcgactctaacgctttattcaggcatccagaaattgttgaattaagagatttaaatgaggaagatcctaccgagatagaagctagcaagcatgatcttgcatatatcaagctagatggaagtattggctgtatggtgaatggggcaggattagcgatggcaacaatggatataattaaattgtatggtaaagagccagcaaattttttagatgtaggcggtggtgcatccaaagaaaaagtatctgctgcattaaagataattctctcagataaaaatgttaaaggtattttaattaatatttttggaggaataatgagatgtgatgtccttgcccaaggagtagttgatgcagctaaagaaattaatattagtgtacctttagttgtaagattagcaggcacaaatttcaaagaaggaaaagaaattcttgataattctggattaaaattaatttctgcagaaaatttagatgatgctgctaagaaaattgttgaggcaataaaataaa

SEQ ID NO: 309933 - DNA, 808 bp, Unknown
  Bacterial polypeptide expressing nucleotide sequence isolated from the Sargasso Sea
atgagcattcttgtcgatcgtaatacacgtgttatttgtcagggcatcactggaaaagttggtgagtttcatactcgaggctgccttgagtacggaacaagaatggtaggtggtgttactcccggtaagggaggagaaacaattgccgatcttccggtcttcaatacagttgctgaagcacgtgatgtgacaggtgcgaatgcgacgatgatttttgttcctccaccttttgcagcggatgccattcttgaggccgtggcagcagaaatcgagcttgtcatcgcggttacagagggcatacccgtgctcgatatggcgcgagttttaccagcctttgaaaactccaagagtcgactcgtcggtcctaattgtcccggagttattacacctggccaatgtaaaattggaattatgccgggctacattcacacaccaggaaacgtcggggtcatgagtcgttccggcacgcttacgtatgaagcggtgtggcaactcactcaactcggtcatggacagagcacatgtgttggccttggtggtgatcctttggtcggatcaagttttatagatatcttggaactttttgaacaagatgatgacacgcacgctattttaatgatgggggaaattggtggctcagcagaagaagaagctgcagcttatgtgaaggaacatgtcacaaagcccgttgcagcctttatagccggtcgtacggctcctcctgggaaacgcatggggcacgccggcgcaattatttcaggcggcaagggaacagccgaggcaaagttagaggcacttcgtgatgcag

SEQ ID NO: 309934 - DNA, 743 bp, Unknown
  Bacterial polypeptide expressing nucleotide sequence isolated from the Sargasso Sea
catgaatattcacgagtatcaagctaagagtttgttgaagcagtacggtgtgcctgttcctaacgggaaggttatcaactctttgcgggatttaatagggctggatcaagaattatctggatcaaaatttgtagttaaatctcaaatccatgcgggtggaaggggtgcgggtttttttaaaaacgatgagcatggcggagggggtgtaacaatcgccaatagcctctcggatgttgaaactaatgttaagaggatgctgaataatacgctcgtcacaaagcagacgggtgcggagggaaaggaagtaaaaaccgtatatattgaagaggcatgtcagatagaacgtgaattttatctttcaatgcttgtagatagaaagtttgggagcgttactgttatttgttccaccgaaggtggaatggaaatcgaagaagttgctgaaaacacgccggaaaaaataattcaaataaacgttgatgggcaaattgggcttaaaggttaccacacacagcaaatttcaaaagaactgggtttgtctaaagaccagcaccgatgcgtctcagatttactgtattccctctacgaagcctttaacaaattagatgcggcgatgattgagattaatccactagttatcacagggagtgatgaggtgttggctgttgatgccaagatgagttttgatgataatgctctgtttagacagccagaagtgcaaggacttcgtgatgaaagtgaagaaa

SEQ ID NO: 309935 - DNA, 748 bp, Unknown
  Bacterial polypeptide expressing nucleotide sequence isolated from the Sargasso Sea
ttgaatattcacgaatatcaagctaaagaactactgaaaaacaatggtgtcaacgtgcctaatggtaaagttgcctttacagttgatgaggctttagatgttgctaaagaacttaactctgacgtttgggttgtaaaagcccaaatacatgctggtggaagaggaaaagcaggtggtgttaaagtcgtaaaatcattagaagaagttcaaacagcagcaaaagaaataatgggcaaaactctgattaccccacaaaccggaccacaaggcaaggttgtaaaaaaactttatgttgaagaaggatcaaatatcgaaaaagaattttatctttcaatggttattgatagagaaactaatggaataactgttatagcttcaactgaaggtggaatggaaattgaagaagtagcagaaaaaacacctgaaaaaattattaaatacaaattaaaaccgtgtgctgaaatgaatataaacgaagctaaagatattgcttctaaattaggtttagaaggagaattaatcgataaagctgctaactttattttatcagttcataaaacaacggtaagtctcgaagccttaatggtagaaattaaccctatggtaattactaaagaaaaagaagtttatgctttagatgcaaaaatgggttttgatgaaaattctttttatagacatgaagatattgcaaatctcagagatgaggatgaagaagatcctttagaattagaagcaaaaaaacatgatc

SEQ ID NO: 309936 - DNA, 922 bp, Unknown
  Bacterial polypeptide expressing nucleotide sequence isolated from the Sargasso Sea
attagttactcatcaaactggtccaggcggaaaagaggttaagagactatacgtagaggagtcaacaaatataaaaaaagaattttatctgtcttgtcttgttgacagagtagattccaaaattgcttttatttcaagtgatcaaggtggaatggatattgaagaagtagcaaaaaaagaaccaaataaaattattaccacgaaagttgatttaaaagaaaatatttctgatgatgagtgtaatcaaatagtcaaaatttttggtttaaaagataatacatttttacaagcaaagaatcttattaaatcaatttataaaatgtttaaagaatgtgatgcaaatttagtagaaattaatcctttaataatatctaaagagaatcagattgtttgtttagatgcaaaaatgaattttgatgataacgcattatttaaacatcctgagattttagcattgcgagatttgaacgaagaagaatcaaacgagatagaagcaagcaaacatgatctttcctatataaaattagatggaaatattggatgtatggtaaatggtgctggcctagctatggcaacaatggatataataaaattatttggaaaagaacctgcaaattttttagatgttggtggcggcgcctctaaagataaagtctcagcagcctttaaaatcatattgttagacaaaaatgtgaaaggaatattaattaatatttttggtggaataatgagatgtgatgttttagccgaaggcgttgttgaagcagctaaagaaatgaaagttaatgttccacttgttgtaagattagctggaactaattttaaacaaggtataaaaattttagatgagtcgggattgaaaataatatcagcatcaaatttgtcagatgctgcaaaaaagatagttgaggcaataaaataa

SEQ ID NO: 309937 - DNA, 775 bp, Unknown
  Bacterial polypeptide expressing nucleotide sequence isolated from the Sargasso Sea
atgaacattcatgaacatcaggcaaaagaaattttaaaagaatttggtgcaccaactactgaaggtttagttatattcaatactgaaaatttagttgaaaaaattaaagttcttaaatctaatcagtttgtcttaaaagcccaaatccacgctggtgggaggggaaaagctggtggagttaagcttgtaaaaaaagaagatattatagatgttgctaaaaatctttttggaaaagttcttgttacacctcaaacagggccagagggaaaggaagtaaaaagaatttatgtgcaaaaagcttatgatattttaaaagaattttatctttcatgtcttgttgacagaaaaagttcaaaaatagcttttataagcagtacagagggtggagtagacatagaagcagtagcaaaaaaaaatccagaaaaaattaatacaactaaagtagatttaaaaaaaaatttaagttctgaagatataaataatattttaaaaatctttaagttcgataaaaaccaaatgattgatgcaacaaaactcgttactgctatgtacgaagctttaatttctaaagatgcctcattaatagagataaacccattggttattataaaaaataacaaaatactttgtctagatgcaaaaatgaattttgatgataacgcaatttttaaacatccagaaatatataagttaagagatttaaatgaagaagatcccacagagattgaagccagcaaacatgatttggcttacataaaattagagggctcaatag

SEQ ID NO: 309938 - DNA, 733 bp, Unknown
  Bacterial polypeptide expressing nucleotide sequence isolated from the Sargasso Sea
aatgaacatacatgagcatcaagcaaagaaattactgagagaatttggtgcacctgttccgaatggtatatttggtttaagtgttcaagaaataattgaaaaatcaaaaaatttaataactaataaatatgtattgaaagctcaaatacatgcgggtggaagaggtaaagccggggggattacaattgtaaatagtttagatgaattagagcaagcagcaaatcaattatttggtaaaactctaataacccatcaaaccggtccaaaaggaaaaaaggttgagagattatacgttgaagaagcttcaagaattgaaaaagaattttacttatcttgcttggtagacaggaaaagctcaaaaattgcttttatttcaagtatccaaggaggtatggatattgagcagactgcaaaagaaaatcctgaaaaaattataacaacaaaagtagaatttgacaaaagcattagcgaaaatgattgtgaaaaaataattaatgtatttaaattagaatatgatgcaaaagatcaagcaatagatttagttaaatcaatttacaacttatttattgagaaggatgcaagtttagtagaaattaatcctttaattctgacaaaagaaaaaaatattatttgtttggatgcaaaaataaattttgatgacaatgctttatataaacatcctgaaatattggaactcagagatttaagtgaagaggatcctacagaaattgaa

SEQ ID NO: 309939 - DNA, 595 bp, Unknown
  Bacterial polypeptide expressing nucleotide sequence isolated from the Sargasso Sea
atgaatattcacgagcatcaagctaaacaaatattaaaaaaatatggagctgtagttcccgaaggagtatttgcgcttaatgttgatgaacttattcaaaaagcaaaagcactcaaaactgagaaatatgtgcttaaagctcaaatccatgctggaggtagaggaaaagctggtggtgtaaaaattttaaaatctattgaggaactaacggtagcagctaaagaattacttggaaaaacactagttactcatcaaactggccctgaaggtagagaggtaaaaagattatacgtagaagaatcatcaaatatagataaagaattttacttatcgtgcctggttgatagggcaagttctaaaattgcatttatatcaagtgaccaaggagggatggacattgaagaagttgcaagcagttcacctgaaaaaattataactacaaaagttgatatgggtgatgaaatttctgattcagattgtgaaaaaataattaatatttttaatttaaatgaagacgcaaaaaaacaagcaataacattaattaaatcaatatataaaatgtttgtaggtactgacgcaaacatggtgaagtaaa

SEQ ID NO: 309940 - DNA, 934 bp, Unknown
  Bacterial polypeptide expressing nucleotide sequence isolated from the Sargasso Sea
aatattcacgaacatcaagcaaaacaaattttaaaaaaatatggtgctagtgttccaaaaggtgattttgctttcacagtaaacgagttaattgaaaaagcaaaaaagattaagactgaaaaatatgttttaaaagcacagatacacgctggaggtagaggtaaagctggaggagtcaaaatattgaataatattgaggaattaattgattctgcaaaagagatgttgggtaaaactcttattactcaccagactggtccaaatggcaaagaagtaaaaagactttatattgaagagtcttctaaaattaagaaagaattttacttgtcttgtcttattgatagagcaagttcaaaaattgcatttatttctagtgatcaaggaggaatggacattgaagaagtagctaaaaagcgtcctgaaaaaataattacgaccaaagtagattatcttgaggatattgatgatgaaaattgcaaaaaaatcattaaaatttttaatctaaaagacaatacaatgttacaaggaataaatctaattaaatcaatttataaaatgtttatatctactgatgcaaacttagttgaaataaatcctttaatattaaccgaagatgataatctaatctgtttagatgccaaaatgaattttgatgataattcaatttttaggcaaccagagattcaaagcctaagagatttaaatgaggaagatccatcagaaattgaagcaagcaaacatgatttagcctatataaaattagatggatcaattggctgtatggtaaatggagcgggattagcaatggcaaccatggatataattaaattgtttgggcaagagccagcaaattttttagatgttggtggtggagcctcaaaagaaaaagtttctgcagcttttaaaattatactttcagatccaaatgttaaag

SEQ ID NO: 309941 - DNA, 928 bp, Unknown
  Bacterial polypeptide expressing nucleotide sequence isolated from the Sargasso Sea
aatgaacattcacgagcatcaagctaaacaaatattaaaaaaatatggagctatagttcccgaaggagtatttgcgcttaatgttgacgaacttattgaaaaagcaaaagtattaaaaactgataaatatgtacttaaagcacaaattcatgctggaggcagaggaaaagctggtggtgtaaaaattttaaactctatcgaggaactaacggtagcagctaaagaattactaggaaaaacactatttactcatcaaactggccctgaaggaagagaggtaaaaagattatatgtagaggaatcatcaaatatagataaagaattttacttatcgtgcctggttgatagggcaagttctaaaattgcatttatatcaagtgaccaaggagggatggacattgaagaagttgcaagcagttcacctgaaaaaattataactacaaaagttgatataggtggtgaaatttctaagtcagattgtgaaaaaataattaatatttttaatttaaatgaagacacaaaaaaacaagcaataatattaattaaatcaatatataaaatgtttgttagtactgatgcaaatatggttgaagtaaatccattaattttaacgaaagaggaaaaaattgtttgtttagatgccaaagttaatttcgattctaacgctttattcaggcatccagaaattgttgaattaagagatttaaatgaggaagatcctacagagatagaagctagcaggcatgatcttgcatatatcaagctagatggaagtattggctgtatggtgaatggagcaggattagcgatggcaacaatggatataattaaattgtacggtgaagagccagcaaattttttagatgtaggcggtggtgcatccaaagaaaaagtatctgccgcattcaaaataattctctcagataaa

SEQ ID NO: 309942 - DNA, 833 bp, Unknown
  Bacterial polypeptide expressing nucleotide sequence isolated from the Sargasso Sea
atttactggctcacacggaacatttcattcagagcaggctataaaatatggaaccaatcttgttggtggagttacgccaaagaaaggtggacaaaaacatttagacagaccagtttttaacagcgttttagaggcaaaaaatgaagtaggagcagatgcaactatgatttatgtacctgctaaatttgcagctgcagcaatcattgaagctattgatgcatcaattgaacttattgtttgtataacagagggaattccaattcaggatatgcttaaggtaagacaaaaattaagtggatctaatagcagattaattggacctaattgtccaggaataatctcaccagatgaatgtaaaattgggattatgccgggaagtattcacaaaagaggaagtgttggaattgtatcaaggtcaggaacattgacatatgaagcagtagcacaaacaactgaaaatggacttggtcaatcaacttgtattggtattggtggtgatcctattaatggaacaaattttatagattgcttagatttatttttaaatgattctgaaacagaatctattttaatgataggtgaaattggaggaacagccgaagaagaagcggctgactttataaaaaatcataagattaaaaaaccaattgttggatttattgctggaattactgctcctccaggaagaagaatggggcatgctggtgccattatatcaggtggcaagggtggagctgaagataaaataaaaaaaatggaagaatgtggtattacagttgccaaatcaccatcaattattggaaaaactttatttgataaactgtctaattgaa

SEQ ID NO: 309943 - DNA, 883 bp, Unknown
  Bacterial polypeptide expressing nucleotide sequence isolated from the Sargasso Sea
aaaaagattatacgtagaagaatcatctaatatagataaagaattttacttatcgtgcctggttgatagggcaagttctaaaattgcatttatatcaagtgatcaaggagggatggacattgaagaagttgcaagcagttcacctgaaaaaattataactacaaaagttgatatgggtgatgaaatttctgagtcagattgtgaaaaaataattaatatttttaatttaaatgaagacgcaaaaaaacaagcaataacattaattaaatcaatatataaaatgtttgtgagtactgatgcaaacatggttgaagtaaatccattaattttgacaaaagaggaaaaaattgtttgtttagatgcaaaagttaatttcgactctaacgctttattcaggcatccagaaattgttgaattaagagatttaaatgaggaagatcctaccgagatagaagctagcaagcatgatcttgcatatatcaagctagatggaagtattggctgtatggtaaatggagcaggattagcaatggcaacaatggatataattaaattgtatggtaaagagccagcaaattttttagatgtaggcggtggcgcatccaaagaaaaagtatctgctgcattaaagataattctctcagataaaaatgttaaaggtattttaattaatatttttggaggaataatgagatgtgatgtccttgctcaaggagtagttgatgcagctaaagaaattaatattagtgtacctttagttgtaagattagcaggtacaaatttcaaggaaggaaaagaaattcttgataattctggattaaaattaatttctgcagaaaatttagatgatgctgctaagaaaattgttgaggcgataaaataa

SEQ ID NO: 309944 - DNA, 457 bp, Unknown
  Bacterial polypeptide expressing nucleotide sequence isolated from the Sargasso Sea
atgaaaattcacgaataccaagcaaaacagatcctagcaaaatatggagttcccgtaccgaatgggaacgtagcgttttctgtagatgaagctttaatggtagcagaggatttaaaatctgaggtctacgtagcgaaagcacaaattcatgcaggagggcgaggaaaaggaggtggagtcaaagtctcaaagggactcgaagctctccgtaaaaatgctgagaccatacttggaatgcaactggtcacacatcagactggtccggcggggcagaaagttaagcaaatactgattgaggaaggaatagatatcagcaaagaactttactgttcggtgctggtagaccgcggaaagcagcgtattgtaattctagcatccacggaaggtggaatggacattgaagaggttgcagcaaacactccggaaaaaattaagaaagtttttgtagatccttctg

SEQ ID NO: 309945 - DNA, 547 bp, Unknown
  Bacterial polypeptide expressing nucleotide sequence isolated from the Sargasso Sea
aaattaagtggatctagcagcagattaattggacctaattgtccaggaataatcacaccagatgaatgtaaaattggcattatgccgggaagtattcacaaaagaggaagtgttggaattgtatcgaggtcaggaacattgacatacgaagctgtagcacaaacaactgaaaatggacttggtcaatcaacttgtattggtataggtggtgatcctattaatggaacaaattttatagattgtttagatttatttttaaatgatgatgaaacagaatctattttaatgataggtgaaattggaggaacagccgaagaagaagcggctgattttataaaaaatcataagattaaaaaaccaatagttggatttatagctggaattactgctcctcccggaaggagaatggggcatgctggtgctattatatcaggtggtaagggtggagcagaagataaaataaaaaaaatgcaagaatgtggtattacagttgctaaatcaccatcaattattggaaaaactttatttgataaactgtctaattgaa

SEQ ID NO: 309946 - DNA, 517 bp, Unknown
  Bacterial polypeptide expressing nucleotide sequence isolated from the Sargasso Sea
tggtcccaactgtccaggtataataactcctgatgaatgtaaaattggaataatgcctggaaatattcataaaaaaggaacagtgggaattgtttctaggtcaggaacattaacttacgaggctgtagcccaaacctcagaaaatggacttggtcaatctacatgtataggaataggtggagatccaatacatggtacaaattttattgattgtctagatctgtttttaaatgatgaaaaaactgagtctatagtaatgattggtgagatcggagggactgctgaagaagaagctgctgaatttataaaaaatcataagataaaaaaaccaatggttggatttgtagctggaattacagcaccacctggcagacaaatgggtcatgctggtgcaataatatcagggggaaaaggtaacgctgatgaaaaaattaaaattatggaaaaatctggtattacaatggcaaaatcaccatctgaaattggaataactctattgaataaattgtctaattga

SEQ ID NO: 309947 - DNA, 498 bp, Unknown
  Bacterial polypeptide expressing nucleotide sequence isolated from the Sargasso Sea
ctttatacaggcaagaagaaatccaatcaatgagagactcatcccaagaagatgaaagagagtatcaagcaaaacaacatgacctgagttatgtatctcttgacggaaatattggatgcatggtgaatggtgcaggtttggcaatgggcacaatggatacaattaaattgtacaacggagaacctgctaactttttagatgttgggggaacggctacaaaagagagagttggagaggcgctaaagttaatattgtctgatcataatgttaagggaattttggttaatatttttggtggcattgttcgatgcgacctgattgctgagggcattataggagcaattaatgaaatagaggtaaatgtgcctatagttgttcgacttcaaggaaatatgagtaatgagggaaaagaattacttaacagttctggacttaatgtgataggtgaggactcgttaattcaagcatctcaaaaaattgtggagttagttaaatgag

SEQ ID NO: 309948 - DNA, 505 bp, Unknown
  Bacterial polypeptide expressing nucleotide sequence isolated from the Sargasso Sea
tgataatgctttgtttcgtcatccagagttaagtgaattacaagatataagtgaagaagatccattagaattagaagctaccaaaaataatatgaactatgtaaagttagatggttcaattggatgtatggtaaatggagctggtttagcaatggcaactatggatttaattaagcaatttggagaagaaccagcaaattttttagatttagggggaacggctaataaagaaagagcagtaaaaggatttaaaattattcagtctgatccaaatgtgaagtcagtgctaattaatatatttggaggaatcatccattgtgacatgatagcaaatggtattattgaagcagtcaaagaactaaactttaaattaccaattgttgtacgttttcaaggaacaaactctaaagaaggaagagatattattaataaatcaaatttaggaatgatttcaattgatgattttactgaagcagcaaacaaagtagtagagttagcaaaataa

SEQ ID NO: 309949 - DNA, 517 bp, Unknown
  Bacterial polypeptide expressing nucleotide sequence isolated from the Sargasso Sea
gttgggccaaactgtcctggagtaattacgccaggacaagcaaaaatcggaataatgccaggattcattcatagtcctggcacaattggtattatgtctagatctggtacgcttacttatgaagctgttcatcaaattggagctcatggattaggacagagcactgtaattggaattggtggcgatccaattattggaaccacatttattgatatgcttgaattatttgctaatgatgagggcacggaaggcgtggtaatgattggagaaattggaggaaatgcggaagaagaggctgctcagtgggtaatagataataacttcaaaaaacctatagtatcatttattgctggtcaaactgccccgcctggacgtcgtatgggtcatgctggtgcaattattgctggaggaaaaggaactgcagcagaaaaaatgaaagaacttaaacgtgcaggtattacggtagtggaaagtccagctgatattggtcaagctatggtatctgcaataaactaat

SEQ ID NO: 309950 - DNA, 886 bp, Unknown
  Bacterial polypeptide expressing nucleotide sequence isolated from the Sargasso Sea
tagggaaatttacctcggatttgttctagaccgatcatcccaaagagtaatgatcgtagcctctgcagaaggaggcatggaaattgaagatatatcggcggagaaacccgatagcatcgtgcgctcaaccgttgagccagcagttggcctgcaagattttcaatgtaggcaaatagcttttaaactaggtattgatccggctttaactcaaagcatggttaggacgctgcaaggttgttaccgtgcgttcagagagcatgatgcaaccatggtagaaataaaccctctggtagtcactggggatagccggatccttgcattagatgctaaaatgacattcgatgataatgccctgtttaggcaccctcatatttcggaattacgtgataaaagtcaggaagatccaagagaaagccgtgccgctgatagagggcttagctatgttggattagaaggcaatattggctgcatagtaaatggtgctgggctagctatggcaacgatggatacgatcaagctagccggtggtgagccagctaattttcttgatattggaggtggagctactcctgagcgagttgctaaagcttttcgtttggtaatgtcggatgacaatgtacaagcggtcttagtaaatatctttgccggtataaaccgttgtgactgggtcgctgagggtgttgttcaggcactgcgtgaagtccaagttaatgttccagttatcgtacgtttggcgggcacgaatgtggaagaaggacagaagattttagcaaagtctgggcttccaattatcagagcgacaacattgatggaggcagccgaacgatcagtccaagcttggcagagtgattccattggagaacctaaattgagggcagtaaaatga

SEQ ID NO: 309951 - DNA, 506 bp, Unknown
  Bacterial polypeptide expressing nucleotide sequence isolated from the Sargasso Sea
aatgaatattcacgagcatcaagctaaacaaatattaaaaaaatatggagctgtagttcctgaaggagtatttgcgcttaatgttgatgaacttattcaaaaagcaaaagcactcaaaactgagaaatatgtgcttaaagcacaaatccatgctggaggtagaggaaaagctggtggtgtaaaaattttaaactctattgaggaactaacagtagcagctaaagaattacttggaaaaacactagttactcatcaaactggccctgaaggtagagaggtaaaaagattatacgtagaagaatcatcaaatatagataaagaattttacttatcgtgcctggttgatagggcaagttctaaaattgcatttatatcaagtgaccaaggagggatggacattgaagaagtcgcaagtagttcacctgaaaaaattataactacaaaagttgatatgggcgatgaaatttctgattcagattgtgaaaaaataattaatatttttaatt

SEQ ID NO: 309952 - DNA, 589 bp, Unknown
  Bacterial polypeptide expressing nucleotide sequence isolated from the Sargasso Sea
gggaattcctgttatggatatgctagaggtcaaagatacgttaagatcttccaaatcacgtctcattggccccaattgtcccggagtcataactcctgatgagtgtaagattggtataatgccagcgcatattcatcaaaagggaaacgtaggaattgtatctaggtctggaacactaacttatgaagcagtttatcaaacaacagtggaaggtcttggacaatccacctgtattggaatagggggcgatccagtgaatggaacaaactttattgattgtttggaacttttcttatctgatccggaaactgagtcgataatcatgattggtgaaatcggtggttcagctgaggaagaagcagctgaatttttgagaaaagaaaaggtaaaaaagccaaccgttggatttattgcaggaacgtcagcccctccaggaagaagaatgggacacgctggagcaattgtatctggagggaaaggtggagcagaagataaaattgaagccatgaaaagtgctgggattcaaatttcaaattctccagcagctttaggatcaactttacttgaggtattaaagaatcaaaactaa

SEQ ID NO: 309953 - DNA, 751 bp, Unknown
  Bacterial polypeptide expressing nucleotide sequence isolated from the Sargasso Sea
atgaacttacacgagtatcaaggcaaagaaatttttgcaaaatatgatttacccgtttcaaaaggaaaagttgtcacaagccttgatgaggttgagcaagcatgtactgatattggaggaagtcgatgggtagcaaaagcacaggttcatgcaggcggtagaggtaaatctggaggcgttgctctatgtgacaccattgaggaggtagccgattttacaaaaaaatggttaggtaaaagacttgtaacatatcaaactgataaagaggggcagctggtaagctgtattcttgttgaggaatgtaccaatatcgcagacgagctttactatagtgcagttgttgatagatcttcacgcgaggttgcaataattgcatcttcggagggaggagtaaatatagaaaaagttgctgaggaaactcctgaaaagatcacttccatatttcttaatggtaaagatgtatcaaaaggcgatattgaaaagatatgcactacactcaaactaaatgagactcaatcttcacagatggagcatattgtaagaaaaacagtttcaatgttctttgagtgtgaccttagccttttggaaattaacccacttgtaataaaagatgatggtaatttgcactgtttagatgcaaagataaatatcgattcaaatgcactttttagacaaaaagagttacaagaaatgcatgatccaactcaagaagatccgagagaatctgaggcatcaaaatatgatctaagtt

SEQ ID NO: 309954 - DNA, 796 bp, Unknown
  Bacterial polypeptide expressing nucleotide sequence isolated from the Sargasso Sea
tgtggcatctaccgaaggaggaatgagcgttgaagaaatttcaaagaaaaaaccagaaactataattagatccaaaatagaagttgctgttggaatgcaaaaatttcaagcaagagaaatagcttttggattgggaattgaatcaaaattaatagcaagagcagctgatacgattattggatgttatcgagcatttagtgaattagacgcaactatggttgaggtaaacccattagttatttctaatcaagaacaaatattagctttggattgtaaaatgagttttgataacaatgctttattcagacgaaatcaggtttcagaattaagagataaaagtcaagaaaatcctaacgaggtatatgcttcagatagaggtctaaattatgtaagccttgaaggaaatattggaaatataattaatggagcaggattggccatggcatctatggatatgattaaattagctggaggagaacctgcaaattttctagacgttggtggtggagcaacccctgaaaaaatagtcaaagcatttaaattaatttcaatggatgaaaaagttaaagttatattagttaatatttttgcaggtataaatagatgtgattgggttgctgaaggaatagttcaagcattacaaaaaatagaaattaaagttccaatagtaataagattagctggaacaaacgttgataaaggcaataaaattttaaaagaaagcaaaataaactacatagaagccaacacattagaagatgctgcaaataaagcagtaaaagctttaggaaaataa

SEQ ID NO: 309955 - DNA, 854 bp, Unknown
  Bacterial polypeptide expressing nucleotide sequence isolated from the Sargasso Sea
cattgaaaaagaattttatttgtcttgccttgtagatagagctacgtcaaaaattgcatttatttcaagtgatcaaggtggaatggatattgaggaggtagctgctaaatctccagataaaattttaacaactaaagttgaattaaacgaggaaatttcaaataaagagtgtgagaaaattatcagaatttttaatttagaaggtagttacaaaaatgaggcaatttctttaataaaatcaatttataaaatgtttattaaaacagatgcaaatatggttgaaataaatccattaatattaactaaagaaaaaaaaattgtttgcttagacgcaaaagttaattttgatagtaatgctttatttagacatccagaaattttgaaacttagagatttaaatgaagaagacccatcagaaattgaagcaagtaaacatgatttagcctatattaaattagatggaagtattggttgtatggtgaatggtgcggggttagctatggctacaatggacataattaagttgtatggtgaagaaccagcaaactttttagatgttggtggaggtgcttcaaaagagaaggtttcagccgcttttaagataattttatcagataaaaatgttaagggaatactaatcaatatttttggtgggattatgagatgtgatgtccttgcacaaggtgttgtagatgcagctaaagaaataaatattagtgttccactagtagtaagactagcaggtacaaattttaaagaaggaaaagaaatattagataactctggtttaaaattaatttctgcagaaaatcttgatgatgcagcaaaaaaaattgttgaggcaattaaataga

SEQ ID NO: 309956 - DNA, 434 bp, Unknown
  Bacterial polypeptide expressing nucleotide sequence isolated from the Sargasso Sea
tggtatagtgtctagatcagggacactaacttacgaagcagtagctcaaacaactcaaaatggtctaggacaatcaacttgcattggaattggcggagatccaataaatggcacaaactttattgattgtttagatttatttttaaacgatccagaaacagagtctatattaatgattggtgaaataggaggaacagcagaagaagaagcgtcagaatttattagaaatcataaaatcaaaaaaccaatggttggttttatagcaggtatcacagctccacctggaaggagaatgggacatgcgggcgcaataattactagaggcaaaggaggtgcacaagaaaaaattaaaactatggaagatgctggaattactattgctaaatcacctgccgaaataggaaaaactcttttgaataagttgtctaattgaa

SEQ ID NO: 309957 - DNA, 662 bp, Unknown
  Bacterial polypeptide expressing nucleotide sequence isolated from the Sargasso Sea
aaaacttactattaatcaaaaaaaggaagccacacaactattaaaagctttgtataaaattttaattcaaaaagatgctaatttaattgagataaatcccttaattattactgaagaagaaaaaattctttgtttagatgctaaaatgaactttgatgataacgctacttacagaagacccgaaattttaaaattaagagatttaaatgaggaagatcctaaagaaattgaagcgagtaaatatgatctagcttatataaaactgaatggctccataggttgtatggtgaatggtgctggcttagctatggctaccatggatataataaaattatatggaaaagaacctgctaattttttagatgttggtggaggtgcatcaaaagaaaaagtttctgcagcatttaaattaatattatctgatagaaatgttaaaggaattttaataaatatatttggtggcattatgaggtgtgatgtacttgcccaaggtgtggtggatgcggcaaaagaaattaatctatctataccgcttgttgtaaggttggcaggaacaaattttaaagagggaaaagaaattttagataaatctaatttaaagatattatcagctacagatttaaacgatgctgcaagaaaaattgtggaggccattggttaaa

SEQ ID NO: 309958 - DNA, 718 bp, Unknown
  Bacterial polypeptide expressing nucleotide sequence isolated from the Sargasso Sea
gtagattttaatgaaagtatttcagaggaagactgtaaaaaaattattaaaatttttgatttagacatcgatgcaagcaaacaagcaatcaatttaataaaatcaatttataaaatgttcattgatacagatgcaaatttagttgagataaatcctctcattttaaccaaaaaaaacaaaattgtatgtttggatgcaaagatgacttttgacgaaaatgcattatttaaacatccagaaattcaaaaactaagagattttaatgaagaagaagaaactgaaattgaagcaagcaaacatgatcttgcatacattaaattggacggaaatataggatgtatggtaaatggtgctggtttagcaatggctactatggatattattaaattatatggagaagagcctgcaaattttttagatgtaggtggtggtgcctctaaagaaaaagtttcagcagcatttaaaattatcttatctgacaaaaatgtaaaaggaatactaataaatatttttggaggaataatgcgatgtgacgtactcgcacaaggtgttgtagatgcagcaaaagaaattaaaattaaagttcctttagtagtgagactagcaggtacaaatttcaaagagggaaaagaaattttagataattcaggattagagattatttctgcaaatgatttatccgatgcagcaaaaaaaattgttgaggcaattaaataat

SEQ ID NO: 309959 - DNA, 946 bp, Unknown
  Bacterial polypeptide expressing nucleotide sequence isolated from the Sargasso Sea
gttaaagctcaagttcatgctggtgggcgtggaaaagccggcggagtgaaaatagctaaaagtattgctaacgttcaggaaatggcatctaagatgcttggtactaatctcataacaaagcaaactgatgataacggattgcctgtgaatcaggtctatattgagtctgggacatcgattcaaagtgaatattatttgagcttactggttgatcgaacgaaagagtcatggacatatatcgcatcaatagaaggtggagttgacattgaggcagtcgctgaagagtctccagaaaagatcatcaattacaccatagatcctttgaagggtttggaattatcctctttgagcgaaatggcagatcaaatgggattcattgatgatgttcgctcacaatttatttcaatcactcaaaagatgtttgaaatagccaaaaacaaagatgctaacctcattgaggtgaacccccttattttagatgatcacaatcagcttatcgctttggatgcaaagatttcaatcgaaagcaatgcattattcagacaagaagaactcttagcatttaaagataactctcaagaaaatgaacttgaggttaaagcctcagagcatgatttaagctatgtatctttggatggaaatattgcatgcatggttaatggagctggacttgcaatggcgacaatggatcttatcaagcttcatggcggggagcccgcaaattttcttgatgttggcggaggtgctacaaccgatagagtaaagatagcaattgatatcattatggaaaatccaaatgttgatgctattttgatcaatatctttggcggcattgttcgttgtgatgtcatcgcacagggtattactgaagcagttaaatcaacagccattgatattcccatagttgctcgcttacagggcaccaatgttgaattaggtacaaaaa

SEQ ID NO: 309960 - DNA, 913 bp, Unknown
  Bacterial polypeptide expressing nucleotide sequence isolated from the Sargasso Sea
tggcccagatgggaaaaaagtccaaagattgttaatcgagtctggtattgatattgaaaaagaattttatgctggaattgttcttgatcgcaaagaaaagaagtttgtatttatggtttcaacggaaggaggagttgaaattgaaaaagtggcagaagaaactccggaaaaaattattaaagaatggattcaccctgaagatggtttatctaaaaatcaagcaacagcattaggcagcgcacttggtttaactagaaatcagttggattcaggaattgaaatatttactgcattatgggaagcatttagtagtcttgattgttctcttatggaaatcaatccattagtgctaacaaaaaacgataaagtgattgctttagatgcaaaaataaattttgatggtaatggcctttttcgacatccagagctgtctgatttacgtgataaatcagaagaagatcctgcggaagcagaggcaagttcatataatttaaattatatcaaattagatggaaatgtcgggtgcatggtgaatggtgctggattagcaatgggcactatggacattattaaattgaaaggcggcgatcctgcaaactttctagatgtaggaggcgtagcaaatccagagacagttgcaaatggttttaaaattattttgtccgacccaaatgttcgatcgatacttataaatatttttggtgggattgtacgttgtgatcgagttgctcaaggagttataaatgcaatgcaaactatcagtgtaaatgtacccgttgtcattcgtttagaaggcacaaacgccaaagaagcatctcaattactcgagcaatctcctcttaattttatcgtagcaaatagcttaagtgatgcagctgaaaaagcagttgctgcaacaaatggagcgatataa

SEQ ID NO: 309961 - DNA, 877 bp, Unknown
  Bacterial polypeptide expressing nucleotide sequence isolated from the Sargasso Sea
aatgtcaattatagctaataaaaatactaaagtaatatgccaaggatttacaggaaaacatggtacttttcattccgaacaggcaattgaatatggaacaaatttagttggaggtgtaacaccaaacaaaggtggacaaacgcatctatcaaaacctgtttttaattctgttaaggaagcaaaagaaaaaactggtgcaaatgcttctatgatttatgttcctgcaaaatttgcggcttcagcaattattgaagctattgatgcttctatcgaattaatagtatgtattactgaaggaatacctgttttagatatgctcaaaataaaaaaaaaattaataaattctaattcgaggttaatcggtccaaattgtcctggaattattactccagaagaatgcaaaattggaataatgccaggaaatattcataaaaaaggatcagttggaattgtatctaggtctggaactttaacttatgaagctgttgcacaaactactaatattggattaggtcaatcaacctgtataggaattggtggcgaccctataaatggaactaattttatagactgtcttgatttatttttaaatgacgaagaaacaaaatccatattaatgattggtgaaataggtggaactgctgaagaagaagcagcagaattttttagagatcacaaaataaaaaaacctatggttggttttatagctggagttacggctccaccaggaagaagaatgggtcatgctggtgcaataatttctgggggaaaaggtggagcggaaagtaaaataaaaaaaatggaagattgcggtataacgattgcaaaatcacctgcagaaattggcaaaacgctaataaataaattgtctaattga

SEQ ID NO: 309962 - DNA, 607 bp, Unknown
  Bacterial polypeptide expressing nucleotide sequence isolated from the Sargasso Sea
atggagcatattgtaagaagaacagttttaatgttctttgagtgtgaccttagccttttagaaattaacccacttgtaataaaagatgatggcaatttgcactgtttagatgcaaagataaatatcgattcaaattcactttttagacaaaaagagttacaagaaatgcatgatccaactcaagaagatccgagagaatctgaagcatcaaaatatgatctaagttatgtttcattggatggaaatattggatgcatggtaaatggagctggattagcaatgggcactatggatacaataaagtttttcaaagggaatcctgctaactttctcgatgttggaggcacagctactcaagaaagggtagcaaaagcttttaaaataattttggatgatccagaagtaaaagtagtacttgtaaacatttttggaggtattgttagatgtgatttaattgcagaaggtatagttgcagcaattgatgaagtaggagttgaaatacctgttgttgttaggctggaaggcaacagtgcagaaaaaggactatcaatcctttctaattcgtcttcaaaaatacaaagcaagaatagtttgaagatgcagctag

SEQ ID NO: 309963 - DNA, 808 bp, Unknown
  Bacterial polypeptide expressing nucleotide sequence isolated from the Sargasso Sea
cttccgcgaggttgcataattgcatcttcggaaggaggagtaaatatagaaaaagttgccgaggaaactcctgaaaagatcacttccatatctcttaatggtaaagatgtatcaaaaggcgatattgaaaagatatgcagtacactcaaactaaatgagactcaatcttcacagatggagcatattgtaagaaaaacagtttcaatgttctttgagtgtgaccttagccttttggaaattaacccacttgtaataaaagatgatggtaatttgcactgtttagatgcaaagataaatatcgattcaaatgcactttttagacaaaaagagttacaagaaatgcatgatccaactcaagaagatccgagagaatctgaggcatcaaaatatgatctaagttatgtttcattggatggaaatattggatgcatggtaaatggagctggattagcaatgggcaccatggatacaataaagtttttcaaagggaatcctgccaactttctcgatgttggaggcacagctactcaagaaagggtagcaaaagcttttaaaataattttggatgatccagaagtaaaagtagtgcttgtaaatatttttggaggtattgttagatgtgatttaattgcgcaaggtatagttgcagcaattgatgaagtaggagttgaaatacctgtcgttgttaggctggaaggcaatagtgcagaaaaaggactatcaatcctttctaattcgtcttcaaaaatacaaagcaagaatagtttggaagatgcagctagaactgcagtggagcttgcaaaatgag

SEQ ID NO: 309964 - DNA, 994 bp, Unknown
  Bacterial polypeptide expressing nucleotide sequence isolated from the Sargasso Sea
gcccaaattcattcaggcgctcgcggtaaagctggaggtattaaggtttgtaaaagcgaagatgaagtagcaaaggcagctgaggaactactggaaaaaaaattggtgactcatcaaacagggccacaaggaaaagtctgtcatcgattatacgtagaggctgggtgcaatatagatcgtgaaatatatatggcttttgttcttgataggcaaaaagagagtgtaacagttgttgcatcagctgaaggcggaatggaaattgaacaacttgcaattgagaaaccagattcgatcataaagattgcagttgaagcggctgtagggatgcaaccatttcaagctcgggagattgtttttgcattaggtttagataagtcacaagttaatcaagcagtaacaactattcttggttgttatcgtgcaatgcgagatcttgatgcaaatatggtagaaataaatccattagttgtaacaaaagaaggaaacctgctagcagtcgatgcaaagatggggtttgatgacaatgcactttttcgtcacagtcagatttctgaattaagagataaatcgcaagaagatattcgcgagatgaatgccgcggatcgtggattaagttatgttgggttggacggcaacattgggtgcattattaacggcgctggtttagcaatggcaacaatggatatgattatgcatgcgggcggagaacctgctaattttcttgatatcggtggcggcgcatctccagaacgcgtaagcaaagcttttaatcttgtgttatctgatgacaacgtaaaatgtattttaataaacatttttgctggtattaatcgatgtgattgggtggcagaaggcataattcaagcagttcaaaaaattgaattaaagttacccgttgttgttagattatcgggaacaaatgttgaacagggtcgaaagatgctaaaagatagtggtttaccactcataatggctgaaacacttagagaagctg

SEQ ID NO: 309965 - DNA, 1011 bp, Unknown
  Bacterial polypeptide expressing nucleotide sequence isolated from the Sargasso Sea
gtggagttaaaattttagaaaatcttcagaagttagagcaagaagctcaaaatttacttggtaagaccttagtgactcatcaaacaggcccaaacggtcgtgaggtaaagagactttatgtagaagcatcatctgaaattagtaaagaattttatctttcttgtcttgttgatagagcaagttctaaaattgcatttatttcaagcgaccaaggaggaatgaatatcgaggatgttgctagcaaatcaccagaaaaaattattacgactaaagtagatttaaatgatgaaatttcggatgatgattgcaaaaaaataattaaaatttttaatttagatatggaagtaagcaaaaaagcagtaaatttgattaaatcaatttataaaatgtttattgatacagatgccaatttagttgaaataaatcctttaatattaacaaaggataataatatagtctgtcttgacgcaaaaatgaattttgatgacaatgcactttttaaacatccggagattctagaattaagagatcttaatgaagaggaagataatgagatagaagcaagcaaacatgacttagcatatataaaattagatggtaatattggttgtatggttaacggcgcaggtcttgctatggctacaatggatataattaagttgtacggtgaagaaccagcaaactttttagatgttggaggcggagcatctaaagaaaaagtttctgctgcttttaaaataatcctttctgataaaaatgttaaaggtattttaataaatatatttggtgggataatgagatgtgatgtacttgcacaaggtgttgttgaagctgctaaagaaattaaaattcaagtgccattggtagtacgtttagcaggtacaaattttgaagaaggaaaaaaaatattagataattctgagttaaaaattatatcagcttcagacctttcagatgctgcaaaaaaaattgttgaggcaataaaaataatttatggcagttttagttgat

SEQ ID NO: 309966 - DNA, 576 bp, Unknown
  Bacterial polypeptide expressing nucleotide sequence isolated from the Sargasso Sea
ttccaacacttgatatgctcaaagtgaaagtgaagctgaaagaaacgggtactcgcatgatcggtcctaactgcccaggtgttatcactcctggtgaatgtaagattggtattatgcctggtcacatccacaagcctggtaaagtgggtattgtttcacgctctggtacattaacgtacgaagcggttaagcaaactactgatgaaggtttcggccaatctacttgtgtaggtatcggtggtgacccaattcctggtactaacttcatcgacgtattggaaatgttccaaaacgacccacaaactgaagcgattgttatgatcggtgaaattggtggtaacgctgaagaagaagctgctgaatacatcaaagctcacgtaactaagcctgttgtatcttacattgccggtgttactgcaccagaaggtaagcgtatgggccatgctggcgcaattatcgctggtggtaaaggtactgctgctgataaatttgctgctttagaagctgctggtgttactactgttcgctctttagctgacattggtaaagcattacgcactaaaactggctggtaat

SEQ ID NO: 309967 - DNA, 571 bp, Unknown
  Bacterial polypeptide expressing nucleotide sequence isolated from the Sargasso Sea
atcaaccctttagtgattactaaaaacggagacctgcattgtttagatgcaaaaattaacattgattcaaatgctctatttaggcaaccggagttaatggaaatgcatgatgaatctcaagaagatccgcaagaagcagaagctgcgaagcatgacttaagttatgtatctttagatggaaacattggatgtatggtcaacggtgctggtcttgcaatggggaccatggacacaattaaattttttggaggcaaccccgcaaattttcttgatgttggtggaacggcaactcaagaaagggtagctaaagctttcaaaattatacttaaagatcctgaagtaaaagttgtgctggtaaatatttttggtggaattgtgagatgcgatcttatcgctgagggaatagttgctgcaattaaagaagtaggtattgaagtcccagtagttgtgagacttgaaggaaataatgctgaaattggagccaagattcttgaggagtctgatattaaagttgaaagcataaatgatcttggatctgctgcaaagaaatctgttgagcttgcaaaatgag

SEQ ID NO: 309968 - DNA, 981 bp, Unknown
  Bacterial polypeptide expressing nucleotide sequence isolated from the Sargasso Sea
aggtaaggcgggcggagtaaaaatattagataatttatctgatctagaaaaagctgcaaaggatttgttaggaaaaaaattaattacacatcagacaggaccaagtggcaaagaagttaaaagactttatctagaggagccatccaacataaaaaaggaattctatttatcctgtcttattgatagggcaagttctaaaattgcttttatttctagcgatcagggtggaatggatatcgaagaagttgcaaaaagtgatcctaataaaatcaatactgtaaaaattagttttaagaaggatattgaagatgaggattgcaaaaaaattattcgtaatttcaatctagatgatgatgccaatacaaaatgtatcaaggttattaaatcaatttacaaagcatttgtttctaccgatgcaagcttaattgaaatcaatccactaatacttacaaaggaaaacaatattgtttgtctggatgcaaaaataagctttgacgacaatgcaattttcaaacatccagaattaatggaattaagagatttgaatgaagaagatcctatagaaatagaggcaagtaaacacgatttagcttacataaaattagatggatctattggatgtatggtaaacggagcaggattagcaatggcaacaatggatataataaaactgcatggccaagaacctgcaaactttttagatgtaggaggcggtgcatctaaagaaaaagttgcagctgcgtttaagataattttatcagataaaaatgtaaaaggaatactgataaatatttttggaggaattatgaggtgtgatgtccttgcccagggaattgtagaggctgcaaaagaatccaaaataaatatacctcttgtagtaagacttgccggaaccaattcaaaagaaggaaaaaaaatattagatgaatctggattaaaaataatctctgctagcgatctaggggatgcagcaaaaaaaat

SEQ ID NO: 309969 - DNA, 937 bp, Unknown
  Bacterial polypeptide expressing nucleotide sequence isolated from the Sargasso Sea
tggcttggaaataaccttgtaacttaccacactgactccaagggacaacctgtcaattcaattttagtagaagaatgtacaaatatttctcaagaactgtatttaagtgctgttattgatagagactcacaaaaaatcgtatttattggctcaagtgagggaggcgtaaatattgaagaagttgcaaaaaatatgcctgaaaagattatttatcaaggtgtagtttatggcgataaatctttacctgataacgctttaaatattgcaaaagttttaaaattaaatgatattcaaactattcaatttatttcaatgatagacaatcttctaagattatttgtagaaaaagatctaagcttattagaaattaatccacttgtaataactgatagcggagatctattatgtttggatgcaaaagttaacatagactcaaatgcactttttaggcaacctgaattactagaaatgtatgatgaaactcaagaagaccctcaagaggctgaggctgcaaaaaatgatttaagttatgtttctctggatggaaatataggctgtatggtaaatggagctggcttagcaatggggacaatggacactattaaattttatggaggcaatcctgcaaattttctggatgttggaggaactgcaactcaagaaagagttgctaaagcatttaagataatacttaaagatccagacgtgaaagttgttttagtgaatatatttggaggcattgtaaggtgtgatttaattgctaaaggaattattgcagctatcaaagaagttgaagtaaaaatacctgttgttgttcgattagagggtaacagtgctgataaaggttcaaaaattctatcaaaagcagatattaaaatagatagtattaatgacttagctgacgcagccaagaaagcagtggaactagctaaatgag

SEQ ID NO: 309970 - DNA, 585 bp, Unknown
  Bacterial polypeptide expressing nucleotide sequence isolated from the Sargasso Sea
aatgtcagttttagtcaataaaaatactagattaatctgtcaaggatttacaggttcccatggaacatttcactctgagcaagcaatcaaatatggaacaaatttagtaggtggagtgacaccaaaaaaaggtggccaaaaacatttgggccttccagtttttaatacagtgaaagaggcaagagaatccgagggagctaatgcaactatgatatacgtcccagctaaatttgcagcctcagcaattattgaagcaatagatgcatctatagaactaattgtatgtataactgaagggattcctattcaggatatgttaaaagttaaacagagattgaataattcaaaaagtagactgattggccctaactgtccaggtgtcataactcctgatgagtgtaaaattggcataatgcctggcagcattcataaaaaaggaacagttggaatagtttcaagatcaggaactttaacttatgaagcagtagctcagactacagaaaatggattaggacaatcaacctgtattggaattggaggtgatcccattaatggtacaaattttatagattgtctagatctatt

SEQ ID NO: 309971 - DNA, 736 bp, Unknown
  Bacterial polypeptide expressing nucleotide sequence isolated from the Sargasso Sea
atttctacaactaaaattgatataaaaagtgaaggacctaatgatgatgaaattaaaaatattatctcaatatttaatttaactacttcacaaaaaaaagaagcatcaaatttaattaaagttctttacaaggttcttgtagaaaaagatgcatctctaattgaggttaaccctttaataatcactaaatctgaaaaaattttatgtttagatgccaagatgacttttgatgacaatgcagtatttaggagaccagagattttagaattaagagatttaaacgaggaggagtccgctgagattgaagcaagtaaacacgacttagcttatataaaattagatgggtctattggctgtatggttaatggagctggcttggcgatggcaactatggacattataaaattatatggtcaagaacctgctaattttttagatgttgggggtggtgcaagtaaagaaaaagtaacagccgcttttaaactaattttagcagataaaagcgttaagggaattttaataaatatttttggaggtataatgagatgtgatgtactagcacaaggagtattggatgcagctaaacaagtaaacttatcagttcctttagttgtaagactggctggaacaaactatattgagggaaaaaaaattcttgatgagtcagatctaaaaattctttccgcttctgatttaaacgatgctgcaaaaaaaattgtagaggctataaaataaa

SEQ ID NO: 309972 - DNA, 625 bp, Unknown
  Bacterial polypeptide expressing nucleotide sequence isolated from the Sargasso Sea
caaatgattgaatacggaactaatattgtaggaggtgttaccccggggaaaggaggtcagttacatttaaacaagcctgtttttgattcagtcaatgaagcagtcagtaaaacaaatgctgatacatctataatatttgttcctccgccatttgcagcggatgctatcatggaatccgctgatgcaggtataaaggtgatcattgcaattaccgagggtattccaatttcagacatggttaaagttgttccatatgtaaaggctaaaggatcaattttaataggtccaaattgtccgggagttattacacctgaagaggctaaagttggaattatgccgggttttgtttttaaaaaaggatctgtaggtataatttcaaaatctggaactcttacttatgaggctgctgatcaagtagttagagctggtttaggcataacaactgcaattggaataggtggagacccaattataggaacaactactagagatgcagtggagttattcatgaatgatccgcaaactaaatgcattgttgtaataggtgaaattggtggacagcttgaagttgaggctgcaagatggataaaaaataccggaaactcaaaacctgtagttggtttta

SEQ ID NO: 309973 - DNA, 867 bp, Unknown
  Bacterial polypeptide expressing nucleotide sequence isolated from the Sargasso Sea
aggaagggtgtgatatcaaaaaagagtactatctaagtatgctcgtggatagagcttcatcttcaattcaaattatagcctctactgagggtggcatggaaattgaggaggtagcagaaaagcaacctgaaaaaattattactgttaatgtccctggggacagtattattgaccaaaatagtttaaataaattaactgaaggtcttaatatagatcaaaacctatcaaatgatttttgtgatcaaattcaaaaaatttacaatagctttttgtcttcagatgcctctttggtggaagttaatccttttgtattgactggtgagggtaattttttggctttagatgcgaaggtttcgatagacgataatgcgctttataaacataaagatgtagcttcaatgagagatgaaactgaagaggaccctgcagagattgaggcttcaaaacatgaacttaactacgtcaaattagatggtcaaattggatgcatggtaaatggagctggtcttgcaatggggacaatggatataattaaattacatggtggcagtcctgcaaattttctagatgtaggaggaggagctacaaaagagagagtggcaaaagctttttctataattctgcaagatccaaatgtaaaagctattttggttaatatttttggtggcattatgaaatgtgacatcatcgctgagggtgtggtagctgcagctaaagagctgtctattaaagttccattggtagtaagattagaagggaccaatgttgacttaggaaaagaaattttaaataaatctgggctctcaattatttcggcagataatttagaagatgcagctcaaaaggcagttggggctttaaactaaa

SEQ ID NO: 309974 - DNA, 733 bp, Unknown
  Bacterial polypeptide expressing nucleotide sequence isolated from the Sargasso Sea
aatgtcagttttaattaataaacacaccaaattaatttgccaaggttttacaggttctcatggcacctttcattctgagcaagcactaaaatatggaactaatttagttggtggtgttactccaaaaaaaggaggacagatccatttaggaagaccagtgtttaacacagtaaaagaggcaaagcaccaaactggagcaaatgctactatgatttacgtaccagctaaatttgctgccgaagcaattatagaggcgatagatgcttctatagatctcatagtttgtatcaccgaaggaattccaattcttgacatgattagagtaaagcaacgtttgtctgagtctaaatcaagactaataggtcccaactgtccaggaataattactccagaggaatgcaaaataggaattatgcctggtgatattcataaaagaggatctgttggaatagtctcaagatctggcacactaacatatgaagcagtagctcagacctcctcaaatggactaggtcagtctacttgcatcggtattggtggcgatcctatcaatggtacaaactttgtagattgcttagatctttttctaaaagatgatgaaactaagtcaatattaatgattggggagataggtggaacagctgaagaagaagccgcagaatttgtcaaaaataataaaataaaaaaaccctatggttggctttattgcaggcctgacagctcctcctggtag

SEQ ID NO: 309975 - DNA, 963 bp, Unknown
  Bacterial polypeptide expressing nucleotide sequence isolated from the Sargasso Sea
ggtgtaaaaatattaaatacgatagaagaactaagcaaagcagctaaagaattattaggtaaaaaattagttactcctcaaacaggaccacaaggaagattagttaaaagactttatgttgaatcatcatctaaaattgataaagaattttatctttcctgcctagttgatagggcgagttctaaaattgcatttatttcaagtgaccaaggcggaatggatattgaagaagttgcaaaaaataatccaacaaaaatcataacaactaaagttaatttagaagatcaaatatcagatgaagattgctataaaattattaaaatatttaatttagaagatagtacaaaaaaacaatcaatagatttaattaaatcaatttacaaaatgtttattgatacggatgctaatcttgttgaaataaacccattaattttaacaaaagataaaaaaattgtttgcttagatgcaaaaatgaattttgatgataatgcattatttagaaatccagatattttaaatttaagagatgttaacgaagaagaagaaacagagatagaggcaagcaagcatgatttagcctatataaaattagatggtagtattggatgtatggttaatggtgcaggtctggcaatggctacaatggatataataaaactttatggagaagaaccagcaaattttttagatgttggtggtggcgcttccaaagaaaaagtttcagcagcattcaaaataattttatcagataaaaatgttaaggggattttaataaatatttttggaggtataatgagatgcgatgttcttgcacaaggagttgtagatgctgcaaaagaaattaaaattgaagtccctttagttgtaagattagcaggaactaaattcgaagaaggtaaaagaatattagataattctggtttaaaaattatttctgcatcagatttatctgacgcagcaaaa

SEQ ID NO: 309976 - DNA, 786 bp, Unknown
  Bacterial polypeptide expressing nucleotide sequence isolated from the Sargasso Sea
tatgaatcttcatgaatatcaagcaaaacaactttttcgcgaatatgggatagccgtatcagatggcgttgctgcctcttcagctgaacaggctgaaaaagctgcactttctttaggtgtatctaagtgggttattaaggctcaagtccatgctggaggaagaggaaaagctggaggggttgaggtggttgataaaattgaaaaagtaagagaatttgctgataaatggctaggaactaacttagttacatttcaaaccgacgcagatggacagcccgtaaatcagattttagttgaaacttgtaccgaaatagaaaatgaactgtatctaggagctgtaattgatagagcttcacaaagacttgttgtaatggcttctactgaaggtggggtaaatattgaagaagtagctgaacaaacgcctgaaaagatatttaaggtggaaatagatcctattgaaggaacgaatgacatggatgctgatgggctctcttcgcttttgggcctcaatgactctcaaagttcacaatttagaagtatctacaaagggttggtaaaactttttgtagaaaaggatctagccttattggaagttaaccctttggtaattactgattccggtgatttactttgcttagatgccaaattaaatatagattcaaatgctctatacagacaagaagctcttactgcaatgcgggatttttctcaagaagattcaagagaatcaaaagctgctgaatgggatctaagttacgttgctctcgatggaaatattggatgtat

SEQ ID NO: 309977 - DNA, 536 bp, Unknown
  Bacterial polypeptide expressing nucleotide sequence isolated from the Sargasso Sea
agaaacaaaagcatctcttttaggtccaaattgtccaggtttaatatcaccgggtaaggcaaatgttggaattatgcctcacgaaattacattgccgggaaatataggagtagtttcaaggtcaggaactttgacttatcaagctgttcatgagctaacaaatcttaatattggacaatcaacgtgtataggtattggtggagatcccgtacctggaatgtcattcatagatgtaattgagaaatttcaagcagatagtgaaacagaaggtatcgttatgattggagagattggtggcacagctgaagaggaagcagcagattttattaaacaaaatgtcacaaaacctgttgtgtcatatatagctggagtaacggcacctcctggtaaaaaaatgggccacgctggagcaattgtttcaggtaacaaaggcaccgcagaagcaaagattcacgctttaactgatgctggtgcaatagtcgttaagacgccaactgaaataggaaaagcgatgaaggatgttataaatggttgaa

SEQ ID NO: 309978 - DNA, 496 bp, Unknown
  Bacterial polypeptide expressing nucleotide sequence isolated from the Sargasso Sea
gctttattcagacatccagaaattgaaaaattaagagatctaaatgaagaagatcaatacgaacaggaagctgctaaatatgatttagcctatatcaagttagatggaaatattggatgtatggtgaatggtgctggtttagctatggcaagtttagacatcatcaagatgtatggtggtgatcctgctaattttcttgatgttggaggtggtgcaaccaaagaaaaagtaagtaacgcattccagattattttatcagatgaaagcgttaaaggaatattagtgaatatttttggaggtattatgcgttgtgacattattgctgaaggtatcgttgctgcagctaaagagcttaaaatttctgtacctcttgttgtgagacttgagggtacgaatgttgaggaaggtaaatcaattttaaacaactctggaattgatattgtttcagcaatggatcttgatgatgctgctaaaaaaatagttaaattagtttgat

SEQ ID NO: 309979 - DNA, 358 bp, Unknown
  Bacterial polypeptide expressing nucleotide sequence isolated from the Sargasso Sea
aatgaatattcatgaacaccaagctaaagaacttctagcgtctaacaatgtaaatgtcgctaaaggcttcccagctttttctgtagatgaagctattcaagtggcaaaaaaacttggtggccctatttgggttgtaaaagctcaaatacatgctggtggtcgaggtaaagctggtggtgtcaaagttgttaattctttaaataatgttgaaatagctgcaaaagaaattctaggaaagactttagtaactcctcaaactggttctgaaggtaaagtagttaagagattatatatcgaggaaggctgcgatattaaaagagaattatacctttccgttttagttgatagaaatttaggg

SEQ ID NO: 309980 - DNA, 513 bp, Unknown
  Bacterial polypeptide expressing nucleotide sequence isolated from the Sargasso Sea
acgataatgctctgtataggcatagggggaacatgtccctcagggacagggatgaagaagatccgcttgaattggaagctagtgaggcaggcttaaattacatcaagctggatggaaacataggctgcatggtcaacggtgcaggtctggcgatgggtacaatggatataatcaagacctacggtggagaacctgcaaattttcttgatgtcggtggtggtgccacgcaggaaactgtggaaaaagcttttcgaatcattacccttgatccaaatgtaaaatgcattctgataaacattttcggaggaattgtacgttgtgacatggtagcagccggagtaattgcggcctttaaaaatgttaatctacagattcctgtggtgatacgtctggaaggtacgaattcggaggaagctcataaaatcgtaagggaatccggacttggagaaagtttacaaatggctgacggaattcagcaggcagcgcaaaaagcagtttcggccgcatattaat

SEQ ID NO: 309981 - DNA, 643 bp, Unknown
  Bacterial polypeptide expressing nucleotide sequence isolated from the Sargasso Sea
aggcaagaagcttataagaattatcaattctttatataaaattttgatagaaaaagatgcaagtcttattgaaatcaatcctttaataattaataaaaatggaaatttaatatgtttagatgccaagatgaattttgatgataatgctatttatagaagaccagaaattttaaaattaagagatttaaacgaggaagatcctaaggagatcgaagccagtaaatttgatttagcctatatcaaacttaacggctcaataggatgcatggttaatggagcgggattagccatggcaacaatggatataattaaactttatggagaagaaccagcaaactttttagatgtagggggaggagcctcaaaagaaaaagtatcggctgcttttaaactgattttatcagatcaaaatgttaaaggaattttgataaatatatttggcggcattatgcgttgtgacgtgctcgctcaaggcgttgttgatgctgcaaaagaggtaaatttatcagttccattggttgttagacttgcaggaacaaattttcaagagggtaaagatattttacaaaaatcaagtttaaagattttatcggctgaggatctaaatgatgctgcaaaaaaaattgttgaggcaattaagtaa

SEQ ID NO: 309982 - DNA, 766 bp, Unknown
  Bacterial polypeptide expressing nucleotide sequence isolated from the Sargasso Sea
aaaaaatatggtgctgcagtcccagaaggagtatttgcactcaatgttgatgatcttgttgaaaaagcaaaaacactaaaaactgaaaaatacgttttgaaagcacaaatccatgctggcggtagaggaaaagctggtggcgtaaaaattttaaatactatagaggaactaactgtagcagccaatgaattaatgggaaaaacacttgttacgcatcaaactggcccagaaggtagagaggttaaaagattatatgttgaggagtcttcaaatatagataaagaattttatttgtcatgtcttgttgatagagctagttctaaaattgcatttatctcaagtgatcaaggaggaatggatattgaagaagttgctagcaaaaatcccgaaaaaattataactactaaagttgacatcaaagatgaaattttaaattcagattgtgaaaaaataattaaagcattcaatttaaatgaaaacactgaaaaacaagcaatattgttaattaaatcaatatataaaatgtttgtgagcacagatgcaaacatggttgaagtaaatccattaattttgactaaagaaaaaaaaattgtttgtttagatgcaaaagtaaatttcgactctaatgctttatttagacatccagaaattgtaaaattaagagatttaaatgaggaagatcctacagagatagaagctagcaaacataatcttgcttatattaaattaaatggaagtattggatgtatggtaaatggagcaggat

SEQ ID NO: 309983 - DNA, 436 bp, Unknown
  Bacterial polypeptide expressing nucleotide sequence isolated from the Sargasso Sea
tatgaatattcacgaataccaagcgaaaaatttattgagagaatatggagtacctgtttctaatggagtaattattttctcattagatgaaattaacgaaaagataaaacaattaaattcaaaaaaactagttgttaaagcccaaattcatgctggcggaagaggaaaggcaggcggagttaaagtcgtaaaaaattcagatgaagcaaaaaaagagttaacaaaaatgtttgggaaaatcttaataactcatcaaactggacctaaagggaaaaaagtaaataaagtttatgtagaagaggcttcagaaatacaaagagaattatatttatcttgtttggtagatagagcaagttccaaaattgcttttataagtagttcagagggtggaatggatattgaaaaagttgctaatgaaaatcaaataagattttta

SEQ ID NO: 309984 - DNA, 409 bp, Unknown
  Bacterial polypeptide expressing nucleotide sequence isolated from the Sargasso Sea
gctaacatatgaggcagtagcacaaactactgaaaatggtctaggccaatcaacttgtatcggtattggaggagatccaatcaacggtacaaattttatagattgtttagatttatttttaaatgatgatgagacagagtcgattttaatgattggagaaatagggggtacagcagaggaagaggcttcagaatttgtcaaaaatcataaaattaaaaaacctatagttggatttatagcaggaattacagctccgcctggtcgaagaatgggtcatgcaggggctattatttctggaggcaaaggtggggcaaaagataaaataaaaaagatggaagaatgtgggattacagttgcagaatcaccatcaattattggaaaaacgttgtttaataaactgtctaattga

SEQ ID NO: 309985 - DNA, 575 bp, Unknown
  Bacterial polypeptide expressing nucleotide sequence isolated from the Sargasso Sea
tattccgacgctggatatgctgacggtgaaagtgaagctggatgaagccggcgtgcggatgatcggcccgaactgcccgggcgttatcaccccaggcgcttgcaaaatcggcatcatgccgggccacattcatcagccgggtaaagtgggtatcgtttcccgctccggtacgctgacctatgaagcggttaagcagaccaccgattacggtttcggccagtctacctgtgtcggtatcggcggcgacccgatcccgggctctaacttcatcgacatcctgaaactgttcgaggaagatccgcagaccgaagcgatcgtaatgatcggtgagatcggcggtagcgcggaagaagaagcggctgcctacatcaaagatcacgtcaccaagccggttgtcggttacatcgccggtgtgaccgcgccgaaaggcaagcgtatgggccacgcgggcgccattatcgcaggcggtaaaggcacggctgatgagaaatttgctgcgctggaagcggcgggcgtgaaaaccgttcgtagtctcgcggatatcggcgaagcgctgaaatcaatcattaagtaaa

SEQ ID NO: 309986 - DNA, 895 bp, Unknown
  Bacterial polypeptide expressing nucleotide sequence isolated from the Sargasso Sea
ccaatgaacattcatgagtatcaggcaaaggccatgttcagagagtcgggagtgtctgtccaacgtggagttcactgcactacagtcgaacaagcactatccgcttacgactctctaaactcagatgttgtcgcggtaaaaagccagattcatgccggtggaaggggcaagggggatttgttctgccctgactctggggagttggtgatgcagggtggagtgaaggtagctttctccaggatggaagtggaaaactactcctcaaatatcctgggtcacaaactcgttaccaagcagacaggcccttctgggaagatcgtaagtaacttgtacgtggaatcaggatgcgacatagcccatgagtactatcttgcaattttagttgatagagaggaggatgcgatcctgatcatggcttccactgagggtggagtggatattgaggaggttgccgagacttccccggaaactatccacaaagtttggttcgacccatctgatggccttagtgaggaggttgcaaattctctcggtgattctctcggcctttcgggaaactcacgcacttcattcacggagatgatggtcaacctcgcctctttgttcaccgagaaggactgttctatgatcgagattaacccccttgtcagagatggaaatggactcatggtggctttggatgcaaaggtcagcttcgatgagaatgccacattcaggcatccatggagggaaggcctcagagacagctcggaagagtcagatgtggaagtaagggctcatgaacatggtctctcatatgttgacttagaaggaaacatcggctgcttggtcaatggtgcaggcctggcaatggctacaatggatgtaatcaagcttgtatgggggggagccagcg

SEQ ID NO: 309987 - DNA, 528 bp, Unknown
  Bacterial polypeptide expressing nucleotide sequence isolated from the Sargasso Sea
aatgaatattcacgagcatcaagctaaacaaatattaaaaaagtatggagctgtagttcctgaaggtgtatttgcgcttgatgttgatgagcttattgaaaaagcaaaagcactaaaaactgagaaatatgttcttaaagcacaaatacacgcgggcggcagaggaaaagctggcggtgtaaaaattttaaacactattgaggaactaacagtagcagctaaagaattactaggaaaaacacttgttactcatcaaaccggccctgaaggtagagaggtaaaaagattatacgtagaagaatcatcaaatatagataaagaattttacttatcttgtttggttgatagagcaagttctaaaattgcatttatatcgagcgatcaaggtgggatggatattgaagaagttgcaagtagttcacctgaaaaaattataactacaaaagttgatatgggtgatgaaatttccgagtcagattgtgtaaaagttattaaaatttttaacttaaatgaagatgcaaaaaaaca

SEQ ID NO: 309988 - DNA, 805 bp, Unknown
  Bacterial polypeptide expressing nucleotide sequence isolated from the Sargasso Sea
aaaattgcgtttatatcaagtgaccaaggagggatggacattgaagaagttgcaagtagttcacctgaaaaaattataactacaaaagttgatatgggtaatgaaatttctgggtcagattgtgaaaaaataattaatatttttaatttaaatgaggatgcaaaaaaacaagcaataacattaattaaatcaatatataaaatgtttgtgagtactgatgctaacatggttgaagtaaatccattaattttgacaaaagaggaaaaaattgtttgtttagatgcaaaagttaatttcgactctaacgctttattcaggcatccagaaattgttgaattaagagatttaaatgaggaagatcctaccgagatagaagctagcaagcatgatcttgcatatatcaagcttgatggaagtattggctgtatggtgaatggagcgggattagcgatggcaacaatggatataattaaattgtatggcaaagagccagcaaattttttagatgtgggcggtggtgcatccaaagaaaaagtatctgctgcattaaagataattctctcagataaaaatgttaaaggtattttaattaatatttttggaggaataatgagatgtgatgtccttgctcaaggagtagttgatgcagctaaagaaattaatattagtgtaccattagttgtaagattagcaggtacaaatttcaaagaaggaaaagaaattcttgataattctggattaaaattaatttctgcagaaaatttggatgatgcagctaagaaaattgttgaggcaataaaataat

SEQ ID NO: 309989 - DNA, 979 bp, Unknown
  Bacterial polypeptide expressing nucleotide sequence isolated from the Sargasso Sea
ggcattgctgcctcctcagctaaagaagttgaaaaagctgctctttctttaggagtatctaaatgggttgttaaagcccaagtccatgctggaggaaggggaaaagctggaggggttgaggtagttgataaaattgaaaaagttagagaatttgctgataaatggataggagctaacttggtaacttttcaaaccgatgctgacgggcagcccgttaatcaaattttagttgaaacttgtactgaaatagaaaatgaactctatctaggtgctgttattgatagagcttcacaaaggcttgttgtaatggcttctactgaaggcggtgtaaatattgaagaagtagctgaaaagacgcctgaaaagatatttaaggtagaagtagatcctattgaaggcattaatgctatggatgctgataaattatcttcgcttttgggcctcaatgattctcagagctcgcaatttagaagtatttacaaaggaatggttaagctctttttagaaaaagatctggctttattggaagttaatcctcttgtaattactggttccggtgatttactttgcttagatgctaaaataaatatagattcaaatgctctttatagacaagaagctctcaatgaaatgcgagatacttctcaagaagatgaaagggaatcaaaagctgcagaatgggacctaagctacgttgctttagatggaaatatagggtgcatggtaaatggcgcaggtttagcgatgggtactatggatattatcaagctacatggaggagaacctgctaattttcttgatgtgggcggcacagctgatgcaaaaagagttgctgaagcatttaagattattttatctgataaaaatgttaacaccgtcctaattaatatctttggaggtattgttcgttgcgatgtgatagctgacggcattgttgaagctcttacggtaatgggagtttcagttccagtggtagtaa

SEQ ID NO: 309990 - DNA, 544 bp, Unknown
  Bacterial polypeptide expressing nucleotide sequence isolated from the Sargasso Sea
aattccaaatcaaagttaattggaccaaattgtcctggcataataactccagacgaatgtaaaattgggatcatgcctggaaatattcataaaaaaggttcagttggtatagtttcaagatctggtactttaacttatgaagcagtttatcaaactacaaaaaatggtcttggacaatctacttgtgttggtattggtggagatccagtaaatggaacaagttttatagattgtctagatttatttttaaaagatgaagaaactaagtcaatactgttaatcggagaaatcggaggttctgctgaagaagaagcatctgaatttattataaataacaaaataaaaaaaccaatagtaggttttattgcaggactcactgcacctagaggtaaaaggatgggacatgctggagcaattatttcaggaggaaaaggtggtgccaaggaaaaaattaaaataatggaagatgctggaataactgtggctgactcgcctagcgaaattggaaatactcttaaagataaattgtctcttttaaaataaa

SEQ ID NO: 309991 - DNA, 892 bp, Unknown
  Bacterial polypeptide expressing nucleotide sequence isolated from the Sargasso Sea
ccaagaggtggaattgtctacagcccagagaatgcagaaaataaagcaagagagcttggtggatctaaatgggttgttaaagcacaaattcattctggagccagaggaaaagcaggtggaataattgtttgtaacagcgctctagaagtggcccaagcagcagataaacttcttggtaaaaaattagtcacaaatcaaacaggcccagaaggaaaaattacaaatagagtttacattgaggaagctacagaaattaaaaaagagttatatttaggactagtatttgatcgaagttcagaaagtataatggtagtggcatcaaccgaaggaggaatgagtgttgaagaaatttctaagaaaaaaccagagactattataagatcaaaaattgaagttgctgttggaatgcaaaaatttcaagcaagagaaattgcttttggattaaaaattgagccaaaactaatagcaagagcggcagaaacaattattggctgttacagagcattcagcgaattagatgctaccatggtagaagtaaatccattagttatttcaaatcaagatcaaatacttgcattagattgtaaaatgagctttgataacaatgccttatttagaagaaatcaagtttcagagttaagagataaaacacaagaaaatagtaatgaagtttatgcatcagacaggggacttagctacgtaagtttagacggaaatattggaaatataatcaatggtgcgggcttagcaatggcatctatggacatgattaaattggctggaggagaaccagctaattttttagacgtaggtggtggggcaactcccgaaaaaatagttaaagcttttaaattaatatcaatggataaaaaagttaaggttatactagtta

SEQ ID NO: 309992 - DNA, 719 bp, Unknown
  Bacterial polypeptide expressing nucleotide sequence isolated from the Sargasso Sea
ttttaatactgtaaaagaagccaaagattctgaaggtgcaaatgctacgatgatttatgttcctgcaaaatttgcagctgctgcgatcattgaggcaattgatgcttcaattgaacttatagtctgtattactgagggcattcctattcaagacatgcttaaagtaaaacaaagattattaaaatcaaattcaagattaattggtcctaactgtccaggaatcataactcctgatgagtgtaagattggtattatgcctggaaatattcataagagaggatcagttggtattgtctctagatctggtacattgacatatgaagcagttgcacaaacaactgaaaatggacttggtcagtcaacatgcattggaattggtggagatccaataaatggcacaaactttatagattgtttagatttatttttgaacgatgaagaaacccaatcaattttaatgataggtgaaattggaggaactgctgaagaagaagcagctgaatttgttaaaaatcataaaattaagaaaccaatggtaggatttattgcaggtgttacagctcctccaggacgaagaatgggtcacgctggtgctattatttcaggtggaaaaggtggagcacaagataaaataaaaaaaatggaagattgtggcattactattgccaactcaccatcaaaaattggcaaaactctttttgataaattagctaattgaa

SEQ ID NO: 309993 - DNA, 489 bp, Unknown
  Bacterial polypeptide expressing nucleotide sequence isolated from the Sargasso Sea
gacatcctgaaaatgttaagctcagagaccttaatgaggaggacttaacagagatggaggcaagtaagcatgaccttgcttatataaaattagatggaaacataggctgtatggtcaatggagctggcttagcaatggcgacaatggatataataaaattatatggaaaggagccagctaattttttagatgtaggaggcggtgcatcaaaggaaaaagtttctgcagctttaaaaattattctttctgataagaatgttaaaggtattttaataaatatttttgggggaattatgaggtgcgatgtgcttgcacaaggggtagtagatgccgctaaagagataaacatcagtgttcctttagtggttagacttgcaggtacaaattttaagcaaggcaaaaaaatacttgataattctggtttgaagttaatatcagcagaaaatttagatgatgcagctaaaaaaattgttgaggcgataaaataaa

SEQ ID NO: 309994 - DNA, 559 bp, Unknown
  Bacterial polypeptide expressing nucleotide sequence isolated from the Sargasso Sea
accggcgacgaccgagtagtggccctcgatgccaaactcagctttgatgataacgctttattccgtcaccgtgacaatgctgacatgagagaccttgctgaagaggatcctctcgaaacggaagccggagaatacgaactgaactacatcaagctcgacggttcgatcggctgcatggtcaatggtgccggtttggcaatgggtacaatggacatcatcaaaacctatggaggagaacccgcgaatttccttgatgttggaggcaccgcgaccgaggaaaccgtagagaagggatttcagatcatcacccaggatcccaatgtacgatgcattctgatcaatattttcggtggcatcgtgcgatgtgacatggttgcatccggaatcatcgaggccttccgtaaagtcaatttgcagattccagtggtggtaagactcgaagggaccaatgcagaagaagcccagaagatcatcggatcttcaggtttcggaaatcgtttacaaatggcggacggactcggagaggccgccgaaatggctgttgctgctgcggcctaat

SEQ ID NO: 309995 - DNA, 752 bp, Unknown
  Bacterial polypeptide expressing nucleotide sequence isolated from the Sargasso Sea
aatgagcatcctcgtcaacaaagataccaaagtaatttgtcagggcttcaccggttctcaagccacattgcattgttcccaagctattgagtatgggacaagcatcattggaggggtaacaccaggaaagggtggagaaagtcatttagatcttcctgtatttaattctacaaaagaggctcaacaagagttggaaatagacgcaacaataatttttgttcctgctaagttttgtaaagattctgttcaagaggctattgatgcagaaattccattgatcatttgtattactgaaggaatacctactttggatatgatgaagttaaaacaaaatgctgactctgcaggttgcagaattattggtccaaactgccctggtgtgattactccagatcaatgcaaacttggaatcatgcccgggtatattcataagccagggaaaataggaatcgtttcaagatcgggaactttaacttatgaagctgttgatcagaccactcaagctggtttaggtcaaagcagttgcgtgggaattggcggagatcccattccaggatcaagttttattgatattttgcagctttttgaagaagattctgaaacagaaggaatcgtgatggttggtgaaattggaggaactgctgaagaagaggctgctgagttcattcagtctaatgtttccaaacctgtggttgcatatattgcaggagtcagtgctccacgcgggaaaagaatgggacatgccggagcaa

SEQ ID NO: 309996 - DNA, 550 bp, Unknown
  Bacterial polypeptide expressing nucleotide sequence isolated from the Sargasso Sea
aaaaataacgaaatactttgtctagatgcaaaaatgaattttgatgataacgcaatttttaaacatccggaaatatataagttaagagatttaaatgaggaagatcctacagagattgaggccagcaaacatgatttggcttacataaaattagagggctcaataggttgtatggttaatggtgcaggtttagcaatggctacaatggatataatcaaactttacggggaagaacctgcaaattttttagatgtaggaggaggcgcaagcagagaaaaagttaccgcagcatttaaaatattactctcagacaaaaatgtaaaaggtgtcctaataaatatttttggcggtataatgcaatgcgatgttcttgctcaaggtgttgttgaagcagcaaaggatgtaaaattgaaagttcctttagttgtccgtttagctggcactaatttcaaagaaggaaaaaaaattcttgatgcatcaggtttagaaatactatcagcagataatcttaatgatgcagcaaaaaaaatagttgaggctataaaataaa

SEQ ID NO: 309997 - DNA, 853 bp, Unknown
  Bacterial polypeptide expressing nucleotide sequence isolated from the Sargasso Sea
gttatctgccagggtattacccggttcgcaaggtagtttccacacccagcaagccatcgaatacggcacccagatggttggcggcgtaacaccaggcaaaggcggcaccgagcacctgggcctgcccgtgttcaacaccgtgaaagaagcggtagaagccactggcgccactgccagcgtgatctacgttccagctcctttctgcaaggactcgatcctggaagcggccttcggcggcatcaagctgatcgtctgcatcaccgaaggcattcctaccctggacatgctggacgctaaagttaagtgcgacgagctgggtgtagtcctgatcggccctaactgcccaggcgtgatcaccccaggcgaatgcaagatcggcatcatgccaggtcacattcacttgccaggtaaagtcggtatcgtttcccgttccggcaccctgacctacgaagctgtaaagcagaccactgacgccggtttcggtcagtcgacttgcgtcggcatcggcggtgacccgatcccaggctccaacttcatcgacatcctgaagctgttccaggaagacccgaagaccgaagcgatcgtgatgatcggtgagatcggcggttcggctgaagaagaagcggctgcctacatcaaggcacacgtgaccaagccggttgtttcctacatcgctggtgtgactgcccctgcgggcaagcgcatgggccatgctggcgcaatcatctctggcggcaaaggcactgcagacgagaaattcgctgcactgcaagacgcaggcgttaaaaccgtgcgttcgctggcagacatcggcaaggccctggccgagctgaccggttgggctgtcaagtaa

SEQ ID NO: 309998 - DNA, 754 bp, Unknown
  Bacterial polypeptide expressing nucleotide sequence isolated from the Sargasso Sea
aaagattcctttaacgataaaggaggggttcaggttattttagaaaaagatcaagtatcttcaattgcaaaatcaatgatggggaatgtgctaataacaaaacaaacaggtaaaactggcaaaactgtaaatcgtatttttattgaagaggggtgtgatattgatagggaattttatcttagtttgcttgttgacagaaataattcaaaattaatgatgatgatttctgcttctggaggtatggatattgaggaagttgctaaaactaatccagaaaaaattataaatattcattttacaaattacacagatataacattagatgaaaatttgcagacaaaacttgagattactaaaaatcaatttgatgcattaaccttaattgttaataaattattaaatgcatttacttctattgacgcatccaccattgaaataaatcctttggttttaaataagcaaggcagttttgttgtgttagatgcaaaaattagtttagatgataacgctttattcagacacccagaattagtcgaattaaaagatttaacagaagaagaccccttagagttgcaagcagcagaacatgatatgaattatgtaaaactcgatggatcaattggttgcatggtgaatggcgctggattagctatggccacgatggatattattaaacaatttggtgaagagcctgcaaactttttagacttaggaggaacagcaaataaagatcgagttattatgggttttaaaa

SEQ ID NO: 309999 - DNA, 669 bp, Unknown
  Bacterial polypeptide expressing nucleotide sequence isolated from the Sargasso Sea
tagagacaaaagcgattaaccgttgtgctcaagcaatccttggtgcttacaaagccttcagtacgtcagatgccactatggtagagattaatcctctggtacttactggtgatgatcatgttgttgccttagattgtaagatgtcatttgatgataatgcattatttcgaaatccagagctggcggaattaagggataaatctcaagaagatccaaaagagacttatgctgccgatagaggtctaaattatattcctttagacggtaatattggaaatataataaatggtgccggtcttgcaatggcttctatggatatgattcaactagcaggaggacaacccgctaactttttggatgtcggaggaggtgctacacctgagaaatttgtaaaagcatttaaacttatctctggtgatcctaaagttaaagttatcttgatcaatatcttcgctggtataaataggtgtgattgggtagctcagggtattgtagatgcacttaatcagatcaatatttctcaacctctagtaataagacttgctggcaccaatgttgatgaaggtataaaaatactaaaagatagtaaaataaaatatattgaggcatacactctggaagatgcagccaacaaagctgttaaagcactgaaagagctaggagaataaa

SEQ ID NO: 310000 - DNA, 629 bp, Unknown
  Bacterial polypeptide expressing nucleotide sequence isolated from the Sargasso Sea
ttttgaagctatagatgcagggataaaggttataatcactataactgagggaatacctgttaatgatatgactaaagttaacatgtatttaaaaggcaaggactgtgttttggttggaccaaattgccctggagttattacccctgatgaagctaaagtaggcattatgcctggttttgtatttaagaaaggtacagttggaattgtttcaaaatctggaacacttacttatgaagcatctgatcaagttgttaaggaaggattgggtgtttcaactgcaattggaataggaggagaccccataattggaacaactacaaaggatgcaattgagctttttatgaatgatgatgaaacaaactgcatagtaatgattggagaaattggaggtcaattagaagctgatgctgccagatgggtaaaagaaaatggtaataaaaaacctgttgtcggttttattgcaggagaaactgctccaaaaggacggacaatggggcatgccggcgcaatagtaggaggaaaagatgatactgcagaagccaaaaaaagaataatgcgtaaatgtggcattcatgtagttgattctccagcacaaattggaaaaaaagttttagaagttttaagttaaa

SEQ ID NO: 310001 - DNA, 809 bp, Unknown
  Bacterial polypeptide expressing nucleotide sequence isolated from the Sargasso Sea
aatgtcagttttagtaaataagaatactagagtgatttgccagggatttactggatctcatggaacattccactctgaacaggccattaaatacggaacgaatctagttggaggagtaactcctaaaaaaggagggcaagttcacttggaaagaccagtatttaattctgttaaagaagcaaaagaaacaacagatgcaaatgctacaatgatttatgtacctgcaaaatttgcagcttctgcgattaatgaagctatagatgcttctattgaattgattgtttgtattactgagggaattccaattttagatatgttaaaagttaagaaaaaattaaccaattctaattcaagattaattggtcctaattgtccaggaattattactcctgatgaatgtaaaatcggaataatgcctggaagtattcataaaaaaggatcagttggtatagtttctaggtcaggaacattaacttatgaagcagtagcacaaacaaccgaaaatggtttgggacaatcaacttgtattggcatagggggcgatccaattaatgggaccaattttattgattgtttagatttatttttaaatgatgaagagaccaaatcaatattaatgataggtgaaataggtggaactgctgaggaagaagctgcagaatttgtaaaaaatcatagaataaaaaaaccaatagttggatttattgctggaattacagctccacctggaagaagaatgggtcatgcaggagctattatttctagaggaaaaggtggcgcagaggacaaaattaaaagtatgcaggatg

SEQ ID NO: 310002 - DNA, 823 bp, Unknown
  Bacterial polypeptide expressing nucleotide sequence isolated from the Sargasso Sea
gtagataggcaaagttcaaaaattgcttttattagcagtacagagggcggcgttgatatagaaaaagtagcatctaaaacaccagaaaagataattacaactaaagttgatcttaaaaatgaaatagaaaaagaagagatagaaaaaataattgctccttttaagtttaataaaaatcaaaaagatgaagctataaagttagtacaaggattgtataaaattttgcttcaaaaagatgcaagtttgattgaaataaatcctctaatcgtaacaaagaatggaaaattaatttgtctagatgctaaaatgaattttgatgataatgcaatttttagaagacctgaaattttaaaattaagagacttaaacgaagaaaatcttgctgaaatcgaagcaagtaaatacgatttagcgtatattaaacttaacggatcaataggctgcatggttaatggagcaggattggctatggccactatggatataattaaaatttatggcaaggaaccagcaaattttttagacgttggaggtggcgcttccaaagaaaaagttgcggcggcatttaagctaattttatcagataaaaatgtagaaggtattttaattaatatttttggcggtatcatgcgatgcgatgtacttgcacaaggggttgtagatgcagctaaagaaattaatttatctgtgcctcttgtagtgagattagcaggaacaaattttaaagaaggaaaagaaattttagataaatctaatttaaaaatattatcagcatctgatttaaatgatgctgctaagaaaattgtagaggctataaagtaaa

SEQ ID NO: 310003 - DNA, 750 bp, Unknown
  Bacterial polypeptide expressing nucleotide sequence isolated from the Sargasso Sea
cacgagtatcagggtaaacaactgtttgcccaatatggtttgcctgtatccaaatgcatcgccgcagcaactgttgaagaagcggtagaagctgcagataaaatcggcggcgacatgtttgttgtcaaagctcaggttcacgctggtggccgcggtaaagcgggcggtgtgaagctggtgaaaagcaaagaagatatccgcgctttcgctgaaaaatggcttggaaagaatctggtgacttaccagacagacgaaaaaggtcagcctgtaagtcgtattctggttgaaacctgtactgacatcgctaaagagttgtatttaggtgctgtagtagaccgttcttcacgtcgtatcgtgtttatggcttctactgaaggtggcgtggaaatcgaaactgttgcccacgaaacgccggaaaaaattctgaaagctgcaatcgatccactggttggcgctcagccattccagggtcgtgaattagccttcaaattaggcctggaaggcaagcaagtgaaccagttcgtgaaaattttcatgggtctggctcaactgtttaaagataaagatttagctctgctggaagtgaaccctctggtgattactcctgctggcgatctgcactgcttagacgccaaactggtgatcgatggcaacgcactgtaccgtcacccagaattaaaagccatgcaagacccttcacaggaagatccacgtgaagctcatgcagcttcgtgggagttgaaactacgt

SEQ ID NO: 310004 - DNA, 352 bp, Unknown
  Bacterial polypeptide expressing nucleotide sequence isolated from the Sargasso Sea
atgaatatacacgagtaccaagctaagcaaattttaaaaaagtatggtgcagctgtactagaaggtgtttcttcacattcagttgaagaattgttggaaaaagcaaagtcattaaaaacagaaaaatttgttttaaaagcacagattcatgctggtggaagaggtaaagcaggaggggttaaaattgtaaatacaatagatgagctaagttcagcagctaatgaaatgttaggaaaaaaattggtaactcatcaaacgggacctcaaggaagagaagtcaaaagactatatgttgagtcatcttcaaaaattagtaaagaattttatctttcttgtttagtcgatagggcaa

SEQ ID NO: 310005 - DNA, 812 bp, Unknown
  Bacterial polypeptide expressing nucleotide sequence isolated from the Sargasso Sea
cggggctccggtctctaatggcacaattattctttctaaaaatgagattaaagaaaaaataaaaaatctgaaagataaacaatttgttgtaaaagcccaaattcatgctggaggcagaggtaaagcgggaggaattaaacttgtaaatgaagtaaaaaaattagagaaagaaattaatctaatgttcggtaaaattttaaaatctcatcaaactggaccagaaggaaaagaagttaaaaaagtttatgttgaggaagcttctaatatttataaagagttttatttatcatgtataattgatagagaaagttcaaaaatagcttttatcagtagtgtcgagggaggcatggatattgaaaaagttgcacacgatactccagataaaatatttactacaaaatttgatttaaaagagcaaatggacgaaatagaaataaataaaattatcaaacctttcggactagatgatgatcaaaaaaaagaagcaagtaaattaataaaaattttgtataaaatattaaaagaaaaagatgcaagtctaattgaaatcaatcccttaattttaacaaaagaaaaaaaattaatctgtttagatgctaaaatgaattttgatgacaatgcaatttttagaagaccagaaatattagaattaagagatttaaatgaagaagaacctactgaaatagaggcaagcaagcatgaattggcgtatataaaattaaatggatctataggttgtatggtcaatggagctggtcttgccatggcaacaatggatattataaagttgtatggagaagaaccagcaaatt

SEQ ID NO: 310006 - DNA, 497 bp, Unknown
  Bacterial polypeptide expressing nucleotide sequence isolated from the Sargasso Sea
tatgaacattcacgaacatcaagccaaggatttgtttagagtttataacattcctgtttcatcaggctctgtagcttatagtgcagatgagatagaaagagctgtaaatgaagttgtaggtccagtgtgggtagtgaaggctcaaatacatgcaggcggaagaggaaaaggcggaggtgtcaaagttgtttctactaaagaagatgcccttaacgaagcaaaaaaaatgtatggcatgaatttagttactcctcaaactggagcatcaggtaaagaggttaagcgcatttacattgaaaatggttctgatatagaaaaggaattatatctctcatgtctgctagaccgatcaactagtaaagttgcatttatagtttctaaaatgggaggcatggatatagaagcagttgccgctgatacgcctgaaaatattactacagttcaaattgaaccatcaataggtgttacaaagaatgatattgaaatgattcaaaagg

SEQ ID NO: 310007 - DNA, 567 bp, Unknown
  Bacterial polypeptide expressing nucleotide sequence isolated from the Sargasso Sea
atatgttaaaagtaaaacaaatattatcaaaatctagttcaagattaatcggaccaaattgccctggaattattactccagatgaatgtaaaattggaataatgcctgggaatatacataaaaaaggttctgtaggtattgtttctaggtcaggaactttaacttatgaggctgtagctcaaactacaattaatggattaggacaatctacttgtataggaattggtggtgacccaataaatggcacaaattttatagattgcttagatttatttctgaatgatccaaagacacaatctatattaatgattggagaaatagggggaactgccgaagaggaagcttctgagtttataaaaaatcataaaataaaaaaaccaatggttggttttattgcaggcataactgctcctccaggaagaagaatgggacatgcgggagcaataatttctggaggtaaagggagcgcaaatgaaaaaattaaaacaatggaggatgcaggaataacaatagcaaaatcaccagcagacattggaaaaacacttttgaacaaattgtctaattgaa

SEQ ID NO: 310008 - DNA, 569 bp, Unknown
  Bacterial polypeptide expressing nucleotide sequence isolated from the Sargasso Sea
tccattagtaatatcaaatcaagatcaaatattagctttagattgtaaaatgagctttgataacaatgctttgtttagaagaaaccaagtttctgaattaagagataaatcacaagaaaaccctaacgaagtgtatgcatctgatcgaggcctcaattatgttagccttgacggaaatattggcaatataattaatggcgcgggtttagccatggcttcaatggatatgattaaattagcaggaggagaaccagcaaatttcttagatgttggtggaggtgctacgcctgaaaaaatagtcaaagcttttaaattaatttcaatggatgagaaagttaaagttatacttgttaacatttttgcaggtataaatagatgcgattgggttgcggaaggtatagttcaagcattagaaaaaatagaaattaaagttccaattgtaataagattagctggaacaaatgttgaaaaaggaaacaaaattttaaaagaaagtaaaataaaatacatcgaagcaaacacgctagaggatgctgcaaataaggctgttaaagcactaggtaattaaa

SEQ ID NO: 310009 - DNA, 523 bp, Unknown
  Bacterial polypeptide expressing nucleotide sequence isolated from the Sargasso Sea
atgaaaattcatgagtatcaagcaaaagaaattctagaaaaatttgatataccaattcaaagaggttatactctagaaaataaagaagatatcaaccttactatcaaaaaagttcaagaagaatttcaaactgaagcagttattgtaaaagcacaaattcatgcaggaggccgtggcaaaggtggtggtgtaaaatattgtgcttctttagaagatgcccaagcgagcgccgaagacatattgggcatgaatcttgttacacatcaaacaggtcccgaagggaaaaaagtaaacaaaatactgattactgaagcgttagatattaaaaaagaatattattttgctatcacttttgatcgttcaaaaaattgtgatgtttttattgtatcagatgaaggtggcgttgatattgaagaagttgctaaaaattcaccagaaaaaattgtcaaagcttggattgatgagtcaaatggctctttaaatcatagtattaataaaataattactcaactttcattagaaa

SEQ ID NO: 310010 - DNA, 901 bp, Unknown
  Bacterial polypeptide expressing nucleotide sequence isolated from the Sargasso Sea
gaaggtaaaatagttaatagaatatatattgaagaggcaacagaaattaaaaaagagttatatttaggtcttgtttttgatcgtagttccgagagcattatggttgtagcatcaacagaaggcggtatgagtgttgaagaaatagcaaaacagaaacctgaaactataattagatcaaaaatagaagttgctgttggaatgcaacaatttcaagcaagggaaatagcttttggtttaggtatcgaaccacagttgattagaagagctgctgaaactataaccggatgttatagagcatttagtgaactagatgctacaatggttgaggtaaatccattggtaatttctaatcaagatcagatacttgcgctagattgtaagatgagttttgataacaatgcgttatttagaagaaatcaagtttcagaactaagagacaaaacccaagaaaattcaaatgaagtttatgcatcagatagaggattaaattacgtaaatctagaaggaaatattggaaatataattaatggtgcaggattagcaatggcttcaatggatatgataaagctagcagggggtgaacctgcaaatttcttagatgtaggaggtggagcaacaccagaaaaaatagttaaagcctttaagctaatttccatggatgaaaaagtaaaagtcatattggtcaacatttttgcaggaattaacagatgtgattgggtagcagaaggtatcgtacaagcattacaaaagatagaaataaaagtacctttggtaattagattggctggtactaatgttgaaaaaggaaataaaattctaaaagaaagtaaaattaattatatagaagctaatacattagaagatgctgcaaataaagcagtcaaagctttaggaaattaaa

SEQ ID NO: 310011 - DNA, 739 bp, Unknown
  Bacterial polypeptide expressing nucleotide sequence isolated from the Sargasso Sea
gaaaaaattattacaactaaagttgaactggatatagaaataaatgagtctgatattgaaaaaatcatttcaccttttaagttcaatgaaagtcaaaaaaaggagtcatttaaattgattaaagccatgtacaagatactaattgagaaagatgcaagtttaatcgaaattaatccactaattattacaaaagataaaaatattttatgtctagatgcaaaaatgaattttgatgataatgcaatatttagaaggcctgaaattttaaatctaagagatttaaacgaggaggaccctgccgaaatagaggctagtaaacatgatttagcatatattaaattgaatggatctatagggtgtatggtaaacggagcaggcttagccatggcaactatggatataattaaattatatgggaaagaacctgcaaattttttagatgttggtggcggcgcatcaaaagaaaaggtatcagctgcttttaaattaattttgagtgataaaaacgtaaaaggaattctaataaatatatttggtggaataatgaggtgtgatgtattggctcaaggtgttgttgaagccgcgacagaaattgatttatctgtacctcttgttgtaaggcttgcaggaacaaattttaaagaaggaaaacaaatcttagacgagtcgaatttaaaaatattatctgcatctgatttaaacgatgctgcaaagaaaatagtagaggcaatcaagtaaa

SEQ ID NO: 310012 - DNA, 755 bp, Unknown
  Bacterial polypeptide expressing nucleotide sequence isolated from the Sargasso Sea
acaaattcatgctggtggaagaggaaaagcaggaggagttaaaatcttagatacgattgatgaattaagaatagccgccaaagaattattaggtaaaactcttgtaacacatcaaacaggccctttgggaagaaaagttaaaagactatatgttgaagagtcctcaaatatagataaagaattttatttatcttgtttagtagatagagctagttctaaaattgcatttatatccagtgatcaaggtggaatgaacattgaagatgtggcaattagttcaccagaaaaaattgtaacaacaaaagttaaagttgataatgaaatttccgataaagattgtgagcaaataattaaaatttttaatttaaatgacaatgctaaaaagcaagcaatgtctttaataaaatcaatttataaaatgtttattggtacagatgctaacatggttgaagtaaatcctttaattttaaccaaagaagaaaaaatattgtgtttagatgcaaaagtgaattttgactcaaatgctttatttagacatccagaaattttagaattaagagacctaaatgaagaagaatcaactgaaattgaagctagtaagcatgatctagcatacattaaattagatggaagtattggttgtatggttaatggagctggtttagctatggcaaccatggatataattaagcagtatggagaagaaccagccaattttttagatgtaggtggaggagcgtctaaagaaaaagttt

SEQ ID NO: 310013 - DNA, 831 bp, Unknown
  Bacterial polypeptide expressing nucleotide sequence isolated from the Sargasso Sea
aatgaatattcatgagtaccaagccaaagatttgtttagaagatttaatataactacttctaaaggagaagtttttgaagatgcagaagcagctgaacagtatgcacaatctataaatgctaaagagtatgtagttaaggcacaaattcatgcgggaggtagaggtaaagccggaggtgtaaagcttgttaaaactccaaatgaagttaaggagcacgtagaaaatatgctaggtatgacgcttgtaactcatcaaactggaccggaaggaaaagtggttaacaaggtttatgttgaagaggcatcttctattataaaagagttttatctttcatttgttactgatagaaaatcagagaaaaatgtaataattgctagccctgaaggtggcgttgatattgaaaaagtagctgaagaagaacctgagaaactgcttactcaaccaatagatcctgtggtaggaatacaacccttccatgtaagaaagattgcttattttcttggttttgacaaagaccaaaccaaacaattgaatgcaataataaatggaatgtataatttgtttacccaaatggactgcgctctagttgaagtcaatccattaattattactgaagaaaatattgtaaaagccttagatgctaaaattaattttgacgacaatgcagcttttagacataaagaatattctgaattacatgaccctacagaagaggaaccttctgagcttgaagcgaagaaatgggattttagcttcgttaagctagatgggcatatagggtgcctttgtaatggagctgggctagctatggctactatggacatcataaa

SEQ ID NO: 310014 - DNA, 854 bp, Unknown
  Bacterial polypeptide expressing nucleotide sequence isolated from the Sargasso Sea
aatgaatattcacgagcatcaagctaaacaaattttaaaaaaatttggtgctgtagttccagaaggagtatttgctctaaatgttaatgaacttattgaaaaagtaaaaacactaaaaactgaaaaatatgttcttaaagcacaaattcatgctggaggtagaggaaaagctggtggtgtaaaaattttaaatactatagatgaattaactatagcagccactgaattgttggggaaaacgttagttactcatcaaactggtcctgaaggtagggaggttaaaagattatatgtcgaagaatcttcaaatatagataaagaattttacctatcctgtctagtagatagggctagttctaaaattgcatttatatcgagcgatcaaggagggatggatattgaagaggttgcaagtagttcacctgagaaaattgtaacaacaaaagttaatatgggtgacgaaatttccgatacagattgtaaaaaaataattcaaatttttaatttaaatgatgatacacaaaaactagcgatatcattaattaaatcaatttataaaatgtttattagtactgatgcaaatatggttgaggtaaatccattaattttgacaaaagagcaaaaaattgtttgtttagatgcaaaagtgaatttcgattcaaatgcattgtttagacatccagaaattgttgaattgagagatttaaatgaggaagatccaactgagattgaagctagcaaacatgatcttgcctatattaaattagatggaagtatcggctgcatggtaaatggagcaggattagcgatggcaacaatggatataataaaattatacggtaaagaaccgggca

SEQ ID NO: 310015 - DNA, 820 bp, Unknown
  Bacterial polypeptide expressing nucleotide sequence isolated from the Sargasso Sea
ggtgttttttcacattcaattgatgaattattgaaaaaagcaaagtcattaaaaacagaaaaatttgttttaaaggcacagattcatgctggtggaagaggtaaagcaggaggggtaaaaattgtaaatacaatagaagaacttaatgcagcagccactgaaatgttaggtaaaaaattgataactcatcaaacaggacctcaaggaaaagaagtcaagagactgtacgtcgagtcgtcctcaaaaattagtaaagaattttatctatcttgtttagttgatagagtaagttctaagattgcatttatctctagtgaccaaggtggaatggatatagaagaagttgcaaaaaataatccaaaaaaaattgtaacaacaaaagttaatttagaagataaaatatcagatcaagattgtgaaaaaattgttgaaatatttagcttaaactctgatgaaaaaaaaaaatcaataaatttaattaaatcaatttataaaatgtttattgagaccgatgctaacctagttgaaataaatccattaattttaacagaagaaaatgaaattgtttgtttagatgcaaaaatgagctttgatgataatgcattatttagacatccagaaattttaaatttgagagatcttaatgaagaagaagagtcagaaatagaagcaagtaaaaatgatttagcttatataaaattagatggaagtattggatgtatggttaatggagctgggttagccatggcaacaatggatataataaaaatgttcggagaagaaccagctaattttcttgatgttggaggtggagcatcta

SEQ ID NO: 310016 - DNA, 835 bp, Unknown
  Bacterial polypeptide expressing nucleotide sequence isolated from the Sargasso Sea
gaaggaaaaattgtaaacagaatttatatcgaagaagcaacagatataaaaaaagaattatatcttggattagtttttgatagggcatcagagagcataatggttgtagcctcaactgaaggcggaatgagtgttgaagagattgctaaagaaaaaccagaaacaattattagatctaaaattgaagttgcagttggtattcaaagttttcaagcaagagaattagcatttggattaggtatcgaaccagaattaataaggagagcttcagaaactattattggatgtgctaaagcttttagcgagctagatgctaccatggttgaagtaaatccacttgttatctcaaaacaaaaacaaattttagctctggattgtaaaatgagctttgataacaatgcaatgtttagaagagataaagtttctgaattaagagataaaactcaagaggatgagaaagaggtttatgcttctgatagaggccttaattatgtaagcctagagggaaatattggaaatattattaatggtgctgggttggcaatggcatctatggatatgattaaactagcaggtggcgaaccagcaaatttcctcgatgtaggtggaggagcaactcctgaaaaaatagtaaaagcttttaggctaataacgatggataaaaaagttaaagttattttagttaatatttttgctggaattaatagatgtgattgggttgcagaaggaatagtacaagcattagaaaaaatagaaattaagtttcccttagtaattagattagctggaacaaacgtgaaaaaggaaataaaattcttcgggatagtaagctaaa

SEQ ID NO: 310017 - DNA, 756 bp, Unknown
  Bacterial polypeptide expressing nucleotide sequence isolated from the Sargasso Sea
tcatgctggcggtagaggcaaagcgggaggagttaaaatcttagataatattgaggaacttaaaattgctgctaaagaacttttaggaaaaactcttataacacatcaaacaggtcctgaaggtagagaggttaaaagattatatgtagaagaatcttctaacattgataaggaattttacttatcatgcttagttgatagggctagttcaaaaatagtttttatatcaagtgatcagggaggaatggacattgaagaagtagcaatcaacagcccagaaagaatcttaacaactaaagttgaaacaaataatgaaatttcaaatgaagattgcgaaaatattgtaaaggtttttaatttaagtgatgatactaaaaatcaagcaatatctttaattaaatcaatatataagatgtttattagcactgatgccaatatggtagaaataaatcctctgattttaacaaaagaaaaaaaaataatttgtttagatgcaaaagttaattttgattctaatgctttgtttagacacccagaaattgtagaattaagggatttaaatgaagaagatccaacagaaatagaagctagcaaacatgatctttcctacataaaattgaatggaagcattggttgtatggttaatggcgctggattagctatggctactatggacattattaagttatatggagaagagccagctaattttttagatgtaggaggtggagcatcaaaagaaaagtttctgctgca

SEQ ID NO: 310018 - DNA, 528 bp, Unknown
  Bacterial polypeptide expressing nucleotide sequence isolated from the Sargasso Sea
ccctccgcgttttgctgcaaatgcaattattgaagctgcggatgcatttaatgaaatcaaaggtgaaggagtaatagtatgtattactgagggaattccaacccttgatatgattaaagcagcggatcatgtttcaaaaattaaagggattagattaattggtccaaattgcccgggaataattactcctggagagaatggtggtgcaaaaattggaattatgccaggccatatacacgctaagggaagaataggaatcgtttcaaaatctggaacattaacatatgaagcagttgctcaaacaatgagtattgatgaaggtcaaagtacatgcgtgggtattggaggagatccagtaaatggcactggtttcatagattgcttagaagcattcgaaaatgatccagaaactgtagcagtagtgatgattggtgaaattggaggtactgctgaagaagaagctgctgaatgggtttccaaaaacatgactaaaccggtagttggatttgtagcagggatgacagcccc

SEQ ID NO: 310019 - DNA, 489 bp, Unknown
  Bacterial polypeptide expressing nucleotide sequence isolated from the Sargasso Sea
ctggagaatgtaaaattggtattatgccaggcaatattcaccagaaaggatcagttggaattgtatcaagatctggaacattaacctacgaagctgtggcacaaacttcgtcaaataaaatgggacaatcaacatgtataggcatagggggcgatccaattaatggcacaaactttatcgattgtttggaactatttttaaaagatgaagaaacgaattcaattataatgattggtgaaattggtggtacagctgaagaagaagcctcagattttcttaaaaaagaaaaaattaagaaaccaatggttggttttattgcaggattaacagcgccgcccggtaggagaatggggcacgctggagcgataatttctggggggaaaggaagcgcccaagaaaaaattgaagtcatgaaatcggcaggtattactatatcaaaatcacctgcggatattggcaaaactctaattgataaactaaacagttgat

SEQ ID NO: 310020 - DNA, 675 bp, Unknown
  Bacterial polypeptide expressing nucleotide sequence isolated from the Sargasso Sea
attgttaggtaaaaaattaattacaatccaaactggtccagagggtaagataataaatagaatttatattgaagaagcaacagatatcaaacatgaattatatttaggcttagtgtttgatagatcttcagaaagtataatggttgtagcttcaacagaaggtggaatgagtgtcgaagagatttcaaaagaaaagcctgaaacaattataagatctaaaatagaggtagcagttggtattcaacaatttcaagcaagagaaatagcttttggtttaggaattgaatccaaattgatttcaagagctgcaaatacaattattgggtgctataaagcttttagtgagcatgatgcaacaatggttgaagttaatccattggttgtatcacaacaagatgaaatattagcattagattgtaaaatgagttttgataataatgcaatgtttagaagagatgaaattgcagaacttagagataaaacacaagaaaattcaaatgaagtttatgcttctgacagaggaatgaattatgtaagtctagatggaaatattggtaatattattaacggtgcaggcttagcaatggcttcaatggacatgataaaacttgctggcggtgagcctgcaaactttttagatgttggcggaggtgcaactcccgagaaaatagttaa

SEQ ID NO: 310021 - DNA, 850 bp, Unknown
  Bacterial polypeptide expressing nucleotide sequence isolated from the Sargasso Sea
aaagcaggaggtattattatttgcaatagttctttagaagttgcacaggcagctgacaagcttcttggaaaaaaattaatcacaaaccaaactggtcctgaaggcaaaataactaatagagtttatattgaagaagcaacagatattaaaaaagaattatatcttggcttagtttttgatcgaagctcagaaagtataatggttgtagcatctacagagggaggaatgagtgttgaagagatttctaaaaagaaacctgaaactataattagatctaaaattgaagtagctgttggaatgcaaaaatttcaagctagagaaatagcatttggattaaaaattgaacccaatttaatagctagagcggcagatacaattattggatgttatagagcatttagtgaattagatgcaactatggttgaagtaaatcctttggtaatatcaaatcaagatcaaatattagctttagattgtaaaatgagctttgataacaatgctttattcagaagaaatcaagtttctgaattaagagacaaaagtcaagagaaccctaacgaagtatacgcatctgatagaggtcttaattacgtcagtcttgatggaaatattggaaatataattaatggtgcgggtttagcaatggcttcaatggatatgattaaattagcgggtggagaaccagcaaatttcttagatgttggtggaggagctacacctgaaaaaatagtcaaagcttttaaattaatttcaatggatcagaaagtgaaagttatacttgtaaatatttttgcaggtataaatagatgtgattgggttgcagaaaggtatagttcaagcattagataaa

SEQ ID NO: 310022 - DNA, 778 bp, Unknown
  Bacterial polypeptide expressing nucleotide sequence isolated from the Sargasso Sea
atgaagattcacgagtaccagggtaaggaaatcctgcggaaattcggagtcgcggtaccgcgcggcaagccggcgttctcggttgacgaggccgtcaaggtggcagaagagctcggcggcccggtttgggtcgtgaaggctcagattcacgcgggtggccgtggcaagggcggcggcgtgaaggtggcgaagtcgatcgagcaggtccgcgaatacgcgaaccagatcctcggcatgcagctcgtcacgcaccagaccggtccggaaggccagaaggtcaaccgtctgatgatcgaagaaggcgccgacatcaagcaggaactgtatgtcagcctcgtcgttgatcgcatctcgcagaagatcgtgctgatgggttcgagcgaaggcggcatggacatcgaagaagtcgccgaaaagcacccggaactgatccacaaggtcatcgtcgagccgtcgacgggcctgctcgacgcgcaggcagacgacctcgccgcgaagatcggcgtgccggctgcttcgattccgcaagcgcgcgcgatcctgcaaggcctgtacaaggcattctgggaaaccgacgcatcgctggctgaaatcaacccgctgaacgtttccggcgacggcaaggtcatcgcactcgacgcgaagttcaacttcgactcgaacgcgctgttccgccacccggaaatcgtcgcgtaccgcgatctggacgaagaagatccggctgaaatcgaagcgtcgaagttcgacctcgcgtacatctcgctcgacggcaacattg

SEQ ID NO: 310023 - DNA, 862 bp, Unknown
  Bacterial polypeptide expressing nucleotide sequence isolated from the Sargasso Sea
agtcgatgggtagcaaaagcacaggttcatgcaggcggtagaggtaaatctggaggtgttgctctttgtgacaccattgaggaggtagccgattttacaaaaaaatggttaggtaaaagacttgtaacatatcaaactgataaagaggggcagctagtaagctgtattctcgttgaggaatgtaccaatatcgcagacgagctttactatagtgcagttgttgatagatcttcacgcgaggttgcaataattgcatcttcggagggaggagtaaatatagaaaaagttgctgaggaaactcctgaaaagatcgcttccatatctcttaatggtaaagatatatcaaaaggcgatattgaaaagatatgcactacactcaaactaaatgagcctcaatcttcacagatggagcatattgtaagaaaaacagtttcaatgttctttgagtgtgaccttagccttttggaaattaacccacttgtaataaaagatgatggtaatttgcactgtttagatgcaaagataaatatcgattcaaatgcactttttagacaaaaagagttacaagaaatgcatgatccaactcaagaagatccgagagaatctgaggcatcaaaatatgatctaagttatgtttcattggatggaaatattggatgcatggtaaatggagctggattagcaatgggcaccatggatacaataaagtttttcaaagggaatcctgccaactttctcgatgttggaggcacagctactcaagaaagggtagcaaaagcttttaaaataattttggatgatccagaagtaaaagtagtacttgtaaatatttttggaggtattgttagatgtgatttaattg

SEQ ID NO: 310024 - DNA, 589 bp, Unknown
  Bacterial polypeptide expressing nucleotide sequence isolated from the Sargasso Sea
aaaataattacaacaagaattgatgttgaaaaagaaatttccgatttagattgtgagaaagttatagatgtttttaaattagaatatgaagcaaaagaccaagcaatcgaacttattaaatctatataccgattatttatagggaaagacgcaagtttaattgagataaaccctttagttttaacaaaagaaaataatattctttgtttagatgcaaaaattaactttgatgataatgctattttcagacatccagatatatatgaacttcgtgatttaaacgaagaagatccaactgaaattgaagcaagtaaacaagagctttcctatattaaactcgatgggaatattgggtgcatggtaaatggagcaggcttagctatggcaacaatggacataattaaattatttggtggtagccctgcaaactttttggatgttggcggtggagcatccaaggaaaaagttgctgccgcttttaaaatgatactcagtgataaaaatgtaaaaggtattttaattaatatttttggaggcatcatgagatgtgatgtattagctttaggtgtagtcgatgctgcaaaatgaa

SEQ ID NO: 310025 - DNA, 442 bp, Unknown
  Bacterial polypeptide expressing nucleotide sequence isolated from the Sargasso Sea
tacagaaatagaagcaagcaaatatgatttagcatatatcaaactagatggaaatattggatgtatggttaatggagctggtttagcaatggctacaatggatattattaaactttatggagaagagcctgcaaattttttagatgtaggtggtggagcttcaaaagaaaaagtttctgcagcatttaaaattattttgtcagataaaaatgtaaaaggaattttaattaatattttcggtggaatcatgaggtgtgatgtaattgcccaaggagttgtagacgcagcaaaagaaattaaaattgaagttccattagttgttagattagcaggaacaaattttgaggaaggaaaaaaaatacttgaaagctctcatttagaaataatttctgcaaacaatttatcagatgcagcaaaaaaaattgttgaggctataaaataa

SEQ ID NO: 310026 - DNA, 738 bp, Unknown
  Bacterial polypeptide expressing nucleotide sequence isolated from the Sargasso Sea
aaaaaattattacaactaaggtagatttaaataatgaaatatctgacgatgattgtaaaaaaataattaaagtttttaatttagatgatcaagcaagtaagcaagcagtaagcttaattaaatcaatttataaaatgtttattgatacagattcaaatttagttgaaataaatccattaatattaaccaaggataataatgtagtctgtcttgatgcaaaaatgaattttgatgacaatgcactttttaaacatccagacattttaaagttaagagatcttaatgaagaggaagataatgaaattgaagcaagcaaacatgatttagcatatataaaattagatggtagtattggctgtatggttaatggcgcaggtcttgctatggccacaatggatataattaagttgtacggagaagagccagcaaactttttagatgttggaggaggagcctcaaaggaaaaagtttccgctgcttttaaaataatcttatctgataaaaatgttaaaggtattttaataaatatatttggtgggataatgagatgtgatgttcttgcgcaaggtgttgttgaagctgctaaagaaattaaaattgaggtaccattagtagtacgtttagcaggtacaaattttgaagaaggaaaaaaaatattagatgattctgttctaaaaatcatctcagcttcagatctttcagatgctgcaaaaaaaattgttgaggcaataaaataat

SEQ ID NO: 310027 - DNA, 918 bp, Unknown
  Bacterial polypeptide expressing nucleotide sequence isolated from the Sargasso Sea
gcgtttgctgcacagtggttgggcaagaatctggttacctaccagaccgatgccaacggtcaacccgtctccaagattctggtcgaatcctgcactgacatcgccaaagagctgtacctgggcgctgtagtcgatcgttcgagccgccgtatcgtgttcatggcttccaccgaaggtggcgtggacatcgagaaagtcgctcacgaaacgcctgagaaaatcctcaaggccaccatcgacccactggtcggcgctcagccgttccagggtcgcgagctggcattccagctgggcctggaaggcaagcaagttcaacagtttgccaagatcttcgttggcctggccaagctgttcaaggatcacgacctggcgctgctggaagtgaacccgctggtgatcaaggccgatggcgacctgcactgcctcgatgccaagatcaacatcgacgccaacgccatgtaccgtcagccgaagctgaaaaccttccacgacccgtcgcaggacgatgcccgtgaagcccacgctgccaagttcgaactgaactacgttgcccttgaaggcaacatcggctgcatggtcaacggtgccggcctggccatgggtaccatggacatcgtcaacctgcacggcggcaagccggccaacttccttgacgttggcggtggtgctaccaaagagcgcgtaaccgaagcgttcaagatcattctgtccgacagcaatgtcgcggccgttctggtcaacatcttcggcggcatcgttcgctgcgacatgattgccgaaggcatcattggtgcagtgaaagaagtcggcgtcaaagttccggttgtcgttcgcctcgaaggcaacaacgccgaactgggcgctaaagtactggcagaaagcggtttgaacatcattgcggcaaccagcctgaccgac

SEQ ID NO: 310028 - DNA, 784 bp, Unknown
  Bacterial polypeptide expressing nucleotide sequence isolated from the Sargasso Sea
aatgaacattcatgaacatcaagctaaagaaatattaagagaatttggtgcgcctgtttctaatggaattgtaatttattcattagacgaaatagataaaaaaataagtaagctcaaatcaaaaaattttgttctaaaagcacaaatacatgcaggtggcaggggaaaggctggaggtgtaaaattagtaaaaaacatagaagaattaagaaaagaggccagagaattatttggcaaaaagttaattacacatcaaactggaccagagggaaaagaagtaaaaatactttatatagaagaagcttcggaaattagaaaagaattttatttatcatgcttagtagacagaaaaacttcaaaaatagcttttatcagcagtaccgaaggtggtatggacattgaaaaggttgcaacagatacaccagaaaaaatttttacaactaaaattgaaattaaagagaatctaactatagaagaaataaataatattataaaaccttttgatttaatcaatgaacaaaaaaatattgctcaaaaactaattcagtctttatataaaattttgatagaaaaagatggaagtttgattgaaataaatccactaattcttactaaggatgaaaggttgatttgtttggatgcaaaaatgaattttgatgataatgccatgtttcgaaggccagaaattttaaagttaagagatcttaatgaggaggactcaacagaaatagaagcaagcaaacatgatttgtcttatataaaattaaatggagctataggttgt

SEQ ID NO: 310029 - DNA, 559 bp, Unknown
  Bacterial polypeptide expressing nucleotide sequence isolated from the Sargasso Sea
atgaacattcatgaatatcaggcaaaacagcttctatcaaaatacggtgtaggggttcttgatggaggtgtggccagcaatagtgcagaggcggtgactgtagcacaacgacttggtggaccaatatgggtggtaaagtcgcaaatccatgctggcgggagaggtaagggaaaatttctggagagtacagcggggaatagtggaggagttcgggtagttaagtctctagatgctgttagggataattgtgatcagatgattggagcacatcttgttacaaatcagactggagaagagggaaaggaagtaaagaaggtatatattgaggacggatgtgaaatacagaaggaactctatttgagtcttttagtggatcgggcaacttcaaaagttaccgtgatagcgtcaaccgaaggcggaatggatatagaacttgtcgcagaacagagtcctgaaaagatcctcaagctagaaatttctgaggaaaaaggtctcgtaaagacaaaggtaatagacttggctaaacaacttggacttggggaaaaggcaatagacgagg

SEQ ID NO: 310030 - DNA, 481 bp, Unknown
  Bacterial polypeptide expressing nucleotide sequence isolated from the Sargasso Sea
cattgctgacttaagggataccacagaagaagatcctaaagaactggaggccagtaagtacgacttaaattatattgcactggacggcgaaattgggtgtatggttaatggtgccggacttgctatggcaacgatggatatcatcaaattatatggcgctgagcccgctaattttttggatgttggagggggcgccacaaaagagaaagtcacagaggctttcaaaataattacgtcagacccaaaagttaaaggaatattagttaatatttttggcgggataatgcgatgtaatgttatcgctgaaggagtagttgcggcggtgaaagaggttggtctgcaagttcctttagtcgttcgtctagaagggacaaacgtggaaaaagggaaagacatcataaataattctggactcgatgtcatagctgcgaacgacctgagagatggggccgaaaaaatcgtaagagcagtgaaaggttag

SEQ ID NO: 310031 - DNA, 397 bp, Unknown
  Bacterial polypeptide expressing nucleotide sequence isolated from the Sargasso Sea
tatggctgtgttaatcgacgaaaaaactaaagtgatttgtcaaggctttacaggttcacaaggaacatttcattccgagcaagccatagcgtacggaacaaaaatggtgggaggagtaacccctggaaaaggcggcagcgatcatttaggtttacccgtattcaattccgtgcacgaagcaaaacacataaccaacgcagatgcttctgtaatatatgtacctccgccctttgcggcagactctattttggaagcaatagacgctcgaatggagctaattgtgtgtataactgaaggtattcctgttcaggatatgctaaaggtaaagagagcacttgaaaactcaagttctattcttgttgggccaaactgtcctggagtaatcaccccagaggct

SEQ ID NO: 310032 - DNA, 871 bp, Unknown
  Bacterial polypeptide expressing nucleotide sequence isolated from the Sargasso Sea
tgtaccaatattgatacggagctttatttgggagcagttatcgatagatcgagtaagcgtgttgtttttatggcttcaactgagggtggcgtagagatagaaaaagtagccgaggagactccagataaaatattgcgggtatccattgatcctgcagtaggagctcagagctttcaaggcagatctttggcatttagactgggtctttctgggaaacaggtttcacaatttaccaatcttttcatgggcttatcaaaattatttcatgaattagattgctctctgctggaaattaaccccttggttattaacgatcagggtgatgttcactgtcttgatgcaaaaataaatattgatgggaatgcattatatcgacagaaagcactggcggagctacacgatccgacccaagaagatgaaagggaggcagcggcgtcaaaatttggccttaattatgtagcactcgatggaactattggttgcatggtaaacggagccggactggcaatgggaactatggatctagtgaagttaaacggaggaaaccctgcgaactttttggacgtgggcgggggcgctaccaaggaggctgttgcagaggctttcaaaattattctttctgatattaatgtgagagctgtattgataaatatttttggggggattgtttcttgcgcaattattgctgacggtataattggagcggtcaaggaggttggggttgacgtgcccgttgtagttcgtttcgaaggcaataattcggaagttggaaggcaaaagttgtctggtagtgggcttaacataatatcagcagagtcgcttaacgatgctgcagagagcgcagtcctagctgcaagtgagggcaaatgag

SEQ ID NO: 310033 - DNA, 803 bp, Unknown
  Bacterial polypeptide expressing nucleotide sequence isolated from the Sargasso Sea
tatgaaaatacatgagtatcaaggcaaaataattttagaagattatcaaataagtattcctaagggtatccccgctttttccattgaagatgcattaaaagcatatgattcgcttgattcagattttgttgcgataaaagctcaaattcatgctggtggacgaggaaaaggcggaggagtaaaaatagctaaaaatagaactgatgctgaaaatcacatatcaaatattctgggaatgaacttagtaacccatcaaacaggtccaaatggtaaaaaagtagaacgaatttacttagaatcaggagtagatattgaaagtgagtactatgctgcaattacactggatagaaataccgagatggatgtcttcatggtttcaacagagggtggtgtcgagattgaaaaagtagcatctgaaacaccggataaaattataaagatatggattgatcctcttgttggcattaaaacttttcaactaagaaaattagcgtttggccttaaactagaaggagccacattcaaagaggcagttgatacttttagaaaaatgtataattgttataaaaatactgacgcttccctccttgaaataaatcccttagtgaaaacgaaaaatgagaatattgttgcactagattctaaatttaattttgataataatgcactttttagacaaaaaaagataatggaaatgagagacctatctgaggaagataagatggaggttgaagcaagtaaatataatttaaactacataaaaatagatggcaatgttggctgtatggttaaatggtgcaggc

SEQ ID NO: 310034 - DNA, 529 bp, Unknown
  Bacterial polypeptide expressing nucleotide sequence isolated from the Sargasso Sea
tatgaaaattcacgaataccaagcaaaacatatcctagcaaaatatggagtccccgttccgaaagggaacgtagcgttttctgtagatgaagctttaatagtagcagaggatttaaaatccgaggtctacgtagtgaaagctcaaatacatgcaggagggcgaggtaaaggaggtggagtcaaagtctcaaagggactcgaagctgtccgtaaaaatgcggagactatacttggaatgcaactggtcacacatcagactggtccgactggacagaaagttaagcaactgctgattgaggaaggaatagatatcagtaaagagctatactgttcggtgttggtagaccgcgggaagcagcgtattgtaattcttgcatccacggaaggtggaatggacattgaagaggttgcagaaaaaacaccggaaaaaattaagaaagtttttgtagatccttctgtcgggctgagaccataccaggcaaatgaattggcatttggattaaaatacatgaaacaaatcccaaattaa

SEQ ID NO: 310035 - DNA, 749 bp, Unknown
  Bacterial polypeptide expressing nucleotide sequence isolated from the Sargasso Sea
attgaagatctggcaaaaactaatccttgagaaaatattcaatatttactttgaaaattttgaagaaacagaactacctaaagaattagaaaaaaaactaaaattaacaaataatcaattttctgaattatcactgattgtttttaagttggttacagcttttaaaaacattgatgcttctacaattgaaattaatcccttggttttaaataagaacggtaattttgttttattagatgcaaaaattagtcttgatgataatgcattatttcgtcaccctgaacttgattctttaaaagatttatctgaggaagatccactagaactagaagcagcagaaaatgatatgaattacgtaaaattaaatggctcaattggttgtatggtaaatggtgcaggtttagcaatggcaacaatggatattataaaacaatttggtgaagagcctgctaattttttagatttaggaggtactgcaaataaagaaagagcgattaaaggttttaaaattattcaatcagatccaaatgttaaatctgtacttataaatatatttggaggaattattcattgcgacatgattgcgaatggtattgttgaagctgttaaagaattaaaatttaaacttccaatggtaattcgttttcaaggtacaaatgcaactgaaggaagagatattataaataaatctactttagaattaatatcaataagtgattttactgaagctgcaaaaaaagttgtagagt

SEQ ID NO: 310036 - DNA, 824 bp, Unknown
  Bacterial polypeptide expressing nucleotide sequence isolated from the Sargasso Sea
taacgtaccgaatggtgtcgtaattttttctttacaggaaatagaacaaaaatctaaaattttaaaaacaaataaaattgctataaaagcacaaattcatgcaggtggcagaggtaaagctgggggcataaaaattgttgataattttcatcaattaaaagaagaagctgaaaaattatttgggaaaaaattaataactcaccaaacaaggccggaaggaacaaaagttacaagattgtacttagaggaaacatgtaatattaaaaaagaattttatttatcttgtttagttgacagatcaagttctaaaattgcctttatttccagtgtagaaggtggagtaaatattgaagaaatagcaaaaaataatcctgaaaaaataaatacagtaaaatttagcctctctaatactgtgaaggaagatgatataaaaaaaattatattaccatttaatttatctaaaaaatctcaaaaacaagcttctaatttgattcaagcagtttataaaattttaatagaaaaggatgctaatcttatcgaaattaatccattggtattaacaagtgatgataatttgctgtgtcttgatgcaaaaattaattttgatgataatgctctatataggcaatcagatattttatcattaaaagattttaatgaagaagacccaattgaaacaaaagcaaatgaatatggtttatcctacatcaagcttaatggaaaaataggctgcatggttaatggtgcaggcttagcaatggctactatggatataattaaattatatggatcggaaccagcaaattttcttgatgtgggtggtg

SEQ ID NO: 310037 - DNA, 550 bp, Unknown
  Bacterial polypeptide expressing nucleotide sequence isolated from the Sargasso Sea
atgaacatccatgagtatcaggcgaagtcgcttcttcgctcctacggtgccccggtgtcggacggccgcgtcgtcctgcgcgccgaagaggccaagacagccgcaggtgaactcgacggccccctttgggtggtcaaggcacaaatccacgccggtggccgcggcaagggcaccttcaaggaacccggcgccggtgaagcgggcggcgtccgcctcgccaaatcggtcgaagaggccgccgatgaagccaagcgcatgctgggccgcaccctcgtgaccaagcagaccggcccggcgggcaagcaggtcaaccgtatctacatcgaagacggctccggcatcgaatccgaactctacctcgccctgctcgtggatcgtcaaaccagccgcatttccttcgtctgctcgaccgaaggcggcatggacatcgaagaagtcgccgaaaagacgcccgagaaaatcctcagcttctcggtcgatccggccaccggctaccaggccttccatggccgccgcatcgccttcatgctgggcctcgaaggtccgcagg

SEQ ID NO: 310038 - DNA, 621 bp, Unknown
  Bacterial polypeptide expressing nucleotide sequence isolated from the Sargasso Sea
catgaaaattcacgaattccaggccaaacaggttctttcacgatatagggttccggtaccccgcagtaaagttgcagaatcagtagaggaagccgtcgatgctgcgagagagttaggcggagaagtctgggtggttaaggctcagatccatgccggtggacgcggtaagggcggcggagtcaaattctgccgcgggttggaggaagtccgggaaaacgcagaaaaaatcctgggcatgcaactggtaaccaaacagaccggaccggcagggcaaaaagtgctcagggttctgatcgaagaaggcatggaaatcatcaaggaactttactgttcggtgctggttgaccgaaccaagcagtctgttgtcatgcttgcatcgactgagggtggaatggacattgaggaagtggcagccaatacaccggataaaatcctcaaaatttttgctgatccatcactgggcctgcttccttatcagtcatcagaactggcttacggacttggaatcgatcaaatcaatcccaaacttctccggcctgctgccaaacttttcagttccctttatcaaacctttgtccatgaggattgcagcctggtcgagatcaatcccctggttcttta

SEQ ID NO: 310039 - DNA, 886 bp, Unknown
  Bacterial polypeptide expressing nucleotide sequence isolated from the Sargasso Sea
atgaacattcacgaatatcaagctaaagatttgtttagaagttataacatccctgtttcatcaggctctgtagcatatagtgcagatgaaattgaaaaagctgtaaatgaagttgagggtccagtatgggtggttaaggcccaaatacatgcaggaggaagaggaaaaggtggaggtgtcaaagttgtttcatctaaagaagatgccttaaatgaagcaaaaaaaatgtatggcatgaatttagttaccccccaaaccggagcatcaggtaaagaggttaatcgaatttatattgaaaatggttctgacatagaaaaagaattatatctttcatgtctactagaccgatcaaccagtaaagttgcatttatagtttctaaaatgggaggcatggatattgaggctgtcgccgtggacacacctgaaaatattactacagttcaaattgaaccatcaataggtgttacaaataatgatattgaaatgatccaaaaggcttttgaaataggagatgatttgaacaatcaattgtcagacttgattaaaaatatgtacctattttttcttgaaaaagatgcaagtcttgttgaggttaatcctctgatagtgacaaatacaaacaaacttttatgtttagacgctaaagtcaactttgatgataatgcaatttatagacatcccgaaattgaagaactaagagatgaaaatgaagaagatgagtatgaaagagaagcagcaaaatacgaccttgcctatattaaattggatggaaatataggatgtatggttaatggagctggacttgcgatggctagtcttgatattattaaaatgtatggcggtgaacctgcaaatttcttagatgttggagggggcgcgtcaaaag

SEQ ID NO: 310040 - DNA, 544 bp, Unknown
  Bacterial polypeptide expressing nucleotide sequence isolated from the Sargasso Sea
ttgataaattcaaattccaagctaataggccctaattgtccaggaataattactcctagtgaatgtaaaataggaattatgcctggaagcattcatcaaagagggtcagttggaatagtttctcgatctggaacactcacatacgaagccgttgatcagactactaaaaatgggttaggacaatcaacttgtataggaattggaggagacccaattaatggaactaattttattgattgtttagatttatttttgaatgatgatgaaactaaatcgatcctaatgataggtgaaattggcggaacagcagaagaagaagctgcagaatttgttaaaaatcataaaattaaaaaacctatagtgggatttattgcaggtgtaacagctcctcctggaagaagaatgggtcatgctggtgcaataatatctggtggaaaaggtggagcagaagataagatcaaaattatggaagattgcgggataacaattgctaaatctccatctgaaattggaaaaacattattaaataaattgtccaattgaa

SEQ ID NO: 310041 - DNA, 824 bp, Unknown
  Bacterial polypeptide expressing nucleotide sequence isolated from the Sargasso Sea
cttgcccgtttcagaggggtacgcagttgacactgcagatcaggcggtggcggcagcagagaaaatcggtggaactcgttgggtcgttaaagtccaggtccatgcgggtgggcggggtaaagcaggaggagttaaggtggctgattctctagacgacgtcaaggccttcgctgatcaatggatcggcaagcgtctagtcacgttccaaacagatgaagatggtcagcctgttagcaagatatacgttgagagctgcaccgatattgcaactgagctctatttaggggcggtggttgacaggggtacgagacgtgttgtttttatggcgtcaaccgaaggcggggttgagatcgaacaggtcgctgaagagacgccggaaaagattctcaaaacaatgattgatcctttcgtgggtcctcagccctatcagggacggcaactggcttttaaattaggactggaaggcaaacaggttcagcaattctcagcacttttcatgggtcttgcgaaattgtttcacgaattagattgctccttattagagatcaatccgctcgtaattactgagactggcgatgttcattgtctggacgcaaaggtcaacatagatggcaatgcgctgtacagacaaaagcctatagaagcgatgagagatttgagtcaagaggacgaacgagaggcgcaagcggatgagtttaaccttaactatgtcgcacttgatggaaatataggttgtatggtcaatggcgctggtcttgcgatggggacaatggacctagtgaaattgcacggtggaaatcctgctaattttctggacgtaggtg

SEQ ID NO: 310042 - DNA, 737 bp, Unknown
  Bacterial polypeptide expressing nucleotide sequence isolated from the Sargasso Sea
ttttaagacacccattgatccaataaaaggagctaaccaagagcaggctatttatttagcagagaatctaaatttaagtcaaagtcagactgaggaatttgtggacttattccttaagctttcaaaactatttcttgataaagatttatcactattagaaataaaccctcttgttattaatgcagataagaatttaatttgcctagatgcaaaaataaacatagattcaaatgctttatatagacaagaagaattgcatcagataaatgatgaatctcaagaagatacaagagaagtagaagcttcgaaatgggatctgaattatgtggctctagatggaaatataggctgtatggtaaatggagctggactggctatgggcacaatggacattattaagctttatggtggtgacccagctaacttcttggatgtaggaggcactgtagatgcaaaaagggtatctgaagcttttaagataattctttctgatgagaatgttaaagctgtcttgattaatatctttggagggatcgtaagatgtgacgtcatagcagatggtgttatagaagcagtgagccaaatggaaattaatgttcctgtagtggttcgcctagaaggaaatcaagcagaattaggtactaaaaaattaggtgaaagtgggttaaatatcattggagcaaatagccttgaagaggcagcatctaaagtggttgaggtttctaaagggagttaat

SEQ ID NO: 310043 - DNA, 733 bp, Unknown
  Bacterial polypeptide expressing nucleotide sequence isolated from the Sargasso Sea
caaacaggtcctgaaggaagagaggttaagagactttatgtagaagagtcttcaaatatagataaagaattttatctatcttgtttagttgatagagctagctctaaaattgcttttatttctagtgatcaaggaggtatggatatcgaagaagtagcagtaaaatcacctgaaaaaattataactactaaaactgatttaaaagatgaaatttcagacgagaaatgcaagaaaattattgaaattttcaaattagatggaagttctaaaggtgaagcaatctctttaattaaatcaatttataaaatgtttgtgagtacagatgcaaacatggttgagattaacccattaattttaacaaaagaaaaaaaagttgtttgtttagacgcaaaagttaattttgatgataatgcactatttagacatcctgaaatagtagacctaagagatttaaatgaggaagatccagcagaaattgaagcaagtaaatatgaactagcttatataaaattaaatggaagcattggctgtatggttaatggagcaggtttagctatggctactatggatataattaaattatatggttcagaacctgcaaactttttggatgttggtggaggagcttcaaaagaaaaagtttctgcagcatttaaaataattttatcagacaaaaatgtaaaaggaattttgatcaatatttttggtggtattatgagatgtgatgttttag

SEQ ID NO: 310044 - DNA, 733 bp, Unknown
  Bacterial polypeptide expressing nucleotide sequence isolated from the Sargasso Sea
atggctgtgttaatcgacgaaaaaaccaaagtgatttgtcaaggctttacaggttcacaaggaacctttcattccgagcaagccatagcgtatggaacaaaaatggtgggaggagtaacccctggaaaaggcggcagcgatcatttaggtttgcccgtatttaattccgtgcacgaagcaaaacacataaccaatgcagatgcttccgtaatatatgtacctccgccctttgcggcagattccattttggaagcaatcgacgctcaaatggaccttattgtgtgcattactgaaggtatccctgttcaggatatgctaaaggtaaaaagagcactcgaaaactcaagttctattcttgttgggccaaactgtcctggagtaatcaccccagaagcttgtaaaataggcatcatgcccggccatatccataagcgtggatctgttggggttgtatctagatcgggcactttaacatatgaagccgtaaagcaaacctctgatgttggattaggacaatcgtcatgtattggaattggaggagaccctgtaaaagggacagaacatatagatgtgcttgaatggtttttgaaagacgatgaaacagaaagcatcatcatgataggagaaataggtgggtcagctgaagaggaagccgctcaatttctaaaagatgaggcaaaaaaagggcgaagtaaaccaactgcaggttttatcgcaggtcgaacggcaccac

SEQ ID NO: 310045 - DNA, 834 bp, Unknown
  Bacterial polypeptide expressing nucleotide sequence isolated from the Sargasso Sea
attgaaaaagaattttatttatcatgcttagttgacagagaaagttcaaaaatagcttttataagcagtacagaaggtggtgtagatattgagtctgtagctaaaaataatcctgaaaaaattttaactacaaaaatagaatttaaagacactttaagtgataatgatattcaaaaaattattaaaattttttctttagatactaatcaaaagaaggatgctgaaagtttggtgaatgcattgtataataccttaatttcaaaagatgcatcccttatcgaaatcaatccacttattattacaaaacaaaaaaaactaatatgtttagatgctaagatgaattttgatgataatgcaatgtatcgaagacctgaaattttaaaactcagagatctcaatgaggaagaaccggcagaaatagaagctagtaaatttggtttagcatacataaaattaaatggatctattggatgtatggttaatggggcgggtcttgcaatgtcaactatggatataataaaattatatggagaggaacctgcaaattttcttgatgtaggaggaggtgcttctaaagaacaagtttccgcagcatttaaattaattttgtcagataagaaagttaaaggaattttaattaatatttttggaggcataatgcaatgtgacgtacttgcccaaggagtagttgaagcagcaaaaaagattaatatacaagttcccttagtagttagactcgcaggaacaaattttgaaaaaggtaaagagattttagataaatcagggcttaaaattttatctgcatcagatttaaatgatgcagcaaaaaaattg

SEQ ID NO: 310046 - DNA, 817 bp, Unknown
  Bacterial polypeptide expressing nucleotide sequence isolated from the Sargasso Sea
aggtccagaaggcaaagttgtaaaaagattatatgttgaagaatcttctaatatagaaaaagaattttatttgtcatgtttagttgatagagctagttcaaaaattgtatttatatcaagcgaccaaggaggaatggatatagaagaggtagctaaaaagaatccagaaaaaattgtaaaaacaaaaattaattactctaaagaagtttcaaatgaagattgtgaaaaagtaataaaaatattctctctaaatgaaaaaactaaagaacaaggaaaaaacttaataaaagcaatttacaaaatgtttataagcactgatgctagcatggttgaaataaatcctttaattttaactaaagaacaaaatattatttgcttagatgcaaaagttaattttgatgataacgctttatttaaacatccagaaattgttgcattaagagatttaagtgaagaagatccaacagaaatagaagcaagcaaatacaatttgtcttatataaagttagacggcagtattggttgtatggttaatggagcaggcttagctatggcaacaatggatattataaagttatatggggaagaacctgctaactttttagatgttggtggaggtgcctctaaagaaaaagtttctgctgcactaaaattaattctttcagatagaagcgttaaaggaatattaataaatatttttggtggaataatgagatgtgatgtactcgctcaaggagtagtcgatgctgcaaaagaaatggatataaatattcctctagtagttagattagctggaactaatttaaggaaggaaaaa

SEQ ID NO: 310047 - DNA, 632 bp, Unknown
  Bacterial polypeptide expressing nucleotide sequence isolated from the Sargasso Sea
aatgaatatacacgagtaccaagctaagcaaattttaaaaaagtatggtgcagctgtactagaaggtgtttcttcacattcagttgaagaattgttggaaaaagcaaagtcattaaaaacagaaaaatttgttttaaaagcacagattcatgctggtggaagaggtaaagcaggaggggttaaaattgtaaatacaatagatgagctaagttcagcagctaatgaaatgttaggaaaaaaattggtaactcatcaaacgggacctcaaggaagagaagtcaaaagactatatgttgagtcatcttcaaaaattagtaaagaattttatctttcttgtttagtcgatagggcaagttctaagattgcatttatttctagcgatcaaggtggaatggatattgaagaagttgcaaaaaataatcctaaaaaaattgtaaaaacaaaagttaatttagaagataaaatatcagatgaagattgtgaaaaaattgttgaaatatttaatttagatttagatgcaaaaaagcaatcaataaatttaattaaatcaatttataaaatgttcattgataccgatgctaatttagttgaaataaatccattaattttaacgcaagaaaataaaattattt

SEQ ID NO: 310048 - DNA, 637 bp, Unknown
  Bacterial polypeptide expressing nucleotide sequence isolated from the Sargasso Sea
cgcaattattgaagcaattgatgcatcaattgaacttattgtctgtattacagaaggtattcctattcaagatatgcttaaagttaaacaaaaattaataaagtcaagttctagactgatcggtccaaactgccctggcattataactcctgatgagtgtaagatcggtattatgcctggtaatattcataaaaagggatctgttggtatagtttctagatcaggtacactcacatatgaagctgttgcacaaacaacggaaaatggacttggccaatcaacttgcattggaattggcggagatccaatcaatggcacaaattttatagattgtttagatttatttttaaatgatgaagaaactaaatcaattttaatgataggtgaaattggaggtactgctgaggaggaagcatcagaatttgttaaaaatcataaaattaagaaaccaatggttggatttattgcaggtgttacagctcctcccggaagaagaatgggccatgctggagctattatttcaggtggaagaggtggagcgcaagataaaataaaaaaaatggaagattgtggtataactattgctaactcaccttcgaaaattggcaaaactctttttgataaattgtctaattga

SEQ ID NO: 310049 - DNA, 843 bp, Unknown
  Bacterial polypeptide expressing nucleotide sequence isolated from the Sargasso Sea
aattttacttatcgtgtttggttgatagagcaagttctaaaattgcatttatatcaagtgaccaaggagggatggacattgaagaagttgcaagcagttcacctgaaaaaattataactacaaaagttgatatgagtgatgaaatttccgagtcagattgtgaaaaaataattaatatttttaatttaaatgaagatacaaaaaaacaagcaataacattaattaaatcaatatataaaatgtttgtgaatactgatgcaaacatggttgaagtaaatccattaattttgacaaaagaggaaaaaattgtttgtttagatgcaaaagttaatttcgactctaacgctttattcaggcatccagaaattgttgaattaagagatttaaatgaggaagatcctaccgagatagaagctagcaagcatgatcttgcatatatcaagctagatggaagtattggctgtatggtaaatggagcaggattagcgatggcaacaatggatataattaaattgtatggtaaagagccagcaaattttttagatgtaggcggtggcgcatccaaagaaaaagtatctgctgcattaaagataattctctcagataaaaatgttaaaggtattttaattaatatttttggaggaataatgagatgtgatgtccttgcccaaggagtagttgatgcagctaaagaaattaatattagtgtccctttagttgtaagattagcaggtacaaatttcaaggagggaaaagaaattcttgataattctggattaaaattaatttctgcagaaaatttagatgatgctgctaagaaaattgttgaggcgataaaataaa

SEQ ID NO: 310050 - DNA, 439 bp, Unknown
  Bacterial polypeptide expressing nucleotide sequence isolated from the Sargasso Sea
cagaattgaagcaagtaaatttgatttagcttatataaaattagatggaaatattgggtgtatggttaatggtgctggcttagctatggcgacaatggatataattaaattatatggtcaagaaccagcaaattttttagatgtaggtggaggtgcctctaaagagaaagtttcagctgcttttaagataattctatcagatcaaaatgttagaggaatattaataaatatttttggggggatcatgagatgtgatgtacttgctcaaggagttgtcgatgcagcaaaagaaatcaatattagtgttccacttgtggttagattagcgggtactaactttaaagagggaaaagaaatattagataattcaggattaaaattgatctcagctgaaaatcttgatgatgctgcaaaaaaaatagttgaggcaataaaatag

SEQ ID NO: 310051 - DNA, 659 bp, Unknown
  Bacterial polypeptide expressing nucleotide sequence isolated from the Sargasso Sea
aatgtcagttcttgtaaataaagaaactaggttaatttgtcagggttttactggttcgcatggaacatttcactctgagcaagcaattaaatatggaacaaaattagtaggtggagtcactcctaaaaaaggaggacaaaaacatttaggattaccagtttttaatacagttaaagaggctaaaaactctgagggcgccaacgccacgatgatatatgtgccagcgaagtttgctgctgcagcaatccttgaggcaatagaagcatcaatcgagttaattgtttgcattactgaaggaatcccaattcaagatatgttgagagttaaacaaaaattatcaaaatcaaattccagattaattggacctaattgtcctggaataataactcctgatgaatgtaaaattggtattatgccaggcaatatccacaaaaaaggttcagttggtattgtctctagatctgggactttaacctatgaggcagttgctcaaaccacagaaaatagattaggtcaatctacttgtataggtattggtggagatccaataaatggtacaaattttattgattgcttagatttatttttgaatgatgatgaaacagagtctattttaatgataggagaaatcggaggaacagccgaagaggaagcagcag

SEQ ID NO: 310052 - DNA, 487 bp, Unknown
  Bacterial polypeptide expressing nucleotide sequence isolated from the Sargasso Sea
atgaatatacacgagtaccaagctaaagaaattctcaaaaactatggattgcctgttcttaaaggtaagtcatataataaaaatcttgaaactcttgactcagatataaaagatttaagaggaccaccttgggttgttaaatcacaaattcatgcaggtggtagaggtgctggatattttaaaaagtcttttaatgataaaggtggtgtccaggttgtttttgaacaaaatgaagtttcttcgatcgctcaatcaatgatgggcaatgtattagtaacaaaacaaacaggcgaaaaaggtaaaatagtaaatcacatttttattgaagaagggtgtgatattgaaagagagttttatcttagcttactagttgatagaaataactcaaaagtaatgatgatgatttctgctgctggaggtatggatatagaagaagtcgcgataactaatcctgaacaaataataaatattcattttattaaataca

SEQ ID NO: 310053 - DNA, 564 bp, Unknown
  Bacterial polypeptide expressing nucleotide sequence isolated from the Sargasso Sea
cacttgttataactgacggcggagatctgttatgtttggatgcaaaagttaacatagactcaaatgcactttttaggcatcctgaattagtagaaatgtatgatgaaacccaagaggaccctcaagaggcggaggctgcaaaaaatgatttaagttatgtttctttagatggaaatataggctgtatggtaaacggagctggcttagcgatggggacaatggatattataaaattttatggaggcagtcctgcaaattttctggatgttggaggaactgcaactcaagaaagagttgctaaagcatttaagataattctcgaagatccagacgtgaaagttgttttagtgaatatatttggaggtattgtaaggtgcgatttaattgctaaaggaattattgcagctatcaaagaagttgaagtaaaaataccagttgtagttcgattagaaggtaatagtgctgataaaggttcaaaaattttatcaaaagcagatattaaaatagatagtattaatgacttagctgatgcagccaaaaaagcagtggaactcgctaaatgag

SEQ ID NO: 310054 - DNA, 619 bp, Unknown
  Bacterial polypeptide expressing nucleotide sequence isolated from the Sargasso Sea
aatgaatattcacgagcaccaagcaaaagaaattttaaaacaatttaatgcgccaatcactaaaggtgtggttatttttgatgtagaaaacattcaagaaaaagtaaaaatattaaaaacaagtaagctagttatcaaagcccaaatccatgcaggcggaagaggaaaagcaggaggggtaaaactcgtagataaaaacaatattttggaagaaacaaaaaaaatgttcggtaaggttcttgtaactcatcaaacaggtccagaaggcaaaaaagtaaaaagactttacatccaggaagcttatgacattgaaaaagaattatatctttcttgtttagtagatagagagacatctaaaatagcttttataagcagtttagaaggcggagttgacatagagtctgttgcaaaaaaaacgccagaaaaaattaccacaattaaaatagatttagaaaaggaaataaaaaaatcggatatagataaggttataaaaatatttccatttgaaaatagtcaaaagaaagatgcaagcgatttagttagagcaatgtataatattttagttcaaaaaaatgcatctttaattgaaataaaccctttagtagtaaccaaacaaaaa

SEQ ID NO: 310055 - DNA, 874 bp, Unknown
  Bacterial polypeptide expressing nucleotide sequence isolated from the Sargasso Sea
atgtcagtattaattaataaaaacacaaaagttatttgccagggttttactggttctcaaggtacatttcactcagaacaagctataaaatatggaactcaaatggttggtggggtgacaccaaagaaaggtggccaagagcatttagggcttcctgtgttcaatagtgttaaagaggcaaaagacaacacagatgcaaatgcaactgtaatatacgttccgccaccttttgcagctggtgctataattgaagcgattgatgcagatatggaactaattgtttgtataactgaaggagtaccagtacttgatatgatgcaagtaaaaagaaaattggaaaaatcaaaatcgcgtctaattggacccaactgccctggaataattacacctgatgaatgcaaaataggcattatgccaggtcatattcaccaaaaaggaaaaataggagttgttagtagatctggcacattaacatatgaagcagtagcacaaacttctgctgtaggtctaggtcaatcgacttgtattggtattgggggtgatcctattaatggaacaaactttatagattgccttgatctttttttaaaagatcccgaaactgaaggtatcataatgattggagagattggtggaactgctgaagaggaagctgcagaatttattaaaaaatctgaaataaaaaaaccagttgcctcttttatagctggtgctagtgctcctgctggaaaaagaatgggtcatgcaggtgcaattatttctggtggaaaagggaccgcagagtcaaagtttagtgctttagaagaagcaggggttcatatatccaaatcaccagcaaaactaggtgagacaatcaaagaagctttaaactaat

SEQ ID NO: 310056 - DNA, 607 bp, Unknown
  Bacterial polypeptide expressing nucleotide sequence isolated from the Sargasso Sea
gatcaggaactctacttaggtgcggtaatcgatagagcttctcagcgccttgtagttatggcatcaacagaaggtggagttaacatagaagaagttgctgaaaagacacctgagaaaatttttaagcaagagatagatcccattaacggaccagatgattcacaagcaagatctctatctgaggaattaggactgaatgcactacaagctgatcaatttttaaatatttttaatggactggtaaatttatttttagaaaaagatttatctttagttgaagttaatcctttagtcataactgaccaaggagatttaatttgtttggacgcaaaaattaatgtggactccaatgcactctacaggcaagaagatgtggagaccttaagagatccttctcaagaagatcccagagaggcaagggcagctgaatgggatttgagttatgttgccctggatggaaatattggatgcatggtcaatggtgcaggactggctatgggtacgatggacattataaaactccacggtggagaaccagcgaactttttagatgtcggaggcactgcagattcaaaaagagtagctgaagcttttaaaatcattcttt

SEQ ID NO: 310057 - DNA, 772 bp, Unknown
  Bacterial polypeptide expressing nucleotide sequence isolated from the Sargasso Sea
aatggacatcgaaaaagttgcaagagaaacaccaaataaaataattactaccaaagtagattttgaaaatgaaatttcagataatgactgtgaaaaaattattaaaatatttaatctaaataatcaaaatagaattgaagccataaaattggttaaatctatatataaaatgtttattaatactgatgctagtttggttgagataaatcctttaattttgactaaagaaaataaaatagtttgtttagatgcaaaaattaattttgatgataatgcattatttaaacataaagaaattggtgatcttagagatttaaatgaagaagatcctacagaaattgaagctagcaaacatgacttagcctatattaaattagatggaagcattgggtgtatggttaatggcgcaggattagctatggcaacaatggatataattaaattatttggtgaagaaccagctaattttttggatgtaggaggtggagcatcaaaagaaaaagtttctgcagcttttaaaataattttgtcagacaaaaatgtaaaaggaattttaataaatatttttggaggcattatgaaatgtgatgttcttgcccaaggagtagtggatgcagctaaagaaaccaaaattcatgtaccgttagtagttagactagctggcactaactttgaacaaggtcaaaaaattctagataattcaggtttaaaaataatttcggcatctgatttatctgatgctgcaaaaaaaattgttgaagaaataagataa

SEQ ID NO: 310058 - DNA, 804 bp, Unknown
  Bacterial polypeptide expressing nucleotide sequence isolated from the Sargasso Sea
tatgtcagtattaattaataaaaatacaaaagttatttgccagggttttactggttctcaaggtacatttcactcagaacaagctataaaatatggaactcaaatggttggtggggtgacaccaaagaaaggtggtcaagagcatttagggcttcctgtgtttaatagtgttaaagaggcaaaagacaacacagaagcaaatgcaactgtaatatacgttccacctccttttgcagctggtgctataattgaagcgattgatgcaaacatggaactaatcgtttgtataactgaaggagttccagttcttgatatgatgcaagtaaaaagaaaattagaaaaatcaaaatcgcgtttaattggacctaactgccctggtataattacacctgatgaatgcaaaataggtattatgccaggtcatattcaccaaaaaggaaaaataggagttgtcagtagatctggcacactaacatatgaagcagttgcacaaacttctgctgtaggtctgggtcaatcgacttgtattggtattgggggagatcctatcaatggaacaaactttatagattgccttgatctttttttaaaagatcccgaaactgaaggtatcataatgattggagagattggtggaactgctgaagaggaagctgcagaatttattaaaaaatctgaaataaaaaaaccagttgcctcttttatagctggtgctagtgctcctgctgggaaaagaatgggtcatgcaggtgcaattatttcgggtggaaaaggcaccgcagagtcaaagtttagtgctttaaa

SEQ ID NO: 310059 - DNA, 811 bp, Unknown
  Bacterial polypeptide expressing nucleotide sequence isolated from the Sargasso Sea
gacacatcaaactggagaaaaaggacaaaaggttaaaagagtatatgttactgaagcctttgatatcgctagagaattttatgctgccataacattagatagaagtaagtgtatggatgtatttatggtttctagtgagggcggtgttgaaattgaaaaagttgctgaagaagatcctgataaaattgcaaaagtttggatagacccatttcttggaatgaaaacttttcaagccagaaaattagcttacacgttgggattagaaggtgatgcatttaaatctgctacaaaaatttttacacaaatgtacaaatgctatcaaagtactgatgctactattgttgaggtaaatcctttggtattgactcaggatgggaaaataattgttcttgattcaaaaatcaactttgacgataatgctctttttcgccataagagtattgctgaaatgcgtgatcttgacgaggaagaccctacagaagtggaagcaggaaaatacaatctaaattacattaaattagatggaaatgtaggatgtatggttaatggagctggccttgcaatggctacaatggatatcatcaaaataactggtggtgatcctgcaaattttcttgatgttggtggtactgcttcttcagagactgttaaaaatggttttcggattattttatctgatgaaaacgtaaaagctgttctaatcaatatttttggtgggattgttaggtgtgaccgtgtggcagatggtgttgtccaagcggtgcaagaattaggtctgcaagttcctgttgtagttagattggaaggcaca

SEQ ID NO: 310060 - DNA, 681 bp, Unknown
  Bacterial polypeptide expressing nucleotide sequence isolated from the Sargasso Sea
gacgaggccgtcaaggtggcagaagagctcggcggcccggtttgggtcgtgaaggctcagattcacgcgggtggccgtggcaagggtggcggcgtgaaggtggcgaagtcgatcgagcaggtccgcgaatacgcgaaccagatcctcggcatgcagctcgtcacgcaccagaccggtccggaaggccagaaggtcaaccgtctgatgatcgaagaaggcgccgacatcaagcaggaactgtatgtcagcctcgtcgtcgaccgcatctcgcagaagatcgtgctgatgggttcgagcgaaggcggcatggacatcgaagaagtcgccgaaaagcacccggaactgatccacaaggtcatcgtcgagccgtcgacgggcctgctcgacgcgcaggcagacgacctcgccgcgaagatcggcgtgccggctgcttcgattccgcaagcgcgcgcgatcctgcaaggcctgtacaaggcattctgggaaaccgacgcatcgctggctgaaatcaacccgctgaacgtttccggcgacggcaaggtcatcgcactcgacgcgaagttcaacttcgactcgaacgcgctgttccgccacccggaaatcgtcgcgtaccgcgatctggacgaagaagaaccggctgaaatcgaagcgtcgaagttcgacctcgcgtacatctcgctc

SEQ ID NO: 310061 - DNA, 670 bp, Unknown
  Bacterial polypeptide expressing nucleotide sequence isolated from the Sargasso Sea
taaaatattttcattcaataaaaatcaattaaaggatgcaaaaaatttggtaaatgctttatttaacattttaataaataaagatgcctcattaatagaaattaatccattaataattacaaaacaaaaaaaattaatatgtttagatgcaaaaatgaattttgatgataattcaatgtttagaagaccagaaatttttaaattacgtgacttaagcgaagaagaagcccctgagatcgaagctagtaaatttggattagcttatatcaaattaaatggttcaatcgggtgtatggtaaatggagctggattagcaatggcaacaatggatataataaaattgcacggacaagagccagcaaattttcttgatgtaggcggtggtgccactaaagaacaggttatagcagcttttaaattaattttgtctgataaaaaagtgaaaggtatattaataaatatttttggtggcattatgcgatgcgatgtcctcgcgcaaggagttgttgaggcagctaaagagaccaatataaaagttccattagtggttaggcttgctggtacaaatttcaaagaaggaaaagagatattagataaatcaggtttaaaaattttatcagcatcagatttaaatgatgcagcaaaaaaaattgttaatgcaataaaataa

SEQ ID NO: 310062 - DNA, 745 bp, Unknown
  Bacterial polypeptide expressing nucleotide sequence isolated from the Sargasso Sea
atgaatatacatgaacatcaagcaaaagagttacttctagagtttggtgcaccggtttcaaaaggtatcgttatatatgacctcaatgatatagatgaaaaaataaaaattttaaaatctaaaaaatttgttcttaaagctcaaatacacgcaggtggcagaggtaaagcgggtggtgtaaaattagtaaaggacattgatgagttaaaaaaagaagcaaataaattattaggtaaaaaattagtaacaccacaaactggcccagctggaaaaaaagttcaaagattgtatatcgaagaagcttcggagatagataaagaatattacctttcttgtttagtagacagacaaagctccaaaattgcatttattagcagtaaagaaggaggtatggatattgaagaagtagctgttaaaagtcctgagaaaataattactacaaaaataaatttgactaaagatttagagataaatgatattgaaaaaattttaaaacctttcgatctaaatgaatctcaaaaaaaagaaggttctcaattggtaaaatcaatctacaagactttaactttaaaggatgcaaatttaatagaaataaatccgctaattctcactaagttaggaaatttaatatgtttagatgctaaaataaattttgatgataatgcaatgtttagaagacctgaaatattaaaattaagagatttaaatgaagaagatccaaaagaaatgaggctagcaaacatga

SEQ ID NO: 310063 - DNA, 610 bp, Unknown
  Bacterial polypeptide expressing nucleotide sequence isolated from the Sargasso Sea
aatgagcattctagttaataaagataccaaattgattgtacagggcttcacagggtcgcaaggtactcttcattcagaacaatctattgaatatggaacaaatattgttggcggcgtcacacctggaaaaggaggtacagagcatttgggaaaaccagtatttaattcggtgaatgaagctgttgaagaattagatccaaatgcatcaattatttttgtccctgcaaaattttgtaaggaatccataatagaatctactgaagctggtattaaattaattgtatgtatcactgagggcatccctacacttgacatgcttgaagtaaaaaaaagaattgatgatttaggagtaagactaattggaccaaattgcccaggtgtaattacacctggcgaggcaaaattagggataatgccaggtaatattcataaaccaggttcaataggtattatttctagatctggaacccttacttatgaggcagtaaagcaaacaactgatcttggttttggacaaagcagttgtgtgggcattggtggcgatccaattccaggatcatctttcatagatatgctaaagcttttgaagatgatgatcaaaccgaagcaa

SEQ ID NO: 310064 - DNA, 803 bp, Unknown
  Bacterial polypeptide expressing nucleotide sequence isolated from the Sargasso Sea
aatgtcagttttagtcaataaaaatactagattaatctgtcaaggatttacaggttcccatggaacatttcactctgagcaagcaatcaaatatggaacaaatttagtaggtggagtgacaccaaaaaaaggtggccaaaaacatttgggccttccagtttttaatacagtgaaagaggcaagagaatccgagggagctaatgcaactatgatatacgtcccagctaaatttgcagcctcagcaattattgaagcaatagatgcatctatagaactaattgtatgtataactgaagggattcccattcaggatatgttaaaagttaaacagagattgaataattcaaaaagtagactgattggtcccaactgtccaggtgtcataactcctgatgagtgtaaaattggaataatgcctggcagcattcataaaaaaggaacagttggaatagtttcaagatcaggaactttaacttatgaagcagtagctcagactacagaaaatggattaggacaatcaacttgtattggaattggaggtgatcctatcaatggtacaaattttatagattgtctagatctatttttaaacgacgtggatactcaatcaattttaatgattggtgaaattggagggacagctgaggaagaggctgcagatttcattaaaaatcataaaataaaaaaaccaattgttggatttatagcaggtgttactgccccaccaggacgaagaatgggtcatgcaggagccataatttcaggtggcaaaggtggcgcaaaggaaaagattaaaaaaatgg

SEQ ID NO: 310065 - DNA, 416 bp, Unknown
  Bacterial polypeptide expressing nucleotide sequence isolated from the Sargasso Sea
ctacatcaagctcgaaggttcgatcggctgcatggtcaatggtgccggtttggcaatgggtacaatggacatcatcaaaacctatggaggagaacccgcgaatttccttgatgtaggtggcaccgcgaccgaagaaaccgtagagaagggctttcagatcatcacccaggatcccaacgtacgatgcattctgatcaatatattcgggggcattgttcgatgtgacatggttgcatccggaatcgtcgaggccttccgtaaagtcaatttgcagattcctgtggtagtaagactcgaagggaccaatgcagaagaagcccagaagatcatcggatcttctggtttcggagatcgtttacaaatggcggacgggcttggagaggccgccgaaatggctgttgctgctgcggcctagt

SEQ ID NO: 310066 - DNA, 763 bp, Unknown
  Bacterial polypeptide expressing nucleotide sequence isolated from the Sargasso Sea
tcgccgaagaactcctgaaaaaatatttaaagctgaaatagatcccatcaaaggtcccaaagaatcacaagctaatgatctttctaaaaatcttggactcaatgaaacacagtgttcgcagtttagagatatcttcaatggcttaattaaactgtttttagaaaaagatttgtctctagttgaagttaatcctcttgttattactgagtctggagatttaatttgtttagatgcaaaaattaatgttgactccaatgccctctatagacaggaagaggttgagaaattaagagatccttcacaagaggaccaaagagaagctaaagcagctgaatgggacttgagctatgtagctctagatggaaacatcggctgtatggtgaatggagctgggctggccatgggcactatggatatcattaaattgcacggaggtgaacctgccaatttcttggatgtcggaggaactgcagactctaaaagagttgctgaggcttttaagataatcctctctgatgagaatgtgaataccgtcttaatcaacatatttggaggtatagttagatgcgatgttattgcagatggaatagttgaagccctaactgtaatgggtgtttctgtaccagttgttgttagactggaaggaaatagtgcggaaaaaggtctcaaaattcttgatgaatgtgaactcaatataattccggcttcaaacttagaagaagctgcaagccttgctgtcaaagcatctaagggagagatttaa

SEQ ID NO: 310067 - DNA, 760 bp, Unknown
  Bacterial polypeptide expressing nucleotide sequence isolated from the Sargasso Sea
tttactggctcgcacggtacttttcattcggagcaggctataaaatatggaaccaatcttgttggtggagttacaccaaagaaaggtggacaaaaacatttagatagaccagtttttaacagtgttttagaggcaaaatatgaagtaggagcaaatgcaactatgatttatgttcctgctaaatttgcagcagcagcaatcattgaggctattgatgcatcaattgaacttattgtttgtataactgaaggaattccaattcaggatatgcttaaggtaagacaaaaattaagtggctctaatagcagattaattggacctaattgtccaggaataattacaccagatgaatgtaaaattggcattatgccgggaagtattcacaaaagaggaagtgttggaattgtatcaaggtcaggaacattgacatacgaagcagtagcccaaacaactgaaaatggacttggtcaatcaacttgcattggtattggtggtgatcctattaatggaacaaattttatagattgtttagatttatttttaaatgactctgaaacagaatctattttaatgataggtgaaattggaggaacagccgaagaggaagcggctgaatttataaaaaatcataagatcaaaaaaccaattgttggttttattgctggaattactgctcctccaggaaggagaatggggcatgctggtgccattatatcaggtggcaagggtggagccgaagataaaataaaaaaaatggaag

SEQ ID NO: 310068 - DNA, 766 bp, Unknown
  Bacterial polypeptide expressing nucleotide sequence isolated from the Sargasso Sea
tcaaaatcaattgtagttatggcttctccagaaggaggagttaacatcgaagaagttgcagaaaaaactcctgaaaatatttataaagcttccgtaaaaattgatcaagaaccttccaaagatgatgcactaagtttagccaagggccttaatcttaataaaaaccaaacagaacaattcataggaatttttaaaaatttaactaagttatttattgaaaaggatttagctttagttgaaataaatcctttggttatcgatgagaatcaaaatttaaagtgcttagatggaaagataagtgttgatagcaatgctttatttagacaagaagaaatgaagaatcttagagacacgtctcaagaagaactaagggagcttaaagcttccgaatgggatttaaattatgtttctcttgatggagaaataggatgcatggtaaacggagcgggattggcaatggcgactatggacattataaaaatatctggtggatttcctgctaattttttggatgtaggaggaggagtaaatcaaaaaagtgtcgctgaagctttcaagatcattttgtcagacgataatgtaaaagtaattttaataaacatctttggcggaatagtgaaatgcgatgtagtagctgaaggtattatttctgccgtcaaagaagttggcgtcaacataccgattgtcgtcagattaaaaggaaataatgctgacattgctcaaagtatgttaaccgatagtgaattgaacatcgtttttgattctg

SEQ ID NO: 310069 - DNA, 874 bp, Unknown
  Bacterial polypeptide expressing nucleotide sequence isolated from the Sargasso Sea
gaagaattattacaaaaggcaaaatcattaaatacagaaaaatttgttttaaaagctcagattcatgcgggcggacgaggaaaagctggagggataaagattgtaaatacaatagaagagctaaattcagcagctaaagaaatgttaggaaaaaaattgataactcaccagacgggaccccaaggaaaagaagttaaaagattatatgttgagtcatcttcgaaaattgaaaaagaattttatctttcatgtttagttgacagagcaagttctaagattgcatttatttcaagtgatcaaggtgggatggatattgaggatgttgcaaaaaataacccaaaaaaaattataactacaaaaattaatttagacgataaaatatcagataaggattgtgaacaaattgtagaaatatttaatttaaatatagatgcaaaaaaacaagctataaatttaattaaatcaatatataaaatgtttattgatatagatgcaaatctggttgaaataaatcctttgattttaactaaagaaaataaaattatttgtctagatgcaaaaatgagctttgatgacaatggattatttagaaatccagagattttaaatttaagagacttaaatgaggaagaagagatagagatagaggcaagcaaacatggtttatcttatataaaattagaaggtagcataggatgtatggtgaatggcgcaggtttagcaatggcaacaatggatataattaaattatatggagaagagccagcaaattttttagatgttggtggaggagcatcgaaagaaaaagtttcagcagcatttaaaataattttgtcagataaaaatgtaaaaggaattttgataaatatttttg

SEQ ID NO: 310070 - DNA, 925 bp, Unknown
  Bacterial polypeptide expressing nucleotide sequence isolated from the Sargasso Sea
aatgaatattcacgagcaccaagcaaaacaaattctaaaaaagtatggagcgaatgtacccgagggagtatttgcatttaatgtatccgatcttttgcaaaaaactaaagaattgaaaactgataagtatgttcttaaagctcaaattcatgctggtggaagaggtaaggctggtggagtaaaaattgttgataatttagaaaatttagaaaaagaagcaaatattttgcttggcaaaaaactaattactcatcaaacaggacctttaggtagagaagtaaaaagactatacgttgagggggtatctaacattagtaaagaattttatctttcttgcctagttgatagagcaagttcaaaaattgcatttatttcaagtgatcaagggggaatgaacattgaagaagttgcccaaaatacacctgaaaaaatcttaacaactaaagtcgattttaaccaagaaatttccgaggtcgattgtaagaaaattattaaggtttttgaattagacgataattctagttcagaagctataagcttaataaaagcaatttataaattgttcatagaaaatgatgcaaatttagtagaaattaacccacttattttaacgaaagaaaataaagtagtttgtcttgatgcaaaaatgacatttgatgaaaatgcattatttaaacatcctgagatacaagaattaagagactataatgaggaagaagcagctgaaattgaagcaagcaaacatgacttggcatatataaaattagatggaagtataggatgtatggtaaacggtgcaggattagcaatggctacaatggatatcataaagctttatggtgaagagcctgctaattttttagatgtaggaggtggagcatcaaaagaaaaagttctgctgcattcaaaattattttatcagata

SEQ ID NO: 310071 - DNA, 448 bp, Unknown
  Bacterial polypeptide expressing nucleotide sequence isolated from the Sargasso Sea
aaaagaggaagtgttgagattgtatcaaggtcaggtacattgacatatgaggcagtagctcaaacaaccgaaattggactgggtcaatcaacttgtattggtattggtggtgatcctattaatggaacaaattttatagactgtttagatttatttttaaatgatgatgaaacggagtctattttaatgataggtgaaattggaggaactgctgaagaggaagctgctgaatttataaaaaatcacaagatcaaaaagccaatagttggatttattgcaggaattaccgctcctccaggcagaagaatgggacatgctggagctataatttcaggtggcaaaggaggagcagaagataaaattaaaaaaatggaagaatgtggtattactgttgctaaatcaccctcaattattggaaaaactttatttaataaactgtctaattgaa

SEQ ID NO: 310072 - DNA, 655 bp, Unknown
  Bacterial polypeptide expressing nucleotide sequence isolated from the Sargasso Sea
aatgatagagtaaagacacaagcaatatcattagtaaaatcaatttatgaaatgtttataaatacggatgcaaatatggtagaggtgaatcctttaattttgacaaaagaagaaaaaattatttgtttagatgcaaaggtaaattttgattctaatgctttatttagacatccagaatttgttgagttgagggatctaaacgaggaagatccaacagaaatagaggctagcaaacatgatttggcttatattaaattagatggaagcattggttgtatggtcaatggagcaggtttggccatggcaactatggatataataaagttatatggaaaagaacctgctaattttctagatgttggagggggtgcttcaaaagaaaaagtctctgcagctttaaaaataattttgtcagataaaaatgttaaaggaattttaattaatatttttggaggcataatgagatgtgatattttagcccaaggagtagttgatgcagcaaaggaaataaatataaacgttcctttagttgttagacttgcaggtacaaatgttaaagagggtagagaaatactagataattcagggttaaaattaatttctgctgataatctagatgatgcagccaaaaaaattgtagaagtgattgaataat

SEQ ID NO: 310073 - DNA, 856 bp, Unknown
  Bacterial polypeptide expressing nucleotide sequence isolated from the Sargasso Sea
aaagcttgcacataatcgggatgatgtagagtctcttgccaaacaaattttaggaatgaatttggttactcaccaaactggcccagaaggaaaaaaagtacaaagattattaatcgaaactggaatcgatattgctaaagaattttatgctggtattgttcttgaccgaaaagagaaaaaatttgtattcatggtttctactgaaggtggcgtagagattgaaaaggtagcagctgaatctcctgataaaattattaaagagtggattcatccagaagatgggctaacaaaagatcaggcaaaaagattatgtgatgccctcagcttgaaagggattcagcaagattctggaattgaaattttcactgctttatggaaggcatttaatagtcttgattgttctctaatggagattaatccattagttttaactaaaaaagatgaagtcattgctttagatgcaaaaataaattttgatggtaatgggttatttcgtcatccggaattatctgaattgcgagatgaaacagaagaagaccctgctgaagctgaagccagttcatacaatctaaactatataaagttagatggaaatgtgggttgtatggtaaatggagctggattagcaatgggaacaatggacattatcaaacttaaaggtggtgaacctgcaaactttttagatgtaggtggtgtagcaaatcctgaaactgttgcaaatggatttaagattattttatctgatccgaatgtaaaatctattttaatcaatatttttggcggcattgtgcgatgtgatcgtgttgcgcaaggtgtaattaatgcgatggaaaacataagtgttaatgtacctgtt

SEQ ID NO: 310074 - DNA, 583 bp, Unknown
  Bacterial polypeptide expressing nucleotide sequence isolated from the Sargasso Sea
ggaataccaattttagacatgcttaaagtaaagcagaaattatcgaaatcaaactcaagattaatagggccaaattgccctggaattataacgccagacgaatgtaagattggaataatgccaggtaacattcacaagaaaggttcagtaggtattgtttctaggtctggaactttaacatacgaagccgtagcccaaacaacaacaaatggtcttggccaatcaacttgtataggtattggtggagacccaataaatggaacgaattttatagattgtttagacttatttttaaatgatccagaaacagagtctattttaatgataggggaaataggaggaacagcggaggaagaggcatctgaatttgtaaaaaatcataaaattaaaaagccaatggttggatttatagctggtgttacagctccacctggtagaagaatgggacatgcaggcgcaataatttcagggggaaaaggaggcgctagagaaaaaattaaaaccatggaggatgcaggaattataatagcaaaatctccagcagaaataggaaaaacacttcttcacaaattgtctaattgaa

SEQ ID NO: 310075 - DNA, 563 bp, Unknown
  Bacterial polypeptide expressing nucleotide sequence isolated from the Sargasso Sea
ctttaatttaaccaaagaaaaaaaaataatatgtttagatgctaaagttaattttgattcaaatgctctatttagacatccagatattttaaaattaagagatttaaatgaagaagaaccaacagaaattgaagctagcaagcacgatcttgcttacataaaattagatggaagtatcggttgtatggttaatggagctggtttagcaatggctactatggatataataaagctttacggaaaagaaccagccaattttttagatgtaggtggaggagcttcaaaagaaaaagtttctgcagctttaaaaataattctttcagataaaaatgttaagggtattttaattaatatttttggtggaattatgagatgtgatgttctcgctcaaggagtagtagatgctgcaaaagaaataaatattaatgttcctttggtggtaagacttgctggaacaaactttaaagagggaaaagaaatattggataattcaggattaaaattaatttctgcagaaaacttagatgatgctgcaaagaaaattgttgaagctataaaataat

SEQ ID NO: 310076 - DNA, 486 bp, Unknown
  Bacterial polypeptide expressing nucleotide sequence isolated from the Sargasso Sea
atcctgaaatattagaattaagagatataaatgaagaaaatccttcagaaattgaagcgagtaaacataacttatcttatattaagctcggaggtacaattggatgtatggttaatggtgctggattagcaatgtcgacgatggatattattaaattatatggaaaagaacctgcaaattttttagacgtgggcggtggagcttcaaaagaaaaagtatcagctgcatttaaaattatactttcagataaaaatgtaaaaggtattttagttaatatttttggaggaatacttcgttgtgatgaattatccaaaggtttaattgaagcggcaaaagaagttaatttaaaagtacctttggtggttagacttgcaggaacaaattttgaagagggaagaaaaattttagataattctaatttaaaaattatctctgcttctgatttagatgatgctgcaaaaaaaattgttgaggctgtaaattaga

SEQ ID NO: 310077 - DNA, 844 bp, Unknown
  Bacterial polypeptide expressing nucleotide sequence isolated from the Sargasso Sea
tgcaactgataaattgctaggtaaaaaattaattacaaaccaaactggtccagagggtaagataataaatagaatttatattgaagaagcaactgatatcaaacatgaattatatttaggtttagtctttgatagatcttcagaaagtataatggttgtagcctcaacagaaggaggaatgagtgttgaagaaatttcaaaagaaaaacctgaaacaattatacgatctaaaatagaagtagcagttggtattcaacaatttcaagcaagagaaatagcttttggtttaggaatagaatccaaattgatctcaagagctgcaaatacaattattggttgttataaagcttttagtgagcttgatgcaacaatggttgaagttaatccattggttgtatcacacaaagatgaaatattagcattagattgtaaaatgagttttgataacaatgcaatgtttagaagagatgaaattgcagaacttagagataaaacacaagaaaattcaaatgaagtttatgcttctgacagaggaatgaattatgtaagcttagatgggaatatcggtaatattattaatggtgcaggcttagcaatggcttcaatggatatgataaaacttgctggtggtcaacctgcaaattttttagatgttggcggaggtgcaacaccagaaaaaatagttaaagcttttaaattaatctctatggacaaaaaagttaaggtaattttagttaatatctttgcagggattaacagatgtgattgggttgcagaaggaattgttcaagctttatcaaaaattgaaattaaacatcctttagttatacgtttagctggaact

SEQ ID NO: 310078 - DNA, 832 bp, Unknown
  Bacterial polypeptide expressing nucleotide sequence isolated from the Sargasso Sea
tagggaatatgacatatcagtttctgaaggcttatctgcctcttctagtcaggaagctgaaaagatagctttatctctaaatgttgataagtgggtagtaaaagcacaagtccatgcgggaggaagaggtaagtctggaggagttgaattagttgatagcatagagaaagttaaagcttttgctgataaatggcttggcaaaaatttagtgactttccaaacagatgagaagggtcaacctgtaaatcaaatcctaatagaaacagttacagatattgataaagaactttatttaggcgcagttattgatagagcttcccaaaggctcgttgtcatggcatcgacggagggaggagtcaatatcgaagaggttgccgaagagacaccagaaaaaatatctaaagctgaaatagatcctattcaaggaccaaatcaacttcaagcagaaaaattagccagtagcttgaacttaaatgaagtgcaaactttacaatttattgagatttttaatggcctagtgaaattgtttatagataaagatttgtctttagtcgaggtgaatcctttagtgattacttcctcaggagatttaatttgtttagatgcaaaaatcaatatagattcaaatgctctttacagacaggaacaaatcttgaaattaagagatccctctcaagaagatcccagagaggcaagtgcagcagagtgggatctaagttatgttgctctagatggaagtattggttgtatggtcaatggtgcaggtttggcaatgggtaccatggatattatcaagttacatggtggcgagcctgccaatttcttagatgtc

SEQ ID NO: 310079 - DNA, 925 bp, Unknown
  Bacterial polypeptide expressing nucleotide sequence isolated from the Sargasso Sea
aatatcagaactaaatagtaaagagttcgttttaaaagcccaaatccatgctggcggaagaggtaaggctggtggagtaaaattaataaaaaacatttctgatttagaacgagaggcaggtaaaatgatgggtaaaacacttataactcatcaaacagggcctgagggtaaagaagtaaagagattatatattgaagaagcttcagatatagcaaaggaattttatttgtcgtgtcttgttgatagagagacagccaaaatagcttttattagtagtacagaaggtggaatggatatagaaaaagtagcatctgaaaatcctgaaaaaatcatcacaaaaaaaatagactttaaaaaagagggaccaagcgaggatgaaattaaagatattatttctgttttcaaattgagtgatgaacaaaaggttacagcttcaaaattagttaaatccctttacaatattataattaataaagatgcaagtctaatagaaatcaatcctttgattatcacaaaatcaaataaattaatttgtctagacgcaaaaatgaattttgatgataatgctatttttagaagaccagaaattttaaaattaagagatctaaatgaggaagacccagctgagatcgaagctagcaagtatgatctcgcatatataaaattgaatggatcaattggttgtatggttaatggtgccggtttagctatggccacaatggatataataaaactatatggtgaagagccagcaaattttttggatgtaggcggtggagcttcaaaagaaaaagttgctgcagcttttaaattaattttatcagataaaaatgtaaaaggaatattgataaatatatttggtggtataatgagatgtgatgtactggcgcaaggtggtagtcgatgcagcaaaagaaacaaatct

SEQ ID NO: 310080 - DNA, 670 bp, Unknown
  Bacterial polypeptide expressing nucleotide sequence isolated from the Sargasso Sea
catgatatatgttcctcctagatttgcagcagaggctattattgaggcaatcgaagctaaaatggaacttatagtttgtataacagagggtattccaattttagatatgatcagagtcaaaaaagaacttagaaaaagcaaatcaagattaattggtccaaattgcccaggtgtaatcactcccgaagaatgtaaaattggaattatgcctggaaatattcatcaaaaaggaacagttggtattgtatctagatcaggaactttaacttacgaagctgttgctcaaacttcatctaatggaatgggccagtcaacatgtatagggatcggtggtgatccaattaatggaaccaattttattgattgtttagaactttttcttaaagatgatgagaccaaatctatagtcatgataggtgaaatcggtggatctgctgaagaagaagccgctgaatttcttagaagagagaaaattaaaaaaccgatggttggttttatagcgggattaacggccccacctggtagaagaatgggacatgcgggggcgattatatcaggcggtaaaggaggtgctgaagataaaattgaaactatgaaatcggctggaattactatatctaaatcaccggcagatattggaaaaacactgtttgaaaaacttaaaggttga

SEQ ID NO: 310081 - DNA, 901 bp, Unknown
  Bacterial polypeptide expressing nucleotide sequence isolated from the Sargasso Sea
tcacgaatatcaagcaaagaaaatactttcaaactttggagtaacaattcctagaggtggaattgtttacagccctgagaatgctgagaataaagcaagagaaattggtggatcgagatgggttgttaaagctcaaatccattctggtgcaagaggaaaagcaggagggataattgtttgtaataccccattagaagttgcccaagcaacagataaattattaggaaaaaaattagttacaaatcaaacaggacctgaaggaaaaattgtaaacagaatttatattgaagaagctacagatattgaaaaggaattatatttaggattagtttttgatagaagctcagaaagtattatggttgttgcatcgacagaaggtggaatgagtgttgaagaaatttcaaaggaaaaaccagaaacaattattagatctaaaattgaagtggctgttggaatgcaaaattttcaagctagagaattagcatttggtcttggtatagagccagaattaattagaagagcttctgatacaattattggatgttataaagcttttagtgaattagatgcaacaatggttgaagttaatccattggttatttcaaaacaaaaacaaattttagcattagactgtaaaatgagttttgataacaatgcaatgtttagaagaagtcaagtttctgagctaagagataaaacacaagaagactcaaaagaaatttttgcatcggatagaggtttaaactatgtcagtttagatggaaatataggtaatattattaacggagcaggtctagcgatggcatctatggacatgattaaattagctggaggagctcctgcaaattttttggatgtaggaggtgggagcacgccagaaaaaatagttaaagccttttaa

SEQ ID NO: 310082 - DNA, 877 bp, Unknown
  Bacterial polypeptide expressing nucleotide sequence isolated from the Sargasso Sea
atgtccattttagtaaataaaaaaacgaaagtaatatgccaaggatttaccggaacacacggaacatttcattctgagcaagcaataaaatatggaacacaattagtaggaggtgttacaccaaaaaaaggtggacaaaaacatcttggcttaccagtatttaacactgttaaagaagcaaaagacaaaactggagcaaatgcatcaatgatttatgttccaccaaaatttgcggctttagcaatattagaggctctagatgcaaatttagatttaatagtttgtataacagaaggaatacctattttagatatgatgagagttaaaaaggttttatcaaaaagtaaaagtagattgattggacccaattgtcccggaataattactccagaagaatgtaaaattggaataatgcctggcaatatacacaaaaaaggttctgtaggaattgtatcaagatcaggaactcttacatatgaggcggttgctcaaacatcaaaaaacggtttaggacaatcaacttgtataggaattggaggagatcctatcaacggcacaaattttattgattgcttagatctttttcttaaagatgaagatactcattcaataattatgataggtgaaattggcggaactgccgaagaagaagcagctgagtttttaaaaagttcaaaaataaaaaaacctatggttggttttattgcgggactaaccgcaccacctggtagaagaatggggcatgctggcgcgataatatctggaggaaaaggcggtgcaaaagacaaaattgaggttatgaaatctgcaggtataactatatcaaaatcaccagcagacattggagagacactttattcaaaacttaaaagttgaa

SEQ ID NO: 310083 - DNA, 463 bp, Unknown
  Bacterial polypeptide expressing nucleotide sequence isolated from the Sargasso Sea
atgaatattcacgagcatcaagctaaacaaatattaaaaaaatatggagctatagttcctgaaggagtatttgcgcttaatgttgatgaacttattaaaaaagcaaaagcactcaaaactgagaaatatgtacttaaagcacaaatccatgctggaggtaggggaaaagctggtggtgtaaaaattttaaactctattgaggaattaacagtagcagctaaaaaattgctaggaaaaacactagttactcatcaaactggccctgaaggtagagaggtaaaaagattatacgtagaagaatcatcaaatatagataaagaattttacttatcttgtttgattgatagagcaagttctaaaattgcatttatatcgagtgatcaaggagggatggacattgaagaagttgcaagcagttcacctgaaaaaattataactacaaaagttgatatgggtgatgaaa

SEQ ID NO: 310084 - DNA, 515 bp, Unknown
  Bacterial polypeptide expressing nucleotide sequence isolated from the Sargasso Sea
aatgaatattcacgagcatcaagctaaacaaatattaaaaaaatatggagctgcagtccctgaaggagtatttgcgctaaatgttgatgaacttattcaaaaagcaaaagcactcaaaactgagaaatatgtgcttaaagcacaaatccatgctggaggtagaggaaaagctggtggtgtaaaaattttaaaatctatcgaggaactaacggtagcagctaaagaattattaggaaaaacactagttactcatcaaactggccctgaaggtagagaggtaaaaagattatacgtagaagaatcatcaaatatagataaagaattttacttatcgtgtttggttgatagggcaagttctaaaattgcatttatatcaagtgaccaaggagggatggacattgaagaagttgcaagcagttcacctgaaaaaattataactacaaaagtcgatatgagtgatgaaatttctgagttagattgtgaaaaaataattaatatttttaatttaaatgaag

SEQ ID NO: 310085 - DNA, 493 bp, Unknown
  Bacterial polypeptide expressing nucleotide sequence isolated from the Sargasso Sea
attgaagaaaatctcggccctaagagatagggatgaagaagatcctcttgaagtcgaagctagtgaggcaggactaaattacatcaagttggatggaaacattggctgtatggtaaacggagccggtctggcaatgggtacaatggatataattaaaacctatggtggagaacccgcaaattttcttgatgtaggcggtagtgctacgcaagaaactgtggaaaaggcttttcgaataatttcacttgattcaaatattaagtgtattctcataaacattttcggaggtattgttcgctgtgatatggtagcagctggagttattgccgcttttaaaaataccatgcttaagattcctgtagtggtgcgtctagaaggtacgaattcagaagaagcacaaacacttgtgagtcaatctggacttggagaaagcttgcagatagcagatggaatccagcaagctgcgcaaaaagcagtttcagccacaaaataa

SEQ ID NO: 310086 - DNA, 580 bp, Unknown
  Bacterial polypeptide expressing nucleotide sequence isolated from the Sargasso Sea
atggttgaagttaatccattagttatttcaaaacaaaaacaaatattagctttagattgtaaaatgagttttgataacaatgcaatgtttagaagaaataaagtttcagaacttagagataaatcacaagaggatgaaaaagaagtatatgcatcagataggggtttgaattatgtgagtttggatggaaacataggaaatattattaacggagctggacttgctatggcatcaatggacatgattaaattagccggtggagaacccgctaactttttagatgtcggtggaggagcaacgccagaaaagattgtcaaagcgtttaggcttataacaatggataaaaaagtaaaagtaattttagttaatatttttgcaggtataaatagatgtgattgggttgcagaaggtattgttcaagcgctagaaaaaattgaggtaaaggttccattggttattcgattagctggtacaaatgttgaaaaaggaaacaaaattttaaaagacagtaatataaattatattgaggcaagtactttagaggaggctgctaataaggctgttgcagcattaaaataaa

SEQ ID NO: 310087 - DNA, 634 bp, Unknown
  Bacterial polypeptide expressing nucleotide sequence isolated from the Sargasso Sea
agaggcaatagatgctcaaatggaacttattgtttgcatcactgaaggtatacccgttcaagacatgctgaaagtaaaaagagcactagaaaatacttcttctatacttattgggccaaactgccctggcgtaataactcctgatgcatgcaaaataggcattatgcctggccacatccataaacgcggttgtgttggtgttgtgtcaaggtcaggcactttaacttatgaagctgttaagcaaacatctgatgtcggattagggcaatcatcttgtgttggaattggcggggatcccataaaagggacagaacatatcgacgtcttagaatggtttctaaaggatgatgaaacagagagcattataatgattggagagatagggggctctgcggaagaagaagctgcacagttcttaaaagacgaagcaaaaaaagggcgcgcaaagccaactgcaggatttatagcagggcgcacggcacctcctggaagacggatgggtcacgcgggagcaattgtggcgggaggcaaaggaggcgccgaagacaaaatcgaggctatgcaatctgctggtatagtagtagcggaaagccccggcagtttaggcgaagccgtattgaaagcgattggttag

SEQ ID NO: 310088 - DNA, 865 bp, Unknown
  Bacterial polypeptide expressing nucleotide sequence isolated from the Sargasso Sea
ggttaataaaagcacaagattaatttgccaaggatttacaggttctcatggaacattccattctgatcaagcaataaaatatggaacaaatttagttggaggtgtgacaccaaaaaaaggtggtcaaaaacatttaggtcttccagtttttaatactgtgaaagaggcaaaggagtccgaaggtgctaatgcaacaatgatttatgtccctgcaaaatttgctgctgcagcaataattgaggcaattgatgcatctattgaaattattgtatgtataactgaaggaattcctattcaggatatgcttaaagttaaacaaaaactaaataattcaaaatgtaggttgattggtcctaattgtccaggaatcataacacctgatgaatgtaaaattggcataatgcccggcaatattcataaaaagggaaccgttgggatagtctcaagatcaggcacgttaacttacgaagcagtggctcagacaacagaaaatgggcttggacaatcaacatgtattggaataggtggcgatcctattaatggtacaaattttatagactgtttggatttgttcttaaatgacgatgacacccaatcaattttaatgataggagaaatcggagggactgcagaggaagaggctgcagattttgttaataatcacaaaataaaaaaaccaattgttggatttattgctggcgtcacagctccacctggacgaagaatgggtcacgctggagctataatttcaggaggcaaaggtgccgctaaagacaagataaaaaagatggaagattgtggaattattatggctaactccccatcaaaaattggaaatacattatttaataaattgtctaattga

SEQ ID NO: 310089 - DNA, 722 bp, Unknown
  Bacterial polypeptide expressing nucleotide sequence isolated from the Sargasso Sea
taaagttgatataggtgatgaaatctcagattcagattgtgaaaaaatagttaaaatttttcatttaaataaagacacacaaaaacaagcgatatcattaattaaatcaatgtataaaatgtttgtcagcacagatgcaaacatggttgaagtaaatccattgattttgacaaaagaggaaaaaattgtttgtttagatgcaaaagttaattttgactcaaatgcattatttagacatccagaaattgttgaactaagagatttaaatgaggaagattctacagagatagaagctagcaagcatgatcttgcatatatcaagctagatggaagtatcggttgtatggtaaatggagcaggattggcgatggcaacaatggatataattaaattgtatggtaaagagccagcaaattttttagatgtaggtggtggtgcatctaaagaaaaagtatccgctgcattaaagataattctttcagataaaaatgttaaaggtattttaattaatatttttggtggaattatgagatgtgatgtccttgctcaaggagtagttgatgcagctaaagaaattaatattagtgtacctttagttgtaagattagcaggtacaaatttcaaagaaggaaaagaaattcttgataattctggattaaaattaatttctgcagaaaatttagatgatgctgctaagaaaattgttgaggcgataaaataaa

SEQ ID NO: 310090 - DNA, 238 bp, Unknown
  Bacterial polypeptide expressing nucleotide sequence isolated from the Sargasso Sea
gatgaatatccacgaatatcaagcaaaagaaattttaaaagagttcggtgctcccgtttccaatggtttcgcagtaacgtccatcgaagaaattaaagataaaattcctagtttaaaaagtaaaaactttgttttaaaagcccaaattcatgcaggcggaaggggaaaggctggtggtgtaaaattagttaaaaacattcaggaactagacttagaggcaaaacaaatgatgggtaaa

SEQ ID NO: 310091 - DNA, 489 bp, Unknown
  Bacterial polypeptide expressing nucleotide sequence isolated from the Sargasso Sea
accaagacattgctgacttaagggatacatcagaagaagatcctaaagaattggaagccagtaagtacgacttaaattatattgcactggatggtgagattgggtgtatggttaatggtgccggacttgctatggcaacgatggatattattaaattatatggcgctgagcccgctaattttttggatgttggagggggcgccacaaaagagaaagtcacagaggctttcaaaataattacgtcagacccaaaagttaaaggaatattagtcaatatttttggcgggataatgcgatgcgatgtgatcgctgaaggagtagttgcagctgtcaaggaggttggcctccaagttcctttagtcgttcgcctggaaggtacaaacgttgaaaaagggaaagacatcattaataattctggtcttgatgtcattgctgcaaacgacctgagggatggggcagaaaaaatcgtaagagcagtgaaaggttgag

SEQ ID NO: 310092 - DNA, 757 bp, Unknown
  Bacterial polypeptide expressing nucleotide sequence isolated from the Sargasso Sea
ttgctagcaaaaatccctgagaaaattataactaccaaagttgatatcaatgatgaaattttaaattcagattgtgaaaaaataacaaaagtattcaatttagatgaaaacactaaaaaacaagcaatattgttaattaaatcaatatataaaatgtttgtgagcacagatgcaaatatgattgaagtaaatccattaattttgactaaagaaaaaaaaattgtttgtttagatgcaaaagtaaatttcgactctaatgctttattcagacatccagaaattattgaattaagagatttaaatgaggaagatcctacagagatagaagctagcaaacataatcttgcttatattaaattagatggaagtattggatgtatggtgaatggagcaggattagctatggcaacaatggatataattaaattgtatggcaaagaaccagcaaactttttagatgttggaggtggagcatctaaagaaaaagtatctgctgcactaaagattattctctctgacaaaaatgttaaaggaattttaataaatatttttggaggaattatgagatgcgatgttcttgctcaaggggtagttgatgccgctaaagaaattaatatcagtgtacctttagttgttcgattagctggtacaaattttaaagaaggaaaaaaaattcttgataattccggattaaaattaatttcagctgaaaatctagatgatgctgctaagaaaattgtagaggcaataaaataat

SEQ ID NO: 310093 - DNA, 370 bp, Unknown
  Bacterial polypeptide expressing nucleotide sequence isolated from the Sargasso Sea
gatggatatccatgaatatcaggcgaaagaaatattagcaaaatttggtgtaggcgtgccaccaggagctcttgcatatagtccagagcaagcagcatatcgagctcgagagattggaggtgatatctgggtcgttaaagctcaaatacatgcaggtggtcgtggaaaagctgggggtgttaaagtttgtaatagcgataccgagatcgtggaaatatgcgaaaacctatttggaagtaaattagttactcaccaaactgactcaaatggcaagggcgtttaccgagtttacgttgaaggtagtgttccaattgatagggaaatatacctaggatttgttttagatagatcctctcaaagagtgatgatc

SEQ ID NO: 310094 - DNA, 841 bp, Unknown
  Bacterial polypeptide expressing nucleotide sequence isolated from the Sargasso Sea
ttgtcagggatttactggcgcacatggaactttccattcagagcaggctataaaatatggaaccaatcttgttggtggagtcacaccaaagaaaggtggacaaaaacatttagacagaccagtttttaatagcgttttagaggcaaaaaatgaactaggagcagatgcaactatgatttatgtacctgctaaatttgcagcagcagcaattattgaagcaattgatgcatcaattgaacttattgtttgtataactgaaggaattccaattcaggatatgcttaaagtcaggcaaaaattgagtgaatctagaagcagattgattggacccaattgtccaggaataattacaccagacgaatgtaaaataggaattatgccaggcaatatccataaaagaggaagtgttggaattgtatcaaggtcgggtacattaacatatgaggcagtggctcaaacaactgaaaatggactcggtcaatcaacttgtattggaattggtggagatcctataaatggaacaaattttatagattgtttagatttatttttaaatgatggtgaaacagagtctattttaatgattggtgaaattggaggaactgctgaagaagaagctgctgaatttataaaaaatcacaagatcaaaaagcctatagttggctttattgcagggattaccgcacctccaggcagaagaatgggccatgctggtgctataatttcaggcggcaaaggtggagccgaagataaaattaaaaaaatggaagaaagtggtattactgttgctaaatcaccatcaattattggaaaaactctatttaataaactgtctaattga

SEQ ID NO: 310095 - DNA, 812 bp, Unknown
  Bacterial polypeptide expressing nucleotide sequence isolated from the Sargasso Sea
tttgaacgaattagaaaagtcagcaaaagaacttttaggaaaaaaattaattactcatcaaacaggaccagaaggaagagaagtaaaaagactttatgtagaagtatcatcaaacatcgaaaaagaattttacctatcttgtttagtagatagagctacttcaaaaattgcatttattacaagcgatcaagggggtatggatattgaagaagtagctgccaaatctccaaataaaattttgacaactaaagttgaattaaatgaagaaatttcaaacgaagattgtgaaagaataatcaaaattttaagtttagagggtagttctaaaaaagaagcaatttctttaattaaatcaatttataaaatgtttattaaaactgatgcaaatatggttgaaataaatccattaatattaactaaagaaaaaaaaattgtttgtttagatgcaaaagttaattttgatagtaatgctttatttaggcatccagaaattttagaacttagagacttaaatgaggaagatccagcagaaatcgaggcaagtaaatacgatttagcttatataaaattagatggaagtattggatgtatggtcaatggtgcaggactagctatggcaacaatggatataattaagttgtatggcgaagagccagctaattttttggatgttggaggaggagcttcaaaagaaaaagtttcagctgcttttaagataattttgtcagacaaaaatgtaaaaggaatattaataaatatttttggagggatcatgagatgtgatgtacttgcgcaaggtgtagtagacgcag

SEQ ID NO: 310096 - DNA, 606 bp, Unknown
  Bacterial polypeptide expressing nucleotide sequence isolated from the Sargasso Sea
aatgaatatacacgagcatcaagccaaacaaatcttaaaaaaatatggtgcagtagtcccagaaggagtatttgctttgaatgttcaggaattacttgagaaagtaaaatcacttaaaactgaaaaatatgttcttaaagcacaaatacatgctggtgggagaggaaaagctggaggtgtaaaaattttaaatacaattgatgagctagaattagcagctaaagagctgttaggaaaaagacttgttacgcatcaaacaggtccagaaggacgagaagttaaaagattatatgttgaagagtcctcaaacataaaaaaagaattttatttatcttgtcttgtggacagagctagttcaaaaattgctttcatatctagtgatcaaggaggcatggatattgaagaagtagccagtaaaataccagaaaaaattttaactactaaagttgatattaacgaagaaatttcaaatactgattgtgaaaaaattataaaaatttttaatttaaataatgacgcaaaaaaccaagctataaatttaatcaaatcaatttataaaatgtttataagtactgatgctaatatggtcgaggtcaatcccttgat

SEQ ID NO: 310097 - DNA, 526 bp, Unknown
  Bacterial polypeptide expressing nucleotide sequence isolated from the Sargasso Sea
tttgaatattcatgaacaccaggctaaagagttattaagacaatataatatacctacaccctctggatacgttgcattcacaactgaagaagccataaaagtatcaaaaaaattaccaggaccaatttttgttgtcaaagctcaaattcatgcaggcggaagagggaaagctggtggagtaaaagttgtaaataatttagatgaagtaaaaaattcggctgagacaatattaggaaaaaacttaatcacccatcaaacaggtcctgaagggaaactagttcaaaggctctacattgaggatggatgtgatataagtgctgaatattacttttctatggttatagaccgagttactagtagagtttcagtaatagcatctactgaaggaggcatggacattgaacaagtagcaaaagaaactcctgagaaaattttatctttcaatatagatccaacaattggctttcacccttttcattcaagattaatagcaaatgaacttaagttaaaaggttctagtttttag

SEQ ID NO: 310098 - DNA, 448 bp, Unknown
  Bacterial polypeptide expressing nucleotide sequence isolated from the Sargasso Sea
tgttgaaacccaggcaaaatcagttggtctcaattatgttgatttggatggtaacattgggtgtatggtaaatggagccggtttagctatggctacaatggatttaattaaacagtctggaggtgaaccagcaaacttccttgatgttggaggtacggctgatgcagacagggtagaggtagcttttaatttaattcttcaagatcctaaagtgaaagctgtgttagttaatatttttggaggtatcgttagatgcgatagagtcgcaaaaggtattgttcaagcatataaaaatatgaaagataagattcaggtaccgattattgtaagattacaaggaacaaactcaattgaagcaaaaaaaattattgatagctcaggtctgcagatatatagcgcaacaagtttctcagatttgacagacagaattaaagaagctcttgtctaa

SEQ ID NO: 310099 - DNA, 946 bp, Unknown
  Bacterial polypeptide expressing nucleotide sequence isolated from the Sargasso Sea
gctgatagctacttggaaaaaactagtaacaaatcaaacaggaccagaaggaaagatcactaatagagtttatatagaggaagcaactgatattaaaaaggagttatatctaggtttggtttttgatagaagttcagaaagtattatggttgtagcttccaccgaaggaggaatgagtgttgaagaaatttccaaaaataaaccagaaacaattataagatctaaaattgaagttgctgtaggtatgcaaaaatttcaagctagggaaattgcctttggtttaaaaatagaacctaaactaatatcaagagtagcagatacaattattggatgttacagggcttttagtgagcttgatgcaactatggtagaggtgaatccattagtaatttctaatcaagaccagatacttgctctggattgcaagatgagctttgataataatgcgctctttagaagaaacctagtatctgaactaagggataaaacccaagaaaatcctaatgaagtgtatgcatcagacagaggtctaaactatgtaagcttagatggaaatattggaaatattattaatggagcaggattagccatggcttcaatggacatgattaaattagccggaggagagccagcaaattttttagatgttggaggaggagctactcccgataaaatagtaaaagctttcaagttaatttctatggataataaagttaaagttatattagtaaatatttttgctggaataaatagatgtgattgggttgcagaaggaatagtacaagcacttaataagatagatattaaagtcccaattgtcataagactagcaggaacaaatgtagataaaggaaacaagattttaaaagatagtaagattaaatatatagaagcaaatacacttgaagatgctgcaaacaaagctgtaaaggcgttaaaaaaataa

SEQ ID NO: 310100 - DNA, 742 bp, Unknown
  Bacterial polypeptide expressing nucleotide sequence isolated from the Sargasso Sea
gacaaaacatttagatcgaccagtttttaacagtgttttagaagcaaaagatgaagttggcgctgacgcaaccatgatttatgtgcctgctaaatttgcagcagcagcaataattgaagcaatcgatgcatcaattgaacttattgtttgtataacagagggaattccaatccaagatatgcttaaggtaagacaaaaattatgtggctcaaacagcagattaataggacctaattgtccaggaataattacaccagatgaatgtaaaataggaattatgccaggtaatattcataaaagaggaagtgttggaattgtatcaaggtcaggtacattgacatatgaggcagtagctcaaacaaccgaaaatggactgggtcaatcaacttgtattggtattggtggtgatcctattaatggaacaaattttatagactgtttagatttatttttaaatgatgatgaaacggagtctattttaatgataggtgaaatcggaggaactgctgaagaggaagcttctgaatttataaaaaatcacaagatcaaaaagccaatagttggatttattgcaggaattaccgctcctccaggcagaagaatgggacatgctggtgctataatttctggtggcaaaggtggagctgaagataaaattaaaaaaatggaagaatgtggtattactgttgctaaatcaccctcaattattggaaaaactttatttaataaactgtctaattga

SEQ ID NO: 310101 - DNA, 697 bp, Unknown
  Bacterial polypeptide expressing nucleotide sequence isolated from the Sargasso Sea
ctgaatgaaaatgctgaaaatattgcaaaagttcttaaattgaatgatcaacaaacattacaatttataccaattatagataacctattaagattatttgttgaaaaggacttgagcttacttgagattaatccgcttgtgattacaggaaatggagatttgcattgtttggatgcaaagataaatattgattcaaatgcactttacagacaaccagaattattagatatgcgtgatgagacacaagaagatcctaaagaatcagaagctgctaaaaatgatttaagttatgtttctttggatggaaatattggatgtatggttaatggagcaggcctagcaatggggactatggatactataaaattttttggcggaaatcctgcaaatttcttggatgttggtggtactgcaacccaagaaagagttgctaaagcttttaagataattcttgatgacccagaagtaaaagtagttctggtaaatatttttggtggcattgtgagatgtgatttaattgcagaaggtattattgccgcaattaaagaagttgaagtaaaaattccagttgttgtccgcttggaaggcaataatgctgacattggatcaaaaattttatctaaagcaaaaatcaagattgaaagtattaacgatttagctgaggctgctaaaaaagcagttttacttgcaaaatgag

SEQ ID NO: 310102 - DNA, 256 bp, Unknown
  Bacterial polypeptide expressing nucleotide sequence isolated from the Sargasso Sea
atgaatattcacgaatatcaagcaaaagaaatttttaaaaactatgaaataaatgttcctaatggagtagttattttttctttagaaaaaatagaagaaaaatttaaaatctttaaaactaataaaattatattaaaagcccaaattcatgctggaggacgtggcaaaggcggtggaattaaaatagtaagcggcatagatgaattaaaagcccaagctaatttgcttttggaaaaaaattggttacacaccaaac

SEQ ID NO: 310103 - DNA, 664 bp, Unknown
  Bacterial polypeptide expressing nucleotide sequence isolated from the Sargasso Sea
aatgagtatcctaattgacaaagatacaagagtgcttgttcagggttttactgggtctcaaggatcgcttcattcatctcaatctattgaatatggaactaatgttgtgggtggagtaactcctggaaaaggtggaaccacacacttagatttacctgttttcaattcagttaacgaggcggttgaacaagtgcaaccaaacgcatcaataatatttgttccagcacccttttgtaaaggtgcaattctcgaagccgcagaagctggaataaagtttattgtttgtataacagaaggtgttccaactttggatatgttagaagtaaaaaagattgttgatggcttaggcattactctaattggccctaactgtccgggtgttatcacccctggagtagggaaaatgggaattatgcctggtgagattcatcttcctggaagagttggaattatatctagatcagggacacttacctatgaagcagtgaagcaaactactgatctaagtctagggcaatctagttgtgttggaataggcggtgacccaattcctggctcttcttttattgatattttgaaactttttgaagttgatgatcaaacagacgcaattgtcatggttggagagattggaggaagtgctgaagaggaagctgctgaattc

SEQ ID NO: 310104 - DNA, 754 bp, Unknown
  Bacterial polypeptide expressing nucleotide sequence isolated from the Sargasso Sea
gcaaaaaaaacaccaaataaaattataacaacaaaaattgaccttaaagaaaatttagaaaatgaagaaatcgaagatattattaaaatttttaaattggacaaaaatcaaaagaaagatggaattaatttaataaatgctctttataaaattttaattaaaaaggacgcctctttaattgagattaaccctttagtaataactaaacaaaaaaaacttatatgtttagatgcaaagatgaattttgatgacaatgcattatttagaagaccagaaattcttaaattaagagatcttaacgaagaagagcccgcagaaattgaagcaagcaaacatggtttagcttatataaaattaaatggtacgattggttgtatggtcaatggcgcagggttggctatggcaaccatggatataattaaattatatggacaagagccagcaaatttcttggatgttggtggtggagcatcaaaagaacaagtaatagaagcttttaaattaatattatcagacaaaaaagtaaaaggtattttaataaatatatttggagggattatgcgttgtgatgtactcgcacaaggtctcgttgatgctgcaaaggaaactaacataaaactacctttagtagtaaggcttgctggaacaaattttgaacagggtaaagaaattttaaataaatcaggtttaaaaatcttatctgcaagtgatttaaatgatgcagcaaaaaaaatagtggatgctataaaataaa

SEQ ID NO: 310105 - DNA, 823 bp, Unknown
  Bacterial polypeptide expressing nucleotide sequence isolated from the Sargasso Sea
gacagagtgacgtctaagatatcttttgtatgctcaacagaaggcggaatggatattgaagatgtgcgggctagcaaccccgaaaaaattctttctttttctgtagatccagcaactggatatcaggctttccatggtaggaagattgcttttgctttaggacttgagaattcgcaagttaaagagtgtataaaactcatgggacaacttttccaagcattcatagaaaaagacatggaaatgctggaaattaatccgttgatcgtaactaaaaacggcactcttactgtcttggacgcgaaagtgggatttgatagcaatgcaatctaccggcaccaagacattgctgatttaagggataccacagaagaagatcctaaagaattggaagccagtaaatacgacttaaattatattgctttggatggcgagattggatgtatggttaatggtgccggacttgctatggcaacgatggatatcattaaactatatggtgctgagccagcaaattttttggatgttggagggggcgcaacaaaagagaaagtcacagaggctttcaaaataatcacatccgacccaaaagttaaaggaatattagtcaacatctttggtggaataatgcgatgtgatgtgatcgctgagggagtggttgcggctgtcaaagaggttggtctgcaagttcctttagtcgttcgtctggaaggaacaaacgttgaaaaaggtaaagacatcataaataattctagacttgatgtcatcgctgcgaacgacctgagagatggggcagaaaaaatcgtaaaagcagtgaaaggttaag

SEQ ID NO: 310106 - DNA, 711 bp, Unknown
  Bacterial polypeptide expressing nucleotide sequence isolated from the Sargasso Sea
aatgagcatattagttgataaaaacacaagactaatagttcagggctttactggttctcaaggaacactccattcagaacaatcgttagaatatggaactaatattgttgggggagttactcctggcaaaggcgggcaatctcatttaaataaaccagtattcaattcagtggcagaagcatgtaaaaaggtagaaccaaatgcatcaataatttttgtgcccgcacagttttgtaaatcatcaattcttgaagctgctgagtcaggtattaagttaattatatgtataactgaaggtgtaccaacattagatatgctagaagtaaaaaatcgagtagatgagctaggagtcagattaattggtccaaattgtccaggagtgataacacctggacaggctaaactaggtataatgccaggaaatatacacaagcctggctctattggaattatctcaagatcaggtactttaacttatgaggctgtaaaacaaactactgacttgggttttggtcaaagcagctgcgttggaattggtggtgatccaatacctggctcatcttttatagatattttgaagctttttgaaaatgattctgaaacagaagcaatagttatggtaggtgaaataggcggcaatgcagaagagttagccgcagaatttataaaggataatatcactaaaccagtcatatcatatatagcaagtca

SEQ ID NO: 310107 - DNA, 592 bp, Unknown
  Bacterial polypeptide expressing nucleotide sequence isolated from the Sargasso Sea
gatgcaactatgggttgaagtaaatccattagtaatatcaaatcaagatcaaatattagctttagattgtaaaatgagctttgataacaatgcattgtttagaagaaatcaggtttccgaattaagagacaaaactcaagaaaacccaaatgaagtatatgcatctgatagaggtcttaattatgttagcctagatggaaatattggtaatataatcaatggtgcaggcctagctatggcctcaatggatatgattaaattggcaggtggagaaccagcaaatttcttagatgttggtggaggagctacacctgaaaaaatagttaaagcttttaaattaatttcaatggatgagaaagtgaaagttatacttgtaaatatttttgcaggtataaatagatgtgattgggttgcagaaggtatagttcaagcattagaaaaaatagaaatcaaagttccaatagtaataagactggctggaacaaatgttgaaaaaggaaataaaatattaaaagaaagtaaaataaaatacattgaagcaaacactcttgaggatgctgcaaataaggctgttaaagcattaggtaattaa

SEQ ID NO: 310108 - DNA, 844 bp, Unknown
  Bacterial polypeptide expressing nucleotide sequence isolated from the Sargasso Sea
agatcaatggttggaaagagagttgtcactgtccaaactggtgatgaaggccttccggtaaatattatttcacttgaaacccttactgatatttcaaaggagctctatttaagctttattgtggatagagtaaataagtctgtttcgataatattatctccctctggagggatgaatatagaggaggttgcaaaaaaaacaccagataaaatcttcaatattcagctggatcacaattttgagtgttcagatatggaaatacagaagcttgctcccaaacttggtttaaataattcacaaaccctacaattaagatcaattcttcaaaagtgttccaaactttttatagagaaagatttgagccttctcgagataaatccattggttgtaaataagtttggggacttaatatgcttggatgcaaaaattaatgtagatgataatgccctatttaggcatgaagatattctgagattgaaagatatctcacaggaggacgatagagagaatgaagcaaatgaaaatgatctgagttacgtatctttagaggggaacattggttgcatggttaatggtgcaggcttagcaatgggtactatggatacgataaagctttatgatggaagtccagcaaattttttggatgtcggaggcacggcaacaaaagaaagagtatctaaagcctttaaacttatactctctgattcaagtgtaaaagcaattcttgtaaatatttttgggggaatagtgaggtgtgacttaatagcacaaggaataattgaagctattagtgagatatctgtagcagttccaatcgtggtaaggcttcaaggaaataaatcga

SEQ ID NO: 310109 - DNA, 675 bp, Unknown
  Bacterial polypeptide expressing nucleotide sequence isolated from the Sargasso Sea
aaaaaaggtcaacttgttaactcaatattaatagaggaatgcacaagtattacaaaagagctctacttaagcgctgtggttgatagagattcccaaaaaattgtcttcattggatcaagtgaaggaggagtaaatattgaggatgttgcaaaaaattcaccagaaaaaataatttatcaaggcatagatattgaaaattcaaatgcaaaagaagaagctgtaagtatttctagagttcttgggcttaatgatattcaaacaaagcaattcattcctatgattgaaaaccttttaaggttgttcattgaaaaagatcttagccttcttgagataaatcctttagttattaatgacaatggtgatttgcattgtttagatgcaaaaataaatattgactctaatgctttattcagacagcccgagcttcaagaaatgtatgatgagactcaagaggatccccaagaggcagaagcagcaaaaagtgacttaagttatgtttctttagatgggaatattggctgtatggtcaatggagcaggattggctatgggaaccatggatactattaaattttttgggggtaatccagctaatttcttagatgttggtggtactgctactcaagaaagagtagcaaaagcatttaaaataatacttaaagataaagaagttaag

SEQ ID NO: 310110 - DNA, 802 bp, Unknown
  Bacterial polypeptide expressing nucleotide sequence isolated from the Sargasso Sea
attgcattgttctcaagctattgagtatgggacaagcatcattggaggggtaacaccaggaaagggtggagaaagtcatctagatcttcctgtatttaattctacaaaagaggctcaacaagagttggaaatagacgcaacaataatttttgttcctgctaagttttgtaaagattctgttcaagaggctattgatgcagaaattccattgatcatttgtattacagaaggaatacctactctggatatgatgaagttaaaacaaaatgctgactctgcaggttgtagaattattggtccaaactgccctggtgtgattacgccagatcaatgcaaacttggaatcatgcccgggtacattcataagcctgggaaaataggaattgtttcaagatcgggaactttaacttatgaagctgttgatcagaccactcaagctggtttaggtcaaagcagttgcgtgggaattggcggagatcccattccaggatcgagttttattgatattttgctactttttgaagaagattctgaaacagaaggaatcgtgatggttggtgaaattggaggaactgctgaagaagaggctgctgagttcattcagtctaatgtttccaaacctgtggttgcatatattgctggagtcagcgctccacctgggaaaagaatgggacatgccggagcaataatcgctggcggaaaaggaacagcggaagataaattcttagctcttgaaaaggctggagttcatacaactagaagccctgccaaaataggagaagaaataagcaagctagtatga

SEQ ID NO: 310111 - DNA, 799 bp, Unknown
  Bacterial polypeptide expressing nucleotide sequence isolated from the Sargasso Sea
agtcaaattctgttcttcaacagaatctgctattaaatctgctaatgagattcttggtatgaatttaatcactcatcaaactggcgaagatggtaaacttgtaaatcaaatattaattactgaagcgctagatattgaaaaagagttctactttgcattaatgtttgatcgagcaaaaaatgctgacgtttttattgtatctactgaaggaggagttgatattgaagaagtagcagacaaaactcctgaaaaaattgttaaggcctgggttaataatgatacctaccctcttgaagatgcagtcaatacaattataaatgcattaggtcttaattcatttaatgatgcttttgaaatttttacaaatatttatcattgctattcaaattcagattgtaatttacttgaaattaatccacttgtaatcactgaagaccaaaaaattattgcgctagatgcgaaagttgatattgattctaatgcattatttagacaagaaataatttcaaaatttcatgatacttcagaggaagatccgctagaactgaaagcatcagagtatggattgaactatataaagcttgatggaaatgttggctgtatggttaatggagccggtctagctatggctacaatggatatagtaaaacatcacggcggtgagcctgctaactttttagatgtaggaggtgcagctaatgttgatacaattaaaaatggcttcaaaattatcctttctgaccctaatgtaaaatcagttttgataaatatttttggtggtatagttagatgtgataga

SEQ ID NO: 310112 - DNA, 823 bp, Unknown
  Bacterial polypeptide expressing nucleotide sequence isolated from the Sargasso Sea
aaagaaattttaaaaaaattcggagcacctgtttctaaaggcgtagttatttttgaaattaaagacttagacgaaaaaataaaagttctaagtacagaaaattttgttctaaaagcccaaatacatgctgggggaagaggtaaagcaggaggtgtaaagcttgtaaataaatctaaaattcaagaagagacaaaaaaaatgtttggcaaaattcttgtaacccatcagacaggaccagaaggaaaaaaggttaaaagggtatacattcaggaggcctatgatattgaaaaagaattatatctatcttgtttaattgataggcaaagttcaaaaattatttttattagtagcacagaaggaggagtggatattgaagaggtggcaaaaaaaaattctgaaaaaattattaaaaccaaagttgatctaaaacaaaatcttttaaatgaagatatagaaaaaataattaaaatattttcttttgatcctaatcaaaaaaaagatgctaaaaatttattaaatgcaatgtataatattttaattcaaaaagatgcttcattaattgaaattaatcctcttgtaattacaaaacagaagaaacttatttgtttagacgcaaaaatgaattttgatgataatgctatgtttagaagaccggaaattttagaattaagagacttaaatgaagaagaaccagccgagatagaagcaagtaaatttggtttagcttatataaaactaaacgggtcaattggatgtatggttaatggtgctggcttagcaatggctacaatggatataattaaactccatgggagaggaacca

SEQ ID NO: 310113 - DNA, 612 bp, Unknown
  Bacterial polypeptide expressing nucleotide sequence isolated from the Sargasso Sea
tgtttttagaaaaagatttgtctctagttgaagttaaccctctagttattactgattcaggagatttgatttgtttagatgcaaaaatcaatatcgattccaatgctctctatagacaggaagagattgagaaattaagagatccttcgcaagaggacccaagagaagctaaagcagctgaatgggacttgagctatgtagctctagatggaaacatcggatgtatggtgaatggagcagggctggctatgggcactatggatatcattaaattgcacggaggtgaacctgccaatttcttggatgtcggaggaacggcagactctaaaagagttgctgaggcttttaagataatcctctccgatgagaatgtgaataccgtcttaataaacatatttggaggaatagttagatgtgatgttattgcagatggaatagttgaagctctaactgtaatgggcgtttctgtaccagttgttgttagattggaaggaaatagtgcggaaaaaggtctcaaaattcttgatgaatgtgaactgaatataatcccggcttcaaatttagaagaagctgcaagccttgccgtcaaagcatccaagggagagatataat

SEQ ID NO: 310114 - DNA, 808 bp, Unknown
  Bacterial polypeptide expressing nucleotide sequence isolated from the Sargasso Sea
atgaatattcacgaacaccaagcaaaagaaattcttaaaagctttgatgccccaatctctaaaggcattgttataatgtctaaagatgaaataaaaaaaaaaattgaaaatttaaatggagaggaatatgtcgtcaaagcgcaaattcatgcgggtggtagaggaaaagcaggaggagttaaacttgttaaaggtctagatagtctagagaaagaaatttcttcaatgtttggaaaaatattagttacacatcaaactggtcccgagggaaaagaagtaaaaagagtttacgtagaagaagcttccaatattgagaaagaattttatctgtcttgtttaatagatagagagacatcaaaaattgcttttataagtagtaccgaaggaggtatggatattgaaaaaatagctagtgaccaaccagagaaaataattaccacaagagttgatttagatgacaaaataaataaagatcaaattgacaaaattataaaaccttattgtctaactgaaaaccaaaaaaaagagggtatcaaagtaattgaggcaatgtataacatactattaaaaaaagatgcctctttaatagagattaatcctttaataatcacaaaagatcaaaaattaatttgtttagatgcaaaaatgaattttgatgacaatgcaattttccgaagaccagaaattctgaaattaagagatttgaacgaagaggatccagctgaggtcgaagcgagtaaacatgatttggcatatataaaactaaatggatctattggttgtatggttaatggtgcaggcttagcga

SEQ ID NO: 310115 - DNA, 823 bp, Unknown
  Bacterial polypeptide expressing nucleotide sequence isolated from the Sargasso Sea
gagtcttctaatataaaaaaggagttttatctttcttgtttagttgaccgagtgagctcgaagatagcattcatatcaagtgatcaagggggaatggatattgaagaagttgcaaaatcaaatccagaaaagattataactacaaaagtagatttacttgatgatataaaagaagaagattgtaggaaaataattaaaatatttaatttagacgataaagcatctttacaaggaattaaattaataaaatctatatataaaatgtttatttctacagatgcaaatttagttgagattaatccattaattttgacagaagaaaatgatttactttgtctagatgctaaaatgaattttgatgataattcaatatttagacatccagaaattttagaattaagagatttaaacgaagaagatccagcagagatagaagcaagtaaacatgatttggcatacataaaattagatggaagtattggatgtatggtgaacggagctggtctagctatggcaacaatggatattattaagttatatggagaagagcctgcaaattttttggatgttggtggtggagcatcaaaagaaaaagtttctgcagcatttaaaattattctttcagacaaaaatgttaaaggaatattaattaatatatttggcggtatcatgagatgtgatattcttgcccaaggagttgttgatgctgcaaaagaaattaaaattgatgtaccgttagttgtaagattagctggaacaaattttttagaaggaaaagaaattttagataattctggtttggaaataatttcagcttcagatt

SEQ ID NO: 310116 - DNA, 691 bp, Unknown
  Bacterial polypeptide expressing nucleotide sequence isolated from the Sargasso Sea
atatatagaagacggatgtgatatagtttcagagtattatttttcaatggtcattgatagagttagcagtagaatttcactaatagcttcaacagaaggtggaatggatattgaaaaagttgccgaagaaaatccagaaaaaatattatctttaaatattgatcctacaataggctttcaaccttttcattctagattgatagcaaatagtcttaacttaactggaacaagttttaaacaagctggagatttttttagtcagttgtataagctttttactgaaaatgatgcaagtctattagagataaaccccctagttttaacttctgaaaataacttgatagccctagatgcaaaaatgtcatttgataataacgcactttatagacatccaaaaataatggctttaagagatgaaactgaagaagatcccgcagaaattttagccagtaaatatgatttagcttatatcaaactagatgggactattgggtgtttggtaaatggagctggtcttgcaatggcaactatggacattattaaattaaaaggtttgtcccctgccaatttcttagacgttggtggcagtgctacaaaagaaaaagttacagaagcattcaaaatcatactatcagatgaagctgttgaaggaattttagtaaaatatttttggaggaataatgcgatgtga

SEQ ID NO: 310117 - DNA, 403 bp, Unknown
  Bacterial polypeptide expressing nucleotide sequence isolated from the Sargasso Sea
acatatgaagcagtagcacaaacttcagctgtaggtctgggtcaatcgacttgtattggtattggcggagatcctatcaatggaacaaactttatagattgccttgatctttttttaaaagatcccgaaactgaaggtatcataatgatcggagagattggtgggactgctgaagaggaagctgcagaatttattaaaaaatctgaaataaaaaaaccagttgcttcttttatagctggtgctagtgctcctgctggaaaaagaatgggtcatgcaggtgctattatttctggtggaaaaggcactgcagagtcaaagtttagtgctttagaggaagcaggagttcatatatccaaatcaccagcaaagctaggcgagacaatcaaagaggctttaaactaat

SEQ ID NO: 310118 - DNA, 672 bp, Unknown
  Bacterial polypeptide expressing nucleotide sequence isolated from the Sargasso Sea
taaaggcggacaaactcatttagataaaccagtatttaacactgtggctgacgcaaaaaagtcaacaaatgcgaatgcaagtatgatttatgttcccgcaaaattttgtgctaatgcaattattgaggcaatagagtcagatatagagcttatagtttgtatcactgaaggaattccagtcttagatatgcttaaagtaaaaaaatatttatccaaatcaaaatcaagactgataggtcctaattgcccgggaataattacacctgatgaatgcaaaataggtattatgcctggtaatattcataaaaagggatctgttggaattgtttcaagatcaggcacattaacttatgaagcagttgctcaaacaacctcaaacggattaggtcaatctacttgtattggtatcgggggtgatccaataaatggtactaattttatagactgcttagacttatttttaaatgatcctgaaacagagtctattttaatgataggagaaattggaggaacagcagaggaagaagctgcagcatttattacacaacataaaattaaaaaacctatagtgggatttattgctggtattacagcgccaccaggaagaagaatgggtcatgctggagcaattatctcaggaggcaaaggtggggcagctgacaaaataaaaac

SEQ ID NO: 310119 - DNA, 889 bp, Unknown
  Bacterial polypeptide expressing nucleotide sequence isolated from the Sargasso Sea
agaagttaaaagactttatatagaggaagcttcagatattctaaaggaattttatttatcttgtttaattgatagagagacatcaaaaatagcttttataagtagcacagaaggcggaatggatattgaaaaagtggcatctgaaacacctaataaaattgttacaattaagattgatctgaaaaaagagggacctagtaaaaaagaaattgaaaagataatttctgttttccaattaaatgaaaaacaaaaaaaaattgcgtctaatttaattaattcgctttatgaaattataattcaaaaagatgcaagtttgattgaaattaatcccttaattataacaaaaacagaggaattaatttgtcttgatgcaaaaatgaattttgatgacaacgcaatttttaggagaccagatatacttaaactaagagatttgaatgaagaagaccctgctgaaattaaagcaagtaaacatgatctagcttatataaagcttaatggaacaataggttgtatggtcaatggtgcaggactagcaatggctactatggatataattaaactttacggtaaagagccagctaattttttagatgtaggaggaggagcaacaaaagaaaaagtttctgctgcatttaaactcattctatctgataagaatgtaaaaggaatattaattaatatatttggagggataatgagatgtgatgttcttgctcaaggagtcgttgatgctgctaaagagataaatttatcagttcctttagtagttagattagcaggaacaaatttcagagaagggaaagaaatattagataaatcaaatctaaaaattttatctgcttcagatcttaacgacgcagcaaaaaaaatagttgaggctataaaa

SEQ ID NO: 310120 - DNA, 755 bp, Unknown
  Bacterial polypeptide expressing nucleotide sequence isolated from the Sargasso Sea
caaaaaaggtggtcagaaacatcttgaaaaacctgttttcaatacagttcaagaagccaagaatgaaacaggagcaacagcaacaatgatatatgttcctgcaaaatttgctgctaacgcaataattgaagcaatagattcatctatggagcttattgtatgtattacagaaggcatacctgtaatagatatgcttaaagtaaaaaaaaaattgaatgaatcaaaaagtagattaattggaccgaactgtcctggaataataacacctgatgaatgtaaaataggaataatgccgggaaatattcacaaaaaaggaactgttggaattgtatcaagatctggaacactgacttatgaagttgtagctcaaacttcagaaaatggacttgggcagtccacttgtgttggcataggaggagatccaattaatggtacaaattttatagattgtttagatttatttttaaaagatcctgaaactgaatctattttaatgattggtgaaataggaggaacagcagaagaagaagcatcaacatttattaaaaatcataaaattaaaaaaccaattgtcggatttgttgcaggattaacagccccagcgggtagaagaatgggacacgctggagccattatttctggaggaaagggtggagcaaaagataaaataaacataatggaagaatgtggtattacagtagccaaatctcctgcagaaatcggcaaaacattgttagataaattgtctaattgaa

SEQ ID NO: 310121 - DNA, 784 bp, Unknown
  Bacterial polypeptide expressing nucleotide sequence isolated from the Sargasso Sea
atgtctgtattagtaaataaaaataccaaagttatatgtcaaggatttacaggcaaacatggagaatttcattctaaacaagcaatagaatatggaaccaatttagttggtggtgtgaccccaaataaagggggtcaaaaacatcttgatagacctgtatttaatacagttgcagaagccaaagcagaagttggtgcagatgcaacaatgatttatgttcctgcaaaatttgcagcagctgcaattatagaagcagtagagtcatcaattgaacttatagtttgtattacagaaggtattccaattcaggatatgcttaaagtaaaacaaaaattaaatggtacaaaaagtagattgataggacctaattgtccaggaattataacccctgatgaatgtaaaattggaataatgcctggaaatattcataagcgaggatcagttggtattgtatctagatctggaactttaacttacgaagcagttgcccaaactacagaaaatggtcttgggcaatcaacctgcataggaatcggaggagacccaataaatggaactaactttatagactgtttagatctatttcttaatgatgaagaaactgaatcaattttgatgataggcgaaataggcggcactgctgaagaagaagcagcagagtttgtaaaaaatcatagtataaaaaaacctatagttggatttattgcaggaattacagcccctcctggaagaagaatggggcatgctggagcaataatatctggtggaaaaggtgggagctaaa

SEQ ID NO: 310122 - DNA, 649 bp, Unknown
  Bacterial polypeptide expressing nucleotide sequence isolated from the Sargasso Sea
atgagcgtattggttgataaaaattcaaaaattattgtacagggtttcactggctcagagggctcttttcactctcaacagatgatcaattatggaacaaatattgtgggtggtgtaacaccaggaaaaggaggaaaaatacatttaggaaaacctgttttcaacactgtacaacaagcaataaatcaaactgatgctgacacctcaatcatttttgttcctgcaggatttgctgcagatgctatcatggaagcatgtgatgcaggcataaaggtcatagttgcaattacagaggggataccgatcagtgatatgtcaaaagtttttacttacataaaaaataagaattgtagattgataggtcctaattgtccaggtgtcataacaccagatgaagcaaaagttggtattatgccaggatttgtttttaaaagcggtcgagttggcttggtctcaaaatcaggaacactgacatatgaggcagccgatcaaattacaaaggcaggttatggtatttcaactgcaatcgggattggaggagatccaataattggaacaactgttcgtgatgctgttgagttattttttgaggatgattccaccgattgtgttgttctaattggtgaaataggtggtcagttggaggctg

SEQ ID NO: 310123 - DNA, 763 bp, Unknown
  Bacterial polypeptide expressing nucleotide sequence isolated from the Sargasso Sea
atgaaaattcatgagtaccaaggtaaggaaatttttaaaaaacacaacattgctacaccaaatggcataccagcctttactgtagaggaagcattggaagcttataactcattaaaatctgatatagttgcagtaaaagctcaaattcatgctggtggtagaggaaaaggtggaggtgttaaaattgccaaaaacaaagatgaggctgaaaaacatattaaaaacatttttgggatgaatctcataactcatcaaactggagaagaaggaaaaaaagttgaaagactctatttagaaagcggtgtagatattagaagtgagttttatgctgctattacgcttgaccgaagtaaagagatggatgtttttatggtttctacagaaggtggagttgagattgaaaaagtagcttcggaaactcctaaaaaaattataaaaatttggattgacccgttagttggcattaaaagttttcaaatgagaaagcttgctaaaggtttaggccttgatggaaatgcatttaaagaagcgtgctttacattcactaaaatgtatgaatgttatcaaaaaactgatgcttctatactagaaattaaccctctagtcatcactagagatgataagattatcgctctagattcaaagtttaattttgatagtaatgctctatttagacaaaaagaaatcctcgatatgcgtgattttactgaagaagataaaatggaaattgaagcaagtaattttaatttaaactacataaaat

SEQ ID NO: 310124 - DNA, 460 bp, Unknown
  Bacterial polypeptide expressing nucleotide sequence isolated from the Sargasso Sea
ttaataggaccaaactgtccaggggtaatcacaccgggtgaagcaaaagttggaattatgcctggatatattcataaacaaggaaaaattgggataatatctaaaagtgggactttgacttacgaagctgtatggcaattaactcagcttgatataggtcaatctagctgtgttggtattggcggagatccaattattggatcttcttttattgatgtacttaaactgtttgaggaagacaaagatactgacggggtaattatgataggagaaataggtggaactgcagagcaagatgcagccctatggattaaagataatttcacaaagcctgtagctgcttttattgcaggagcgactgctcctaagggaaaaagaatgggacatgctggtgcaattgtttcaggcagttcgggttcagccgaaaaaaagaaacaggtattagaatcagttggtatta

SEQ ID NO: 310125 - DNA, 829 bp, Unknown
  Bacterial polypeptide expressing nucleotide sequence isolated from the Sargasso Sea
aaagttttagtaactcatcaaactggaccagagggcagaaaagtaaaaacattatatatcgaagaggcttcagatatttctaaagaattttatctttcatgccttgtggacagagagacttcaaaaatagcatttattagtagtaccgaagggggtatggacattgaaaaaattgcaaaagaaacaccaaataaaataattacgacaaaaattgattttagtattgaaggtcccaacaaaaaagaaattgaaaatataattaatattttctcattcaatacagagcaaaagctcgtagctgaaaaattaataaaatctttatataaaattataattgaaaaagatgcaagtttagttgaaataaatccattgataattacgaagaatgataaaattatttgcttagacgcaaaaatgaattttgacggtaatgcaatttttagaagaccagaaattttaaaacttagagatttaaatgaggaagagcccgcagaaatagaagctagcaaatatgacttagcttatataaaattaaatggctcaattggttgtatggtaaatggcgctggacttgcaatggctacgatggatataatcaaacttcatggtaaagagcctgcaaattttttagatgttggaggtggtgcttcaaaagaaaaagtaacagcagccttcaaattaattttagctgataaaaatgtcaaaggtattttaataaatatttttgggggaattatgcgatgtgatattttagctcaaggtgtagtagaagcggctaatcaagtgaatttaaatgttccactcgttgtaagattagctgggactaata

SEQ ID NO: 310126 - DNA, 454 bp, Unknown
  Bacterial polypeptide expressing nucleotide sequence isolated from the Sargasso Sea
attcataaaaaaggttctgttgggatagtttcaagatcaggaaccttaacatatgaagctgttgcccagacaactcaaaatggattgggacaatcaacttgtataggaatcggcggagatcctataaacggtacaaacttcattgattgcttagatttattccttaaagatgaagatacacactcaattataatgattggcgaaataggaggtactgctgaagaggaagcagcagagtttctaaaaaagtccaagataaaaaagcctacaataggttttgttgcaggattaacagcccccccaggaagaagaatggggcatgcgggggcaattatatctggagggaaaggtggggctgaggataaaattgagcaaatgaagtctgcaggtattattatatcaaattcaccagctgatattgggaaaactctttatgcaaaacttaaaaattaaa

SEQ ID NO: 310127 - DNA, 520 bp, Unknown
  Bacterial polypeptide expressing nucleotide sequence isolated from the Sargasso Sea
gatgaatattcacgaataccaggcaaaagaaatattaaaagaatttggagcacctgtttcaaatggttttgttatttttaatcctgaagaaataaatgatcaaataaataaaataaaatcagataaattagtagttaaggctcaaatacatgctggtggaagaggaaaagctggaggcgtaaaattagtagatagatctcaaattagttccgaggtcaaaaaaatgttcggcaaagttctagttacacatcaaactggcccagaaggaaaaaaagttaaaagagtttatgtacagcaagcgtatgatattgaaaaagaattttatttatcttgtttggtcgatagagaaagttcaaaaatagcatttattagtagcaccgaaggaggcgtagatattgagtctgttgcaaaaaatagcccagaaaaaattattactactaaaatagatttaaaaaaatctttaactaatgatgaagtacaaaaaataataaaaatattctctttagatacaaatcaaaaa

SEQ ID NO: 310128 - DNA, 652 bp, Unknown
  Bacterial polypeptide expressing nucleotide sequence isolated from the Sargasso Sea
tttgccgagtatggcctgccggtctccgaaggttatgcctgtgccaccccgcaggaagcggccgaagcggccgacaagattggcggcaacacctgggtcgtcaagtgccaggtccacgccggtggccgcggtaaagcgggcggcgtcaagctggccaagagcaaggacgagatccgtgccttcgcccagaactggctcggcaagaacctggtgacctatcagactgacgccaacggtcagccggtcaccaagatcctggtggaatcttgcaccgacatcgccaaggagctctatctgggcgccgtggttgaccgtggttcgcgccgcgtggtcttcatggcctctaccgaaggtggcgtggagattgagaaagtcgcccacgaaaccccggaactgattcacaaagccgccatcgatccgctggtaggcccgcagccttatcaggcccgcgagctggccttcaaactgggtctggttggcgagcagatcaagcagttcaccaagatcttcatgggcctgggccagatgttcctggactgcgacttcgccctgctggaaatcaacccgctggtgatcaccgcccagggcaacctgcactgcctggacggcaagatcaacatcgacgccaacgccctgtaccgtcgatgttgat

SEQ ID NO: 310129 - DNA, 493 bp, Unknown
  Bacterial polypeptide expressing nucleotide sequence isolated from the Sargasso Sea
tataggcagccagagattttgaagttaagagatttaagcgaagaagatccagcagaaatagaggcaagcaaaaatgacttagcatatattaaattaggtggaaccatagggtgtatggttaatggagcaggacttgctatggcaaccatggatataattaaactatacggaaaagaacctgctaattttttggatgttggaggtggagcctctaaagaaaaagtgtcagcagcttttaaacttatcttaaacgataaaaatgttaaaggaatattgataaatatatttggaggaattatgaggtgtgatgttttagcaaaaggtgtagttgatgccgctaaagaaataaatttgtctgtcccactagtagttagacttgctggaacaaattttaaagagggtaaagaaatactcgaaaaatctaaactaaaaattttatcagcatcagatttaaatgaagctgcaaaaaagatagtggaagctattaaataga

SEQ ID NO: 310130 - DNA, 617 bp, Unknown
  Bacterial polypeptide expressing nucleotide sequence isolated from the Sargasso Sea
aatcaatttacaaaacattgttttttacagatgcaagcttaatgaaatcaatccactaatacttacaaaggaaaacaatattgtgtgtctggatgcaaaaataagctttgatgacaatgcaattttcaaacatccagaattactggaattaagagatttgaatgaagaggatcctacagaaatagaggcaagcaaacacgatttagcctacataaaattagatggatctattggatgtatggtaaacggagcaggattagcaatggctacaatggatataattaaactgcatggtcaagaacctgcaaattttttagatgtaggaggcggtgcatctaaagaaaaggttgcagccgcgtttaagataattttatcagataaaaatgtaaaaggaatactaataaatatttttggagggattatgaggtgtgatgtccttgctcaaggaattgtagaggctgcaaaagaaaccaaaataaatatacctcttgtagtaagacttgctggaaccaattcaaaagaaggaaaaaaaatattagatgaatctggattaaaaataatctcagctagcgatctaggggacgcagcaaaaaaaattgtaaaacaagtggaataaa

SEQ ID NO: 310131 - DNA, 867 bp, Unknown
  Bacterial polypeptide expressing nucleotide sequence isolated from the Sargasso Sea
agatattgataaagagctttattttaggtgctgtgattgatagggcctcccaaaggctcgttgttatggcatcgacggagggaggagtgaatatcgaagaggttgctgaggagacaccagaaaaaatacataaagctgaaatagatcctattcaaggtccaaatcaaccgcaagcagaaaagttagctaattgcttgaacttaaatgaagtacagactatacaatttattgagatttttaatggtctagtgagattatttatagataaagatttatcccttgttgaggtgaatcctttagtgattacctcctcaggagatttaatttgtttagatgcaaaaataaatgtagattcaaatgctctttacagacaggaacaaatcctggaattgagagatccctctcaagaagatcccagagaggcaagtgcagcagagtgggatctaagttatgttgctttagaaggaaatattggttgtatggtcaatggtgcagggttggcaatgggtaccatggatatcatcaagttacacggtggcgagcctgctaattttttggatgtcggcggcacagctgattcaaaaagagttgctgaggcgtttaagataatcctctcagatgaaaatgttaatacggtattgataaatatctttggtgggattgttcgttgtgatgttattgctgacgggatagtagaggccttaacagtaatgggagtttcagtccctgtaatagttagattagaaggaaataatgctcacaaaggattgaagatacttgacgaatgcgacctgaatatcatccctgcatcaaatttggaggaggcagcaagtttagctgtaagagcatcaaagggagatatatgag

SEQ ID NO: 310132 - DNA, 718 bp, Unknown
  Bacterial polypeptide expressing nucleotide sequence isolated from the Sargasso Sea
gttcaagggttcacaggctcgcaaggaaccctccattctcatcagtctattgaatatggaacaaatatagttggaggagtgactcctgggaaaggaggtaagcagcacctcgaaagacctgtatttaattcggtggaagaagctataagggaagaagagcctaatgcctcaataatttttgttcctgcaaaattttgtaaagattctatattagaagctgctgaagctggtattaaattaattatatgtataacagaaggtgtgcctaccttagatatgcttaatattaaaaagcgaattgattctcttggggtaagacttattgggccaaattgccctggtgtaattacgccaggagaagctaaattaggcataatgcctggcaatatacataagccaggatctattggcattatctcaagatcgggaacgcttacttatgaggcagtaaaacaaactactgacttaggatttggacaaagcagctgtgttggtattggtggagatcctattccaggttcatcctttatagatattttaaaactgtttgaggacgacgatcaaactgaggctatcgtaatggttggagaaattggtggtaatgctgaggaatctgcagctgactttattcaaaataatatatcaaagccagttatatcttatatcgcaggacaaactgctccacccggtaaaaggatgggtcatgctggagctatta

SEQ ID NO: 310133 - DNA, 843 bp, Unknown
  Bacterial polypeptide expressing nucleotide sequence isolated from the Sargasso Sea
gatgagtatcctaattgacaaagatacaagagttcttgttcagggttttactgggtctcaaggaacgcttcattcatctcaatcaatagaatatggaactaatgttgtgggtggcgtaactcctggaaaaggtggaaccgaacacttagatttacctgtttttaattcagttaacgaggcggttgaacaagtacaaccaaacgcatcattaatatttgttccagcacccttttgcaaaggtgcaattttggaagccgcagaagctggaataaagttcattgtttgtataacagaaggtgttccaactttagatatgttggaagtaaaaaagattgttgatggcttagacattactcttattggtcctaactgtcctggtgttatcacccctggagttgggaaaatgggaattatgcctggtgagattcatcttcctggaagagttggaattatatctagatcaggaacacttacctatgaagcggttaagcaaaccactgatttaggtctggggcaatctagttgtgttggaataggcggtgatccaattcctggctcttcttttattgatattttggaactttttgaatctgacgatcaaacagacgcaattgtcatggttggagagattggaggaagcgctgaagaggaagctgctgaattcatttcacagaatgtcactaaaccagttgtttcatatattgctggtcagactgcaccacctggcaaaagaatgggccatgcaggtgccataatttctggaggcaagggtacggcagaggataaaataaaaaaactaaatgagagcggtgttgttgttgcaaaaaatcttcttgaaatagg

SEQ ID NO: 310134 - DNA, 477 bp, Unknown
  Bacterial polypeptide expressing nucleotide sequence isolated from the Sargasso Sea
aatgaatatccacgaatatcaagctaaagaaatattatctaaatatggagtttcaattcccaaaggaggactggcatacagtccagaaaatgcaaaagatcgtgctaccgagcttggaggagatttatgggtagtaaaagcacaaattcattccggagctagaggtaaagctggaggtattattgtttgtaaatcagagcaagaagtctctgatgcagcaaataaacttcttggtaaaacactagttactcatcaaaccggaccagaaggtaaaacggttcaaagaatctatgttgaagaaggaacagacataaaaaaagagttttacttaggattggtttttgacagaagtactgagagcattatggtggtagcttcttctgaaggaggtatgagtgttgaggaaatagcgcaagagaaacccgaatctttaatcaagactaaaattgaagctgcagtaggtatgcaggcttttca

SEQ ID NO: 310135 - DNA, 739 bp, Unknown
  Bacterial polypeptide expressing nucleotide sequence isolated from the Sargasso Sea
aatgaatattcacgagcatcaagctaaacaaatattaaaaaaatatggtgcagtagtcccaaaaggagtatttgcactaaatgttgatgatttacttgataaagtaaagtcactcaaaactgaaaaatatgtcctaaaagcacaaatacatgctggtggaagaggaaaagctggaggtgtaaaaattttaaatacaattgaggagctagaattagcagctaaagagttgtttggaaaaatacttataactcatcaaactggcccagagggaagagaggttaaaagattgtacgttgaagagtcctcaaatatagaaaaagaattttatttatcatgccttgtagatagagctagttcaaaaattgcttttatatcaagtgatcaaggaggtatggatattgaagaggtagcgagcaaaacgcctgaaaaaattataaccacaaaagttgctattaatgatgaaatttcaaacaatgattgtgaaaaaattataaaaatttttaatttaaataatgatgcaaaaaaccaagcaataactttaattaaatcaatttataaaatgtttattagtacagatgcaaatatggttgaggtcaatcctttaattttaactaaagaagaaaaaatagtttgtttagatgcaaaagtaaattttgactcaaatgctttgtttagacatcctgaaattgttgagcttcgagatcttaacgaggaagattcaactgaaattgaagcaagc

SEQ ID NO: 310136 - DNA, 434 bp, Unknown
  Bacterial polypeptide expressing nucleotide sequence isolated from the Sargasso Sea
cgcgtctgatagaggtcttaattatgtaagtttagatggcaatattggtaacataattaatggagcaggtttagcaatggcttcaatggatatgataaaactggctggtggtgaaccagctaacttcttagatgttggtggaggcgcaacacccgaaaaaattgtgaaggcatttaagctaatctcaatggataaaaaagtaaaagttatcttagtcaatatttttgctggaataaatagatgtgattgggtggcagaaggaatagttcaagcactacaaaaaatagaaataaaagtaccattagttattcggttagcaggtacaaatgtcgaaaagggtaatcaaatattaaaagaaagtaaaattaattatattgaagccaataccttggaggatgcagcaaacaaagctgtaaaagcgttaggaaaataga

SEQ ID NO: 310137 - DNA, 568 bp, Unknown
  Bacterial polypeptide expressing nucleotide sequence isolated from the Sargasso Sea
aatgtcaatatttatagataaaaatacaaaagtaatttgccaaggtttcactggttcacaaggaacttttcactctcagcaagctatcgattatggtactaatatggtgggtggtgttacacctggtaaaggtggagagaaacatttagggttacctgtttttgatacagtttatgatgcaaaatttaaaaccaaagctaatgccacagtgatttatgtacctccaccatttgccgcagatgcaatacttgaagctatagactctgaaatagaaacaattgtgtgtattactgaaggtataccagttatagatatggtaagagtaaagagagctttacatggttcaaaatcacgtttgatagggccaaactgtccaggtgtgattactcctgaagaatgcaaaatagggattatgccaggacacattcataaaaaaggaagtgtaggggtagtttcaagatctggaacacttacttatgaagcagttgctcaaactacagaaataggattgggtcaatccacatgcgttggaataggaggtgatcctgttaaaggaacagaacatgtt

SEQ ID NO: 310138 - DNA, 337 bp, Unknown
  Bacterial polypeptide expressing nucleotide sequence isolated from the Sargasso Sea
ttattcggttctgaaccagcaaattttttggatgtaggcggaggtgctactaaagagaaggtaactgaagcttttaaaattataacctccgataaaaatgttaaaggaattttagtgaatatttttggagggataatgagatgcgatgttattgcagaaggggttgttgaggctgtcaaaaatgttggtctttcagttcctttagtcgttagactcgagggtacaaatgtagaaaaaggtaaagatataataaataaaagtgggttaaatgtaattgctgcagataatctttctgatgctgcaaaaaaaattgtttcagcagtgaaaggtaattaaa

SEQ ID NO: 310139 - DNA, 870 bp, Unknown
  Bacterial polypeptide expressing nucleotide sequence isolated from the Sargasso Sea
gttgccatacaccgggatgaagcagtaaaatgtgcagaaaaactttctaaagatacaggaactaaaatatttgtagtaaaggctcaaatacatgcaggtggtagaggaaaaggagggggtgttaaaattgcaaaaagtctagaagaggtgaagaaaatttcatcagatattataggcatgaacctcattactcctcaaacatctaaggatggaaagcttgttagaaaagtgcttattgcagaggatgtatattatgatggagagtttaatagaaaagaattttatatgtctgttctattaaacagagcttcatctaaaaatatgatagtctattcaactgaaggaggggttgatattgaggcagttgctgaaaatactccggaattgatttttaatgaagaaattgatcctggaacagggattttaccatttcaatcaagaaaaattgcatttaatttaggcctggaaggtttagctttcaagaatatgtcaaaatttgtaactaatctttataatgcatatgtaaattccgatgcttcgttatttgaaataaatcctgtgctaaaggcctctgatgataaaataattgctgtagattcaaaagttacaattgatgagaatgccctttttagacataaagactatgagtccttgagagatttaaatgaagagaatccagttgaggttgaagcaagagaaaatggtctaaactatgttgatttagatgggaatgtaggatgtatggttaacggtgccgggctagctatggctactatggatcttataaagcttgctggaggagagccagcaaactttcttgatgttggtggaactgctgattcaaaaagagttgaaaaggcttttaggctc

SEQ ID NO: 310140 - DNA, 797 bp, Unknown
  Bacterial polypeptide expressing nucleotide sequence isolated from the Sargasso Sea
cgttgcatccactgagggagggatgagtgttgaggaaatttctaaacagaaaccagaaactattattagatccaaaattgaagtagctgtcggtatgcaacaattccaagcgagagaaatcgcatttggccttggtattgaaccaaaattaatttcaagaactgcagaagcaataactggatgttacagagcgtttagtgagcttgatgctaccatggttgaggtaaatccgttggtaatatcaaaccaagatcaaattttggctttagattgtaaaatgagttttgataataatgcgttatttagacgaaaccaaatatcagaacttagagacaaaacgcaagaaaatgaaagtgaggtctatgcatctgatagaggttttaattacgtaagtttagatggcaatattggaaacataattaatggagctggtttagctatggcttccatggatatgataaaattagcaggtggggagccagctaatttcttagacgttggtggtggagcaacacctgaaaaaattgttaaagcatttagattaatttcaatggataaaaaggtaaaagtcatattagttaatatatttgcaggaataaacagatgtgattgggttgcagaaggaatagttcaagctttagaaaaaattgatattaaagttcctttagtaatacgattagcaggcaccaatgttgaaaaaggtaataaaattttaaaagaaagtaaaataaattatattgaggcaaatactttagaagatgcagcaaacaaagctgttaaagctttaggaaaataaa

SEQ ID NO: 310141 - DNA, 736 bp, Unknown
  Bacterial polypeptide expressing nucleotide sequence isolated from the Sargasso Sea
aaaatcatacaaactaaagttaatttagaagatcaaatatcagatgaagattgtaataaaattgttggaatatttaatttagatactagcgcaaaaaaacaagcagtaaatttaattaaatcaatatacaaaatgtttattgatactgatgctaatcttgttgaaataaacccattaattttgacaaaaaataataaaattgtttgcttagatgcaaaaatgaattttgatgataatgcgttatttagaaatccaggtattttaaatctaagagattttaatgaggaggatgaaaccgagatagaggcaagcaaacatgatttagcctatataaaattagatggtagcattggatgtatggttaatggcgcaggcttagcaatggctacaatggacataattaagctttatggagaagaaccagcaaattttttagatgttggcggtggtgcttccaaagaaaaagtttcagcagcatttaaaattattttatcagatgaaaatgttaagggaattttgataaatatttttggaggtataatgagatgtgatgttcttgcacaaggagttgtagacgctgcaaaagaaattaaaattgaagttcctttagttgttagattagcaggaactaaatttgaagaaggtaaaaaaattttagataattctagtttaaaaattatttctgcatcagacttatctgatgcagcaaaaaaagtagtaaaagcaattaaataaa

SEQ ID NO: 310142 - DNA, 880 bp, Unknown
  Bacterial polypeptide expressing nucleotide sequence isolated from the Sargasso Sea
aaggctttatgttgaatcatcttctaaaattgataaagaattttatctttcctgccttgttgatagagcaagttctaaaattgcatttatttcaagtgatcaaggaggaatggatattgaagaagttgcaaaaaataatcctaaaaaaatcataacaactaaagttaatttagaagatcaaatatcagatgaagattgtaataaaatagttggaatatttaatttagatactagtgcaaaaaaacaagcagtaaatttaattaaatcaatatacaaaatgtttattgatacagatgctaatcttgttgaaataaacccattaattttaacaaaagataaaaaaattgtttgcttagacgcaaaaatgaattttgatgataatgcattatttagaaacccagatattttaaatctaagagattttaatgaggaggaagaaacagagatagaggcaagcaaacatgatttagcctatataaaactagatggtagtattggatgtatggttaatggtgcaggtttggcaatggctacaatggacataattaaactttatggagaagaaccagcaaattttttagatgttggcggtggtgcttccaaagaaaaagtttcagcagcatttaaaataattttatcagataaaaatgttaagggaattttgataaatatttttggaggcataatgaggtgtgatgttcttgcacaaggagttgtagatgctgcaaaagaaataaaaattgaagttcctttagttgtaagattagcaggaactaaatttgaagaaggtaaaaaaattttaaataattctggtttacaaattatttctgcatcagatttatctgacgcagcaaaaaaagtagtagaggcaataaaataa

SEQ ID NO: 310143 - DNA, 855 bp, Unknown
  Bacterial polypeptide expressing nucleotide sequence isolated from the Sargasso Sea
tatggatatccacgaataccaagcaaaaaaaatactttcagattttggagtaacgattccaagggggggaattgtatacagtccagagaatgctgagaataaagcaagagagataggtggatccagatgggtagttaaagctcaaattcactcaggtgctagaggaaaagcgggtggaataattgtttgtaattctcctttagaagttgcccaagcaacagataagttactaggaaaaaaattagttacaaatcaaacaggccctgaaggtaaaatagtaaatagaatttatattgaagaagcgacagatatagagcgagaactatatcttggtctagtttttgatagaagttcagaaagtattatggtggttgcttcaacagaaggtggaatgagtgttgaagaaatttcaaaagagaaaccagaaactataatcagatcaaaaattgaagttgctgttggaatgcaaagtttccaagctagagagttagcatttggtttaggaattgaaccagatttaattagaagggcctctgaaactattattggatgttataaagcatttagtgaattagatgctactatggtggaagtcaatccattagtaatttcaaaacaaaaacaaatcttggctttagattgtaaaatgagttttgataacaatgcaatgtttagaagaaatcaagtttcagaacttagagacaaaacacaagaggacgcaaaagaagtttttgcatctgatagaggactaaattacgtaagcctagatggaaacattggtaacattataaatggtgctggtttagcaatggcatcaatggacatgataaaactagctggaggaagtcctgctaa

SEQ ID NO: 310144 - DNA, 511 bp, Unknown
  Bacterial polypeptide expressing nucleotide sequence isolated from the Sargasso Sea
aatgagtatccttattaacaaaaatacaattgctatttgtcagggttttactggttctcaagctacgttgcattgttctcaatcaattgaatatggaactaaaattgttggtggagtgactccaggaaaggcagggcaaatacatcttgaccgccccgtatttgaaaatgtctcagaggcaattgaaagcacaggcgcagatacttcgataatatttgtaccagctccatattgtaaagattcaataaatgatgccttagactctgggttaaagttagtcattgtaatcaccgaaggaattccaacacttgatatgctgtatttaaaagcaaaggcagatgaaatgggagtcaagattattggtccaaattgtcctggggtaataaccccgggagaagcaaaattggggataatgcctgtggaaattcacaagaaaggaaaagtaggaattgtttctaggtcagggacccttacttatgaagcagtagatcaaacaaccgcaattggatta

SEQ ID NO: 310145 - DNA, 900 bp, Unknown
  Bacterial polypeptide expressing nucleotide sequence isolated from the Sargasso Sea
aggaccagaaggaaaagaagtaaaaaggttatacatcgaagaggcctcaaatatttcaaaagaattttacctatcctgtttagttgacagagcctcttctaaaatagcctttataagtagtactgagggcggaatggacatagaaaaggttgcagcagacacaccaaaaaaaatagttacaaaaaaaattgattataaaaaggaaggtccttctgatgatgaaataacagaaataatatcgatttttgatctaaaagattcacaagttaaacaaggaaaagaattgataaagtctctttacaaaatattaactgaaaaagatgcaagtcttatagaaattaatcctcttattattaacaaagataataatttaatttgtttagatgcaaaaatgaattttgatgataatgcaatttttagaagaccagaaattatgcaattaagagatcttaatgaggaagagccagcagaaattgaagcaagcaaatacgacttagcatatataaaactgaatggatcaattggatgtatggtcaatggtgctggtttagccatggctacaatggatataattaaactatatggtcaagaacctgctaattttttagatgtaggaggtggagcgtcaaaagaaaaagtgaccgccgcatttaaattaatattggcagataaaaatgtaaaaggtattttaataaatatttttggtggaattatgagatgcgatgtacttgcgcaaggagtcgttgaggctgcaaagcaaataaatctatcagtcccgcttgttgtaagattggcaggtacaaattttgaagaaggaaaaaaaattctcgaagactcaaatttaaaaatattatctgccacagatttaaacgatgcagcgaaaaaaattgtcgactcaat

SEQ ID NO: 310146 - DNA, 223 bp, Unknown
  Bacterial polypeptide expressing nucleotide sequence isolated from the Sargasso Sea
atgaatatacacgagtaccaagcaaaacaaattttaaaggaatttggtatagaagtaccaaatggtgtttttgccctttcagttgaagatcttataaaaaaagctaagcaattaaatacaaataagtacgtgcttaaagcccaaattcatgccggaggaagaggcaaagcaggaggtgtaaaaattctaaataacattgatgaattaagcaaagcatctaaag

SEQ ID NO: 310147 - DNA, 286 bp, Unknown
  Bacterial polypeptide expressing nucleotide sequence isolated from the Sargasso Sea
atgaatatacacgagtaccaagctaaacaaattttaaaaaaatatggtgtagtagtaccaaatggtgtgttttcagattcaattgaagaattattagaaaaagcaaagtcattaaaaacggaaaaatttgttttaaaagcacaaattcatgctggtgggaggggtaaagcaggagggataaaaattgtaaatacattagaagagctaaatttagcagcaaatgaaatgttagggaaaaaattagtaacacatcaaacgggaccccaaggaacgaaagtaaaaagat

SEQ ID NO: 310148 - DNA, 769 bp, Unknown
  Bacterial polypeptide expressing nucleotide sequence isolated from the Sargasso Sea
gcacgggcgtttgcccagcagtggctagacaagcgcctggtgacttatcagaccgacgccaatggtcagccagtcagcaagatccttgtcgaggcttgcaccgatatcgacaaggaactctatctgggcgccgtggttgatcgcgccagtcgccgggtcgtgttcatggcctccaccgaaggtggcgtggatatcgaaaaagtcgctcacgacacgcccgagaaaatcctcaaggccaccatcgacccgctggtcggtgcgcagccgttccaggcgcgcgagctggcattccagctgggtctgaagggcgatcaggtcaagcagttcgtccatatcttcgtcggccttgcccagctgttccaggactatgacctggccctgctcgaagtgaacccgctggtgatcaagagggacggcaacctgcactgcctggatgccaagatcaacatcgacagcaacgccatctatcgtcaacccaaactgcgcgacatggccgatccgtctcaggacgatccgcgcgaggcccatgcagccaagtgggagctcaattacgtagcgctcgacggcaacattggctgcatggtcaatggtgcgggcctggccatgggcaccatggatatcgtcaacctgcatggcggtgcgccggcgaacttcctcgacgtgggcggtggtgccaccgaggaacgcgtgaccgaagcgttcaagatcattctctccgatagcaatgtcgcggccgttctggtgaacatcttcggcggcatcgtgcgat

SEQ ID NO: 310149 - DNA, 768 bp, Unknown
  Bacterial polypeptide expressing nucleotide sequence isolated from the Sargasso Sea
cctgtttccaaaggtaaggttatttttcatcctagatgatgcaatcgatgcttgcaatgaaattggtggatcaaagtgggttgtaaaagctcaagttcatgctggtgggagaggtaaagctggaggtgtagaattaatagaatcacctgaaatggcagttgaattttcaaaaaaatggttagggaatagactgattacttatcaaacagataaattaggtcaaattgttaactcaattttaattgaagaatatacagatattgataaagaattatatttaagtgcgattattgatagggactcacaaagtattgtttttattggctcaagtgaaggaggggtaaacatagaagaagttgctaaaaattcacctgaaaaaattatttatcagtcggtagcgtataaagatagttctttgcctgaacatgcaaggaatattgcacaggttttaaagcttgatgaaaatcaaactggtcaatttataagcatgatagataatcttttaagattatttattgagaaagatctaagtttattagaaattaatcctctagtaattaattctgctggtgatttacattgtttagatgcaaaaataaatattgactcaaatgcactttataggcagccagaattatttgatatgtatgatgaaactcaagaagatcctcaagaggctgaagctgcaaaaaatgatttaagttatgtttctttggatggaaatattggttgcatggttaatggagctggtttagcaatggggactat

SEQ ID NO: 310150 - DNA, 499 bp, Unknown
  Bacterial polypeptide expressing nucleotide sequence isolated from the Sargasso Sea
gcgctttttcgacatccagaacatttagatttaagggatttaaaagaggaagaggagacagaaatagaggcaagcaaacatggtttatcttatataaaattagatggcaatataggatgcatggttaatggtgctggcttggctatggctactatggatataatcaaattatatggtcaaacaccagcaaattttttagacgttggaggtggtgcatcaaaagaaaaagtttccgcagcgctaaaactgattttatcagataaaaatgttaaaggtattttgattaatattttcggcggcataatgagatgtgatgttcttgcggcaggtgttgtagatgctgcaagtgaaataaaaatagatttaccaattgttgtaagattggcaggcactaatgttgaagagggaaacaaaatattaaataactctaaattaaaaattattccagcttcagatttatcagatgctgcagagaaaattgttaatgctattacataat

SEQ ID NO: 310151 - DNA, 622 bp, Unknown
  Bacterial polypeptide expressing nucleotide sequence isolated from the Sargasso Sea
tatgaacattcacgaacatcaagccaaagatttgtttagagattataacattcctgtctcatcaggctctgtagcttatagtgcagatgagatagaaagagctgtaaatgaagttgtaggtccagtgtgggtagtgaaggctcaaatacatgcaggcggaagaggaaaaggcggaggtgtcaaagttgtttctactaaagaagatgcacttaacgaagcgaacaaaatgtatggcatgaatttagttactcctcaaactggagcatcaggtaaagaggttaagcgaatttacattgaaaatggttctgatatagaaaaggaattatatctctcatgtctgctagaccgatctactggtaaagttgcatttatagtttctaaaatgggaggcatggatatagaagcagtcgccgctgatacgcctgaaaatattaccacagttcaaattgaaccatcaataggtgttacaaataatgatattgaaatgattcagaaggcttttgaaatagatgataatttaaatcatcaattgtctgatctgattaaaaatatgtatttattttttattgaaaaagatgcaagtcttgttgaagttaatcctctgatagtcacaaatacaaat

SEQ ID NO: 310152 - DNA, 768 bp, Unknown
  Bacterial polypeptide expressing nucleotide sequence isolated from the Sargasso Sea
tattcaagaagcgtatgacatcgaaaaggaattatatctttcttgtttagttgacagagaaagctcaaaaattgctttcataagtagtaccgaaggaggaatagacatagagtctgtagcaaaagagaaaccagaaaaaattttaactaacaaaattgatctaaaaaaatctcttaccacagatgacattgaaaaaattattaagatattttcttttagtgatgatcaaaaaaaggatgcagaaaaattagtaaatgctttgtataatattttaattactaaagatgcttcgctaatagaaataaatcccttgataattacaaaacaaaaaaaactcatttgtttagatgcaaaaatgaattttgatgataatgcaatgcatagaagacctgaaattttaaaactaagagatctaaacgaggaagaacctgcagagatagaagctagcaagtttggtctagcttatataaagttaaatggatcaattggatgtatggttaatggcgcaggtctagcaatggcaaccatggatataattaaattatacggtcaagaacctgcaaattttcttgatgttggaggtggtgccacaaaagaacaggtcgcagcagcctttaagttaattttatcagataaaaaagttaagggaattttaataaatatttttggaggaataatgcgttgcgatgtacttgcacatggtgttgtggatgcagccagggaaatcaatataaaggttcctttggtggtcagacttgctggaaccaa

SEQ ID NO: 310153 - DNA, 514 bp, Unknown
  Bacterial polypeptide expressing nucleotide sequence isolated from the Sargasso Sea
tggcaatgcactgtatagacaaaagccgatagaagcaatgagagatttgagtcaagaggacgagcgtgaagcgcaagcggatgaatttaacctcaactacgttgcccttgatggaaatataggttgtatggtcaatggggctggtcttgcgatggggacaatggacctcgtgaaattgcatggtggaaatccagcaaattttctggatgtaggtggcggagcgacaaaggaagcagtcgccgaggcgtttaaaattatcttatctgatgattcagttaaggccgttttgatcaatatcttcggcggcatagtgagctgtgcgaccattgccgaggggatcataggagctgtccaggaggttggcgtgactgtgcctgtcgttgttaggtttgaggggaataactccgagttagggaggcagaccttgaaagaaagcgggctaaatataataccgggcgaatctttggtagatgcggctgaaaaggctgtggccgcagcgggagggtcaaaatga

SEQ ID NO: 310154 - DNA, 442 bp, Unknown
  Bacterial polypeptide expressing nucleotide sequence isolated from the Sargasso Sea
aatgagcatacttattgattcaagcactaaagtgatttgtcagggattcaccggtggccaaggaaccctgcacagcgaacaggctattgcatatgggaccaagctggtgggaggagttactccaggaaaaggcgggactcagcatctcgacctaccagtttttgatactgtcgctgatgcggtaagcaatactggagcgaccgctagcgtcatctacgtgccagctggtttttgcaaagattctattctggaggcgcttgacgcgggtatagagcttatagtttgtatcactgaaggcataccaaccttagatatgttggcggtgaaggctcgacttgaaatcagtggctcgaggatgattgggccgaattgtccgggggtcattacacctgggagcctgcaaaatagggatcatgcctggggatatcattttacccggtaa

SEQ ID NO: 310155 - DNA, 800 bp, Unknown
  Bacterial polypeptide expressing nucleotide sequence isolated from the Sargasso Sea
ttcattcagagcaggctataaatatggaaccaatcttgttggtggagttacaccaaagaaaggtggacaaaaacatttagacagaccagtttttaatagcgttttagaggcaaaaaatgaagtaggagcagatgcaactatgatttatgtacctgctaaatttgcagcagcagcaattattgaagctattgacgcatcagttgaacttattgtttgtataacagagggaattccaattcaggatatgcttaaggtcagacaaaaattaattggatctagtagcagattaattgggcctaattgtccaggaataatcacaccagatgaatgtaaaattgggattatgccgggaagtattcacaaaagaggaagtgttggaattgtatcaaggtcaggaacattgacatatgaggcagtagctcaaacaactgaaaatggacttggtcaatcaacttgtattggtattggtggtgatcctattaatggaacaaattttatagattgtttagatttatttttaaatgattcagaaacagaatctattttaatgataggtgaaattggaggaacagccgaagaagaagcggctgactttataaaaaatcataagattaaaaaaccaatagttggatttattgcaggaattactgctcctccaggaagaagaatggggcatgctggtgccattatatcaggtggcaagggtggagctgaagataaaataaaaaaaatggaagaatgtggtattatagttgctaaatcaccatcaattattggaaaaactttatttgataaactgt

SEQ ID NO: 310156 - DNA, 836 bp, Unknown
  Bacterial polypeptide expressing nucleotide sequence isolated from the Sargasso Sea
tctttcttgtgttgtagatagagaaacttcaaaaatagcatttatttcaagtgatcaaggagggatggatattgaagaggtagcgaaaaataacccagaaaaaataactactacaagattagaatttcaaaaagaaattacagatatagattgtgaaaaaatagtaaaaatctttaaactggattctgaagcaaattatcaagccataaaattggtaaaatcaatttataaattgtttatagaaaatgacgcaagtttaattgaaattaacccacttattttaacaaaagaaaataaaattttatgtttagatgcaaaaataaattttgatgataatgcactttttagaaatccagagattttaaatttgagagactttaatgaggaagaggaaaaagaaattgaagcaagcaaatataatttgtcctatattaaactagatggaaatataggttgtatggtaaatggagctgggcttgcgatggcaacgatggatataattaaactttatggacaagagcctgcaaattttttagatgtcggaggtggcgcatctaaagaaaaagtatctgcagcttttaaaattatattatctgataaaaatgtaagaggtattttaataaatatttttggtggaataatgagatgtgatattcttgctcaaggtgttgtagatgcagcaaatgaaatcaatattaatgtaccattagttgtaagattagcaggtacaaaatttgaggaaggaaaaaaaattttagaaaattctaatttaaaaatcatatcagcaacagatttatcagatgcagcaaaaaaaattgttgaggcaataaaataat

SEQ ID NO: 310157 - DNA, 694 bp, Unknown
  Bacterial polypeptide expressing nucleotide sequence isolated from the Sargasso Sea
gaagctaaagaaaagaccgaggctaatgcaactgtaatttatgtcccacctccatttgcagcggatgctattttagaagccatagatgctgaaattgaaattatagtatgcataactgaggggatccctcaacatgatatgaccagagtttataataagttgttacagtcaaaaagtagattagtaggaccaaattgtccgggtgttattactccagaggaatgtaaaattggaattatgccaggacacattcattcaaaaggtaatgttggcattgtatccaaatcaggaactttaacctatgaggcagtttatcaaacctcaacgataggtttgggacaatcttcttgtattggaataggaggagacccaatacctggtactaactttatagatattattgatctttttttaagagatgaagctactaattcaataataatgataggtgaaattggaggaaatgctgaggaagaagcagcagaatttataaaaaattctaaaataaaaaagccaatggtagcatttatagcaggtctaactgctccaaaaggaaaaagaatgggacatgctggtgctataatagcaggtggtaaaggaacagcagaagacaaaatagaggcgttaaaatctgctgatgtaaaagtttctatgtcaccagctttaatgggaaaaacgctatatgatttagtca

SEQ ID NO: 310158 - DNA, 437 bp, Unknown
  Bacterial polypeptide expressing nucleotide sequence isolated from the Sargasso Sea
aatcaaagcaagcaaatatgatttggcatatatcaaattagatggaaatattggttgtatggttaatggagctggtctagccatggctacaatggatattataaaattatatggagaggaacctgcaaattttctagatgttggtggcggagcttcaaaagaaaaagtatctgcagcatttaaaattattctttccgataaaaatgtaaaaggaattttaataaatatatttggtggaattatgagatgcgatgttcttgcccaaggggttgttgatgctgcaaaagaaattaaaattaatgtcccactagtcgttagattagctgggacaaactttaaagaaggtaaaaaaattttagataattctaatttagatattatctcagcttctgatttatctgatgcagcacaaaaaattgtaaaggaaattaagtaaa

SEQ ID NO: 310159 - DNA, 517 bp, Unknown
  Bacterial polypeptide expressing nucleotide sequence isolated from the Sargasso Sea
aattaattttgatgataattcactttatagacatccagaaattttaaaattaagagatttaaatgaagaaaatccaactgaaattgaagctagcaaacataatttgtcttatataaaactcgacggcaacattggctgtatggttaatggagcaggacttgctatggctacaatggatataataaaactttatggtaaagaacctgcaaattttttagatgttggaggcggtgcttctaaagaaaaagtatcagctgctttaaaaataattctttcagataaaaatgtaaaaggtattttaataaatatttttggagggataatgaagtgcgatgtacttgcccatggtgttgttgatgctgccaaagaaataaaaataaaagtacccttagttgtaagacttgcaggtacaaattttaaagaaggaaaaaatattttggacaattctggtttaaaaattatttcagcagaaaatttggatgatgctgcaaaaaaaattgtagaagctataaaataa

SEQ ID NO: 310160 - DNA, 799 bp, Unknown
  Bacterial polypeptide expressing nucleotide sequence isolated from the Sargasso Sea
aatgtcagttttagtcaataaaaatactagattaatctgtcaaggatttacaggttcccatggaacatttcactctgagcaagcaatcaaatatggaacaaatttagtaggtggagtgacaccaaaaaaaggtggccaaaaacatttgggccttccagtttttaatacagtgaaagaggcaagagaatccgagggagctaatgcaactatgatatacgtcccagctaaatttgcagcctcagcaattattgaagcaatagatgcatctatagaactaattgtatgtataactgaagggattcccattcaggatatgttaaaagttaaacagagattgaataattcaaaaagtagactgattggtcccaactgtccaggtgtcataactcctgatgagtgtaaaattggaataatgcctggcaacattcataaaaaaggaacagttggaatagtttcaagatcaggaactttaacttatgaagcagtagctcagactacagaaaatggattaggacaatcaacttgtattggaattggaggtgatcctatcaatggtacaaattttatagattgtctagatctatttttaaacgacgaggatacccaatcaattttaatgattggtgaaattggagggacagctgaggaagaggctgcagatttcattaaaaatcataaaataaaaaaaccaactgttggatttatagcaggtgttactgccccaccaggacgaagaatgggtcatgcaggagccataatttcaggtggcaaaggtggcgcaaaggaaaagattaaaaaa

SEQ ID NO: 310161 - DNA, 697 bp, Unknown
  Bacterial polypeptide expressing nucleotide sequence isolated from the Sargasso Sea
atgaacatacacgagtaccaagctaaagaaattcttaaacaatttggattacctgttcttaagggtaagtcatacaataaaaatcttcaaactcttaacgatgatatagctgatttaaaaggaccaccttgggttgttaaatcacaaattcatgcagggggtagaggcgctggatactttaaaaattcttttaatgataagggcggtgttcaggttgtgtttcaaaaaaatgaagtcacaaccattgctaaatcaatgatgggaaacatactgataacaaaacaaacaggagagataggtaaaacagtcaatcgtatatttattgaagaaggatgtgatattgacagagaattttatcttagtctgctagttgatagaaataattcaaaactaatgatgatgatttctgctgcaggtggtatggatattgaggaagttgcggtaaccaatcctgaaaaaataataaatgttcattttacaacatacaaagatatttcattagatgaaagcttaattgcaaaacttgagattaataacaatcaatttaaggaattaacttccattgttaataaattaataaatgcttttacttccattgatgcgtcaacaattgaaattaatccactggttttaaataaacagggaggttttgtagttttagatgcaaaaattacccttgatgataatgcgctttttc

SEQ ID NO: 310162 - DNA, 413 bp, Unknown
  Bacterial polypeptide expressing nucleotide sequence isolated from the Sargasso Sea
aactttaacctatgaagcagttgcacaaaccagtgaaaatggattgggacaaacatcatgtattggcattggaggagatcctattaatggaacaaattttatagattgtttggatttatttttaaatgacgaggaaacgaaatctatcttaatgattggagaaataggcggaacagcagaagaagaagcagcagaatttgcaaagaatcatagtataaaaaagccaattgttggttttattgcaggtttagcagcccctccaggaagaagaatgggacatgcaggagctataatttcaggtggaaaaggaggagccaaggaaaaaatcaaaaaaatggaagaatgtggtattacagttgcaaaatcgccctccgaaattggaaaaacattatttaataaattgtccaattgaa

SEQ ID NO: 310163 - DNA, 460 bp, Unknown
  Bacterial polypeptide expressing nucleotide sequence isolated from the Sargasso Sea
aatgtggatagttacactggactgaaaagtttccacgtgcaaaaaattttaaaagagttaggtctctctaaaaatcagcaaaaagctttgtcaaatttactgcagtctttgtttcgggcttttttacagctggacgcggccatgatcgaaataaacccattagtcataacaaagacagatgacctactagctatcgatgctaagatgagctttgatgataatgctctcttccggcagccagaggtgaaacaattacgcgatgaaagtgaggaagaacccacagaaattgaggcggcccaactggagttaaattatataaaactcgatggtaatatagggtgtctggtaaatggtgctgggctagcgatggcaactatggacattattaaattgcacgggggggaccctgcaaattttctagatgtaggcggaagtgccacaaaagagagagtagcagccg

SEQ ID NO: 310164 - DNA, 883 bp, Unknown
  Bacterial polypeptide expressing nucleotide sequence isolated from the Sargasso Sea
tgttcttcaaggtaagtcctatactaaaaatcttgatacacttcatgtagatatagaagatttaaatggcccaccttgggttgtaaaatcacaaattcatgctggtggaagaggtgctggacattttaaaaattcttttaatgataaaggcggtgtccaggttgtgtttgaaaaaaaagatgttctcactattgcgcaatcaatgatgggtaacgtgcttgtaacaaaacaaacaggtgaggaaggtaaaatagtaaaccacatttttattgaagaaggatgtgatattgatagagagttttatcttagtctcctggttgatagaaataatgctaaaataatgatgatgatttcttctgctggcggtatggatattgaggaagttgcggtaactaatcctgaaaaaattataaatattcattttacaacatacaaagatgtttctttagatgaaagtttactgacaaaacttgacattactaaaaaccaacttgaagatttaacttctattatcaataaattattaaatacttttacttctatagatgcatcaacaattgaaattaatccgcttgttttaaataagcaaggaggttttgttgtgttagatgcaaaaattagcttagatgataatgcgctttttcgacatcctgaattagtagagttaaaagatttaaatgaagaagatcctttggagttgcaagcagctgaacatgatatgaattatgttaagcttgatggatcaattgggtgtatggttaatggcgctggcttagctatggcaacaatggatattatcaaacaatttggtaaagagcctgcgaattttttagatttaggaggcacagcaaataaagatagagttataatgggctttaagatc

SEQ ID NO: 310165 - DNA, 630 bp, Unknown
  Bacterial polypeptide expressing nucleotide sequence isolated from the Sargasso Sea
tcctggaagccatcgatgccggcatcaagctcatcgtcaccatcaccgaaggcatcccgaccctggacatgctggacgtcaaggtgaagctgcaggaaaccggcgtacgcatgattgggcccaactgcccgggtgtcatcaccccgggtgagtgcaagatcggcatcatgccgggccacatccacaagccgggcaaggtgggcatcgtttcccgctccggcaccctgacctatgaagcggtcaagcagactacggacgagggcttcggccagtccacctgcgtcggcatcggtggcgatcccatcccgggttccaacttcatcgacatcctggagatgttccagaatgacccgcagactgaagccatcgtgatgattggcgagatcggcggcaacgccgaggaagatgcggcggcctatatcaaggcccacgtcaccaagccggtggtctcctacatcgcgggtgtcaccgccccggctggcaagcgcatgggtcatgcgggcgccatcatcgccggtggtaaaggcaccgcggcagagaaatttgccgccctggaagatgccggtgtgaaaaccgtgcgctccctggccgatatcggcaaagccctgcgtgaagtaaccggctggtaag

SEQ ID NO: 310166 - DNA, 562 bp, Unknown
  Bacterial polypeptide expressing nucleotide sequence isolated from the Sargasso Sea
ttttttttctaaaatttataaaacttttgttgatttagatgctagcttggtagagataaatccacttgtgctttcaaaagaaaataaattaatcgcacttgatgcaaaaatgtcttttgacaataatagtttatttagacagtcagaagttttggaacttaaagatgaaacagaagaagagccttctgaaacattagctaaaaaatttgatttagcatacataaagttagatggtgaaattggttgtttagtaaatggcgctggtttagctatggcaaccatggatatcataaatcttaaaggttcatcaccagctaattttttagatgtaggtggaagcgctactaaagaaaaagttaaagaagcattcaaaataattttgtctgatgatgctgttaaaggtatattagtaaatatattcggtggtataatgagatgtgacattattgcagaaggtgttgtagctgcagctagtgatttggcacttgacaaacctcttgttgtaagactttcaggaacaaacgtagagaagggaaaagagattttatctaaatctgatctt

SEQ ID NO: 310167 - DNA, 820 bp, Unknown
  Bacterial polypeptide expressing nucleotide sequence isolated from the Sargasso Sea
aatgaatattcacgaatatcaagcaaaagagattttaaaagaatttggagctccagtctcaaatggagtgacaattttttcaataagtgagattaaagaaaaaattaaaaaattaaaaagtaatgagctggttttaaaagcccaaattcatgctggcggaagaggaaaagccggtggagtaaaattgataaaagatatttcaaatttagaagaggaagcaaaaaaaatgataggaaagactcttgttacccatcaaactggaccagagggaaaagaggttaaaaaattatatattgaagaggcctctgatatttctaaagaattttatctatcttgtttaatagataggcagtcatccaaaatagcttttattagcagcacagaaggaggaatggatatagaaaaagttgcatctgagacacctgaaaatattgttactaataaaatcgatttgaaaaatgacggacctagtgaattagaaattgaaaaaataatttcagtttaccaattaaacaatgatcaaaaaaaagatgcatcaaaattaataaaatcgctttataatattataattcaaaaagatgcaagcttaatagaaattaatccattaattttaacaaaatctgaaaaattgatttgcttagatgctaaaatgaattttgatgacaatgcaatttttcgaagaccagaaatttcaaagttaagggatttagatgaagaaaatcctgcagaggtagaagctagcaaaaatgatcttgcttacattaagctcaatggatcaataggatgtatggttaatggagctggtttagctatggctacc

SEQ ID NO: 310168 - DNA, 882 bp, Unknown
  Bacterial polypeptide expressing nucleotide sequence isolated from the Sargasso Sea
aattaaaagtctccaagaagtttctggtgcttgcaaaaaaattggaggcaagagttgggttgcaaaggcacaagtgcatgcaggggggagaggaaaatctggaggagtaaaattatgcaattccattaatgaggtaagagattttgcagaacaatggttaggaaaaagtttaattacttatcaaaccgatgagtatggacaacttgtcaactcgatattaattgaagaactgactgatattaaagatgagatatatttaagtatggttgtagacagaacttcacagtctgttgctattattgcctctgcagagggtggggttaatattgaagaaacagctaaaaataatccagaaaaaattatttcaatttttttaaaagacccaaacatttctcaattacaaattcaaaagatttgtttaaccctgtctcttaataaacagcaatcagaacaaatggatgatattctaaaacgattgacaaaacttttttttgagtgcgatcttgcacttcttgaaattaatcccttggtcattaaaactgatgagaaactgcattgcttggatgcaaaattaaatgttgataacaatgctttatttcgacaacaagaattagctaaaatgcatgatcaaactcaagaagatcatagagaagcaactgccaaacaatttgatttaagttatgtatcactagttggtaacattggatgcatggtcaatggcgctggtttagcaatgggcaccatggatacaataaaattctttggtggtaatccagctaattttcttgatgtgggagggacagcaacacaagagagggttgctcaggctttcaaattaattctagatgatcccgatgttaaagtgattcttgttaacatttt

SEQ ID NO: 310169 - DNA, 832 bp, Unknown
  Bacterial polypeptide expressing nucleotide sequence isolated from the Sargasso Sea
ggtttagtttttgatagaagctcagagagcataatggttgtagcctcaactgaaggaggaatgagtgttgaagaaattgctaaagaaaaacctgaaacaattataagatctaaaattgaagtagcagttggtattcaaagttttcaagcaagagagcttgcatttggattaggaattgactcagatttgattgctagagcatctgatacaattattgggtgcgctaaagcgtttagcgaattggatgctacaatggttgaagttaatccattagttatttcaaaacaaaaacaaatattagctttagattgtaaaatgagttttgataacaatgccatgtttagaagaaataaagtatcagagttaagagataaatcccaagaagatgagaaagaagtatatgcatcagatagaggcttaaattatgtaagtttagagggaaacattggcaacattattaatggagctggacttgctatggcctcaatggacatgattaaattagctggaggagaacctgcaaattttttagatgttggtggtggagcaacaccagaaaaaattgtaaaagcgtttaggttaattaccatggataaaaaagtaaaagtaattttagtaaatatttttgcaggtataaatagatgtgattgggttgcagaaggtatagtccaggcgctagacaaaatagaggtaaaggttccattagttattagattagctgggacaaatgttgaaaaaggaaataaaattttaaaggacagtaaaataaactttattgaggcaagtactctagaggaagctgccaataaagcagtggctgcactgaaataaa

SEQ ID NO: 310170 - DNA, 727 bp, Unknown
  Bacterial polypeptide expressing nucleotide sequence isolated from the Sargasso Sea
cattcctatatttgatgatgtagaaaaagctgtcagtgaaacaaatgctaatgttgctctcacctttgtcccacctgcatttgcaaaagatgcagtgttagaagctgcatttggtggatgtgaattaatagtatgtataactgaaggaataccagcaaaagatgaagctgaaatgtatgacattctgaaaaaagaaacaaaagcctctcttttaggtccaaattgtccaggtttaatatcaccgggtaagacaaatgttggaattatgcctcacgaaattacattgccgggaaatataggagtagtttcaaggtcaggaactttgacttatcaagctgttcatgagttaacaaatcttaatattggacaatcaacgtgtataggtattggtggagatccagtacctggaatgtcattcatagatgtaattgagaaatttcaagcagatagtgaaacagaaggtatcgttatgattggagagattggtggtacagctgaagaagaagcagcagattttattaaacaaaatgtcacaaaacctgttgtgtcatatatagctggagtaacggcacctcctggtaaaaaaatgggccatgctggagcaattgtttcaggaaacaaaggtactgcagaagcaaagattcaagcattaactgatgctggtgcaatagttgttaagaccccaactgaaataggaaaagcaatgaaagatgttataaatggctga

SEQ ID NO: 310171 - DNA, 857 bp, Unknown
  Bacterial polypeptide expressing nucleotide sequence isolated from the Sargasso Sea
attgataaagatacaagagtactgttcagggtttacagggtctcaaggaacgcttcattcatctcaatctatagaatatggaactaatgttgtgggtggtgtaactcctggaaaaggtggagcctcacacttagatttacctgtttttaattcagttaaggaggcggttgaacaagtacaaccaaatgcatcattaatatttgttccagcacccttttgtaaaggtgcaattctcgaagccgcagatgctggaataaagtttattgtttgtataacagaaggtgttccaactttggatatgttggaagtaaaaaagatagttgatggcttagacattactcttattggccctaactgtcctggtgttataacccccggagttgggaaaatgggaattatgcctggtgagattcatcttcctggaagagttggaattatatctagatcaggaacacttacctatgaagcggttaagcaaactactgatttaggtctggggcaatctagttgtgttggaataggcggtgacccaattcctggttcttcttttattgatattttggagctttttgaagctgatgatcaaacagacgcaattgtcatggttggagagattggaggaagcgctgaagaggaagctgctgaattcatttcacagaatgtcactaaaccagttgtttcatatattgctggtcagactgcaccaccaggcaaaagaatgggccatgcaggtgccataatttctggaggtaagggtacagcagaggataaaattaaaaaactaaatgagagcggtgttgttgttgcaaaaaatcttcttgaaataggttctactataaagtcactgatgtcttgag

SEQ ID NO: 310172 - DNA, 589 bp, Unknown
  Bacterial polypeptide expressing nucleotide sequence isolated from the Sargasso Sea
gctgttggagataaatccgctggtggtgaccaaagacggcgacgtcatcccattggacgccaaaatgaacttcgactccaatgccctttaccgacagaacgatattcatgatctgcgcgatgaagacgaagaagaccccatggagctgcaggcctccaagcacgatctcaactatattaagttaaatgggaccatcggctgcatggtcaacggggccggcctggccatgtcgaccatggacatcatacagctccacggcggctcacctgcaaactttctagatgtgggcggcggggccaccgcggaaaaagtgactacggcattcaagataatcctgtctgacccaaacgtggaaggcattttggtcaacatcttcggcggtattatgcgctgtgatgtgatcgcggagggcgttgtcgaagcagcaaaagaggtcagcttggaagtgccgctagtggtccgcctagaaggtaccaatgtcgagttgggcaagaaaatcatggctgactctggtttgccaattatctccgccgatgatttgggagatgcggctgccaaagttgttaacgcggtgaaggacgcggcctga

SEQ ID NO: 310173 - DNA, 895 bp, Unknown
  Bacterial polypeptide expressing nucleotide sequence isolated from the Sargasso Sea
gaattacttggaaaaacactagttactcatcaaactggtcccgaaggtagagaagtaaaaagattatacgtagaggaatcttctaatatagaaaaagaattttacttatcgtgtctagtcgatagagcaagttctaaaattgcgtttatatcaagtaatcaaggtggaatggatattgaagaggttgcaaatagttctcctgaaaaaattataactacaaaagttgatatgggtcatgaaatttctaattcagattgtgaaaaaataattaaaatttttaatttaaatgaagatgtaaaaaaagaagcgatatcattaatcaaatcaatatataaaatgtttgtgagtacagacgcaaacatggttgaagtgaatccattaattatgacaaaagaggaaaaaattgtttgtttagatgcaaaaattaatttcgattcaaacgctttattcagacatccagaaattgttgaattaagagatttaaatgaggaagatcctatcgagatagaggctagtaaatatgatcttgcatatattaaactaggtggaagtattggctgcatggtgaacggagcaggattagcgatggcaacaatggatataataaaattgtatggtaatgagccagcaaattttttagatgtgggtggtggtgcatctaaagaaaaggtatccgctgctttaaagataattctctcagataaaaatgttaaaggtattttaataaatatttttggaggaattatgagatgtgatattcttgctcaaggagttgttgatgcagctaaggaaattaatattagtgtacctttagtcgtacgattagcaggtacaaatttcaaagaaggaaaagaaattcttgataattcaaaattggaaattaatttctgcagaa

SEQ ID NO: 310174 - DNA, 661 bp, Unknown
  Bacterial polypeptide expressing nucleotide sequence isolated from the Sargasso Sea
ggcaaacagattggttctgcggtaaaaattctatcggcgatgtatgaagcctttacggaactcgatgccagccttctgaaaataaatccgctcgttgttactaaaaacaacgagatcgttgccctcgatgcgaaaatggcctttgacgacaacggcctctatcgtcaaccgggcgtatccgaaatgcgtgatgaggatgaggagaacccgacagaattagaggcttccaagcacgagctcaattatatcaagctcgaaggcagcatcggttgcatggtcaatggcgccggcttagcaatggcaacgatggatattattaagctgtacggggcagaaccggcgaatttcctcgatgtgggtggcggggcgaccaaggaacgggtaagcacggcttttaagctcattctgtcggatcccaatgtcgaaggaattttggtgaatatctttggcggcattatgcgttgcgatgtgattgcggagggggttgtcgcagcggcgcgcgaggtcagtttgcaagtgccgttggtggttcgtctggaaggaacgaacgtcgagatgggtaaaaaaattattggagagtcagggctggagattatcgctgccaataatttggcggacgctgccgataagattgtcaaagcggtcaaggggatggagtaat

SEQ ID NO: 310175 - DNA, 646 bp, Unknown
  Bacterial polypeptide expressing nucleotide sequence isolated from the Sargasso Sea
atcagcagtacagaaggtggtatggatattgaaaaagttgctaaagagacaccacataaaataataactaacaaattagaatttacaaaggaaggacctaataaaaaagaaattgaaaaaataatttcgatatttaattttaataatacgcaaattgaaactgctcaaaatttgataaaatctttatataaaatattgattcaaaaagatgctaatttaattgaaattaatcctctaattataactaataataataaaataatatgtttagatgcaaaaatgaattttgatgataatgctatttttagaagacccgaaattttaaagctaagagatcttaatgaggaagattcaactgagattgaagcaagtaaacatgatctcgcttatataaaacttaatggctcaattggatgtatggttaatggagcaggtttagcaatggctacaatggacataattaaactttatggcaaagaaccagcaaactttctagatgtaggtggtggagcttcaaaagaaaaagtcaccgcagcatttaaattaattttggccgataaaaatgtaaaaggtattttgattaatatttttgggaggtatatgcgatgtgatgttttagctcaaggagtagttgaagctgcttaac

SEQ ID NO: 310176 - DNA, 517 bp, Unknown
  Bacterial polypeptide expressing nucleotide sequence isolated from the Sargasso Sea
aatgaatatccacgagcatcaagcaaaacaaattttaaaagaatttggagccacagtacctgaaggagtagttggttttacagttcaggaattattagagaaatgcaagttgttaaaaacggacaaatttgttttaaaagctcagatacatgcaggaggtagaggaaaagctggtggtgtaaaaattttagataatttagaagaactaagaaagtcagctaaagagcttttaggaaaaaaattagttacgcatcaaacaggacctgaaggaagagaagtaaaaagactttatgttgaagtttcttcaaaaattgaaaaagaattttatctttcatgtctagtagacagggcttcatcaaaaattgtgttcatttctagtgatcagggtggaatggatattgaagaggtggctataaaatcccctaataaaatttcaaagacaaaagttgaattaaaagatgaaatctcaaacgaacaatgtgaagaaattataaagatatttaattttagagggtag

SEQ ID NO: 310177 - DNA, 851 bp, Unknown
  Bacterial polypeptide expressing nucleotide sequence isolated from the Sargasso Sea
aaagaaattatatttaggtttagtttttgatcgaagctcagaaagtattatggttgtagcgtcaacagagggtggaatgagtgttgaagaaatttctaaaaagaaacccgaaactataattagatctaaaattgaagtagctgttggaatgcaaaaatttcaagctagagaaatagcttttggattaaaaattgagcctaatttaatagctagagcagcagacactattatcggatgttatcgtgcatttagtgagctagatgcaacgatggttgaagtaaatccgttagtaatatcaaatcaagatcaaatattagctttagattgcaaaatgagttttgataacaatgctttattcagaagaaatcaagtttctgaattaagagataaaacacaagagaatcctaatgaagtatatgcatcagacagaggccttaattacgttagcctagatggaaatatcggtaatataattaatggtgcaggtttagctatggcttcaatggacatgattaaattagcgggtggagaaccagcaaatttcttagatgttggtggaggagctacacctgaaaaaatagttaaagcttttaaattaatttcaatggatgagaaagtgaaagttatacttgtaaatatttttgcaggcataaatagatgtgattgggttgcagaaggtatagttcaagcattagagaaaatagaaattaaagttccaatagtaataagattggctggaacaaatgttgaaaaaggaaataaaatattaaaagaaagtaaaataaaatatatcgaagcaaacacactagaagatgctgcaaataaggcagttaaagcattgggtaattaaa

SEQ ID NO: 310178 - DNA, 781 bp, Unknown
  Bacterial polypeptide expressing nucleotide sequence isolated from the Sargasso Sea
aaaaaacacaaaagtcatttgccagggatttactggcgctcatggaacttttcattcagaacaagctttaaagtatggcacaaagttagtaggcggcgttaccccaaaaaaaggtggacaaattcatcttggtcttcctgtttttaattcagttcaagaggcaaaagaaaaaacaaaggctaacgcgtcgatgatttatgtaccgccaaaatttgctgcttcagctattattgaggcaatagactcagaaattgaactaattgtttgtatcactgaaggcatacccgttattgatatgataaaggttaaaaatttattaaaaaaaaataagagcaggcttataggtccaaactgtccaggaataataacaccaaatcaatgtaaaattggaataatgccaggtgatatacacatggagggttcagtaggcatagtgtctagatcaggcacattaacgtatgaggcagttgctcagacctcgtcaaataatttaggtcaatctacatgcattggaattggtggagatccgataaacgggacaaactttattgactgtttagaattatttttgaaggatgaaaatactcaatcaattgtaatgataggggagattggtggcactgccgaagaagaagctgcagaatttattaaaaggtctaaaataaaaaaacctattgttggttttgtagcaggtctcacggcacctcctggtagacggatgggccatgctggtgctataatttctggtggtaaaggcggagctaatgataagattgaaaca

SEQ ID NO: 310179 - DNA, 832 bp, Unknown
  Bacterial polypeptide expressing nucleotide sequence isolated from the Sargasso Sea
atgaacattcatgagtaccaagcaaaaactatgttcagggagtatggagtatcggtacagccgggttctcactgcaccacagtggatcaggcactattagcttacgactcccttggttcaaaaattgttgccgtaaaaagccagattcatgccggaggaagagggaagggagatctcttctgtacagactcaggagatttggtgatgcatggaggggtgaagatagcttcatccagggaggaagtgcttgatttctcatcaagtattctcggacgaaggttagtcaccaagcaaaccggacaatcgggtaagatcgtcaataatctgtatatcgaagcaggatgtgaaatagtgcatgagtactatctggcccttcttgtagacagagagaaggactctcttcttgttatggcctctactgaaggaggcgtggacatagaagaggtagcagagaattctcctgaagctatccataaattatggtttgatccttcacagggacttgatctacatagtgcaggaggactagcttcatctttaggcttagaggattcatcgcagcaatccttcattaaaatgatcagcaatctggcaacaatgtttgtagaaaaggactgttctatgatagaaatcaatccacttgtaagaacagaaaataatctcatgatcgcattggatgctaaggtgagcttcgatgagaatgcctcattcagacatcaatggatggaagatttacgggatctctcagaggagtcagacgttgaaataagagctaaggaatacgatctttcgtatgttgacctagatggaaatattggatgtttagtaaacg

SEQ ID NO: 310180 - DNA, 736 bp, Unknown
  Bacterial polypeptide expressing nucleotide sequence isolated from the Sargasso Sea
atgtcaattttaataaacaaaaatacaaaagtaatatgccagggttttacaggaaaacatggtacgtttcactctgaacaagcaatcaaatatggaactaatttagttggaggtgtaacaccaaaaaaaggtggtcaaatgcatctatcaaaaccggtttttaattctgttaaagaagcaaaagaaaaaactggtgctaatgcttctatgatttatgttcctgctaagtttgctgcttctgctattatagaagctatagatgcttctatagaattaatagcatgtattactgaaggaataccagttttagacatgttaaaagttaaaaaaaaattagctaattctaattcaagattaattggaccaaattgtcctggaattattacaccagaagaatgtaaaattggaataatgcctggaaatattcataaaaaaggttctgttggtattgtatctaggtccggaactttaacttatgaagccgtggcacaaactacagataatggactgggtcagtcaacctgcatagggattggtggcgatcctattaatggaacaaattttatagattgtctggatttatttttaaaagatgtagaaacaaaatctatattaataataggtgaaataggaggaacagctgaggaagaagcagcagaattttacaaaaatcataaaataaaaaaacctatggttggatttatagctggaattacagccccgccaggaagaagaa

SEQ ID NO: 310181 - DNA, 534 bp, Unknown
  Bacterial polypeptide expressing nucleotide sequence isolated from the Sargasso Sea
tttgtttagatgctaaagtaaattttgacagcaatgctctttttaggcaaccagaaattttagaattaagagatttgaatgaagaagaacctgcagaaattgaagctagcaaacatgacctagcatacataaaattagatggaaatattggatgtatggtaaatggtgccggtttagctatggccacaatggacataattaaacaatatggagaagagccagcaaattttttagatgttggaggaggagcctctaaagaaaaagtttctgctgcatttaagattattttgtctgataaaaatgtaaaaggaattttgattaatatttttggcggcattatgagatgtgatgtcctcgctcaaggtgtagtggatgcagcaaaagaaattaatattgaagtcccactagttgtaagattagctggtacaaattttaaagagggtaaagaaattttagataattcaggtttaaaattaatttctgctgaaaaccttgacgatgcagcaaaaaagattgttgaggctataaaataaa

SEQ ID NO: 310182 - DNA, 561 bp, Unknown
  Bacterial polypeptide expressing nucleotide sequence isolated from the Sargasso Sea
catgcagctcgtcacgcaccagaccggtccggaaggccagaaggtcaaccgtctgatgatcgaagaaggcgccgacatcaagcaggaactgtatgtcagcctcgtcgttgatcgcatctcgcagaagatcgtgctgatgggttcgagcgaaggcggcatggacatcgaagaagtcgccgaaaagcacccggaactgatccacaaggtcatcgtcgagccgtcgacgggcctgctcgacgcgcaggcagacgacctcgccgcgaagatcggcgtgccggctgcttcgattccgcaagcgcgcgcgatcctgcaaggcctgtacaaggcattctgggaaaccgacgcatcgctggctgaaatcaacccgctgaacgtttccggcgacggcaaggtcatcgcactcgacgcgaagttcaacttcgactcgaacgcgctgttccgccacccggaaatcgtcgcgtaccgcgatctggacgaagaagatccggctgaaatcgaagcgtcgaagttcgacctcgcgtacatctcgctcgacggcaacattggctgtctcgtgaacgg

SEQ ID NO: 310183 - DNA, 783 bp, Unknown
  Bacterial polypeptide expressing nucleotide sequence isolated from the Sargasso Sea
acaaaaatgggttggggtggagttacacctaggaaaaggaggtcaaaaccacctaaatttaccggtttttgatactttagatgaagcaatagacgtgacctcagctaatgcgtctgtaatttacgttcctcctgcgtttgcagctgattcaattttagaagcaattgacgctaaaattgatttaattgtttgtataactgagggaattcctgttcttgatatggtgaaagttaaaaatgcattaaaatattctagttcaagactaattggacctaattgcccgggtattattacacccaatgaatgtaaaattggtattatgcctggtcatatacacaaaaaaggtaaaattggaattgtatcaaggtcaggtacattaacatacgaggccgttggacaaaccacagctgctggtcttgggcaatccacatgtgttggaattggtggcgaccctttaaacggaactaattttattgattgtttaaatctttttctctcagatgaagaaactgatgctattattatgattggtgaaattggaggaacagctgaagaagaagcatcagaatttttgaaatcttcaaaaattaaaaaaccagttgcgggtttcatagcgggtagaactgctccaccaggaagaagaatgggacatgctggcgctatagtctcaggcaaaagtggaggtgcagaggccaaaattgatgcaatgagaagcgcgggaattaatgtaactgatagccctggtatgcttggtgaagctattattgaagctatgaagaaatt

SEQ ID NO: 310184 - DNA, 641 bp, Unknown
  Bacterial polypeptide expressing nucleotide sequence isolated from the Sargasso Sea
tcaatttaaaataattatagagaaattaggcagagcctttatttcattggatgcttcaactattgaaattaatccactggttatcaataaatcaggcaatttattacttctagatgctaagatagctttggatgataacgctttgtttcgtcatcctgaatatttgcaattaagagatacaagtgaagaaaatgaaatggaattagaggcaagtaagaatgatatgaattatattaaattagatggcgaaattggatgcatggtaaatggtgctggattagcaatggcgactatggatattgtaaaacagtttggcaaagagccagctaactttttggatttaggtggtacagctaataaagaaagaacaacaaaaggttttaaaattatacaatccgacccaaatgttaaatctgttcttataaatatttttggtggaattattcattgtgacatgattgcaaacggcatcatagatgcaataaaagaattaaactataaattaccagtagtagtaagattccaaggcacgaatgcagctgaaggaaaaaatattatcaataaatcttcacttggattggtttcaatagatgacttaacagaagctgcaaaaaaagtagttgatttagcaagtaaatgag

SEQ ID NO: 310185 - DNA, 637 bp, Unknown
  Bacterial polypeptide expressing nucleotide sequence isolated from the Sargasso Sea
aatgaatattcatgaatatcaagcaaaggaaattttaaaaaaatttggagttaaagttccaaatggggttcctgtttttgatttgagcgaattggaacaaaaatataaactatttaaaagtagaaaaattgctttaaaggcacagatacatgccggcggaagaggtaaggctggaggtataaaaatagtaaatagtttaaaagagttaaaaaaaagtgccacacttttatttggaaaaaaattagttacacaccaaactggaaaaaaaggaaaagaagtcaaaagattatatctggaagaaacatgtaatattaaaaaagaattttatttatcttgccttgtagatagatcaagttcaaaaattgtttttatttcaagcgcagaaggaggagtagatatagagaaagttgcaaaaaaaaatccaaaaaaaattattacagtgaaattagattcatttaattcaataaacgatgaaaatattgaaaaaataatttctccatttagtttatcaaaagaattgaaaaaaaaatcatttcgcttaattcaatgtatacataaaactttaatcgaaaaagacgcaaatcttattgaagttaatccattagttttgaccgaagataatgacttagtatgttta

SEQ ID NO: 310186 - DNA, 500 bp, Unknown
  Bacterial polypeptide expressing nucleotide sequence isolated from the Sargasso Sea
ccaagcgaaagtgcgagaaatgcgcgacacgactcaggaaaatgagcgagaaaatcgtgctcagcagtgggagttgaattacatctcgctggatggtgacattggttgtatggttaacggcgcgggtttagcgatggcgaccatggatttaatcaagctcaacggtggtaacccagctaactttctggacgtgggtggtggcgcaacaaaagagcgtgtaacagaagcgttcaagatcatcatgtctgatgacaatgtgaaggccgtattggttaatatctttggcggtattgttcgttgtgacttaattgctgaaggtatcatggctgcagtagaagaagtcggtattacggtaccggttgtggttcgcttagagggcaataacgcagagttgggtgcgaaattattggctgacagtggcttgaatatcatcccagcgaatggtttttctgatgcagcagcgcaagtcgttgcagcagctcagaaagcggctgaatagt

SEQ ID NO: 310187 - DNA, 757 bp, Unknown
  Bacterial polypeptide expressing nucleotide sequence isolated from the Sargasso Sea
tctaaaaagaaacctgaaactataattagatctaaaattgaagtagctgttggaatgcaaaaatttcaagcaagagaaatagcatttggattaaaaattgaacctaatttgattgcaagagcagcagacacaattattggatgctatcgagcatttagcgaactagatgcaacaatggttgaagtaaatccattagcgatatcaaaacaagatcaaatattagctttagattgtaaaatgagttttgataacaatgctttatttagaagaaatcaagtttccgaattaagagacaaaactcaagaaaacccaaatgaagtatacgcatctgatcgaggtctaaattacgttagtcttgatggaaatattggaaatataattaatggagcaggcttagctatggcttcaatggacatgattaagttagctggtggagaaccagcaaatttcttagatgttggtggaggagctacccctgaaaagatagttaaagcttttaaattaatttcaatggacgaaaaagtaaaagttatactggtaaacatttttgcgggtataaatagatgtgattgggttgcagaaggcattgttcaagctttagaaaaaatacaaattaaagttccaatagtaattagattagctggaacaaatgttgaaaaaggaaataaaatattaaaagaaagtaaaattaaatatattgaagcaaatacattagaggatgccgcaaataaagcggttaaagcattgagtaattaaa

SEQ ID NO: 310188 - DNA, 856 bp, Unknown
  Bacterial polypeptide expressing nucleotide sequence isolated from the Sargasso Sea
aatactaaagtaatttgtcagggatttactggcgcacatgggacttttcattcagagcaggctataaaatatggaactaatcttgttggtggagttacgccaaagaaaggtggacaaaaacatttagacagaccagtttttaatagcgttttagaggcaaaaaatgaagtaggagcagatgcaactatgatttatgtacctgctaaatttgcagcagcagcaatcattgaagctattgatgcatcaattgaacttattgtttgtataaccgaaggaattccaattcaggatatgcttaaggtaagacaaaaattaagtggctctaatagcagattaatcggacctaattgtccaggaataattacaccagatgaatgtaaaattgggattatgccaggaagtattcataaaagaggaagtgttggaattgtatcgaggtcaggaacattgacatatgaagcagtagcccaaacaactgaaaatggacttggtcaatcaacttgtattggtattggtggtgatcctattaatggaacaaattttatagattgtttagatttatttttaaatgactctgaaacagaatctattttaatgataggtgaaattggaggaacagccgaagaagaagcggctgactttataaaaaatcataagattaaaaaaccaatagttggatttattgcaggaattactgctcctccaggaaggagaatggggcatgctggtgccattatatcaggtggcaagggtggagctgaagataaaataaaaaaaatggaagaatgtggtattataattgctaaatcaccatcaattattggaaaaactttatttgataaactgtctaattgaa

SEQ ID NO: 310189 - DNA, 219 bp, Unknown
  Bacterial polypeptide expressing nucleotide sequence isolated from the Sargasso Sea
aatgaaaattcacgaataccaagcaaaggaaatatttagagattttgatgtacgtgttcccagtgggaaaccggttttttctgtagaagaagctcttcaagcatatgatgaaatgggatcagagacagttgttgttaaagcgcagattcatgcaggtggtcgtggaaaaggaggaggagtaaaactcgcacataatcgggatgatgtagagtctcttgc

SEQ ID NO: 310190 - DNA, 848 bp, Unknown
  Bacterial polypeptide expressing nucleotide sequence isolated from the Sargasso Sea
ttacttagtgaatttggaataccaattcctaagagtaaagtttctgatgacaaaaatacattattaaatcattttgatgattttggatcgaacgctgttttgaaagtacaagttcatgctggaggtagaggaaaagcaggtggtgtgaagttggtagacaataaagaagatgcagctaattttgcagacaagttttttggtaatttattccaaacatttcaaacaggagatgaatccgttgttgtgaataaaattctcgtagaagaagctagtaaaatagtttctgaaatgtatttagccttgttagttgatggcagtaatcaatcagttaatattattgctagtcctgaaggcggaactgatatcgaagaagttgcgtcttcaaatcctgagaaaatatttaatcttccaataaacactattttaggaccaacagattttcatgtcagagaaattttagattttctttatttagacaaaaagcttttttctcaattaaataaaattatacgaggattatataaattgtatttagaaaaagactgctctttaattgaaattaatcctttaatactaaatgaagataacgaaataatagcactagacgcaaaaatcacttttgatgaagatgcattatttagaaataaagatattggtgaattaagagatttaagccaagaaaatgaagtagagattaaagcagctgaacttggtattaagtacgtacaactcaaaggaagtgtgggctgtattgtaaatggagcgggtttagcaatggctactatggatgttattcaatcagcaggattaaatcccgcgaactttttagatatcggtggaggagcaga

SEQ ID NO: 310191 - DNA, 684 bp, Unknown
  Bacterial polypeptide expressing nucleotide sequence isolated from the Sargasso Sea
aatgtcaattttagttaacaaaaatacaaaagtaatatgccagggttttactggaaaacatggtacttttcattctgaacaagcaattaagtatggaacaaatttagttggaggcgtaacaccaaaaaaaggtggtaaaatgcatctatctaaaccagtttttaactcagttaaagaagctaaagaaaaaactggcgcaaatgcttctatgatttatgtccctgcaaagtttgctgcttctgctattattgaagctgtagaagcttctatagaattaataacatgtattactgaaggaataccagttttagatatgttaaaagttaaaaagaaattaagaaattctaattcaagactaatcggcccaaattgccccggaattattactccgggagaatgtaaaattggaataatgccaggaaatattcataaaaaagggtctgtaggaattgtatctagatcaggaactttaacttatgaagctgtggcacaaactacagataatggattgggccagtcaacttgtatagggattggtggcgatcctattaatgggacagactttatagattgtttagatttatttttaaacgatgaagaaacaaagtctatattaattataggtgagataggcggaacagctgaggaggaagcagctgaattttttaaaaatcataaaataaa

SEQ ID NO: 310192 - DNA, 766 bp, Unknown
  Bacterial polypeptide expressing nucleotide sequence isolated from the Sargasso Sea
atgaatattcatgaatatcaggccaaacaggtcttaaacaagtatggtgttccgacttcgagtgggattgttgcacttaaagaggaagaaattgatgagctgatgaaagattttgacgctgatctatatgttgttaaagcacagatccacgcaggtggtagaggaaaagctggcggtgttaaagttgttaaagacaaagaggaagcaagaaagcaagcgcatgaaatgtttggaaaaactcttgttactcatcaaacaggtccagaagggcaggttgtaaagagagtatatgtcgaatcaggttgtggtatagaaaaagaatactacttcagtgcggttttagatagagcgactagcagaattacatttatggcatcgactgaaggtggtgttgatattgaggacgtagcggaaaaaactcctgaaaaaataatcaaagtatcagtagatcctgcaactggtttgcaacctttccattgtagatcacttgcatttggtcttggtttttcgggtgatcaagctaagcaaatgatgaaaatggctagttgtgtatatgatgcttttgtttcaactgatgcatcgcaagttgagattaatcctctagtagttacgacagaaggtaatttgcttgctcttgatgctaagatgaattttgatgaaaatggactatttagacatcctgagattgaagctcttcgtgacgaagatgaagaagatccacaggaagtaagagcaagtaaacatgatttgagttatgttcgtatgg

SEQ ID NO: 310193 - DNA, 703 bp, Unknown
  Bacterial polypeptide expressing nucleotide sequence isolated from the Sargasso Sea
gacaaaatcggcggcagcgagtgggttgtcaaagcccaggtccacgccggtggtcgcggtaaagcgggcggcgtcaagctggttcgcagcaaagaagacgccaaggccttcgcacagcagtggctgggcaagcgtctggtgacttaccagactgatgccaatggccaaccagtcaccaagatcctggttgaatcgtgcactgatatcgctaaagagctgtacctgggcgctgtcgttgaccgttcgagccgtcgcatcgtgttcatggcttccaccgaaggtggcgtggacatcgagaaaatcgctcacgaaaccccagaaaaaattctgaaggccactatcgatccactggttggcgctcagccattccagggtcgcgagctggctttccagctgggcctggaaggcaagcaagttgcccagttcgccaagatcttcgtaggtctggccaaactgttccaggatcacgatctggccctgctggaagtgaacccgctggtgatcaaggctgacggcgatctgcactgcctcgatgccaagatcaacatcgacgccaacgccatgtaccgtcagcctaagctgaagactttccacgatccgtcgcaagacgatccgcgcgaagcgcacgctgccaagttcgaactgaactacgtagccctggaaggtaacatcggctgcatggtcaacggtgccggcctggcca

SEQ ID NO: 310194 - DNA, 373 bp, Unknown
  Bacterial polypeptide expressing nucleotide sequence isolated from the Sargasso Sea
ggcttgggtcaatcaacatgtattggaattgggggagacccaattaatggaacaaactttattgattgtttagaattatttcttaaagataaagaaacagagtctattgttatgatcggagaaataggcggcactgctgaagaggaggcatcagagtttattaaaaagtcaaaaataaaaaaacctatcgttggttttgtggcaggtttgacagcacctcctggtagacggatgggtcatgctggagcaattatatccggtggtaaaggcggagcaaatgataagattgaaactatgaaatcagcaggaataactatctctaagtctcctgctgatataggtaagacactttttgaaaaactaaaggcttgat

SEQ ID NO: 310195 - DNA, 253 bp, Unknown
  Bacterial polypeptide expressing nucleotide sequence isolated from the Sargasso Sea
attcataaaaaaggaacagtaggaattgtttctaggtcaggaacattaacttacgaggctgtagcccaaacctcagaaaatggccttggtcaatccacatgtataggaataggtggagatccaatacatggtacaaattttattgattgtctagatctgtttttaaatgatgaaaaaactgagtctatagtaatgattggtgagatcggagggactgctgaagaagaagctgctgaatttataaaaaatcata

SEQ ID NO: 310196 - DNA, 777 bp, Unknown
  Bacterial polypeptide expressing nucleotide sequence isolated from the Sargasso Sea
aatgtcagttttaattaacaaggacacaaaagtaatttgtcaaggtttcactggcgctcacggaacttttcattctgaacaatctattaagtacggaactaacttggttggtggagttactcctaaaaaaggaggtcaaattcatttggaaagaccagtatttaatactgttaaagaagctaaagatcagacaggtgcaaatgcaacaatgatttatgttcctgcaaagtttgcagcttcagcaattatagaggcaattgattcatctatagaattgattgtatgtataagtgagggaattccagttttagacatgcttaaagtaaaaaaaagactttttaactctaaatcgagacttattggtcccaactgtccaggtataataactcctgatgaatgtaaaattggaataatgcctggaaatattcataaaaaaggaacagtaggaattgtttctaggtcaggaacattaacttacgaggctgtagcccaaacctcagaaaatggccttggtcaatctacatgtataggaataggtggagatccaatacatggtacaaattttattgattgtctagatatgtttttaaatgatgaaaaaactgagtctatagtaatgattggtgagatcggagggactgctgaagaagaagctgctgaatttataaaaaatcataagataaaaaaaccaatggttggatttgtagctggaattacagcaccacctggcagacgaatgggtcatgctggtgcaataatatcaggggggaaaaggta

SEQ ID NO: 310197 - DNA, 730 bp, Unknown
  Bacterial polypeptide expressing nucleotide sequence isolated from the Sargasso Sea
acaatagatccagcatctggactttctagcttttatgggagagcgattgccttttcgctaaatctaaaaggcaaacaaataaaacaatgtgtatcactagtctcaaccctctataaaatatttttagaaaccgactgtgaaatgctggagataaatcctctcattttaaccaaagatggagatcttaactgtttagactgcaagatggctttcgatagcaatgctctctataggcagccctcaatacttagcttgcgagatgagtctgaagaagacccaaaggaattagctgcttccaaatttgacttaaactatattgcccttgatggagaaattggatgcatggtcaatggagcaggccttgctatggcaacaatggatataataaagtatttcggatcggaacctgctaattttttggatgtcggaggtgcggcaacaaaagagaaagtcactgaagcatttaaaataattactgccgataaaaatgttaaaggtatattagtgaatatttttggaggcataatgagatgtgacgtaatagctgaaggagtagtttcggctgttaaggaagtaggattaaaagttccactagttgtgagattagaaggcactaacgtagatttaggaaaagagatcataaataagagtggtttaaatgtcatagcagcagacaatctaggtgatgcggcgaataaaattgtaaaagaagtaaaaagtggaaattaga

SEQ ID NO: 310198 - DNA, 844 bp, Unknown
  Bacterial polypeptide expressing nucleotide sequence isolated from the Sargasso Sea
agtaaataaagtgttaattgctgaagatgcatatgcaccagattttgataaaaccagtgaattttacatgtctgttttacttaacagagattctgggaaaaacattataatgtattctacagaaggaggaatgaatattgaagaagttgctgaaaaaacaccccatctaatttttaaggaggaaattgatccaggtattggaattcagccttttcagtgtagaaatattgcatttaatttagggcttagtggaaaagcttttaaagaaatgaccaaatttgttagagctctttatgctgcatatgttgggtgtgatgcttctttattcgagataaatccagttttaaaaacctgtgatgacagaataattgctgtggattctaaggtttctcttgatgataatgcactttacagacaccctgattatgctcaaatgcgtgatttagatgaagaagatccaatagatgttgaagctgatcaagctggactaaattatgtgaatttagatggtaatgtgggctgtatggttaatggagcaggtttagctatggcaactatggacattataaagcaaagtggtggagatccagcaaactttttagatgttggtggtactgctaatgccgatagagtagagaaagcatttaatatcattttaaaagaccctaatgtaaagggtattttggttaatatttttggtggaattgttagatgtgatcgagttgcaaatgggattgttcaagcatataagaacattggaaatattccggttccaattattgtaaggttacaaggaactaattcgattgaagctaagtcaattattgataattctggtttaaat

SEQ ID NO: 310199 - DNA, 799 bp, Unknown
  Bacterial polypeptide expressing nucleotide sequence isolated from the Sargasso Sea
caagcaattaaatatggaactaatttagttggtggtgtaactccaaaaaagggtggtcaaaaacatttagatagacctgtttttaatagtgttattgaagcaaaagatagtgttggtgcagatgcaacaatgatttatgtgcctgctaaatttgctgcaactgcaattatagaagcgatagatgcttcaataggattaattgtttgtattactgaaggtatcccagttcaggatatgcttaaggtaagacaaaaattaaatggctctaaaagtagattgattggaccaaattgcccaggaataattactccagacgaatgtaaaattggaattatgccaggaaatattcataaaagaggatcggttggaattgtatcaagatcaggaacactcacttacgaagcggtagcacaaacaactgagaatggattaggtcaatcaacctgtattggtatcggtggcgatccaattaatggaacaaattttattgattgtttagatttgtttttaaacgacgaagataccaaatctattttaatgataggagaaattggaggtactgcagaagaagaggctgcagaatttgtaaaaaatcataaaatcaaaaaaccaatagttgggtttattgctggaattactgcccctcctggacgtagaatgggtcatgcaggagctattatttcaggaggaaagggtggtgctgaagacaagattaaaaaaatggaggaatctggcataactgttgcaaaatcgccttcaataattggaaaaactttatttaataaattgtcaaattgaa

SEQ ID NO: 310200 - DNA, 857 bp, Unknown
  Bacterial polypeptide expressing nucleotide sequence isolated from the Sargasso Sea
ggtaagtctggaggagttgaattaattgattctgctaaatcagctactagatttgctgaaaaatggttaggtaacagattggtcacatatcaaactgataaaaaaggccaactcgttaactcaatattaatagaggaatgcacaagtattttaaaagagctttacctaagcgctgtgatagatagagattctcaaaaaattgttttcattgggtcaagtgaaggaggagtaaatattgaggatgttgcaaaaaattcaccagaaaaaataatttatcaaggcatagatattgataactcaaatacacaagaagaagctcttagtatttctaaagttcttggacttaacgatattcaaactaagcaactcatacctatgatcgaaaaccttttaaggttattcatagaaaaagaccttagtcttctagaaataaatcctctagttatcaatgaaaatggtgatttaaaatgtttagatgcaaaaatcaatgttgactctaatgctttatttaggcagcccgagcttcaagatatgcatgatgagactcaggaagatccccaagaggcagaagcagcaaaaagtgatttaagttatgtttctttagatgggaatattggatgtatggtcaatggtgcagggttagctatgggaactatggatactattaaattttttgggggcaatcctgctaattttttagatgttggcggtactgctactcaagaaagagtagcaaaggcatttaaaataatacttaaagacaaagaagttaaggttgttttagttaatatttttggtggaattgttagatgcgacttaattgcagaaggtgtcgtagcagcaatgaaagaagttaa

SEQ ID NO: 310201 - DNA, 633 bp, Unknown
  Bacterial polypeptide expressing nucleotide sequence isolated from the Sargasso Sea
ctatcaaattgattaaatctatctataaaatgtttattagtactgatgcaaatcttgttgaaattaatccattaattttaacaaaagaaaataaaattatttgtttagatgcaaaaataagttttgatgatagcgcattatttaaacatccagaaattttagagttaagagatttaaatgaggaagaaagtacagagatagaagcaagcaaacatgatttagcttatataaaattagatggtaaaatcggatgtatggttaatggtgctgggcttgcaatggcaacaatggatataattaagttgcatggtcaagagccagcaaattttttagatgttggaggcggagcttcaaaagaaaaagtttcagctgcatttaaaataatattatcagataaaaatgttaaaggaatcttaataaatatttttggaggtataatgaggtgtgatgttcttgcacaaggagttgtagacgctgcaaaagaaattgaaattaatgttccattagttgtaagattagcagggacgaaatttgaagaaggaaaaaaaattttagataattcaggattaaaaattatatctgccacagatttatctgatgcagccaaaaaagttgtaggggcaataaaataaa

SEQ ID NO: 310202 - DNA, 760 bp, Unknown
  Bacterial polypeptide expressing nucleotide sequence isolated from the Sargasso Sea
aatgaatattcatgaacatcaagctaaagaaattttgaaagaatttggtgcacctgtatctaatggtgttgtaattaattctattgatgaaattaaagaaaaaatttcaaagctaaatacaaaagaatttgtattaaaagcgcaaatccatgctggaggaagaggaaaagccggaggtgtaaagttggttaaaaatatctctgatttagaaactgaagctgaaaaaatgatgggaaaaactttaataacccatcaaactggacctgaaggcaaacaagttaaaagattatatatagaagaagcctctgatatttcgaaagaattttatttatcttgtctaattgatagagagtcatcaaaaatagtttttatttctagcaccgagggaggcatggatattgagaaggttgcagctgaaacaccaaagaaaattacaactaataagattgaatttaaaaaagagggattaaatgaaaaagaaatagaaaatattatttcaatttttaaattagatgataagcaaaaaaaaatagcatcaaaattattgaactcgctttatgaaattataattaaaaaagatgccagcttaattgaaatcaatccattaattattacaaaatcaaacaatttggtttgtttagatgcaaaaatgaattttgatgataatgctatttttagacatccagagattttaaaacttcgagatcttaacgaagaagagccagctgaaatagaggcaagtaggcatgatttagcttat

SEQ ID NO: 310203 - DNA, 559 bp, Unknown
  Bacterial polypeptide expressing nucleotide sequence isolated from the Sargasso Sea
ggtaattacaaaaagtaatgaaatactttgtctagatgcaaaaatgaattttgatgataatgcaatttttaaacatccagaaatatataaattaagagatttaaatgaggaagaccctacagagattgaggccagtaaacatgatttggcttacataaaattagaaggctcaataggttgtatggttaatggtgcaggtttagcaatggctacaatggatataatcaaactttatggggaagaacctgcaaattttttagatgtaggaggaggcgcaagtagagaaaaagttaccgcagcattcaaaatactactctcagacaaaaatgtaaaaggtgtcctaataaatattttcggcggcataatgcaatgcgatgttcttgctcaaggtgttgttgaagcagcaaaagatgtaaaattaaaagttcctttagttgtccgtctagctggcactaatttcaaagaaggaaaaaaaattcttgatgcatcaggtttagaaatactatcagcagataatcttaacgatgcagcaaaaaaaatagttaaggctataaaataa

SEQ ID NO: 310204 - DNA, 751 bp, Unknown
  Bacterial polypeptide expressing nucleotide sequence isolated from the Sargasso Sea
aatgtcagttttagtaaataaaaatacaaaagttatatgccaaggctttacaggtaaacatggtacttttcattcagaacaagctttaaaatatggcacaagacttgtaggaggcgtgactcctaacaaagggggtcagaaacatttaaatcttccagtatttaatacagtacaggaagctaaagataaaacttcagctaatgcaactatgatttatgttcctccaaaatttgcaggagcagctataattgaggcaatagatgcaaaaatggaattgattgtatgtattaccgagggaataccagttattgatatgataaaagttaaaaaaattttgaaaaaaagtagctcaagattaataggtcccaattgccctggtataataacaccagatgaatgtaaaattgggattatgccaggtaatattcataaaaaaggttctgttggtatagtttctagatctggaacattgacgtacgaggctgtagctcaaacgtcagcaaataatattggacaatcaacttgcatagggattggaggagacccaattaatgggacgaacttcatagattgtttaaaactttttttagaggatgacgaaacagagtcgatagtaatgattggcgaaataggaggtactgcggaggaagaggcagcagaatttttaaaaaaagagaaaattaaaaaacctacagtgggatttattgctggattgactgcgccaccaggcagaagaatgggacacgctggg

SEQ ID NO: 310205 - DNA, 403 bp, Unknown
  Bacterial polypeptide expressing nucleotide sequence isolated from the Sargasso Sea
agacggtgagataggttgtcttgttaacggagctggattggcaatggctacaatggatattataaagcttaaaggatcatcaccggctaattttttggatgttggtggcagtgctacaaaagaaaaagtaacagaagcgtttaaaatcattttatctgatcaatctgtaaaaggaatattggtaaatatttttggaggaattatgagatgtgatattatagctgaaggcgttgttgctgcagcaagtgatttaaagatagataaacctttagttgtgaggctatctggtacaaatgtaagtgaggggaaatcaattttagctaactctgatctagaaataatttctgctgataatttagatgacgctgctgaaaaaattgtagcatctgtaaatggtaattaa

SEQ ID NO: 310206 - DNA, 784 bp, Unknown
  Bacterial polypeptide expressing nucleotide sequence isolated from the Sargasso Sea
gctcaaatacatgcaggcggtagaggaaaagctggtggtgtaaaaattttagataatttaaatgaattagaaaagtcagcaaaagaacttttaggaaaaaaattaattactcatcaaacaggaccagaaggaagagaagtaaaaagactttatgtagaagtatcatcaaacatcgagaaagaattctacctatcttgtttggtagatagggctacttcaaaaattgcatttattacaagcgatcaagggggtatggatattgaagaagttgctgccaaatctccaaataaaattttgacaactaaagttgaattaaatgaagaaatttcaaaagaggattgtgaaaaaataatcaaaatttttgatttagaagatagttctaaaaaagaagcaatttctttaattaaatcaatttataaaatgtttattaaaacagatgcaaacatggttgaaattaatccattaatattaactaaagaaaaaaacattgtttgtttagatgcaaaagtcaattttgatagcaatgctttgtttagacatccggaaattttagaacttagagatttaaacgaagaagacccagcagaaattgaagcaagcaaacatgatttagcttatattaaattggatggaagtattggctgtatggtgaatggtgcgggactagccatggcaactatggatataataaaattgtatggtgaagaacctgcaaattttttagatgtcggtggaggtgcctcaaaagaaaaagtttcagcagcttttaaaataattttgtcag

SEQ ID NO: 310207 - DNA, 511 bp, Unknown
  Bacterial polypeptide expressing nucleotide sequence isolated from the Sargasso Sea
tttgacgataacgctatttttagacacccagatatttatgaacttcgtgatttgaatgaagaagacccaactgaaattgaagctaataaacaagaactttcttatattaaactcgatggaaatattggatgtatggtaaatggcgcaggactagctatggcaacaatggatataataaaattatttggtggcagcccagcaaactttttagatgttggtggcggagcatcaaaggataaagttgcagctgcttttaaaatgatactcagtgataaaaatgtaaaagctattttaattaatatctttggaggcataatgagatgcgatgtattagctttaggtgtagttgaagctgctaaagaaatgaaaatagatatcccattagttgtcagattagcaggtaccaattatgaaaagggaaaaaaaatcttagacgattctaaattaaaaattatttctgcctcagatttatctgaagctgcaaaaaaagtggtagaggttactaaataat

SEQ ID NO: 310208 - DNA, 445 bp, Unknown
  Bacterial polypeptide expressing nucleotide sequence isolated from the Sargasso Sea
agaggaagtggttggaattgtatcaaggtcaggtacattgacatatgaggcattagcacaaacaaccgaaattggactaggtcaatcaacttgtattggtattggtggtgatcctattaatggaacaaatttcatagactgtttagatttatttttaaatgatgatgaaactcagtctattttaatgataggtgaaataggaggaactgctgaagaggaagctgcagaatttataaaaaatcataatattaaaaagccaatagttggatttattgcaggaattaccgctcctcctggcagaagaatgggacatgctggtgctataatttcaggtggtaaaggtggagctaaagataaaattaaaaaaatggaagaatgcggcattactgttgctaaatcaccatcaatcattggaaaaactttatttaataaactgtctaattga

SEQ ID NO: 310209 - DNA, 854 bp, Unknown
  Bacterial polypeptide expressing nucleotide sequence isolated from the Sargasso Sea
ggccaaagggaaagaggtcaaaagattatatattgaagaaggatgtgatattggtaaagaattttatttgtcattattagttgatcgtaaaacatctaaaataacaattatagcttctacagaaggtggtatggacattgaaaaagttgcagcagaaaatccagaaaaaatacatactatttctattgattcgtctactggtttaaagcctcatcatgcaagaaggttgtctaatgcattagaacttgaaacttatacctcaaaacaactttggggatttttaaactgtctctataaagcgtttatcagtttagatgcatctcttattgaaataaatccattaattgtaacttcaaaaggagacttaatagctttggatgcaaaaatgtccttcgatgataatgcattatttagacaactgcacttaaatgaacttagagatttaaatgaggaagacccagcagaacttagagcatcagaatttgatcttaactatataaaattagacggaagtataggttgtatggtaaatggagctggtttggcaatggctacgatggacataattaagattgaaggtggtgaacctgcaaattttcttgatgttggtggtggagcaacaatagaaaaagttaatgaagcatttaaaattattttatctgataaaaatgttaaaggaatccttgttaatatttttggtgggataatgagatgtgatgttattgctcagggagtagtagaagcagcaaaatcacttggattaaaaaaaccattagtggttaggctagagggtactaatgtagaagagggaaaaaaaataatgagtgaatcaggtctagatataatacctgcaa

SEQ ID NO: 310210 - DNA, 806 bp, Unknown
  Bacterial polypeptide expressing nucleotide sequence isolated from the Sargasso Sea
aatgaacatccacgaacatcaatctaaagacttgctaaaagaatttggggctccagtttcaaatggatttgtgattttaaatcccgaggaaatcaaagaaaaaattaaattcattaattctaaaaaattggtcattaaagctcagatccatgctggtggaagaggtaaggctggcggggtaaaactagttgatagatctgaaattcagagtgaggttgataaaatgtttgggaagattttggttacacatcagactgggccagagggaaagcaagttaaaagaatatatattcaagaagcttatgatattgaaaaagaattatatctatcctgtttaatagacagagaaagttcaaaaatagtttttataagcagtaccgaaggtggcgtagatatcgaatcagttgcaaaaaaaacccctgaaaaaatattaacaacaaaaattgatcttaaaaaaagtcttgataagttcgataaagaaaaaattttgaagatatttccatttagcaaaaatcaaagacaagatgcagaaaatttattagatgcattgtacaatatattaattcagaaagatgcttcattaattgaaataaaccctttagtactaactaaacaaaaaaaaattatttgtttagatgcaaaaatgaattttgatgaaaatgcattgttcagaaggcctgatatttttaaattaagagatttaaacgaggaagagccagcagagatagaagccagcaagcatggcttagcctatattaaacttaatggctcaattggatgtatggttaatggggcgggtttggcta

SEQ ID NO: 310211 - DNA, 655 bp, Unknown
  Bacterial polypeptide expressing nucleotide sequence isolated from the Sargasso Sea
atgtcagtattgattaatcgagatacgcgtgtcatttgtcagggattcacgggttcgcaaggcacttttcattctgagcaagcaatagcttacggtactaatatggttggtggagtcacgcctggtaaaggagggcaaaagcacctatctttgccagtattcgacactgtatcagaggcagttgaagaaacaggtgctaatgcatcggtaatatatgttccaccgccatttgcagcagactctattcttgaagcaattgatgcaaaaattgagctcatcatctgtataacagagggtattcctattatggatatggttgctgtaaaagctgcactcaatgacagttttagtacgttagtggggcctaactgtccaggtgttattactcctggtgaatgtaagataggtattatgccaggacatattcataaaccaggcaaagtaggaattgtttctcgctctggcacattaacttatgaagcagtagctcaaacaagtgtaattggtcttggtcaatcaacctgtattggaattggaggagatccaataaatggaacaaattttgtagactcattatctttgtttctagaagatgagcaaacagaagctattttgatgataggggaaatcggcggagatgctgaagagaaggcgg

SEQ ID NO: 310212 - DNA, 530 bp, Unknown
  Bacterial polypeptide expressing nucleotide sequence isolated from the Sargasso Sea
tatgaatattcatgaataccaagctaaagagctttttaaaaactatggcattaatgttcttaaaggcaaaattgcctatacagcccaagaagcttttaatgttgccagtttaattaagacaaaaaaatggatagtaaaagctcaaatacatgcaggaggaagaggaaaaggcggaggggtaaagttagccaattccctagacgaagtaaaaattatatctgataaaattattggtatgaatttagtcacacatcaaactggctcggaaggaaagaaagttttgaaggtgtatgttgaggaagcttgcgatataaaaaaggaattctacctaggtatagtattagatagatctataagtaaatttgtaattatggcttcaacagaaggaggaatggatattgaaaatgtagctgaaaattatccagataaaatttataaagtagtagttgaccctctgttaggaattgaaacttatcaaatcaaaaaaatagcttttttcttaaaaataccaaaagaaactataaatgatt

SEQ ID NO: 310213 - DNA, 415 bp, Unknown
  Bacterial polypeptide expressing nucleotide sequence isolated from the Sargasso Sea
ctggactttgacttatgaagcagttgctcaaaccacagcaaatggaattggccagtcaacttgtattggtataggcggagatccaataaatgggacaaattttatagactgtcttgaactttttcttaaagataaagatactaaatcaatagtaatgattggggaaataggcggaacagcagaggaagaggcagcggagtttttaaaaaaagaaaaagttaaaaaaccaatggttggttttattgccggtctgacagcgcctcctggaagaagaatgggtcacgcaggagcaattatttctggtggcaaaggaggagctgaaaataagattgaaataatgaaatctgcaggaataactatatcaaaatcacctgctgatataggtaaaacactttatcaaaaacttaatggttga

SEQ ID NO: 310214 - DNA, 747 bp, Unknown
  Bacterial polypeptide expressing nucleotide sequence isolated from the Sargasso Sea
aatctccaaataaaattttgacaactaaagttgaattaaatgatgaaatttcaaatgaagattgtgaaaaaatagtcaaaatttttaatttagaaggtagttataaaaatgaagcaatttctttaattaaatcgatttataaaatgtttattaagacagatgcaaatatggttgaaataaatccgctaatattaactaaagaaaaaaaaattgtttgtttagatgctaaagtcaattttgatagtaatgctttgtttagacatccggaagtttcagaacttagagatttaaatgaagaagatccagcagaaattgaggcaagtaaacatgatttagcatacattaaattagatggaagtattggctgtatggtgaatggtgcagggttagcaatggcgactatggatataattaaattatatggagaagagccagctaattttttagatgtaggagggggcgcttcaaaagaaaaagtttcggctgcttttaagataattttatcagataaaaatgttaaaggaatattgataaatatttttggtggtattatgagatgtgatgtacttgctcaaggtgttgttgatgcagcaaaagaaattaatattagtgtaccacttgtagtaagattagcaggcacaaactttaaagaaggaaaagaaatactagataattctggtttaatattaatttcagcagaaaatcttgatgatgcagcaaaaaaaattgttgaggcaattagataaa

SEQ ID NO: 310215 - DNA, 790 bp, Unknown
  Bacterial polypeptide expressing nucleotide sequence isolated from the Sargasso Sea
tatgaacttacatgagtatcaagcgaaggggttattcgctgaatatggactgccagtatccgagggttatgcggtagacacggcggaggaagctgttgaggccgcgaaaaaaataggaggcgatcgttgggtcgtcaaagttcaagtccatgcaggagggcggggcaaagcaggcggggtcaagctagtcgattcattagaagaagtccgtgagtttgctaatcagtggataggtaaaaacttggtgactattcaaaccgatgagaatggtcaaccggtcagtaaaatatttgtagagagttgcacagaaatcgagactgaactttatttaggtgctgtaatcgatcggggctctaggcgtgtcgtgtttatggcttctaccgaaggtggtgtggagattgaaaaagtagctgaagaaacccctgagaagatattgcgagtagcgattgacccgtttgtgggcgcgcaaccctatcaggggagagatttggcttttagactaggattaaaagacaaacagattcgccaatttgcagacctattcatgggtttgtccaagttatttatggagctggattgctcgctgctggagatcaatcctttggttgttacctccgaaggcgacgtccattgtctcgatgctaaagtaaacattgatggaaacgcgctgtaccggcaaaagcgtatttccgagatgaacgatccctcacaagaggatgaaagagaagcccaagctgcggagtacaacttaaattatgtggctttggatggaaatattgggtgtatggtc

SEQ ID NO: 310216 - DNA, 793 bp, Unknown
  Bacterial polypeptide expressing nucleotide sequence isolated from the Sargasso Sea
ctataaatatggaactaatcttgttggtggagttacgccaaagaaaggtggacaaaaacatttagacagaccagtttttaatagcgttttagaggcaaaaaatgaagtaggagcagatgcaactatgatttatgtgcctgctaaatttgcagcagcagcaatcattgaagctattgatgcatcagttgaacttattgtttgtataacagaaggtattccaattcaggatatgcttaaggtcagacaaaaattaagtggatctagtagtagattaattggacctaattgtcctggaataatcacaccagatgaatgtaaaattgggattatgccgggaagtatccacaaaagaggaagtgttggaattgtatcaaggtcaggaacattgacatatgaagcagtagcccaaacaactgaaaatggacttggtcaatcaacttgtattggtattggtggtgatcctattaatggaacaaattttatagattgtttagatttatttttaaatgactctgaaacagaatctattttaatgataggtgaaattggtggaacagctgaagaagaagcggctgactttataaaaaatcataagattaaaaaaccaatagttggatttattgctggaattaccgctcctccaggtaggagaatggggcatgctggtgccattatatcaggtggcaagggtggagctgaagataaaattaaaaaaatggaagaatgtgatattacagttgccaaatcaccatcaattattggaaaaactttatttgataaactgtctaattga

SEQ ID NO: 310217 - DNA, 641 bp, Unknown
  Bacterial polypeptide expressing nucleotide sequence isolated from the Sargasso Sea
agaacaaggaaaaaacttgataaaagcaatttataaaatgtttataagtactgatgctagtatggttgaaataaatcccttaattttaactaaagaacaaaatattatttgtttagatgcaaaggttaattttgatgataatgctttgtttaaacatccagaaattgttgagttaagagatttaagcgaggaagatccaacagagatagaagcaagcaaacacaatttgtcttacataaaattagatggcagtataggttgtatggttaatggagcaggcttagctatggcaacaatggatattataaagttatatggagaagaacctgctaactttttagatgttggtgggggtgcctctaaagaaaaagtttctgctgcactaaaattaattctttcagataaaagtgtaaaaggaatattaataaatatatttggcggaataatgagatgtgatgtactagctcaaggagtggttgatgcagcaaaagaaatggatataaacattcctctagtagttagattagctggaactaattttaaagagggaaaaaaaatattagataattcaggtctaaaactgatttctgctgaaaatttagatgatgcggctaaaaaaattgtgaaggctataaaataaa

SEQ ID NO: 310218 - DNA, 777 bp, Unknown
  Bacterial polypeptide expressing nucleotide sequence isolated from the Sargasso Sea
ggggatggatattgaaaaaattgcttcagaaacacccagataaaaatgtaacaacaaaaatgaaaattaaggaaaatatttctcaaacagatattgacaaaataatattaccttttgattttgatgaagatcaaaaagatgatgcaaataaacttattaacgctttatataaaataatgctcgataaagacgcaactttaatagaaataaatcccctgataattacaaaaaataaaaaaatattatgtttagatgcaaaaatgaattttgatgataatgctatttttaggagacctgaaattttaaaactaagagatttaaacgaagaagaccctgcagaaattgaagcaagcaaacatgatctagcttatattaaactcgatgggtctattggatgtatggtaaatggagctggcttagcaatggcaaccatggatataattaaattatacggaaaagaacctgcaaattttttagacgttggtggtggtgcatcaaaagaaaaagtatcagcagcattcaagctgatcttatctgatagtaacgtcaaaggaattttaataaatatatttggtggtataatgcgttgtgatgtattggctcaaggtgtggtagaagcggctaaagaaataaatttatctgtaccattggttgtgagattagctggcactaattttaaggaaggaaaagatattttggataaatcaggtttaaaaatcttatcagcagaagatttgaatgatgctgcaaaaaaaattgttgaggcaataaaataaa

SEQ ID NO: 310219 - DNA, 865 bp, Unknown
  Bacterial polypeptide expressing nucleotide sequence isolated from the Sargasso Sea
aaagagacaactaaaatgtttggaaaaattcttgttactcaccaaactggacctgagggaaaggaagtaaaaactgtttatatccaagaagcttatgatattgataaagaattttatttatcctgtttagttgatagagaaagctcaaaaattgcttttataagtagtacagaaggtggcgttgatatagaggctgttgcaaaagataatccagaaaagatttcaacaaataaaattaatcttaaaaaagaacttcatgagacagagatagataatataattaaaatatttcagttaagtgaaaaccaaaaaaaggaggcaaaaaaaataataatcgctatttataatattttaattaaaaaagatgcatctcttgtagagataaatcctttggttattacaaaacaaaaaaaacttatatgtttagatgccaaaatgaattttgattctaatgcactttttagaaggcctgaaattcttgctcttagagacttaaacgaagaagaacccgctgaaatacaggccagcaaacataacttagcatatataaaattaaatggatcaattggttgtatggttaatggtgccggactagctatggcaacaatggatataattaaattatacggacaagaaccggcgaattttttagatgtcggaggcggagcatcaaaagaacaggtggcagcagcatttaaattaattttgtctgataaaaaggttaagggaattttaataaatatttttggaggtataatgcgttgtgatgtacttgcccaaggcgttgtggaagcagcaaaagaaaccaatataaaagttcctttagtggtcagacttgcaggtactaattttgaggaaaggtaaa

SEQ ID NO: 310220 - DNA, 382 bp, Unknown
  Bacterial polypeptide expressing nucleotide sequence isolated from the Sargasso Sea
gacagaaaatggattaggacaatcaacttgtattggaattggaggtgatcctattaatggtacaaattttatagattgcctagatttatttttaaaagacaaagatactcaatcaattttaatgattggtgaaattggagggaccgccgaggaggaggctgcagattttattaaaaatcataaaataaaaaaaccgattgttggatttatagcaggtgttactgcaccaccaggacgtagaatgggtcatgcaggagccataatttcaggtggcaaaggtggcgcgaaagaaaaaattaaaaaaatggaggattgtgggataactatggcaaactctccatcaaagattggaaaaacattattaaataaattgtctaattga

SEQ ID NO: 310221 - DNA, 473 bp, Unknown
  Bacterial polypeptide expressing nucleotide sequence isolated from the Sargasso Sea
attaagagacaaaacacaagaagatgagaaagaggtttatgcctctgatagaggccttaattatgtaagcctagaagggaatattggaaatattattaatggtgctggattagcaatggcatcgatggatatgattaaattagcaggtggtgagccggcaaatttccttgatgtaggtggaggtgcaacacccgagaaaatagtaaaagcttttaggctaatcacgatggataaaaaagttaaagtcattttagtcaatatttttgctggaataaaccgatgtgattgggttgctgaaggaatagttcaagcattggaaaaaattgaaattaaggttcctttagtaataagattagcaggaacaaacgttgaaaaaggaaataaaatacttcgtgatagtaagttaaattacattgaagcaaacactttagaggatgccgcaaataaagcagtagcagcgttaaaaaaataaa

SEQ ID NO: 310222 - DNA, 786 bp, Unknown
  Bacterial polypeptide expressing nucleotide sequence isolated from the Sargasso Sea
acaagttctaaaattgcatttatatcaagtgaccaaggaggtatggacattgaagaagttgcaagcagttcacctgaaaaaattataactacaaaagttgatatgagtgatgaaatttctgagtcagattgtgaaaaaataattaatatttttaatttaaatgaagatacaaaaaaacaagcaataatattaattaaatcaatctataaaatgtttgtgaataccgatgcaaacatggttgaagtaaatccattaattttgacaaaagaggaaaaaattgtttgtttagatgcaaaagttaatttcgactctaatgctttattcaggcatccggaaattgttgaattaagagatttaaatgaggaagatcctaccgaaatagaagctagcaagcatgatcttgcatatatcaagctagatggaagtattggctgtatggtaaatggagcaggattagcgatggcaacaatggatataattaaattgtatggtaaagagccagcaaattttttagatgtaggcggtggcgcatccaaagaaaaagtatctgctgcattaaagataattctctcagataaaaatgttaaaggtattttaattaatatttttggaggaataatgagatgtgatgtccttgcccaaggagtagttgatgcagctaaagaaattaatattagtgtccctttagttgtaagattagcaggtacaaatttcaaggaaggaaaagaaattcttgataattctggattaaaattaatttctgcagaaaatttagatgatgctgct

SEQ ID NO: 310223 - DNA, 787 bp, Unknown
  Bacterial polypeptide expressing nucleotide sequence isolated from the Sargasso Sea
aatgtcagtattaattgataaaaatacaaaagtaatttgccaaggttttacaggatctcatggcacttttcactctgaacaatctattaaatatggaacaaacttagttggaggagtaacaccaaaaaaaggtggtcaaactcacttagaaagaccagtgtttaacacagttaaagaagcaagagctgctactggtgctgatgcaacaatgatatatgtacctgcaaagtttgcttcatcagccatcattgaagctatcgatgcatctattgaattaattgtttgtataagcgaaggaataccaattctagatatgttaaaagtaaaaaaaaaattacaagactcaaattcaagattaattggtccaaactgtccaggaataattacacctaatgaatgtaaaattggaataatgccaggtaatattcataaaaaaggttcagtaggaattgtatcaagatcaggaacacttacctatgaggcagtagctcaaacaaccgaaaataaccttggccaatcaacttgcataggtattggcggtgacccaattaatggaactaatttcattgattgcctagatttatttttaaatgatgaccagactgagtccattttaatgattggagaaataggtggaactgctgaggaagaagctgcggagtttgttaaaaatcacaaaattaaaaaaccaatagtcggatttatagcaggtgtaactgctcctccaggaagaagaatgggacatgctggagcaattatttcaggtggaaaaggaagtgcgaggaaa

SEQ ID NO: 310224 - DNA, 561 bp, Unknown
  Bacterial polypeptide expressing nucleotide sequence isolated from the Sargasso Sea
tatgaacattcatgaatatcaggcaaaacagcttctatcaaaatacggtgtaggggttcttgatggaggtgtcgccagcaatagtgcagaggcggtgactgtagcacaacgacttggtggaccaatatgggtggtaaagtcgcaaatacatgctggtgggagaggtaagggaaaatttctggagagtacagcggggaatagtggaggagttcgggtagttaagtctctagatgctgttagggataattgcgatcagatgattggagcacatcttgttacaaatcagactggagaagagggaaaggaagtaaagaaggtatatattgaggacggatgtgaaatacagaaggaactctatttgagtcttttagtggatcgggcaacttcaaaagttaccgtgatagcgtcaacagaaggcggaatggatatagaacttgtcgcagaacagagtcctgaaaagatcctcaaactagaaatttctgaggaaaaaggtctcgtaaagacggaggtaatagacttggctaaacaacttggacttggggaaaaggcaattgaagaggc

SEQ ID NO: 310225 - DNA, 738 bp, Unknown
  Bacterial polypeptide expressing nucleotide sequence isolated from the Sargasso Sea
aaaaaattattactgtcaatgtccctgggggcagtattattgaccaaaatagtttaaataaattaactgaaggtcttaatatagatcaaaacctatcaaatgatttttgtgatcaaattcaaaagatttacaatagctttttgtcttcagatgcctctttagtagaggttaatccttttgtattgactggtgagggtaattttttggctttagatgcgaaggtatcgatagacgataatgcgctttataaacataaagatgtagcttcaatgagagacgaaactgaagaggaccctgcagagattgaggcttcaaaacatgagcttaactacgtcaaattagatggtcaaattggatgcatggtaaatggagctggtcttgcaatggggacaatggatataattaaattacatggtggaagtcctgcaaattttctagatgtgggaggaggagctacaaaagagagagtggcaaaagctttttctataattctgcaagatccaaatgtaaaagctattttggtaaatatttttggtggcattatgaaatgtgacattatcgctgagggtgtggtagctgcagctaaagagctatctattcaagttccattggtagtaagattagaagggaccaatgttgacctaggaaaggaaattttaaataaatctgggctgtcaattatttcggcagataatttagaagatgcagctcaaaaggcagtcagggctttaaactaaa

SEQ ID NO: 310226 - DNA, 841 bp, Unknown
  Bacterial polypeptide expressing nucleotide sequence isolated from the Sargasso Sea
caaggttttacaggaagccagggaacgtttcactgccaacaagctattgaatatggtacaaaaatggttggtggagttacacctggaaaaggaggtcaaagccacttaaatttaccggtttttgatactttagataaagcaataaaagtgacctcagctaatgcgtctgtaatttacgttcctcctgcgtttgcagctgattcaattttagaagcaattgacgctaaaattgatttagttgtttgtatcactgaggggattcctgttcttgatatggtaaaagttaaaaatgcattgaaatattctgattcaagactaattggacctaattgcccgggtattattacacccaatgaatgtaaaattggaattatgcctggtcatatacacaaaaaaggtaaaattggaattgtatcaaggtcaggtacattaacatacgaggccgttggacaaaccacagctgctggtcttgggcaatccacatgtgttggaattggtggcgaccctttaaacggaactaattttattgattgtttagatctatttctctcagatgaagaaactgatgctattattatgattggtgaaattggaggaactgctgaagaagaagcatcagaatttttgaaatcttcaaaaatcaaaaaaccagttgcgggtttcatagcgggtagaactgctcctccaggaagaagaatgggacatgctggagctatagtctcaggcaaaagtggaggtgcagaagccaaaattgatgcaatgagaagcgcaggaattaatgtaactgatagccctggtatgcttggtgaagctattattgaagccatgaagaatttttaaa

SEQ ID NO: 310227 - DNA, 871 bp, Unknown
  Bacterial polypeptide expressing nucleotide sequence isolated from the Sargasso Sea
aaaggacaacctgtctctgttgtaatggttgagccatgcattgaaatcgaaaaagagctgtatcttagtgcagtggttgataggtcagcaaaggcaatttcaattattgcctctggagagggcggtgttaatattgaagaagttgcagaaacaaatcctgaaaaaatcttttatgagaaaattgatttaattattggcccacaaccatatcaagctagaaggctatctgaagcattacatcttgatgcccaacagtcaaatgaattctggaatctgtttaaaaatttagtaaaaatgtttgttgattgtgacatgagtcttgtagagataaatccactgattattactagcgaagggcacctacattgcttagatgcaaaggtcaacttggattcaaatgcactatttagacaaagtaatcttgccaatatgcgtgatttatctcaagaggatccacaagaatgtgaggccagtaaccatgatttaagttatgtttctcttgatggcaatattggatgcatggtaaatggtgctggcctagcaatgggaactatggatactattaagttttatggaggcgagccagcaaattttcttgatgtgggaggtgctgcaactaaagagagagttgcaaaagcttttaaaattattctaaatgatcctaaagttaaagtaattttggtgaatatttttggcggcattgtaagatgcgacctcattgctgaggggataatagctgctgtcaaagaaactgagttagtcattccaatcgtagtaagacttgaaggaaacaattcaaaattaggatctgatatgttgcaaaaatcatcattagctatagaaagcgataatgatctgaaaatgcagcaaa

SEQ ID NO: 310228 - DNA, 952 bp, Unknown
  Bacterial polypeptide expressing nucleotide sequence isolated from the Sargasso Sea
aaggcaggaggcataaaattagtaaataatttagaggagttagaaaaagaagcgaaaaatttaataggaaaaattttggtgacacatcaaacaggtcctaacggaagaaaggttcagagactttatgtggaagaagcatcatcaatcaataaagagttttacctgtcatgtctggtagacagagagagttctaaaattgcatttatttccagtgatcaaggaggaatggatatagaagaagtggcaaaaaataacccagaaaaaattttaacaacaaaagttgaatttaaagatcaaatttctgatgaaaactgtaaacaaattatagaaatatttaatttagatcaggaagcatataaagaagcacaaaaattaattaaatcaatttataaaatgtttattgaaaaagatgcaagtctagttgagattaatccacttatattaactaaagataacaaaattgtttgtttagatgcaaaaatgaagtttgatgataatgcactttttaaacatccagaaataatagatcttagagattttaatgaagaagaagaaacagaaatagaagcaagcaaatacgatctagcctatattaagttagatggaaaaataggatgtatggtaaacggtgctggtcttgcaatggcaacaatggatattattaaattatatggagaagaacctgcaaactttttagatgttggcggcggagcctcgaaagaaaaagtttcagcagcttttaaaataattttgtcagataaaaacgttaaaggtatattaataaatatatttggaggaataatgaggtgtgatgttcttgcaaaaggattagttgaagcagcaagagaaattaaaataaatgtaccattagtaattagattggctggaactaattataaagaaggtaaaaaaatattagataattctgggctaaaaattatttcagcatcag

SEQ ID NO: 310229 - DNA, 798 bp, Unknown
  Bacterial polypeptide expressing nucleotide sequence isolated from the Sargasso Sea
atggtttctactgaaggtggcgtagagattgaaaaggtagcagctgaatctcctgataaaattataaaagagtggattcatccagaagatgggctaacaaaagatcaggcaaaaagattatgtgatgccctcagcttgaaagggattcagcaagattctggaattgaaattttcactgctttatggaaggcatttaatagtcttgattgttctctaatggagattaatccattagttttaactaaaaaagatgaagtcattgctttagatgcaaaaataaattttgatggtaatgggttatttcgtcatccggaattatctgaattgcgagatgaaacagaagaagaccctgctgaagctgaagccagttcatacaatctaaactatataaagttagatggaaatgtgggttgtatggtaaatggagctggattagcaatgggaacaatggacattatcaaacttaaaggtggtgaacctgcaaactttttagatgtaggtggtgtagcaaatcctgaaactgttgcaaatggatttaagattattttatctgatccgaatgtaaaatctattttaatcaatatttttggcggcattgtgcgatgtgatcgtgttgcgcaaggtgtaattaatgcgatggaaaccataagtgttaatgtacctgttattattcgattagagggtaccaatgctaaagaagcatcaagtttattaaacaactctccacttaattttattgtcgcaaacagcttaagtgacgcagctgaaaaagcagtaagcgctacaaatatggaatca

SEQ ID NO: 310230 - DNA, 598 bp, Unknown
  Bacterial polypeptide expressing nucleotide sequence isolated from the Sargasso Sea
gcatcagaactgacttacggacttggaatcgatcaaatcaatcccaaacttctccggcctgctgcaaaacttttcagttcactttatcaaacctttgtccatgaggattgcagcctggtcgagatcaatcccctggttcttaccggcgacgaccgggtagtggccctcgatgccaaactcagctttgatgataacgctttattccgtcaccgagacaatgctgacatgagagaccttactgaagaggatcctctcgaaacggaagccggagagtacgaactgaactacatcaagctcgacggttcgatcggttgcatggtcaacggtgccggtttggcaatgggtacaatggacatcatcaaaacctatggaggagaacccgcgaatttccttgatgtaggtggcaccgcgaccaaagaaaccgtagagaagggctttcagatcatcacccaggatcccaacgtacgatgcattctaatcaacatttttgggggcatcgttcgatgtgacatggttgcatccggaatcgtcgaggccttccgtaaagtcaatttgcagattccagtggtggtaagactcgaagggaccaatgcagaag

SEQ ID NO: 310231 - DNA, 823 bp, Unknown
  Bacterial polypeptide expressing nucleotide sequence isolated from the Sargasso Sea
catgctggcggcagagggaaagcaggaggtgttaagcttgtagatcaaattgaacaactagaccaagaagtcaatcaaatgtttgataaaattttaaagacctaccaaactggcccagagggaaaaaaagttaaaaaagtttatgttgaagaggcatcaaatatttttaaagagttttatttgtcttgtttgatcgacagagagagttcaaagatagcttttataagcagtacagagggaggagtagatattgaaaaagtggcaacagataatcctaatagaataataacaactaaatttgatttaaaagataagatagacgaagaagatataaataaaataattaaaccatttaattttcaagataatcagaaagaagatggcaaaagattagttaagattttatataaaattttaatagagaaagatgcaagcttaattgaaattaatccactaattataactaaagatcaaaagttaatttgtctagatgcaaaaatgaattttgatgataatgcaatttttagaagaccagaaattttagaattgagagatattaacgaagaagagcctgcagagactgaggcaagaaaacacgatttggcttatataaaattaaatggttcaataggctgcatggttaacggagcaggactagcgatggcaactatggatataattaaattacacggagaagagccggccaattttttagatgttggcggaggagcttcaaaagaaaaagttgagtcagcttttaaattaattttgtctgataaaaatgttaagggaattttaaaaaatatttttggaggaatcatgc

SEQ ID NO: 310232 - DNA, 650 bp, Unknown
  Bacterial polypeptide expressing nucleotide sequence isolated from the Sargasso Sea
atttgcggcagcagcaattattgaggcaattgaagcttcaattgaacttattgtttgtataactgaaggtattcctattcaagatatgttgagagtaaaacaaagattattaaaatcaaaatcaagattgattggtccaaactgtccaggaattataactcctggtgaatgtaagattggcattatgcctggtaatattcataagagaggctcagttggtatcgtctctagatcaggaacattaacttacgaggctgttgctcaaaccactgaaaatggacttggccagtcaacttgcattggaattggtggagatccaattaatggtacaaattttatagattgtttagatttatttctaaatgatgatgagactcaatcaattttaatgataggtgaaatcggtgggactgctgaagaggaggctgcagaatttgttaaaaatcatagaattaagaaaccaatggttggatttattgcaggtgttacagctcctccaggaagaagaatgggacatgctggtgccattatttcaggtgggaaaggtggcgctcaagataaaataaaaaaaatggaagattgtggtatcactattgctgactcaccttcaaaaattggcaaaactctttataataaattgtctaattgaa

SEQ ID NO: 310233 - DNA, 509 bp, Unknown
  Bacterial polypeptide expressing nucleotide sequence isolated from the Sargasso Sea
ttgtcctggaataataacaccagatgaatgtaaaattggtatcatgccagggagcattcataaaaagggatctgttggaattgtttcgagatcaggcacacttacttatgaagcagtagctcaaactacagaaaatggtcttggacaatccacttgtataggaattggtggagatcctattaatggtactaattttatagactgtttagatttgttcttaaaagatgatgaaacacaatcaattttaatgattggcgaaataggaggaacagcagaggaagaggcagcagattttattaaaaatcataaggtaaaaaaaccaattgttggatttatagctggagtaacagctcctcctggacgaaggatgggccatgctggggccataatttcaggtggaaaaggtggtgcagtggataagataaaaaaaatggaagattgtggaataactatagctaactcaccatcaaaaattggaaaaacattatttaataaattgtctaattgaa

SEQ ID NO: 310234 - DNA, 868 bp, Unknown
  Bacterial polypeptide expressing nucleotide sequence isolated from the Sargasso Sea
aatgagcatcctcgttaacaaagataccaaagtaatttgtcagggctttaccggttctcaagccacattgcattgttctcaagctattgaatatgggacaagcatcattggaggggtaacaccaggaaagggtggagaaagtcatctagatcttcctgtatttaattctacaaaagaggctcaacaagagttggaaatagacgcaacaataatttttgttcctgctaagttttgtaaagattctgttcaagaggctattgatgcagaaattccattgatcatttgtattacagaaggaatacctactctggatatgatgaagctaaaacaaaatgctgactctgcaggttgtagaattattggtccaaactgccctggtgtgattacgccagatcaatgcaaacttggaatcatgcccgggtacattcataagcctgggaaaataggaattgtttcaagatcgggaactttaacttatgaggctgttgatcagaccactcaagcaggtttaggtcaaagcagttgcgtgggaattggcggagatcccattccaggatcgagttttattgatattttgctgctttttgaagaagattctgaaacagaaggaatcgtgatggttggtgaaattggaggaactgctgaagaagaggctgctgagttcattcagtctaatgtttccaaacctgtggttgcatatattgctggagtcagcgctccacccggaaaaagaatgggacatgccggagcaataatcgctggcggaaaaggaacagcggaagataaattcttagctcttgaaaaggctggagttcatacaactagaagccctgccaaaataggagaagaaataaagcagctagtatga

SEQ ID NO: 310235 - DNA, 399 bp, Unknown
  Bacterial polypeptide expressing nucleotide sequence isolated from the Sargasso Sea
aatcacttgtcagatctgattaaaaatatgtatttattttttattgaaaaagatgcaagtcttgttgaagttaatcctctgatagtcacaaatacaaataaacttttatgtttagacgcaaaagtaaactttgatgataatgcaatttatcggcaccccgaaattgaagaattaagagatgaaaatgaagaagatgaatatgagagggaagcagcaaaatatgaccttgcctatattaaattggatggaaatataggatgtatggtaaatggagcaggacttgcgatggctagtcttgatattattaaaatgtatggcggtgaacctgcaaatttcttagatgttggcgggggcgcgtcaaaagaaaaagtctcgagtgcttttaaaattatcctttca

SEQ ID NO: 310236 - DNA, 861 bp, Unknown
  Bacterial polypeptide expressing nucleotide sequence isolated from the Sargasso Sea
catatgatatgaaaaaagaattttatttatcgtgtctggttgatagagaaagctcaaaaatagcctttataagtagtacagaaggtggtgtggacatcgagtcagttgcaaataataatccagaaaaaattttaactaccaagatagaccttaaaaaatctttaactgatgatgatatacaaaggattattaaaatattttctttagattccagtcaaaaaaaagatgctgaaaatttattaaatgccgtatttaatattttaatttcaaaagatgcatctctaatcgaaattaatccacttgttatcacaaaacaaaaaaaattaatctgtttagacgcaaaaatgaactttgattctaatgcaatgtatcgaagaccagaaattttaaaacttagagacctgaatgaggaagaaccagcagaaatagaggcaagtaaattcggtctgtcttatattaaattaaacgggtctattgggtgtatggtaaacggagctggacttgcgatgtcaacaatggatataataaaattatatggagaagaacccgcaaattttcttgatgtggggggtggtgcatctaaagagcaagtctctgctgcctttaagttaattttatctgacaaaaaagttaaggggattttaataaatatttttggaggaataatgcaatgtgatgtgcttgcccaaggcgtggtagaagcggcgaaagagattaatattaaaatacctttagtagtaagactagcaggaacaaattttgaaaaaggtaaagaaattttagaaaaatcaggacttaaaattttatctgcatcagatttaaatgatgcagcaaaaaaaattgtaaatgcaataaaataaa

SEQ ID NO: 310237 - DNA, 442 bp, Unknown
  Bacterial polypeptide expressing nucleotide sequence isolated from the Sargasso Sea
tactgaaatagaagctagcaagcatgatcttgcatatatcaagctagatggaagtatcggctgtatggtcaatggagcaggattagcgatggcaaccatggatataattaaattgtatggtaaagagccagcaaattttttagatgtaggaggtggtgcatccaaagaaaaagtatctgctgcattaaagataattctctcagataaaaatgttaaaggtattttaattaatatttttggaggaataatgagatgtgatgtccttgctcaaggagtagttgatgcagctaaagaaattaacattagtgtacctttagttgtaagattagcaggtacaaatttcaaagaaggaaaagaaattcttgacaattctagattaaaattaatttctgcagaaaatttagatgatgctgctaagaaaattgttgaggcgataaaataa

SEQ ID NO: 310238 - DNA, 706 bp, Unknown
  Bacterial polypeptide expressing nucleotide sequence isolated from the Sargasso Sea
gatggccatttggattgaagagaatgcaaaggtgctcgtacagggcattactggtaatcaaggaacattccatgccaccaagatggtggaatatggcaccaatattgtcggtggagtgactccaagaaaaggtgggcaaaccgttgacttaggagccgtccaagcacctgtttgggatgcgatggctgaagcgattgaagctacggatgcggatgcgagtgtcatctacgtcccaccccgattcgcaggagccgcaatcatcgaagccgcggatgcgtttgcatccattcggggcaatggtgtcatcgtctgcatcacagaaggcattccaacattggacatggtgaaggccgcagaacacgtggcaaagtatcccgatgttcgtctgattggacccaactgtccaggaattatcacaccaggagaaacgggtggggcgaagattggaatcatgcccggacacattcacgcgaaaggacgaattggaattgtctcaaagtcgggaaccctgacctacgaagctgtagctcaggcgatgagcatcgatgagggtcagagtacgtgtgttggaatcggaggtgaccctgtcaatgggactggattcatcgattgtttggctgcgttcgaaaatgatgagcaaaccgctgcagttgtcatgattggtgaaatcggtgggaacgctgaggaagaagccgcagcatgggtt

SEQ ID NO: 310239 - DNA, 862 bp, Unknown
  Bacterial polypeptide expressing nucleotide sequence isolated from the Sargasso Sea
aataaaaatacaaaagttatttgccaaggatttactgggagctcatggaacttttcattcagaacaagcattaaaatatggcaccaagttagtgggaggtgtgactcctaaaaaaggaggacaaaaacatttgggtttacccgtttttaattctgtggccgaagcaaaagaaaaaactaaagctacagcgacaatgatatatgtgccgcctaaatttgcggcatctgcgattatagaggcgattgagtcaaaaatggacttagtggtttgcattacggaaggtatccctgttattgatatgataaacgtaaaaaaaattttaaagcaaagtaaaactagattagttggaccgaattgtccgggagttataacgccaaatgagtgtaaaattggaattatgccaggaagcattcataaaaagggttcagttggaatagtatcaagatctggaactctaacttatgaagcagtggctcaaacaacttttaatggactaggtcaatccacctgtattggtattggaggtgatcctattaatggaactaattttatagattgcttagaattatttttgagagatgatgataccaaatccattattatgattggcgaaataggtggaacagccgaagaggaagcttctcaatttatcaaagactccaaaataaaaaaacctatggttggttttgtagcaggtttaaccgcaccacccgggagacgtatgggtcacgctggagctattatttctggaggcaaaggtggcgccaacgataaaattgaattaatgaaatctgcaggtatttctatttctaaatcgcctgcggacatagggaagacactttttgagaaacttaaggcttga

SEQ ID NO: 310240 - DNA, 766 bp, Unknown
  Bacterial polypeptide expressing nucleotide sequence isolated from the Sargasso Sea
atgaatattcacgaacatcaagctaaagacatcttaaaagaatttggagctccagtctctaatggtatcgtagtgtcatcgattggtgaaataaaagaaaagattacgaaattaaaaagtaagcaatttgttttaaaagcccaaatacatgcgggtggaagaggtaaagctggtggtgtaaaattagtcacaaatattcacgaacttgagaccgaggcaaaaaagatgatgggaaaaatattagttacacatcaaactggaccagaaggaaaagaagttaaaagattatatattgaagaagcctcagatattttaaatgaattttacttatcatgtttgatagatagagagtcttcaaaaatagcatttataagtagcacagaaggaggcatggatattgagaaagtagcatcagaaactcctgataaaattattacaaacaaaatagatttgaaagataccggtccatcaaatgacgaagtagagaaaataattaatatatttaaatttactggtgatcaaaaagaaattgctaaaaaactgatcaaatctttatatagaataattactgagaaagacgcaagtttgattgaaattaatccacttataattactaaggaaaataaaattgtatgtttagatgcaaaaatgaattttgatgataatgcaatttttagaagacctgaaatttcaaaattaagagatctaaatgaagaagatccaacagaaaccgaagcaagcaagcatgaccttgcttatattaaac

SEQ ID NO: 310241 - DNA, 949 bp, Unknown
  Bacterial polypeptide expressing nucleotide sequence isolated from the Sargasso Sea
ctctgggtgcaagaggaaaggctggaggataatagtctgtaattcacctttagaagttgcccaggcgacagacaaattattaggaaaaaaattagttacaaatcaaacaggaccagagggaaaaattgtaaatagaatttatatcgaggaagcaaccgatatagaaaaggaactttatttgggtttagtgtttgatagaagctcagagagcataatggttgtagcttcaacagaaggaggaatgagtgttgaagaaatcgctaaagaaaaacctgaaacaattataagatccaaaattgaagtagcagttggaattcaaagttttcaagcaagagagctcgcatttggattaggaattgaatctgatttaattgctagagcatctgatacaattattggatgtgctaaagcgtttagtgagttagatgctacaatggttgaagttaatccattagtcatttcaaaacaaaaacaaatattagctttagattgtaaaatgagcttcgataataatgctatgtttagaagaaataaagtatcagagttaagagataaatcccaagaagatgagaaagaagtatatgcatcagatagaggcttaaattatgtaagtctagaaggaaacattggtaatattattaatggggctggacttgctatggcatcgatggacatgattaaattagctggaggagagcctgcaaactttttagatgttggtggtggtgcaacaccagaaaaaatcgtaaaagcatttaggttaattacaatggataaaaaagtaaaagtaattttagtaaatatttttgcaggtataaatagatgcgattggattgcagaaggtatagtccaggcacttgagaaaatagaggtaaaggttccattagtaattagactagctgggacaaatgttgaaaaaggaaacaaaattttaaggacagtaaaataa

SEQ ID NO: 310242 - DNA, 407 bp, Unknown
  Bacterial polypeptide expressing nucleotide sequence isolated from the Sargasso Sea
aacctatgaagcagttgctcaaactactgaaaatggattaggccaatccacttgtataggtattggtggagatccaataaatggcacaaattttattgattgtttagatttatttttaaatgatgatgaaacagagtctattttaatgataggagaaataggaggtacagctgaagaagaagcagcagattttattcaaaatcataaaataaaaaaaccaattgttggctttatagcgggtataacagcaccaccaggtcgtaggatgggccatgctggtgcaatcatttctgggggcaaaggtggggctaaagataagattaaaaagatggaagattgtggaataacaatggcgaattctccttctaaaattggaaaaacactgttcgataaattgtctgattgaa

SEQ ID NO: 310243 - DNA, 412 bp, Unknown
  Bacterial polypeptide expressing nucleotide sequence isolated from the Sargasso Sea
gagggcagtattggttgcattattaacggcgcgggcctggcgatggccaccatggatatgatcaaacactcgggaggtgaacccgcaaactttctcgatatcggaggtggcgcctctcccgaacgggtcgccaaggcattcaacctggtcctctccgatgaaaacgtcaaaggggtgctggtcaacatctttgccggtattaaccgctgtgactgggttgcccaaggcgtggtgaaggcgatgcaggatctcaatatccaggtgccggtcgtcgtgcgcctctcgggtaccaatgtcgaagagggtcgacggatccttgaagagagttccatgcccctgattactgctgataccctggccgaggcagccgagaagtcggtcgccgcagtgagtgaggaggcgacagtatgag

SEQ ID NO: 310244 - DNA, 895 bp, Unknown
  Bacterial polypeptide expressing nucleotide sequence isolated from the Sargasso Sea
ggaaaagaagtcaaaagactgtatgttgagtcatcttcaaaaattagtaaagaattttatctctcttgtttagttgatagggcaagttctaagattgcatttatttctagcgatcaaggtggaatggatattgaagaggttgcaaaaaataatcctaaaaaaattgtaaaaacaaaagttaatttagaagataaaatatcagatcaagattgtgaaaaaattgttaaaatatttaatttagatttagatgcaaaaaagcaatcaataaatttaattaaatcaatttataaaatgttcattgataccgatgcaaatttagttgaaataaatccattaattttaacaaaagaaaataaaattatttgtttagatgcaaaaatgagttttgatgataatgcattatttagacatccagaaatattagatttaagagacttaaatgaagaagatccaacggaagttgaagctagcaagcacaatcttgcttatataaagttagatggaaatattggttgtatggttaatggagctggattagccatggctacaatggatataataaaactttatggaaaacagccagcgaattttctagatgttggaggaggagcctcaaaagaaaaagtatctgctgcattaaaaataattctttctgataaaaatgtgaaaggtattttaatcaatatttttggaggaataatgagatgtgatgttctagcacaaggtgttgtagatgctactaaagaaataaaaattaatttacctttagttgttagactagcaggaacaaattttatcgaaggaaaaaaaattttagataactcaggattaaaaataatttctgcagaaaacttagatgatgcagcaaaaaaaatagttggagcgataaagtaat

SEQ ID NO: 310245 - DNA, 586 bp, Unknown
  Bacterial polypeptide expressing nucleotide sequence isolated from the Sargasso Sea
tatgaatattcacgaacatcaagcaaaaaaaatactctctgactttggagctccaatatcaaaaggtgttgtaattctaaaaaaagatgaaattgataataaactatctcttttacaaggtgataagtttgtaataaaagctcaaattcatgcaggtggcagaggaaaagctggtggcgtaaaagtcgtaaaaaaaaataaaagtttaaaaaaagaaatagaagatatgtttggtaaaattttagtgactcatcaaacaggtcctgagggaaaagaagtaaaaagagtatatgttgaagaggcttcagatatagaaaaagaattttacttatcttgtttgattgatagagaaacttctaaaattgcttttataagtagcaccgcaggcggcatggatattgaaacaattgcaaaagaagatcctaaaaagatacttacaactaaaatagatttaactgataaattagatattaaagatattgaaaaaatacttaaaccttttaattttaatactgaacaaaaattggaggggacaaaagttgtaaattctatgtttgaaattttaatcaaaaaaagatgcatcact

SEQ ID NO: 310246 - DNA, 940 bp, Unknown
  Bacterial polypeptide expressing nucleotide sequence isolated from the Sargasso Sea
gaacatcaggcaaaagagttattaagacaatataatatacctacgccagctggatacgtagcatttacaattgatgaagctattaaagcagctaaaaaattacctgggccagtttttgtggtaaaagctcaaatacatgctggtggaagaggtaaagctggcggtgtaaaagttgtaaaagatttagatgaagttaaaaactctgctgaaacaattttaggaaaaaaattaattactcatcaaacgggttctgagggaaaattagttcaaagactctatattgaggatggatgtgatataagcgctgaatattacttttctatggttgtagaccgagctactagtagagtttcagtaatagcatctactgaaggtggtatggatattgaacaagtcgcaaaagaaacccctgagaaaattttatcattcaatatagatccaacaattggctttcaaccttttcatgcacgattaatagcgaatgaactcaaattagaaggatctagttttaaacaagcaggtaagttttttaatcaattatataaactatttactgaaaaagatgctagtttgttagaaattaacccacttgtattaacctctgaaaatagtctaattgctttagatgcaaaaatgtcttttgataataatgcattatttaaaaactcagatataatatccttaagagacgaaactgaagaagatcctgctgaaatattagcaagtaaatttgacttagcctatataaaacttgacggaacaataggctgtttagtaaatggcgcaggtcttgcgatggctacaatggatatcattaaactaaaaggtgcatctcccgcaaactttttagatgttggaggtagtgccactaaggaaaaagttactgaagcttttaaaatcattttatctgatccagcggtagaaggtattttggtaaata

SEQ ID NO: 310247 - DNA, 751 bp, Unknown
  Bacterial polypeptide expressing nucleotide sequence isolated from the Sargasso Sea
atgtcggttttggtaaataaaaatactaaagtaatttgtcagggatttactggctcacacggaacatttcattcagagcaggctataaaatatggaaccaatcttgttggtggagttacgccaaagaaaggtggacaaaaacatttagacagaccagtttttaatagcgttttagaggcaaaaaatgaagtaggagcagatgcaactatgatttatgtacctgctaaatttgcagcagcagcaatcattgaagctattgatgcatcagttgaacttattgtttgtataactgagggaattccaattcaggatatgcttaaggtcagacaaaaattaagtggatctagtagcagattaattggacctaattgtccaggaataatcacaccagatgaatgtaaaattgggattatgccggggagtattcacaaaagaggaagcgttggaattgtatcaaggtcaggaacattgacatatgaagcagtagcccaaacaactgaaaatggacttggtcaatcaacttgtattggtattggtggcgatcctattaatggaacaaattttatagattgtttagatttatttttaaatgattctgagacagaatctattttaatgataggtgaaattggaggaacagccgaagaagaagcggctgaatttataaaaaatcataaaatcaaaaaaccaattgttggatttatagctggaattactgctcctccaggaaggagaatggggcatgctggtg

SEQ ID NO: 310248 - DNA, 748 bp, Unknown
  Bacterial polypeptide expressing nucleotide sequence isolated from the Sargasso Sea
aatgaatattcacgagcatcaagctaagcaaatattaaaaaaatatggagctgtagttcctgaaggagtatttgcacttaacgttgacgaacttattgaaaaagcaaaaacactaaaaactgataaatatgtacttaaagcacaaattcacgctggtggcagaggaaaagctggtggtgtaaaaattttaaactctattgaggaactaacagtggcagctaaggaattactaggaaaaacactagttacccatcaaactgggcctgaaggtagagaggtaaaaagattatacgtagaagaatcatcaaatatagataaagaattttacttatcgtgcctagttgatagggcaagttctaaaattgcatttatatcgagcgatcaaggaggaatggacattgaagaggttgcaagtaattcacctgaaaaaattataactacaaaagttgatatggctgatgaaatttctgagtcagactgtgaaaaaataattaaaatttttaacttaaatgaagatgcaaaaaaacaagcaatattattaattaaatcattatataaaatgtttgtgagtactgatgcaaacatggttgaagtaaatccattaattttgacagaagaggaaaaaattgtttgtttagatgcaaaagttaatttcgattcaaacgctttattcagacatccagaaattgttgaattaagagatttaaatgaggaagatcctactgagatagaagctagcaagcatgat

SEQ ID NO: 310249 - DNA, 913 bp, Unknown
  Bacterial polypeptide expressing nucleotide sequence isolated from the Sargasso Sea
tatggacattcacgaatatcaagcaaagaaaatactttcaaactttggagtaacaattcctagaggtggaattgtttacagtccagaaaatgctgagaataaagctagagaaattggtggatcaagatgggttgtcaaagctcaaatacattctggcgctagaggaaaagctggagggataattgtttgcaataccccattagaagttgctcaagcaacagataaattattaggaaaaaaattagttacaaatcaaacaggacctgagggaaagattgtaaacagaatttatattgaagaagctacagatattgaaaaggaattatatttaggattagtttttgacagaagttcagagagtataatggttgttgcctcaacagaaggtggaatgagtgttgaagaaatttcaaaggaaaaaccagaaacaataattagatcaaaaattgaggtagccgttggaatgcaaaatttccaagctagagaattagcatttggtcttggtatagagccagacttaattagaagagcatcagacacaattattggatgttataaagcttttagtgaattagatgcaacaatggttgaagttaatccattggttatttcaaaacaaaaacaaatattagcattagactgtaaaatgagttttgataacaacgcaatgtttagaagaagtcaagtttctgagctaagagataaaactcaagaagactcaaaagaaatttttgcatcagacagaggcttaaattatgtcagtttagatggaaacataggtaacattattaatggcgctggtcttgctatggcatccatggatatgattaaattagctggaggagctcctgcaaattttttagatgtaggaggtggagcaacgccagaaaaaatagttaaagcctttaaatta

SEQ ID NO: 310250 - DNA, 550 bp, Unknown
  Bacterial polypeptide expressing nucleotide sequence isolated from the Sargasso Sea
tatgaatattcatgaacaccaagcgaaagaaattctgaaagaatttggagcgccagtttcaaatggcattgttattttttctttaaaagatttaaaaaaagaaataacaaaattaaaaagtaaggagtttgtattaaaagctcaaattcatgcagggggaagaggaaaagcaggaggagttaaactagttaaaaatgttacagatttagagaatgaagcaagtaaaatgtttggaaagattttagttacacatcaaacaggtccagaaggaaaagaagtgaaaagattgtacattgaagaggcgtctgaaatttcaaaagaattttatttatcatgtttaattgatagagaaacatctaaaatagcttttattagtagtactgaagggggcatggacatagaaaaagttgcatcggagacacctggtaaaataataacaaaaaaaattgatctaagtgaagaagggcccagtaaaaatgaaattcaagaaataatatcaatatttaaattttctactgatcaaaataaagaagctgtaaaaataattaaa

SEQ ID NO: 310251 - DNA, 661 bp, Unknown
  Bacterial polypeptide expressing nucleotide sequence isolated from the Sargasso Sea
agatcccaaactgattcgctcaacagcgtcgattttcatggctctgtacaagacatttgttgaagaagactgctccctcattgagattaatccactagtgcttactagagaaggattcgtatttgcactagacgctaagcttacattcgacgataatgccctctacagacacaagggaaatatggcctttagagacagggacgaagaagatcctcttgaagtagaagcaagtgatgcagaccttaattacatcaagctggacggaaatataggttgcatggtcaatggtgctggtctggctatgggaacaatggatattataaaaacatacgatggagaacctgcaaattttcttgatgtcggtggtggagctacacaggaaacagtagaaaaagcttttcgcttaattacacgtgatccaaatgtaaagtgcattcttattaacatttttggaggaattgtacgttgcgacatggttgcagccggggtaattgaggcctttaaaaatgtaaatctcaagatccccgttgtggtacgcctagaaggaacaaattcggcagaagctcgtacacttgtaagcgaatctggacttggagaaagtttacaaatggctgaaggaattcagcaggcagcccaaaaagcagttgcagccgtaaaataa

SEQ ID NO: 310252 - DNA, 838 bp, Unknown
  Bacterial polypeptide expressing nucleotide sequence isolated from the Sargasso Sea
atgtcagttttagtaaataaagaaaccagagtaatttgccaaggttttacagggtcacatgggacatttcattctgaacaatcattaaagtatggaacaaaattagttgggggtgttactccaaagaaaggtggtcaaaaacatttgggtctcccagttttcaatagtgtaaaggaagctaaagagtctgaaggtgcaaatgcaacaatgatttatgttcctgcaaaatttgctgcggctgcaattattgaggcaattgatgagtctattgaactaattgtttgtataactgaagggattcctattcaggatatgctgaaagtaaaacaaaaactatcaaaatccaagtcgagattaatagggccaaactgtccaggcattattactccagaagaatgtaagattggtattatgccaggaaatattcacaagagaggatcagttggtatagtttcaagatcagggacattaacttatgaggctgttgcacaaactaccgaaaatggactgggacaatcaacttgtataggaattggtggagatcctattaacggtactaattttatcgattgtttggatttatttttgaatgataaagaaacagagtcaattttaatgattggtgaaataggaggtactgcagaagaggaagctgcagaatttataaaaaaccatgaaataaaaaaaccaatagttggttttatagcaggagtgacagctccacctggaaggcgcatgggacacgcaggggcaattatttctggaggaaaaggtggagcacaagataaaataaaaaagatgcaagattgtggcataactatcgcaaactcaccttcaa

SEQ ID NO: 310253 - DNA, 775 bp, Unknown
  Bacterial polypeptide expressing nucleotide sequence isolated from the Sargasso Sea
aaaaggtggattggcatacagtcctgaaaatgcaaaagatagagctactgagcttggtggtgatttatgggttgtaaaggcacagatacattctggagccagaggtaaagcaggtgggattattgtttgtaaatccgaacaagaagtatctgatgcagcaaataaacttcttggaaaaacactagtcacacatcaaaccggacccgaaggtaaaactgttcagcgaatctatgttgaagaaggaacagttataaaaaaagaattttatttaggtttggtctttgatagaagtactgagagtataatggtagtagcttcatcagaaggtggaatgagtattgaggaaattgcacaagaaaaacctgagtcacttataaaaactaaaatagaggctgcagttggtatgcaagcatttcaagcaagagaagttgcattcaaactagggcttgaagcaaaagctatcaatcgttgtgcccaagcaatacttggtgcttataaagcatttagcacatcagatgcaacaatggttgaaattaatccactagtacttactggtgatgatcatgttgttgcgttagattgtaaaatgtcttttgatgataatgcattattcaggaatcctaatttagccgaattaagagataaatctcaagaggacccaaaggagacatatgccgctgatagaggtttaaattatataccccttgatggagatataggtaatattatcaatggtgctggtcttgcaatggcatctatggatatgatacagcta

SEQ ID NO: 310254 - DNA, 824 bp, Unknown
  Bacterial polypeptide expressing nucleotide sequence isolated from the Sargasso Sea
aattcatgcaggaggcagaggaaaggctggaggagtaaaaattattgataatttaactcttttggaagaggaagcgaataaattgtttgggaaaacattatttacacatcaaactggaccgtcaggaagggaggtgaaaagattatatgttgaaactgcatcagaaatagaaaaagaattttatctgtcttgtcttgttgatagagcttctgcgaaaattgcatttatttccagtgatcagggtggaatgaatattgaggaagttgccataaaattaccagagaaaataatcactactaaagtagattttaatgaaaatatttcagaggaagactgtagcaaaattattaaaatttttgatttagacaacaatgcaagtaaacaagcaatcaatttaataaaatcaatttacaaaatgtttattgatactgacgcaaatttagtagagataaatcctcttattttaacaaaaaaaaataaaattgtatgtttagatgcaaagatgacgtttgatgaaaatgcattatttaaacatccagaaattcaaaaacttagagattttaatgaagaagaaaaaacggaaatcgaagcaagcaaatatgatctagcatacattaaattggatggaaatataggatgtatggtaaatggtgctggattagcaatggctaccatggatattattaaattgtatggagaagaacctgcaaattttttagatgtaggtggtggcgcatccaaagaaaaagtttcagctgcatttaaaattatcttatctgacaaaaatgttaaaggaatattaataaatattttggaggaataat

SEQ ID NO: 310255 - DNA, 952 bp, Unknown
  Bacterial polypeptide expressing nucleotide sequence isolated from the Sargasso Sea
aaagaaattctaaatagtaataaagtcccaattccaagtggcaaagtagcaaaatctggaattgaagcaaaagaaatagccactttattgggcggaaattgcgtcgttaaagcacaagttcatgcaggtggaagaggaaaagctggaggcataaagctcgctaataatcctaatgaagcattacagcacgcagaaaatatgattggttcatatttaaaaacttttcaatcgggtgacactgaatttcctataaatgaagtatacattgagaaggcttctagtattttaaaagagtattacttagctgtaaccatggattttgatttcaaatgcccagtaatcattttttctaccgaaggaggaatgaatattgaagaagttgctgaaaaatatcctgacaagataattaaaattcatgttgaccctcttgttggcccttcaccatacaagattaggaacctaataagtttttttaaatttgataaagaggtttcatctcaactatttaaaataattactcagttgtatgaaatttttatttcgcgtgatagtacacttattgaaatcaacccacttgcgcttgttgatggaaataatttagttgcccttgatgcaaaaattacaattgatgacgatgctttgtttaggcataaagacttaattgagttatttgacgaatcgcaaattaataagtctgagctcaatgcccaaaaaaatgatctggcttatattaaattaaatggtggtgaggtcggatgtatggtaaacggtgctggacttgctatggcaactatggacataacaatgaaggccggagcacttcctgcaaacttccttgatgttggaggcagtgcatcagaagaaaggataatggaagcatataacataattacttctgatacggatgtaaaattaattttggtaaatctattggagggatatgaggtgcgat

SEQ ID NO: 310256 - DNA, 677 bp, Unknown
  Bacterial polypeptide expressing nucleotide sequence isolated from the Sargasso Sea
tatgaatattcatgagcatcaagctaaagaaattctaaaagaatatggagcaccagtatctaatggtgtagcaattaccaatttagatgagctaaaattaaaaatctcatcgcttaatagcaaaaaatttgttcttaaagctcagattcatgctggtggccgaggaaaagcaggtggagtaaagcttgttcatgatattcaagaattagaagatgaggcaagtcaaatgatgggcaaaaccttagttacacatcaaacaggacctgaagggaaacaggtaaaaagattatatgttgaagaagcgtccgaaatagaaaaagaattttatttgtcttgtttagttgatagagaaacatctaaaattgcatttataagcagtactgaagggggcatggacatcgaaaaagttgcatcaaagcaaccaaaaaaaataattactacaaaatttgaattaaaggatgagttatcaaataatgaaatagataaaataatattaccatttaatcttaatcaaaatcaaaaaactgatgcatacaaattagtacgtgcgttatataaaattctaattgaaaaagatgcaacattaattgagataaaccctctgatagtaacaacaaaaggaaaattaatttgtttagatgccaaaatgaattttgatgataatgctttattcagaa

SEQ ID NO: 310257 - DNA, 672 bp, Unknown
  Bacterial polypeptide expressing nucleotide sequence isolated from the Sargasso Sea
aatgaatatacatgaacatcaagcaaaggaattatttgacggttatgatatacctgtgtccaaaggaagcgttgcatatgaaaaaagtcagataaatgaagcagtagaaaaagttaagggtccaatttgggttgttaaagcgcaaattcatgcaggtggcagaggtaaaggtggaggcgttaaagtagtttcttcaaaagaagaagctgtaaatgaggctgaaaaaatgtttggtatgaatttaataacgcctcaaacaggcccagcaggaaaagaagtaaaacgtatctacattgaaaatgggtcggatattaaaaaagaattatacctttcttgtttattagacagagcgacaagcaaagttgcctttattgtatctaagatgggaggtatggacattgaagcagttgcaaaagataccccagaaaatataacaacagttcaaatagagccttcaataggtgttactgaaaatgatataaatataattagtaaagcttttgagctcaaaaaagatcttgagggccaactttctgatcttataaaaaatatgtataaattttttttagaaaaagatgctagtcttgttgaagttaatcctctgattataactgagactgataaactattgtgtctcgatgctaaagttaattttgatgataatgctttata

SEQ ID NO: 310258 - DNA, 733 bp, Unknown
  Bacterial polypeptide expressing nucleotide sequence isolated from the Sargasso Sea
aaaattgaagctgcggtaggcatgcaggcatttcaagtaagagagatagcgtttaaactaggcttagaagcaaaagcgattaaccgttgtgctcaagcaatccttggtgcttacaaagccttcagtacctcagatgccactatggtagagattaatcctctggtgcttactggtgatgatcatgttgttgccttagattgtaagatgtcatttgatgataatgcattatttcgaaatccagagctagcagaattaagggataaatctcaagaagatccaaaagagacttatgctgccgatagaggtctaaattatattcctttagacggtgatattggaaatataataaatggtgccggtcttgcaatggcttctatggatatgattcaactcgcgggaggacaacccgctaactttttggatgtcggcggaggtgctacacctgagaaatttgtaaaagcatttaaacttatctctggtgatcctaaagttaaagttatcttgatcaatatcttcgctggtataaataggtgtgattgggtagcccagggtattgtagatgcacttaatcagatcaatatttctcaacctctagtaataagacttgcaggcaccaatgttgatgaaggtataaaaatactaaaagatagtaaaataaaatatattgaggcatacactctggaagatgcagccaacaaagctgttaaagcactgaaagagctagaagaataaa

SEQ ID NO: 310259 - DNA, 844 bp, Unknown
  Bacterial polypeptide expressing nucleotide sequence isolated from the Sargasso Sea
attgcaaaagagctctatttaagtgcaattattgatagagattctcaagaaattatgtttattggctcaagtgaaggtggtgtaaatatagaagaagttgcaaaaaatactcctgaaaaaattatctatcaacccatgatttataaagatagctcctcttcaaaaaatgcagaaaatattgcaaaagttttaagattaaatcaagagcaaattaatcaatttattccaatgattgaaaatttgttaagactctttgttgaaaaagatctaagcttattagaaattaatccactagttatcactaaaaatggggatttgcattgtttagatgcaaaaatcaatattgattcgaatgccctgtatagacagcctgaaattgaagagatgcatgacgaatcacaagaagattcacaagaagctgaggcagccaaaaacgatcttagttatgtgtctttagaaggaaacattggttgtatggtaaatggagcaggtttggcaatgggaacaatggatacaattaaattttttggaggcaatcctgctaattttttagatgttggtggaactgcgacacaagatagagttgcaaaagcatttaaaattattttaaaagatccagatgttaaagcagttttagtcaacatctttggcggcatcgtcagatgtgacttaattgctgatggaattatcgctgcaattaaagaaattgaagttaaaattccagttgttgttaggcttgagggtaataatgctgatcttggagccaaaatcttatcaaaatcaaatattaaaattgagagcattaataatttagcagacgctgcaaagaaagttgttgagttag

SEQ ID NO: 310260 - DNA, 726 bp, Unknown
  Bacterial polypeptide expressing nucleotide sequence isolated from the Sargasso Sea
aagcaaagataactactggggccaacgcaagcgcaatctatgtaccaccgccattcgcggcagacgcaatattagaagcggttgatgccgaaatggatctcatagtttgcatcacagagggtatacctattttagacatgatgcgagtaaaggctgttttatcacgatcaaattcaattctaatagggccaaattgtccaggcgtgataacaccggggcaatgcaagattgggataatgccggggcatattcataaaaagggaacagtaggtgttgtctcacgatctggaacattaacttatgaagctgttgatcaaacgacgaaaattggattaggtcaatcatcttgtattggtataggaggtgacccaatcaagggtacagaattcatcgatgtaattgataagtttttaaacgatgatgaaacacaatctataataatgataggagagatcggtggtagcgccgaggaagaaacttgtgaatatttaattaaagagcgcaaaaagggcagatcaaaaccgattgcgggtttcattgctggaagaacagctcccaagggaagaagaatggggcatgccggagctatagtagcaggaggtatgggtgccgctgaagataaaatagaagcaatgaaaaaagctggggtggttgtttctgacagtccagctactttaggagaagcagtacaagaggcaataaaaaaagttagccaatcatactaga

SEQ ID NO: 310261 - DNA, 787 bp, Unknown
  Bacterial polypeptide expressing nucleotide sequence isolated from the Sargasso Sea
tatgggactaatttagttggtggagttactcctaaaaaaggaggtcaaattcacctggaaagaccagtattcaatactgttaaagaagcaaaagaccagacaggtgcaaatgcaacaatgatttatgttcccgcaaagtttgcagcttcagcaattatagaggcaatagactcatctatagaattgattgtatgtataagtgagggaattccaattttagacatgcttaaagtaaaaagaaaactttcgaactctaaatcgagacttattggtccaaactgtccaggtataataactcctggtgaatgtaaaattggaataatgccaggaaacatacataaaaaaggaacagtaggcattgtttctaggtcaggaacattaacatacgaggcagtagcccaaacttcagaaaatggccttggtcaatctacatgtataggaataggtggagatccaataaatggtacaaattttattgattgtctagatctgtttttaaaagatgaagaaactgagtctatagtcatgataggcgagataggaggaactgctgaagaagaagctgcagaatttataaaaaatcataagataaaaaaaccaatggttggatttgttgctggaattacagccccacctggtagaagaatgggtcatgctggcgcaataatatcagggggaaaaggtaacgctgatgaaaaaatcaaaattatggaaaaatctggtattacaatggcaaaatcaccatccgaaattggaataactctattgaataaattgtctaattgat

SEQ ID NO: 310262 - DNA, 485 bp, Unknown
  Bacterial polypeptide expressing nucleotide sequence isolated from the Sargasso Sea
accaaaaattaatgatatgtatgatgagacacaagaggacccacaagaagctgaggctgctaataatgacttgagttacgtatcactagatggaaacattggatgtatggttaatggtgctggtttagcaatgggaacaatggatacaataaaatactttggtggaaatcctgcaaattttcttgacgttggaggaactgcaactcaagaaagagtaactaaagcatttaaaattattttaagagatcctgatgttaaagttgttttagtcaatatatttggtggaatcgtcaggtgtgatttaattgcagagggtgttattgcagccattaaggatgttgatataaaaattcctgttgtcgttagattagagggcaataatgctgaactaggagcagaaattttacttaattcaaatattagaattataagtattaatgatttggctgaagctgcaaaaaaatcagtggaattagcaaaatgag

SEQ ID NO: 310263 - DNA, 697 bp, Unknown
  Bacterial polypeptide expressing nucleotide sequence isolated from the Sargasso Sea
atgtcagttttagtcaataaaaatactagattaatctgtcaaggatttacaggttcccatggaacatttcactctgaacaagcaatcaaatatggaacaaatttagtaggtggagtgacaccaaaaaaaggtggccaaaaacatttgggtcttccagtttttaatacagtgaaagaggcaagagaatccgagggagctaatgcaactatgatatacgtcccagctaaatttgcagcctcagcaattattgaagcaatagatgcatctgtagagctaattgtatgcataactgaagggatacctattcaggatatgttaaaagttaaacagagattgaataattcaaaaagtagactgataggtcccaactgtccaggtgtcataactcctgatgagtgtaaaattggtataatgcctggcagcattcataaaaaaggaacagttggaatagtttcaagatcaggaactttaacttatgaagcagtagctcagactacagaaaatggattaggacaatcaacttgcattggaattggaggtgatcctatcaatggtacaaattttatagattgtctagatctatttttaaacgatgaggatactcaatcaattttaatgattggtgaaattggagggacagctgaggaagaggctgcagatttcattaaaaatcataaaataaaaaaaccaatcgtgg

SEQ ID NO: 310264 - DNA, 838 bp, Unknown
  Bacterial polypeptide expressing nucleotide sequence isolated from the Sargasso Sea
caccagaccggcccgcagggccgcgaggtaaagcgtctctatatcgaagaagggtgcgatatcggcatagagctgtacctgtcgcttctggtcgaccgtggcagcagccgtgtgaccatcatcgcctctagcgagggtggcatggacatcgaggaagtcgccgccacgcagcctgacaagatcctgtccgtggcgatcgacccggcaaccgggctgcagccccaccacgcacggcgcttagcaggcgtgatgggcctttccggcgccaccgccaagcagcttccgaaattccttggcgggcttttcgaggcgttcagcaggcttgatgccagccttgtcgaaatcaacccgctggtcgtgaccggttccggcgatcttcttgcgctcgatgcgaagatgagctttgacgacaacgcgctgtaccggcaccccgaagtgatggagcttcgcgatcttgccgaagaggatccggccgaggtccgtgccagcgagttcgacctcaactacatcaagctggacggcaatatcggctgcatggtgaacggcgccggccttgccatggcgacgatggacatcatccagcttcagggtggctcgcccgccaacttcctcgacgttggcggcagcgccacggccgagcgtgtaaccgaggccttcaagatcatcctgtccgacgacaatgtcaaaggcatcctcgtcaacatcttcggcggcatcatgcggtgcgacatcatcgctgaaggtgtggtcggcgcggccaggacgctagggctggacaagccgctggtggtccggctcgaaggaacaaatgtcgaggaaggaaagcgcatcatggccg

SEQ ID NO: 310265 - DNA, 486 bp, Unknown
  Bacterial polypeptide expressing nucleotide sequence isolated from the Sargasso Sea
catgaagattcacgaataccaaggcaaggaaatcttgcgcaattttggtgtgcccgttccgcgtggcattcccgcattcacggtgcaagaagccgtggaagcagcccagaagctcggcggccccgtgtgggtggtcaaggcccagatccacgccggtggccgtggcaagggcggcggcgtgaaggttgccaagaccattgacgacgtgaaggctcgcgccagcgaaatcctgggcatgcaactggtcacgcaccagaccggtcctgaaggccagaaggtccgtcgcctgtacatcgaagacggcgccgacatcaagaacgaactgtacgtttcgctggtcaccgaccgcgccacgcagaaggtcgccctgatcgcttcgagcgaaggcggcatggacattgaggaagtggcccactccacgcccgagaagatcgtcaccgagatgatcgacccgctgaccggcatcaccgaagcgcagagccgtaa

SEQ ID NO: 310266 - DNA, 761 bp, Unknown
  Bacterial polypeptide expressing nucleotide sequence isolated from the Sargasso Sea
aaatatagaaaaagttgccgaggaaactcctgaaaagatcgcctctatatctcttaatggaaaagatgtatcacaaagcgatattaaaaagatatgcagtacactcaaattgaatgatactcaatcttcacagatggagaatattgtaagaaaaacagtttcaatgttctttgaatgtgaccttagccttttagaaattaatccgcttgtaataaaagaggatggaaatttgcactgtttagatgcaaagataaatatcgattcaaatgcactttttaggcaaaaagagttgcaagaaatgcatgatccaactcaagaagatccaagagaatctgaggcatcaaaatatgacctaagttatgtttcattggatggaaatattggatgcatggtaaatggagccggattagcaatgggcaccatggacacaataaagttttttaaaggtaatcctgctaactttctcgatgttggaggcacagctactcaagaaagggtagccaaggcttttaaaataattttggatgatccagaagtaaaagtagtgcttgtaaacatttttggaggtattgttagatgtgatttaattgcagaaggtatagttgcagcaattgatgaagtaggagttgaaatacctgtagttgtaaggttggaaggcaacagtgcagaaaaaggactatcaatcctttctaattcgtcttcaaaaatacaaagtaagaatagtttggaagatgcagccagaactgcagtggagcttgcaa

SEQ ID NO: 310267 - DNA, 418 bp, Unknown
  Bacterial polypeptide expressing nucleotide sequence isolated from the Sargasso Sea
aatgaatattcacgagcatcaagctaaacaaatattaaaaaaatatggagctatagttcctgaaggagtatttgcgcttaatgttgatgaacttattaaaaaagcaaaagcactcaaaactgagaaatatgtacttaaagcacaaatccatgctggaggtaggggaaaagctggtggtgtaaaaattttaaactctattgaggaattaacagtagcagctaaaaaattgctaggaaaaacactagttactcatcaaactggccctgaaggtagagaggtaaaaagattatacgtagaagaatcatcaaatatagataaagaattttacttatcttgtttgattgatagagcaagttctaaaattgcatttatatcgagtgataaaggagggatggacattgaagaagttgcaagcagt

SEQ ID NO: 310268 - DNA, 903 bp, Unknown
  Bacterial polypeptide expressing nucleotide sequence isolated from the Sargasso Sea
gggaccaatttgataacaaaacaaacagataatctaggactaccagtaagtaaggtctatatcgagtcaggcacatcaattcaaagcgaatattatctcagcttgctggttgatcgcactaaagaatcatggacattcattgcatcaaaagagggcggagttgatattgaagctgttgctgaagagtctccagataagatcgtgaactatacgattgacccatttataggtgtggaaatagaatctttaaaggaaatggcagatcgaatgggttttattgatgacattcagtcccaatttatttcgatcacaaggaagatgtttgagattgcgaaagaaaatgatgcaaatctgatagaggtgaatcctcttattttggactatgagaatcagctgattgctctcgatgcaaaaatatcaatcgaaagcaatgcattgttcagacaacaagagctcttattacttaaagatgactctcaagaaaatgaactcgaagtcaaagcttcagagcatgatttaagctatgtttctttggatggaaatatcgcttgcatggtcaatggagcagggcttgcaatggcaactatggatctaatcaaactgcatggaggtgagcctgcaaattttctagacgttggtggaggtgctacaagcgaaagagttaaaatggcaattgatatcattatggaaaatcccaatgtcgatgctatcttaatcaatatttttggagggattgttcgatgcgatgtaattgcccaaggtatttatgaggcagtgaagtcaacgaaaattgatgttccgattgttgttcgcttacagggaacaaatgttgaattaggtacaaaaattctcgaagaatcaggaatgaagattatttcagctagcgatctcacagatgctgca

SEQ ID NO: 310269 - DNA, 538 bp, Unknown
  Bacterial polypeptide expressing nucleotide sequence isolated from the Sargasso Sea
aatgaaaattcacgaataccaagcaaaggaaatatttagagattttgatgtacgtgttcccaatgggaaaccggttttttctgtagaagaagctcttcaagcatatgatgaaatgggatcagagacagttgttgttaaagcacagattcatgctggaggtcgtggaaaaggaggcggagtaaagcttgcacataatcgtgatgatgtagagaatatcgccaatcaaatattaggaatgaatttggttacacaccaaactggcccagaaggaaaaaaagtccaaagattattaatcgaaactggaatcgatattgctaaagaattttatgctggtattgttcttgaccgaaaagagaaaaaatttgtattcatggtttctactgaaggtggcgttgagattgaaaaggtagcagctgaatctcctgagaaaattattaaagagtggattcatccagaagatgggctaacaaaagatcaggcaaaaagattatgtgatgccctcagcttgaaagggattcagcaagattctggaattgaa

SEQ ID NO: 310270 - DNA, 805 bp, Unknown
  Bacterial polypeptide expressing nucleotide sequence isolated from the Sargasso Sea
aatgagtatcctaattgataaagatacaagagtgcttgttcagggttttacagggtctcaaggaacgcttcattcatctcaatctatagaatatggaactaatgttgtgggtggcgtaacccctggaaaaggtggagcctcacacttagatttacctgtttttaattcagttatggaggcggttgaacaagttcaaccaaatgcatcattaatatttgttccagcacccttttgtaaaggtgcaattctcgaagccgcagatgctggaataaagtttattgtttgtataacagaaggtgttccaactttggatatgttggaagtaaaaaagattgttgataacttagacattactcttattggtcctaactgcccaggtgttataacccctggagttggaaaaatgggaattatgcctggtgagattcatcttcctggaagagttggaattatatctagatctggaacacttacctatgaagcggtgaagcaaactactgatttaggtctggggcaatcaagttgtgttggaataggcggtgacccaattcctggttcttcttttattgatattttggaactttttgaagctgatgatcaaacagacgcaattgttatggttggagagattggaggaagtgctgaagaggaagctgctgaattcatttcacagaatgtcaccaaaccagttgtttcatatattgctggccagactgcaccaccgggcaaaagaatgggccatgcaggtgccataatttctggaggtaagggtacggcagaggataaaattaaaaaactaaatgag

SEQ ID NO: 310271 - DNA, 733 bp, Unknown
  Bacterial polypeptide expressing nucleotide sequence isolated from the Sargasso Sea
aatgagtatcctaattgataaagatacaagagtgcttgttcagggttttaccgggtctcaaggaacgcttcattcatctcaatctatagaatatggaactaatttagttggtggcgtaactcctggaaaaggtggaaccgttcacttagatttacctgtttttaattcagttaatgaggcggttgaacaagtacaaccaaacgcatcattaatatttgttccagcacctttttgtaaaggtgcaattctcgaagccgcagaagctggaataaagtttattgtttgtataacagaaggtgttccaactttggatatgttggaagtaaaaaagattgttgatggcttagacattactcttgttggtcctaactgtcctggtgttatcacccctggagttgggaaaatgggaattatgcctggtgagattcatcttcctggaagagttggaattatatctagatcaggaacacttacctatgaagcggttaagcaaaccactgatttaggtctggggcaatctagttgtgttggaataggcggtgacccaattcctggctcttcttttattgatattttggaactttttgaatctgatgatcaaacagatgcaattgtcatggttggagagattggaggaagcgctgaagaggaagctgctgaattcatttcacagaatgtcactaaaccagttgtttcatatattgctggtcagactgcaccaccgggcaaaaga

SEQ ID NO: 310272 - DNA, 477 bp, Unknown
  Bacterial polypeptide expressing nucleotide sequence isolated from the Sargasso Sea
aaattggaataatgccaggaaatattcataaaagaggaactgttggtattgtttcaagatcaggtactttaacttatgaggcagtggctcaaacaacagaaaatggacttggtcaatctacttgtattggcataggtggagatccaataaatggtacaaattttatagattgtttagatttatttttaaatgacgatgaaacgcagtctattttaatgattggagaaatagggggaacagcagaggaagaagctgcagaatttttaaaaaatcataaaattaaaaaaccaatagttgggtttattgcaggcattaccgccccaccaggaagaagaatggggcatgcaggtgcaataatttctggtggaaaaggtggtgccgaagataaaattaaaaaaatggaagaatgtggcattactgttgctaaatcaccatcaataattggcaaaactttatataataaactgtctaattgaa

SEQ ID NO: 310273 - DNA, 538 bp, Unknown
  Bacterial polypeptide expressing nucleotide sequence isolated from the Sargasso Sea
atgcaaaaaataaatgtagattcaaatgctctttacagacaggaacaaatcctagaattaagagatccctctcaagaagatcccagagaggcaagtgcagcagagtgggatctaagttacgttgctttagaaggaaatatcggctgtatggtcaatggtgcaggtttggcaatgggtaccatggatatcatcaagttacacggtggcgagcctgctaattttttggatgtcggtggcacagctgattcaaaaagagttgctgaggcgtttaagataatcctctcagatgaaaatgttaatacggtattgataaatatctttggtgggattgttcgttgtgatgttattgctgacgggatagtagaggccttaacagtaacgggagtttcagtccctgtcatagttagattagaaggaaataatgctcacaaaggattgaagatacttgacgaatgcgacctgaatatcatccctgcatcaaatttagaggaggcagcaagtttagctgtaagagcatcaaagggagatatagggtgag

SEQ ID NO: 310274 - DNA, 687 bp, Unknown
  Bacterial polypeptide expressing nucleotide sequence isolated from the Sargasso Sea
ttgaaaaggttgcaaaagaacatccagaaaaaattattaaaactaaattcgatttaaaaaaagaagttaaccaaaaagatttcgaaaatattattaaggtttttgatttaaatgataagcaaaagaaacaagcaaaaaaaatcattgaatcaattttcaatttattaattaaaaaagacgcaactttaattgaaattaatcctcttataataacaaaatccatgaatcttttatgcttagatgcaaaaattagttttgatgataatgctatgtttagaaatcaagatattttaaaactacgcgattttaatgaagaagagccgactgaaattgaagcaagcaaaaatggattatcctacattaaactcgaaggatccattggatgtatggtaaacggagcaggattagcaatggcaacaatggatattattaaattacacggaaaagaacctgcaaattttttagatgttggaggtggagcttctaaggaaaaagttgctgaagcttttaaaattattttgtccgataaaaatgtaaaaggtattttgattaatatttttggagggattatgagatgtgatgtattagctaaaggagtagttgaagcagcaaaaaaaataaaattaaaagtaccattagtagttagacttgcaggtacaaattttgaggaaggaaaaaaaatttaag

SEQ ID NO: 310275 - DNA, 813 bp, Unknown
  Bacterial polypeptide expressing nucleotide sequence isolated from the Sargasso Sea
ctagctcaaaaatcgcatttatatctagtgaccaaggtggagtggatattgaggaagtagcaagaagttcgccagaaaaaattacaacaacaaaagttgaaatggataacgaaatttccgataaagattgtagtgaaataattaaagtctttgatttaaatgataatgcaaaaaaacaagcagtaactttaattaaatctatttttaaaatgtttattagtactgatgctaatatggttgaaataaatcctttaattttaactaaagaggaaagaattgtctgtttagatgcaaaagtaaattttgactcaaatgctttatttagacacccagaaattttagaacttagagatttaaatgaagaagaagaaacggaaattgaagctagtaagcatgaccttgcctatatcaaattagatggcagtattggctgtatggtaaatggagcaggcttagctatggcaacaatggatattattaaattgtatggaaaggaaccagctaattttctagatgtaggaggtggagcatcaaaagaaaaagtctcagctgctctaaagataatactttctgataataatgttaaaggaattctaataaatatttttggcggaattatgaggtgtgatgttctcgcacaaggcgttgttgatgccgccaaagaaattaatatcaatgttcctttagtagtaaggcttgctggaactaattttaaagagggaaaaaaaatacttgataattcaggtcttaaattaatttcggcagaaaatttagatgatgcagcacaaaaaattgttgaggcaataaaataaa

SEQ ID NO: 310276 - DNA, 523 bp, Unknown
  Bacterial polypeptide expressing nucleotide sequence isolated from the Sargasso Sea
atgaaaattcacgaattccaggccaaacaggttctttcacgatatggggttccggtaccccgtagcaaagttgcagaatcagtagaggaagccgtcgatgctgctagagagttaggcggagaaatctgggtggtcaaggctcagatccatgccggtggacgcggcaagggcggcggagtcaaagtctgccgcgggttggaagaagtccgggaaaacgcagaaaaaatcctgggcatgcaactggtaaccaaacagaccggacctgccgggcaaaaagtgctaagggttttgatcgaagaaggcatggaaatcatcaaggaactatactgttcggtgcttgttgatcgaaccaaacaatctgttgtcatgcttgcatcgaccgagggtggaatggacattgaggaagtggcagcgaacacaccggataaaatcctcaaaatttttgctgatccatcactgggtatgcttccctatcaggcatcggaactcgcttacggacttggaatccatcaaatcaatccca

SEQ ID NO: 310277 - DNA, 873 bp, Unknown
  Bacterial polypeptide expressing nucleotide sequence isolated from the Sargasso Sea
ttcttcaaaagaagaagccgtaaatgaggctgaaaaaatgtttggtatgaatttaataactcctcaaacaggcccagcaggaaaagaagtaaaacgtatctacattgaaaatgggtcggatattaaaaaagaattatacctttcttgtttattagacagagcgacaagcaaagttgcctttattgtatctaagatgggaggtatggacattgaagcagttgcaaaagataccccagaaaatataacaacagttcaaatagaaccttcaataggtgttactgaaaacgatgtaaatacaattagtaaagcttttgaactcaaaaaagatcttgaaggccaactttttgatcttataaaaaatatgtataaattttttttagaaaaagatgctagtcttgttgaagttaatcctttgattataactgagactgacaaactattgtgtctcgatgctaaagttaattttgatgataatgctttataccgccatccagaaattgaggaattaagggatgtgaatgaagaggatgaatatgaaagagaggcatcaaaatttgatctcgcatatataaaattggatgggaatataggctgtatggtcaatggcgcaggcttggcaatggctagcttagatattattaaaatgtatggtggtgagcccgccaactttcttgatgttggtggtggagcttctaaagaaaaggtctctagtgcatttaaaattattctttctgataaaggcgtaaaaggcatcttagttaacatctttggtggaatcatgagatgtgacatcattgctgaaggaattgttgctgcagcaaaggaattagaaatttctgtaccgcttgtagttagacttgaaggtacaaatgt

SEQ ID NO: 310278 - DNA, 882 bp, Unknown
  Bacterial polypeptide expressing nucleotide sequence isolated from the Sargasso Sea
gggggagttaagttagtcaaaaatttaaatgatttagaaaaacaggcaaagattatgatgggaaaagtattagtaactcatcaaacaggaccagagggtaaagaagttaaaagattgtatatcgaagaggcatctgacatctcaaaagaattttacctatcgtgcttagttgatcgagaaacatctaaaattgcctttataagcagtaccgaaggtggaatggatattgaaaaggttgcaaaagagacaccaaataaaataattacacataaaatagacttaaaagattctggtccttctacagatgagatcgataatataatttcaatttttaattttaatgaaatacaaaaaaaagcggcagaggctttaattaaatctctttacaagataataattgaaaaagatgcaagcttaatagaaatcaatccactaattattactaaaagtggcaaattgatttgtttagatgctaaaatgaattttgatgataatgcaatttttagaaggccagaaattctaaaattaagagacttaaatgaggaagatccagctgaaacagaagcaagtaaatatgatctagcatatataaaattaaatggatcaataggatgcatggttaatggagcaggattagcaatggccacaatggatataatcaaactccatggagaagaaccggctaactttttagatgttggaggcggagcttcaaaagaaaaagtatcagcagcatttaaactaattctttcagataaaaatgttaagggaatattgataaacatttttggtggaataatgaggtgtgatgtacttgcacaaggagttgttgatgctgcaaaagaaattaatttatctgttcctttagtttgtaagttagct

SEQ ID NO: 310279 - DNA, 730 bp, Unknown
  Bacterial polypeptide expressing nucleotide sequence isolated from the Sargasso Sea
tacaaataaaattgaattgaaagacgaaggccctagtgatgatgaaattgataaaattatttctatatttaaatttaatacccaacaaaaggttacagcatcaaatttagtaaaatcattatataaaattctaattcagaaagatgcaaatttaatagagataaatcctttaattgtaacaaaaacagataaaatagtttgtttagatgcgaaaatgaactttgatgataatgcaatatttcgaagacctgaaatacttaaattaagagatttaaatgaggaaaatgaagctgaaattgaagccagcaaacatgatttagcttatattaagctcaatggttctataggatgcatggtaaatggggcaggattagcaatggccactatggatataattaaactttacggaaaagaaccagccaattttttagacgtgggtggtggcgcctcaaaagaaaaagttgctgcagcctttcaattaattttgtcagataaaaatgttaaaggaattttgataaatatttttggtggaattatgagatgtgatgttcttgctcaaggtgttgttgatgcagcaaaaaaaattaatttatcagtaccactagttgttagattagccggaactaattacaaagaaggtaaagaaattttagataaatcagatctaaaaatattgtctgcttcagatttgaatgatgcagcaaaaaaaattgttgatgcaataaaataa

SEQ ID NO: 310280 - DNA, 544 bp, Unknown
  Bacterial polypeptide expressing nucleotide sequence isolated from the Sargasso Sea
gtggttgcactcgacgccaagcttacattggacgataatgctctctacagacagaaggggaatatgtccctcagggacagggatgaagaagatccacttgaattggaagctagtgaggccggcttaaattacatcaagctcgatggaaacataggctgcatggtcaacggtgccggtctggcgatgggtacaatggatataattaagacctatggtggagaacctgcaaattttcttgatgtcggcggtggtgccacgcaggaaactgtggaaaaagcttttagaatcattacccttgatccaaatgtaaagtgcattctgataaacattttcggaggaattgtacgttgcgacatggttgcagccggagtaattgcagcctttaaaaatgtgaatctacagattcctgtggtgatacgtctggaaggtacgaattcggatgaagctcataaaattgtatgggaatcgggacttggagaaagtttacagatggctgacggaattcagcaggcagcgcaaaaagcagtttctgccgcaaattaat

SEQ ID NO: 310281 - DNA, 696 bp, Unknown
  Bacterial polypeptide expressing nucleotide sequence isolated from the Sargasso Sea
aatgaatatacacgaacatcaagcaaaggaattatttgacggttatgatatacctgtgtccaaaggaagcgttgcatatcaaaaaagtcagataaatgaagcagtaggaaaagttaagggtccaatttgggttgttaaagcgcaaattcatgcaggtggcagaggtaaaggtggaggcgttaaagtagtttcttcaaaagaagaagctgtaaatgaggctgaaaaaatgtttggtatgaatttaatcacgcctcaaacaggcccatcaggaaaagaagtaaaacgtatttatattgaaaatggctcggatattaaaaaagaattatatctttcttgtttattagacagagcaactagcaaagttgcctttattgtatctaagatgggaggcatggacattgaagcagttgcaaaagatactccagaacatataacaactgttcaaatagaaccttcaataggtgttacagaaaaagatataaatacaattagtacagcttttgaactcgaaaaagatcttgagagtcaactttctgatcttataaaaaatatgtataaattttttttagaaaaagatgctagtcttgttgaagttaatcctttgattattactgagaccgacaaactattatgtctcgatgctaaagttaattttgacgataatgctttgtaccgccatcctgaaattgaggaatt

SEQ ID NO: 310282 - DNA, 646 bp, Unknown
  Bacterial polypeptide expressing nucleotide sequence isolated from the Sargasso Sea
atttatcttggctttgtactggaccgggcgacagaacgggtgatgttggtagcgtccgcggcaggtggaatggaaatcgagcagatcgcagaagaagatccggagtcgatgattcgggttgtgattgagccggcggtgggtcttcaggctttccaggcccgtgaggttgcctttgcactcggattggatgcgtctctggtgaccgaggcggccaataccttaagagcctgttaccggtctttccgggatcttgacgccacgatggtcgagatcaatccgttggtggtcacggctgacgggcgcatccttgcgcttgatgccaagatgacatttgatgacaacgcacttttcaagcatcaacgcatatctgagttgcgggataaatctcaggaagacccccgtgagatgagggccaccgatcgggggctcagttacgtgggattggaaggcgatattggctgcatcatcaatggcgccggtttggcgatggcgactatggatatgatcaagcactcgggtggcgaaccagcaaacttccttgatatcggaggtggcgcatcacctgaacgggtcgctaaggcattcaccctggtgctttcggatgacaatgtcaaaggcgtgttggtgaatatctttgccgggatca

SEQ ID NO: 310283 - DNA, 731 bp, Unknown
  Bacterial polypeptide expressing nucleotide sequence isolated from the Sargasso Sea
tattgaggatgtggcagctaataatcctgaaaaaattatcaatattcactttaatgatattaaaaatgttactttagatcacaatttacaatcaacacttgaaataaatcaacatcaatttgaagaattaaatacaattactaataaattattatcagttttcagctctattgacgcctctactattgagattaatcccttggttttaaataaacaaggctcttttgtattattagatgcaaaaataagtttagatgataatgctttattcagacatccagacttactagctttaaaagatctaacggaagaagatcctctagaacttcaagcagcagaacatgacatgaattacgtcaagcttgatggttctattggatgcatggttaatggagcaggactggcgatggcgaccatggatattatcaagcaatttggcgaagagccagcaaattttttagacttagggggaacggccaataaagatagagttattatgggttttaagactattcaatcggatccaaatgtgaaatcaattttaatcaatatctttggaggcattattcattgtgacatgatagccaatggtattgtggaagctgtaaaggaactcaattttaaacttcctcttgtggttcggtttcaaggaactaatgctagtcaaggcagagatgtaattaataactcatcacttggtttaatttctattgatgattttacagaagcag

SEQ ID NO: 310284 - DNA, 904 bp, Unknown
  Bacterial polypeptide expressing nucleotide sequence isolated from the Sargasso Sea
tggaccagagggtaaaaaagtaatgaggctctatgttgaggaagcttctgaaatatcaaaagaattttacctgtcgtgcttagttgacagacaaagttcaaaaattgcatttataagcagtactgagggtgggatggatatagaaaaagttgcaaaagacaatccagaaaaaatcattacaacaaaaattgaattcaaagacgatattaatataaaagatattgataagattatagagccatttgcatttgatgataaccaaaaaaaagagagtcaaaacttaattcgctcaatttataaaactttaattaatactgatgcaagtctaatagaaattaacccattgatagttactaaatcaaatcaaataaaatgtttagatgcaaaaatgaattttgatgacaatgcactatttaggagaccagaaattttaaaattaagagatcttaatgaagaagatccaaaagaaatagaggcaagcaaatatgatttggcatacataaaacttaacggaaatatcggctgtatggtgaatggtgctggtttagcaatggcaacaatggacataattaaactttatggtcaagagcccgctaattttttagatgttggaggtggagcatctaaagaaaaagtttcagcagccttcaaacttataatgtctgataaaaatgtgaaaggtattttaataaatatttttggaggaataatgagatgtgatgtcctcgcagcaggagtagttgaggcagcaaaagaaacaaatttagaggttccactagtagttagattagcagggactaattttaaagaaggaaagaaaattttagaagaatcaaagttaaaaattttatctgccagtgatctaaatgatgcagccaaaaaaattgttgaggctataaaataa

SEQ ID NO: 310285 - DNA, 593 bp, Unknown
  Bacterial polypeptide expressing nucleotide sequence isolated from the Sargasso Sea
taatgatgcaacattaattgaaataaaccctttggttttaacatcagataaccaaatattagctgcggatgcaaaattagacatagatgatgattctatatttagacatgaggaaataaaaaatatctctgatatttcacaagaagatacattagaagttgaagcgcgggattttgatattaattacgtaaaacttgacgggaatataggctgtatcgtaaatggtgcagggctagcaatggcaacaatggatgttgcaagttctgcaggggcttcccctgcaaactttttagatattggaggaggagccacagaagaaaaggtagctaaagcattaagtttagttttatctgataataatgttaaggctgtattggtaaacttatttggaggaattcttagatgtgatattgcagcaagaggttttgtaatgtgcattgaagaatctcaaaatttcaatattcctttaatcgtccgaatgttaggcacaaacgcagaagaaggaatagagatactgaaaaattcaaatttaaacgtaacttttgttgacacactagaagaagcagcttctaaaatcagcaaatattcttagg

SEQ ID NO: 310286 - DNA, 778 bp, Unknown
  Bacterial polypeptide expressing nucleotide sequence isolated from the Sargasso Sea
agttgatagagcaagttcaaaaattgcatttatttcaagtgatcaaggaggaatgaacattgaagaagttgcccaaaatacacctgaaaaaattttaacaactaaagtcgattttaaccaagaaatttcagaggttgattgtaagaaaattattaaggtttttaaattagacgataattctggttcagaagctgtaagcttaataaaagcaatttataaattgttcatagaaaatgatgcaaatttagtagaaattaacccacttattttaacgaaagaaaataaagtagtttgtcttgatgcaaaaatgacatttgatgaaaatgcattatttaaacatcctgagattcaagaattaagagactataatgaggaagaagccactgaaattgaagcaagcaaacatgacttggcatatataaaattagatggaagtataggatgtatggtaaacggtgcaggattagcaatggctacaatggatatcataaagctttatggtgaagagcctgcaaattttttagatgtaggaggtggagcatcaaaagaaaaagtttctgctgcattcaaaattattctgtcagataaaaatgttaaaggaatattgataaatatttttggtggaattatgagatgtgatatacttgcgcaaggtgttgtagatgcagcaaaagaaattaaaattgaagttccgttagtagtaagattagcaggaacaaactttgaagaaggaaaaaagatattagagaattctggtttaaaaattatatctgcaaat

SEQ ID NO: 310287 - DNA, 940 bp, Unknown
  Bacterial polypeptide expressing nucleotide sequence isolated from the Sargasso Sea
tatgaacattcatgaatatcaggccaaggcaatttttagggaatctggggtccctgttcaggaaggattgcactgcacatcagtccaacaggctctatccgcctacgactctttaggttcgaaagtcgtggcagtcaagagtcaaattcacgctggaggaagagggaagggtaagctactttcacccaaatctgggaatctagttatggaagggggggtcaaggtcgcattttcccgagatgaggtcgaagaatactcttccaaaatcttaggcaacaatcttgtcacgaaacaaacaggaccttcaggcaagattgttaacaatctgtatatcgaatccggatgcgaaatagctcacgaatactaccttgcccttctggtagatagggaaagcgactcgcttctaatcatggggtctacggaaggtggagtagacattgaggaagtggctgagaccaatcctaaggcgattcacaaacaacgattttacccatctgaagggttgggtatcgacaaagcttcttccatggcaatatcattaggattatcggggaaatctcacgatcttttcgtagaaatggctctcaacctatcctctttattcatagaaagagattgttcaatgatagaaataaatccgcttgttagatcctcagatgatagaataattgccttagatgctaaggttagctttgatgaaagtgctacatttagacatccatggagggatgaactcagggatatctcagaggaatcggaggtcgaagtcagagctaacgagtttggcttatcgtacgttgatttggatggcaatattggttgcctagtaaacggagctggattagcaatggcaacaatggacgtcatcaaaatgtatggtggggaacctgccaatttcttagatatcggaggaagagcaaatagcgaatcaatcacggca

SEQ ID NO: 310288 - DNA, 355 bp, Unknown
  Bacterial polypeptide expressing nucleotide sequence isolated from the Sargasso Sea
ttgtattggtattggtggtgatcctattaatggaacaaattttatagattgtttagatttatttttaaatgatgatgaaacagaatctattttaatgataggtgaaattggtggaacagctgaagaagaagcggctgactttataaaaaatcataagattaaaaaaccaattgttggatttattgctggaattaccgctcctccaggaaggagaatggggcatgctggtgccattatatcaggtggcaagggtggagctgaagataaaattaaaaaaatggaagaatgtggtattacagttgccaaatcaccatcaattattggaaaaactttatttgataaactgtctaattga

SEQ ID NO: 310289 - DNA, 931 bp, Unknown
  Bacterial polypeptide expressing nucleotide sequence isolated from the Sargasso Sea
aggtgtagagttagtcgatagtgcttcagacgtcaaggctttcgctgaaaaatggttaggtaaaaatctggtcacttaccaaacagatgctaatggtcaacctgttagtaagatattggtagaggagtgcgtggcaatagatcaggagctctatttaggcgccgttcttgaccgctcttctcgaagaatagtttttatggcctcgacagaaggaggtgtagaaatagagaaagtagcctctgaaacacctgagaagatacttaaagcttcaatagacccgcttacggggccaatgtctttccaaggaagagaattagcattcaatttagggttagagggcgatcaaattaagcagtttactagcttattccttgggctctccaaattatttttggatttagacctttcactgctggagattaatcctttggtgataacaaaagagggcgacttaaattgtttagatggaaaaattaatgtcgacggtaacgcgctttttcgacagccaaaactacaagatatgcaagacatatcgcaagaggatgagagggaagccaaggccgcagaatgggagttgaattacgtggctttagatggaaacatcggctgtatggttaacggagctggtcttgcaatgggtactatggatattgtgcagctttacggcggaagccctgcaaattttctagatgtaggcggtgcggcaaataaagaacgtgttaccgaagcatttaaaataatcttatctgatgaaaaggtatccgcagttctggtaaacattttcggcggcatcgtccgatgcgatctaatagcagaaggcgtaattggagccgtaaatgaagtaggagtctctgtgcccgttgttgtccggctagagggcaacaacgctgaattaggccgacaagttttggctaaaagtggtttaaacatc

SEQ ID NO: 310290 - DNA, 223 bp, Unknown
  Bacterial polypeptide expressing nucleotide sequence isolated from the Sargasso Sea
atgaaaattcacgaatatcaggcaaaacagattcttgcaaaacatggagtgcctgtaccaaaagggaaagtagtattttctgtggatgaggctgtaaaaactgcgcatgatttaaataccgaagtctgtgtggtgaaggcgcaaatacatgcaggcggaagagggaaaggaggcggagtcaaagtttcaaaaggactcgaggcagtccgtaaaaatgctgaga

SEQ ID NO: 310291 - DNA, 748 bp, Unknown
  Bacterial polypeptide expressing nucleotide sequence isolated from the Sargasso Sea
atgaatattcacgagcatcaagctaaacagattttaaaaaagtacggcgcagtagtcccagaaggagtatttgcactaaatgttgaagatttacttcaaaaagtgaaattacttaaaacagaaaaatacgttcttaaggctcaaatccatgctggaggaaggggaaaggctggaggtgtaaaaattttaaatactcttgaagagctgaaattagcagccaaagagctacttggaaagacacttgtaacacaccaaacaggtccagagggcagagaagttaaaagattatatgttgaagaatcatcaaacatagaaagtgaattttatttatcatgtcttgtggatagagccagttctaaaattgctttcatttctagtgatcaaggcggtatggatattgaagaagtggcgagtactaatccagaaaaaattattactactaaagtcgacattagagaggaaatttctgttccagactgtgaaaaagtaattgaaatttttaaattagataacgattcaaaaaatcaagcaataactttaattcagtctatttataaaatgtttatcagtacagatgctaatatgattgaagtaaatccattgattttgacgaaagaaaaaaaaattgtttgtttagatgcaaaagtaaattttgactctaatgcgctgtttaggcatccagaaatattagagttaagagacttaaatgaagaagatccggcagaaatagaggcgagcaagcatgatc

SEQ ID NO: 310292 - DNA, 658 bp, Unknown
  Bacterial polypeptide expressing nucleotide sequence isolated from the Sargasso Sea
cctgctaaatttgcagcctccgcaattatagaagctgctgagctttcaatagaattaataacatgtattacagaaggaataccagttttagacatgctaagagttaaaaaaaaactagccaattctaattcaaggttaattggcccaaattgtcctggaattattactccagaagaatgtaaaattggaataatgccaggaaatattcataaaaaagggtctgttggaattgtatcaaggtctggaactttaacttacgaagctgtggcacagactacaaataatggattaggacagtcaacatgcataggtattggtggagatcccataaatggaacaaactttatcgattgtttagatttatttttaaatgatcaagaaacagagtccatattaatgataggcgaaataggtggaacagccgaagaagaagctgctgaattttttaaaaaccataaaataaaaaaacctatagtaggctttatagcaggaattacagcaccgtcaggaagaagaatgggccatgccggtgctataatttctggaggaaaaggtggagcagaagacaaaataaaaaaaatggaagattgtggcataacgattgcaaaatcgcctgcagaaattggcaaaacattattaaataaattgtctaattgaa

SEQ ID NO: 310293 - DNA, 657 bp, Unknown
  Bacterial polypeptide expressing nucleotide sequence isolated from the Sargasso Sea
ttgttccagcgcaattttgcaaagattctattttagaggcggctgatgctggaattaaattaataatatgcattacagagggagtgccaaccttagacatgcttatagttaaaaagagggttgatgagctgggcatcacattaatcggtcctaactgtccaggaatcataactccaggtgaagcaaagttaggaattatgccaggcagtattcatttgcaaggctcagttggaattatttctagatctggtactttgacttatgaggctgtgaagcaaactagtgatcttggtcttggtcagagcacgtgtgttggtattggaggagatccaattcctggaacatcatttattgatgttttgaagatgatggagttagatgatcaaactaaagccatagtcatggttggtgaaattggaggaacagctgaagaagaagccgctgaatatattaaagataatatttcaaagcctgtaatttcatatattgcaggacaaacagcgcctgcaggaaagagaatgggacatgcaggagcaattattgctggtggaaaaggaacagccgcagacaaaattaagaagctcaaagagtgtggtgttcatatatcggagaatctccttcaaattggtgcaaagactaaggaagttctggggtagc

SEQ ID NO: 310294 - DNA, 907 bp, Unknown
  Bacterial polypeptide expressing nucleotide sequence isolated from the Sargasso Sea
ctaattactcatcaaacaggacctttaggtagagaagtaaaaagactatacgttgaggaggtatctaatattagtaaagaattttatctttcttgcctagttgatagagcaagttcaaaaattgcatttatttcaagtgatcaaggaggaatgaacattgaagaagttgcccaaaatacacctgaaaaaatcttaacaactaaagtcgattttaaccaagaaatttccgaggtcgattgtaagaaaattattaaggtttttgaattagacgataattctatttcagaagctataagcttaataaaagcaatttataaattgttcatagaaaatgatgcaaatttagtagaaattaacccacttattttaacgaaagaaaataaagtagtttgtcttgatgcaaaaatgacatttgatgaaaatgcattatttaaacatcctgagattcaagaattaagagactataatgaggaagaagtagctgaaattgaagcaagcaaacatgacttggcatatataaaattagatggaagtataggatgtatggtaaacggtgcaggattagcaatggctacaatggatatcataaagctttatggtgaagagcctgcaaattttttagatgtaggaggtggagcatcaaaagaaaaagtttctgctgcattcaaaattattttatcagataaaaatgttaaaggaatattgataaatatttttggtggaattatgagatgtgatgtacttgcgcaaggtgttgtagatgcagcaaaagaaattaaaattgaagttccattagtagtaagattagcaggaacaaactttgaagaaggaaaaaagatattagagaattctggtttaaaatcatatctgcaaatgacttatcagatgctgcaaaaaaagttgtaga

SEQ ID NO: 310295 - DNA, 673 bp, Unknown
  Bacterial polypeptide expressing nucleotide sequence isolated from the Sargasso Sea
ttaaaaatatttaaattagactcaaattcaaagaaacaagcattagatcttataaaatcgatttataaaatgtttactgaatatgatgtatcccttgttgaaataaacccagtaattttaacaaaagagaaaaatatcatttgtttagatgctaagataagtttcgatgataatgctctacacaaacatcctgaaatacttgaattaagagatttaactgaagaggatcctatagaaatcgaggcaagcaagcatgacttgtcatatgttaaattagatggaaacattggatgtatggttaacggcgctggactagcaatggcaactatggacattataaaactttatggtgaggagccagcaaattttttagatgttggtgggggtgcttcaaaagagaaagtttcagcagcttttaaaattattctttcagacaaaaatgttaaaggaattttgattaatatatttggaggaattatgaaatgtgatgtactagctcaaggcgtagtcgatgcagcaaaagaaacaaaaattaatttaccaatagttgtaagattagcaggtactaactttgagcaaggaaaaaaaatattagacaattctgggttaaaaataatttcagcatcagatctatctgatgcggctgaaaaaattgttaaggaagtaaaataat

SEQ ID NO: 310296 - DNA, 505 bp, Unknown
  Bacterial polypeptide expressing nucleotide sequence isolated from the Sargasso Sea
catgagtattttagttaataatgataccaaattaattgttcaaggtataaccggaagccaaggtctctttcatgcaactcagtgtagggaatatggaactaatgtagttggtggtgttacgcctggaaaaggtggaacagaagtagaaggttttgaagtatttgattcagtagttgatgctcgtaaagccaaggcagctaataccagtcttatttttgtgccagctgcatttgcccctgatgcaattcttgaagctactgatgcaggcattgaacttataatctgtataactgaaggtataccaaccaatgatatggttagtgtaaaaaaggtcgttgatgcatcctcatcaacattaattggtccaaattgcccaggagtcattacgcctggtcaagcaaaagttggaataatgccaggatatattcataaagaaggaaatataggaattatctccaagagcggaacgctcacttatgaagccgtctggcaattaactcaatta

SEQ ID NO: 310297 - DNA, 861 bp, Unknown
  Bacterial polypeptide expressing nucleotide sequence isolated from the Sargasso Sea
aaaaaattaatcacacatcaaactgggccagaaggtcgagaagtaaaaagactttatgttgaaacttcttctaatatagagaaagaattttatttatcatgtttaattgatagagccacatctaaaattgcatttatttctagcaatgaaggagggatggatattgaagaagtagcagtaaaatctccagacaaaattttaactaacaaaattgatcttacagaagaaatttctgataaagattgtgaaaagataatcaaaattttcgatttagaggatagttcaaaaatggaagctatttctttaattaaatcaatttttaaaatgtttgttaaaacagatgcaaatatggttgaagttaatccattaattttaacaaaagaaaaaaaaattgtttgtctagatgcaaaaattaattttgacagcaatgctttatttagacatccagagattttaaatcttagagatctaaatgaggaagaccctatagagattgaagctagtaaacatgatttagcttatataaaattagatggaagtattggttgtatggtaaatggagctggcttagcaatggctacaatggatataattaagttatatggagaagagccagcgaattttctagatgttggtggaggagcttcaaaagagaaagtttcagcggcttttaagataattttatcagataaaaatgttaaaggtattttaatcaatatttttggtggcattatgagatgtgatgttcttgctcaaggtgtagttgatgcagcaaaagaaatcgatatcaatgttcctttggtagtaagattagctggtacaaattttaaagaaggaaaaactatattagacaattctgga

SEQ ID NO: 310298 - DNA, 853 bp, Unknown
  Bacterial polypeptide expressing nucleotide sequence isolated from the Sargasso Sea
atgaacattcacgaacatcaagcaaaaaaaattctaagagattttggagcacctgtttcaaatggcattgtaattatgtctgtgaacgagataaaagaaaaaatttcaagccttaccggtgagacgtttgttttaaaagctcaaattcatgcgggaggcagaggtaaagcgggtggtgttaaaataattaaagatatccaagaattaaaaatggctgccaaagaaatgatgggtaaaatattagtgacgcatcaaacaggaccacagggaaaagaggtaaagagactttatattgaagaagcctcagaaattgagaaagagttttatttgtcatgtataatagatagagaaagctcaaaaatagctttcataagtagtacacaaggaggtatggatatagaaaaggtagcgtttgagactccagataaaattaaaactataaaaattgatcttaaaaatgagggtccaaatgatgatgaaatcgaaaaaattatttcatcatttaatttgaattacaatcaaaaaaaagatgcaggagatttaattaaatctctttacaaaataatagtagaaaaagatgcgacgcttatagaaataaatccattaataattacaaaaactggaaaaattatttgtttggatgccaaaatgaattttgatgataattctatttttagaagaccagaaattttagcattgagagatctaaacgaagaagatccagcagaaattcaagcgagtaaacatgatttagcctatataaaattaaatggctcaataggatgcatggttaatggtgcaggattagcaatggctacaatggacattataaaattatatggcaaagaaccag

SEQ ID NO: 310299 - DNA, 757 bp, Unknown
  Bacterial polypeptide expressing nucleotide sequence isolated from the Sargasso Sea
tctaaaaagaaacctgaaactataattagatctaaaattgaagtagctgttggaatgcaaaagtttcaagctagagaaatagcatttggattaaaaattgaacctaatttaatagcaagagcagcagatacaattattggatgttatagagcgtttagcgagttagatgctactatggttgaagtaaatccattagtaatatcaaaccaagatcaaatattagcattagattgtaaaatgagttttgataacaatgctttatttagaagaaatcaagtttctgaattaagagacaaaactcaagagaaccccaacgaagtatacgcatctgatagaggtcttaattacgtcagtcttgatggaaatattggaaatataattaatggcgcaggtttagcaatggcttcaatggatatgattaaattagcaggtggagaaccagcaaatttcttagacgttggaggaggagctacacctgaaaaaatagttaaagcttttaaattaatttcaatggatgagaaagtgaaagttatacttgtaaatatttttgcaggtataaatagatgtgattgggttgcagaaggtatagttcaagcattagagaaaatagaaattaaagttccaatagtaataagattggcgggaacaaatgtcgaaaaaggaaataaaatattaaaagaaagcaaaatagaatatatcgaagcaaacacattagaggatgctgcaaataaagcagttaaagcattgggtaattaaa

SEQ ID NO: 310300 - DNA, 715 bp, Unknown
  Bacterial polypeptide expressing nucleotide sequence isolated from the Sargasso Sea
aatgtcagtattagttaacaaaaacacaaaagttatttgccagggctttactgggtcacatggtacttttcactcagagcaagcaattaaatatggaacaaatttagttggtggagttacaccaaaaaaaggaggtcaaaaacatttagatagaccagtttttaatagtgttgttgaagcaaaaaatgaagttggtgcagatgcaacaatgatttatgttccagctaaatttgctgcagctgcaattatagaggcaattgatgcgtctattgaattaatagtttgtattacagaaggtattcctgttcaggatatgcttagagttagacaaaaattaaatggatcaaaaagtagattaataggtccaaactgcccaggaattattactcctgatgaatgtaaaattggaataatgcctgggaatattcataagcgaggatcagttggaattgtatctagatctggaactttgacatatgaagcagttgcacaaactacagaaaatggtttaggtcaatcaacatgtattggaataggaggtgatccaataaacggaactaattttattgattgtttagatctatttcttaatgacgaagaaacaaaatccattttaatgattggtgaaatagggggaacagctgaagaagaagctgcagaatttgtaaaaaatcacaaaataaaaaaacccatagtaggatttattgcaggaatt

SEQ ID NO: 310301 - DNA, 916 bp, Unknown
  Bacterial polypeptide expressing nucleotide sequence isolated from the Sargasso Sea
agctcctgtatcaaaaggaatagttattttcaatttagatgagctacaaaagaaaatttcccaactgcaaagtaaagaatatgtattaaaagcacaaattcatgctggcggaagaggaaaagccggtggtgtaaaattaattaaaaattttcccgaccttataaatgagtcaaaaaaaatgatgggaaaaattttagttactcatcaaactggcccagagggcaagcaagtgaaaagactttatatagaagaagcctcgaatatttcaaaagaattttatttatcatgtctggttgatcgagagacttctaaaattgcttttataagtagtacagaaggcggcatggatatagaaaaagttgctcaagaaacaccagataaaataattacaaataagatagatcttaatgaaagcggacctagtaatgatgaaatagaaaaaataatttcagttttcaggcttagtgaaaaacaaaaaaaaacagcatataaattaataaaatctctttatgagataataatttcaaaagatgcaaacttaattgaaattaatcccttaatattaacaaaatccaacgaattaatttgtttagatgctaaaatgaacttcgatgacaatgctatttttcgcagaccagaaatatacgagcttagagatttaaatgaggaagatccaactgaaatagaggcaagcaaatatgatctcgcatacatcaaattaaatggttcaataggttgtatggtcaatggagctggtttagctatggcaacaatggatataattaaactttacggtaaagagcctgcaaattttttagacgtaggtggtggcgcatctaaagaaaaagtagctgctgctttcaaattaattttatcagataaaaatgtaaaaggcattttgataaatatatttgga

SEQ ID NO: 310302 - DNA, 949 bp, Unknown
  Bacterial polypeptide expressing nucleotide sequence isolated from the Sargasso Sea
agtaaatacccctctgaaggtaaagtttttgaaaatgaaaacgatgctgaagagtatgcaaaatcactgggagttgacgaatttgttgttaaggctcaaattcatgctggtggaagaggaaaggctggaggggttaaattggtaaaaactcctgaagaggttagagatacagtcaaacaaatgttaggtatgactttagttacacatcaaacagggcccgagggtaaattagttaataaggtatatgttgaaaaatcttcaactatcaaaaaagaatattatctatcattggtaacagatagatcaactgaaaagaatgtaattatcgcgagtccagagggtggagttgacattgaaaaggtagcagaagaaacaccagaaaagcttttaactcaaccaattgaccctgttgttgggattcaaccttttcatattagaaaaatttcatatttccttggtcttgataaagaacaaactaagcaattaagttctattatctctggactatataatctttatacagaaatggattgtgctttagttgaagtcaatcctcttatagcaacgaatgagggagaaattagagcattagatgcaaaaattaattttgatgataatgctgaatttagacatcaagagtatccagaactccatgatccaaccgaggaagagccacttgaactagaagcaaaagagtggggttttagcttcgttaaacttgatgggaacattggatgtcttgtcaacggtgcggggttagctatggctacaatggatataataaaatatcatggtgcagaaccagccaactttttagatgttggaggtggagcatctgtagaacaggtaactcaagcatttaaaatgatccttagtgatgacaatgttaaagctatattggttaatatttttggtggaatcatggaatgtgacactatagctgaaagta

SEQ ID NO: 310303 - DNA, 638 bp, Unknown
  Bacterial polypeptide expressing nucleotide sequence isolated from the Sargasso Sea
tgtaggatcaaatcttattaaatcactttatgaaatagtattaaaaaaagatgcaagcttaattgaaataaatcctttaataatcactaaatctggcgagttgatttgtctagatgcaaaaatgaattttgatgacaatgcgatttttcgtagaccagaaattcttgaattaagagatcttaatgaagaagaaccggcagaaattgaagccagtaaaaatgatctagcttatataaagttgaatggctcaataggttgcatggtgaacggtgctggcttagcaatggccacaatggatataatcaagctttatggagaagaaccagctaattttttagatgtaggaggtggagcttcaaaagaaaaagtttcagcagcatttaagttaattctttcagataaaaatgtaaaagggattttaataaatatttttggtggaatcatgagatgtgacgtgcttgcacaaggagttgttgatgctgcaaaagaaattaatttatctgtcccgttagttgttagattggccggtactaattttaaagagggtaaagaaatattagataaatcaaatttaaaaatcttatcagcctcagatttaaatgatgcggctaaaaaaatagtagaggcaataaaataaa

SEQ ID NO: 310304 - DNA, 592 bp, Unknown
  Bacterial polypeptide expressing nucleotide sequence isolated from the Sargasso Sea
gctggatgcgagccttctggagatcaacccgctcgttgtgaccggaagcggcgatctcctggcgctcgatgcgaagatgagcttcgatgacaacgcgctctaccgtcatcccgatgtgctggcgcttcgcgaccttgcagaggaagacccggctgaagtgcgcgccagcgaattcgagctcaactacatcaagctcgacggcaatatcggctgcatggtgaacggcgccggcctcgccatggcgaccatggacatcatccagctgcagggcggctctccggcgaacttcctcgatgtcggtggcagcgccaccgtcgagcgtgtcaccgaagcctttaagatcattctctccgacgagaatgtgaagggcatccttgtcaacatcttcggcggcatcatgcgctgtgacatcatcgccgagggcgttgttagcgcggcccgcagccttgggctcgacaagccgctggtcgtgaggctcgagggcaccaatgtcgaagagggcaagcgcaccatggccgaaagcggtctcgacatcattgcggcagacaatctggccgacgccgcggcgaaaatcgtcgccgcgacagcctga

SEQ ID NO: 310305 - DNA, 656 bp, Unknown
  Bacterial polypeptide expressing nucleotide sequence isolated from the Sargasso Sea
tcctccaccatttgctgcagatgctatcttggaggctatagatgctgaaatagaactaatagtttgtattactgaaggaattcctcaacatgatatgactaaggtttataataagttattacaatcaaaaagtagacttgttggccctaattgtcctggagtgattactcctgaagaatgtaaaattggaattatgccggggcatattcattcaaaaggtaatgtaggaatagtttctaaatcaggcaccttaacttatgaagcagtatatcaaacctcgcaaatagggcttggacagtcttcatgtataggcattggaggagatcctatccctggtacaaacttcatagatattatagatctatttctaaaagatagcgaaactagttctattattatgataggcgaaattggaggtaatgcagaggaagatgctgcagattttataaaaaaatctaaaattaaaaaacctatggttgcctttatagcaggcttaacagcacccaaaggaaaaagaatgggtcatgctggtgccataatagctggtggtaaaggtacagcagaagataaaatagaagcattaaaatcagcggatgtaaaaatctcaatgtcacctgctttaatgggaaaaactctttatgagttattgaaatgag

SEQ ID NO: 310306 - DNA, 548 bp, Unknown
  Bacterial polypeptide expressing nucleotide sequence isolated from the Sargasso Sea
aagaggttttgttgtgttagatgcaaaaattagcttagacgacaatgcactttttcgacatcctgaattactagaattaaaagatttaacagaagaagatcctttggagttgcaagcagcagaacatgatatgaattatgttaagcttgatggatcaattggctgtatggttaatggtgctggcttagctatggcgacaatggatattatcaaacaatttggcgaagagcctgcgaattttttagatttaggaggcacagcaaataaagatagagtcataatgggctttaaaatcattcaatcggatccaaatgttaaatctatattgattaatatttttggtggcatcatacattgtgatatgattgctaatggaattgttgaggcagtaaaagaattagattttaaactacctttagttgttcgatttcaaggaacaaactcaagtgagggaagagatgtaattaataattctgatctaagattaatttctattgatgattttacagaagcagcgaaaaaagtagtggatttggctaaaggataat

SEQ ID NO: 310307 - DNA, 862 bp, Unknown
  Bacterial polypeptide expressing nucleotide sequence isolated from the Sargasso Sea
gatgtcagttttagtagataaaaaaacaaaagttatttgtcagggctttacaggaacacacggaacttttcactcagaacaagcattaaagtatggaacacaattagttggaggtgtaacccctaaaaaaggagggcaaaaacatcttggtctcccagtatttaacacggttattgaggccaaagaaaaaacaaaagcaaaagcctcaatgatttatgttcctcctaaatttgcatcttcagctataatcgaagctatagactctaaaattgaattaatcgtttgtataactgaagggatacctgtaattgatatgattaaagttaaacaggctctaaaaaaaagtcaaagtagattaataggacctaactgtcccggtataattaccccagaagaatgtaaaataggaataatgcctggaaatattcataaaaaaggttctgtaggaattgtttcaagatccggcacgttaacctacgaggctgttgctcaaactactgctaatggaatgggtcaatcaacatgcattggtattgggggtgacccaattaacggaacaaactttatagattgtttagaactttttttaaatgacgaagaaacagaatcaatcgtaatgattggtgagattggtgggactgctgaagaagaagctgcggaatttttaaaaaaatcaaaaataaaaaaacctatggtaggttttatcgcgggcctaacagcacctgcaggcagaagaatgggccatgctggggcaattatatcaggtggcaaaggcggagcgaaagacaagatagaaacaatgaaatctgccgatataactatctctgattctccagcagatattaggaaaaacattatataa

SEQ ID NO: 310308 - DNA, 481 bp, Unknown
  Bacterial polypeptide expressing nucleotide sequence isolated from the Sargasso Sea
atgaatcttcatgaatatcaagcaaaacaactttttcgcgaatatgggatagccgtatcagatggcgttgctgcctcttcagctgaacaggctgaaaaagctgcactttctttaggtgtatctaagtgggttattaaggctcaagtccatgctggaggaagaggaaaagctggaggggttgaggtggttgataaaattgaaaaagtaagagaatttgctgataaatggctaggaactaacttagttacatttcaaaccgacgcagatggacagcccgtaaatcagattttagttgaaacttgtaccgaaatagaaaatgaactgtatctaggagctgtaattgatagagcttcacaaagacttgttgtaatggcttctactgaaggtggggtaaatattgaagaagtagctgaacaaacgcctgaaaagatatttaaggtggaaatagatcctattgaaggaacgaatgacatggatgctg

SEQ ID NO: 310309 - DNA, 853 bp, Unknown
  Bacterial polypeptide expressing nucleotide sequence isolated from the Sargasso Sea
atgaacatccacgagtaccaaggtaaagccctattcagagaagagggcgtcgccgtgcaagaaggctttcactgcacaacagtcgaccaggctctggaagcgtacgactctcttggaagcaagatcgtcgccgtaaagagccagatacatgcgggaggacgtgggaaagggaacctctactgccccgacactggcgatttgcagatggagggcggagtcaagattgccttatcgcgcgacgaggtcgagacctattccaaaaacatcctagggaacattctggtcaccaagcagtccggtccggaaggtaagatggtgaacaacctatacatagaggcaggctgtgaaatcgcccatgagtattatctcgctctcttagtcgatcgagaagaggatgccatcttggtgatggcttcgactgagggaggtgttgacatagaggaggttgctgagactactccccaggctattcacaaagcttggaccgactcgtcagggaaactgcctaccggggctgacagtgcgatggctgattccctaggactcacaggcgtatcaaaggactcgttcaaagagatgctaggacgtctggtttctatgttcgtaacacgagactgttctatgattgagatcaatcctcttgtgagagcaggagatggtgcgatgattgcactagactccaagataagtttcgatgacaacgcctcatttaggcatccctggagagcggagatgagagacatgtccgaagaggaagaggtcgagattagggccaataaatccggcctatcatacgtcaaattggatggaaatatcgaaaggttggtcaacggagcaggattggccatggcct

SEQ ID NO: 310310 - DNA, 677 bp, Unknown
  Bacterial polypeptide expressing nucleotide sequence isolated from the Sargasso Sea
ggaaatagacgcaacaataatttttgttcctgctaagttttgtaaagattctgttcaagaggctattgatgcagaaattccattgatcatttgtattactgaaggaatacctactttggatatgatgaagttaaaacaaaatgctgactctgtaggctgcagaattattggtccaaactgccctggtgtaattactccagatcaatgcaaacttggaatcatgcccggatatattcataagcccgggaaaataggaattgtttcaagatcgggaactttaacttatgaagctgttgatcagaccactcaagctggtttaggtcaaagcagttgtgtgggaattggcggagatcccattccagggtcaagttttattgatatcttgcagctgtttgaagaagattctgaaacagaaggaatcgtgatggttggtgaaataggaggaactgccgaagaagaggctgctgagttcattcagtctaatgtatccaaacctgtggttgcatatattgcaggggtgagtgctccacccgggaaaagaatgggacatgccggagcaataatcgctggcggaaaaggaaccgcggaagataaattcttagctcttgaaaaggctggagttcatacaactagaagccctgccaaaataggagatgaaataagcaaactagtatgaa

SEQ ID NO: 310311 - DNA, 373 bp, Unknown
  Bacterial polypeptide expressing nucleotide sequence isolated from the Sargasso Sea
tggtttaggtcaatcaacatgcattggaattggaggagatccaattaatggaacaaattttatagattgtttagatttatttttacatgatgatgaaacagaatcaattttaatgattggtgaaattggtggtacagcagaggaagaagcctctgaatttattaaaaatcacaaaataaaaaaaccaatagtgggctttatagctggagtaacggcccctccaggaagaagaatgggacatgctggagcaattatttctggggggaaaggcggtgctgaagataagataaaaaagatggaggaatctggaataactgttgcaaaatccccatcaataattggtaaaactttatttaacaaactgtctaattga

SEQ ID NO: 310312 - DNA, 565 bp, Unknown
  Bacterial polypeptide expressing nucleotide sequence isolated from the Sargasso Sea
ataataaacaaaaaaggtaaattcattttattagattcaaagattacaattgatgacaatgctctttttagacactctgatcttgaaagccttagagatttatctcaagaagaacctctagaagtggaggcaaatgaatatggtttaagttatataaaattagatggttcaataggatgtatggttaatggagcaggattagcaatggcaaccatggatgttatcaagcaatttggagaagaacctgcaaattttttagatttaggcggatctgcaaataaggaaagagctgtaaaagcttttaaaattctacaatctgataaaaatgtcaaatctgtatttataaatatttttggaggaattgttaggtgtgatgttattgcaaatggcattgtagacgctgtaaaagaattaaattttaaattaccaatagtaatacgttttcaaggaactaatgcatctattggacaagaaattattaacaaatctaatttagatttagtttctgtagacgacttcatggcagctgctaagacagcagtagatctgtcaagaaagaagtaat

SEQ ID NO: 310313 - DNA, 712 bp, Unknown
  Bacterial polypeptide expressing nucleotide sequence isolated from the Sargasso Sea
attcaaaaagcaaaagcactcaaaactgaaaaatatgtgctcaaagcacaaatccatgcgggaggcaggggaaaagctggtggtgtaaaaattttaaattctattgaagagctaacggtagcagcaaaagaattactaggaaaaacactagttactcatcaaactggccctgaaggtagaaaggtaaaaagattatacgtagaagaatcatcaaatatagataaagaattttacttatcgtgcctggttgatagggcaagttctaaaattgcatttatatcaagtgaccaaggagggatggacattgaagaagttgcaagcagttcacctgaaaaaattataactacaaaagttgatatgggtgacgaaatttcagagtcagattgtgaaaaaataattaatatttttaatttaaatgaagacgcaaaaaagcaagcaataacattaattaaatcaatatataaaatgtttgtgggtactgatgcaaacatggttgaagtaaatccattaattttgacaaaagaggaaaaaattgtctgtttagatgcaaaagttaatttcgactctaacgctttattcaggcatccagaaattgttgaattaagagatttaaatgaggaagatcctaccgagatagaagctagcaagcatgaccttgcatatatcaagctagatggaagtattggctgtatggttaatggagccaggatta

SEQ ID NO: 310314 - DNA, 889 bp, Unknown
  Bacterial polypeptide expressing nucleotide sequence isolated from the Sargasso Sea
atggatatacacgaataccaagcgaaaaaaattttatccggttttggagtcaccatcccaagaggtggcattgcttatagtccagaaaatgctgaaaacaaagcaagagaattaggtggctctaaatgggtagttaaagcacaagtccattctggttcaagaggtaaagctggaggtatagttatgtgtaattcgcctttagaggttgctcaggcaactgataagttattaggaaaaaaattagtaacaaaccaaactggtccaataggtaaaattataaatagggtttacatcgaagaagcaacggatataaaaaaagaactttatctagggttggttttcgatcgaagttcagagagcataatggttgttgcatctactgaaggtggcatgagcgtagaggaaatatcaaaagaaaaaccagaaaccattataagatctaaaatagaagttgcagttggaatacaacaatttcaggcgagagaaatagcatttggattaggaatagactcaaaattaatatcaagaatggctgatacaattattggatgttatagggcttttagtgaacttgatgcaaccatggtcgaggttaatcccatggttatttccaatcaagatcaaatattagcattagattgcaaaatgagttttgataacaatgcactatttagaaggagccaagtttcggaattaagagacaaaacacaagagaatccaagtgaagtttatgcatcagatagaggtttaaattatgtaagcttagatggaaacattggaaatattattaatggagcaggtctagcaatggcttctatggatatgattaaattagatggaggggagccagcaaatttcttagatgtcgggggtggagcgacgccagaaa

SEQ ID NO: 310315 - DNA, 753 bp, Unknown
  Bacterial polypeptide expressing nucleotide sequence isolated from the Sargasso Sea
tcatcaaactggccctgaaggtagagaagtaaaaagattatacgtagaagaatcatcaaatatagataaagaattttacttatcgtgcctggttgatagggctagttctaaaattgcatttatatcaagtgaccaaggagggatggacattgaagaagttgcaagcagttcacctgaaaaaattataactacaaaagttgatatgagtgatgaaatttctgagtcagattgtgaaaaaataattaatatttttaatttaaatgaagaagcaaaaaagcaagcaataacattaattaaatcaatatataaaatgtttgtgaatactgatgcaaacatggttgaagtaaatccattaattttaacaaaagaggaaaaaattgtttgtttagatgcaaaagttaattttgactctaacgctttattcaggcatccagaaattgttgaattaagagatttaaatgaggaagatcctaccgagatagaagctagcaagcatgatcttgcatatatcaagctagatggaagtattggctgtatggtaaatggagcaggactagcgatggcaacaatggatataattaaattgtatggtaaagagccagcaaattttttagatgtaggcggtggcgcatccaaagaaaaagtatctgctgcattaaagataattctctcagataaaaatgttaaaggtattttaattaatatttttggaggaataatgagatgtgatgtccttgcccaaggagttgttga

SEQ ID NO: 310316 - DNA, 502 bp, Unknown
  Bacterial polypeptide expressing nucleotide sequence isolated from the Sargasso Sea
atgtcaatattagtaaacaaaagtacaaaagttatttgccaaggatttacaggctctcatggaacttttcattcagaacaagccattaaatatggaactaaacttgttggaggagtaacaccaaaaaagggtggtcaaaaacatttaggacttccagtttttaatacggttcaagaagcgaaagataaaacaaaagcaactgctactatgatttatgttcctcctaaatttgccgcttcagcaataattgaagctataaatgcagaaatcaaactagtggtatgtataactgaagggataccagttatagatatgataaaagtaaaagaaaaattaaaaaaaagtaaaagcagattaatagggccaaactgcccaggtgtaattacccctaatgaatgtaaaataggtattatgccaggaaacattcataaaaagggatctgtaggaataattacaagatctggaactttaacttatgaggcggtggctcaaaccactcaaa

SEQ ID NO: 310317 - DNA, 847 bp, Unknown
  Bacterial polypeptide expressing nucleotide sequence isolated from the Sargasso Sea
gcagttattacatctccagatgatattttgagtgctgtaagggatattggtggagataaatgggtagtcaaagcacaggcacatgctggaggaagaggtaaggcaggaggcgtaaagttagttgatacgcctgaagaagcaaaagaatttgctaagcattggcttgggaatagactagtcacttatcagactgattctaatgggcagctagttagctccatcttagttgaagagtgtacagatattgcaaaggagctatatcttagcgctgtcattgatagaggtactcagagaattgtttttattggctcgagtgagggcggtgtcaacattgaagaggttgctgaaaaaacaccagagaaaatcatctatgaacctattgatcctttaacaggaccaatgggttttcaagcaagaaaaatttcaaaagtactgggtttagataatgaacagacaaaacagttttcaaaaatgctttcgcaattaactaagttatttatttcttatgacctcagcttgctagaaataaatccattagtaataactcaaagaggaaagctccattgtttagatgcaaaaatcaacatcgattctaatgcaatatatagacagccagaaattcaggcaatgcacgatccatctcaagaggatcccagagaggctgaagctgctaaaagtgacttgagctatgtttcattagacggaaatataggttgtatggtaaatggtgccggattagcaatgggaacaatggataccattaaatatttcggtggttcaccagcaaatttccttgatgttggtggaactgctactcaggaaagagtctcaaaagcttttaaattaa

SEQ ID NO: 310318 - DNA, 824 bp, Unknown
  Bacterial polypeptide expressing nucleotide sequence isolated from the Sargasso Sea
aatgtcatttttagttaataaaaaaactagattaatttgccaagggttcacaggttcacatggaacatttcattctgaacaggcgattaaatatggaacgaaattagttgggggagttacaccaaaaaaaggtggacaaaaacatttaggactgcccgtctttaatactgtaaaagaagcaaaaaattctgaaggtgctaatgcaacaatgatttatgttcctgcaaaatttgctgctgctgcaattatagaagcaattgaagcatctattgaattaattgtttgtatcactgagggcattcctattcaggatatgctcaaagttaaacaaaaattatccaaatcaaaatgtagattaattggaccaaactgtccgggaataataacaccagatgagtgtaaaattggcattatgccaggcaatattcataaaaaaggatctgttggtatagtttctagatctggtacacttacttatgaagctgtagctcaaacgactgaaaacgggcttggacaatcaacttgcatcggaatcggaggagatccaattaatggcactaattttatagattgtttagacttgtttttaaatgatgaagaaacgcaatcaattttaatgataggggaaattggagggacagctgaagaagaagcagctgaatttattaaaaatcataaaatcaaaaaaccaatagtagggtttatagcaggtgtgactgctcctcctggacgaagaatggggcatgctggagcaattatttctggaggcaaaggtggagcagaagataaaattaaagcaatggaagattgtggcattatcattg

SEQ ID NO: 310319 - DNA, 874 bp, Unknown
  Bacterial polypeptide expressing nucleotide sequence isolated from the Sargasso Sea
atgtcaattttagttaataaaaatactagagttatatgccaaggcttcactggaaatcatggtacatttcattctgaacaggcaattaaatatggaactaatttagtcggaggtgtaactccaaaaaaaggcggacaaacccatctatcaaaaccagtttttaattctgttaaagaagcaaaagaaaaaacagatgcaaatgcttctatgatttatgttcctgctaaatttgccgcctctgctatcatagaagctattgaagcctcaattgaattaattgtatgtatcactgaaggaataccaattctagacatgttaagagtaaagaacaaattatcagattctaattcaagattaattggcccaaattgcccagggattataactccagaggaatgtaaaattggaataatgcctggaaatattcacaaaaaaggttctgttggaattgtatctagatctggaactttaacttatgaagctgtggcgcaaaccactaataatggactaggacaatcaacttgtattggtattggcggagatccgatcaatggaacaaattttatagattgtttagatttatttttaaatgatgaggaaacaaaatctatactaatgataggcgaaattggaggaacagccgaggaagaagccgcagaattttttaaaaatcataaaataaaaaaaccaatggttggttttatagctggaattacagctccaccaggaaggagaatgggtcatgcaggagcaataatttcaggaggaaaaggtggagctgaagataaaataaaaaaaatgcaagattgtggtataacaattgctaaatcgcctgcagaaattggaaaaactctattaaaaaaaattgtctaat

SEQ ID NO: 310320 - DNA, 565 bp, Unknown
  Bacterial polypeptide expressing nucleotide sequence isolated from the Sargasso Sea
cctttaattttaacaaaagaaaaagagttgatttgtttagatgcaaaaatgaattttgatggaaatgctttattcagacatccagaactaattgagttgagagacctcaatgaagaagaagcaacagagatagaagctagcaagcatgatctagcatatattaaacttgatggaacaattggatgtatggttaatggagctgggctcgcaatggcaactatggatataattaaattatatggaaaggagccagcaaattttttagatgttggtggtggtgcttctaaagaaaaagtggcagctgcttttaaaataattttatcagataaaaatgttaaaggaatattgattaatatttttggtggaataatgagatgtgatgttcttgcccaaggtgttgtggatgctgcaaaagaaataaaaatgaatgttcctttagttgtaagattagccggaacaaattttgaagagggaaaaaaaattcttgataattcaggtcttgagttaatttctgcatctgatttatcagatgctgccaaaaaaattgtagaggctattaaataaa

SEQ ID NO: 310321 - DNA, 841 bp, Unknown
  Bacterial polypeptide expressing nucleotide sequence isolated from the Sargasso Sea
gttttatttatcttgtttagttgatagagctagttctaaaatagcattcatatctagcgaccaaggtggaatggatattgaagaagtagcaaatagttcacctgaaaaaatcaatacaacgaaagtcgatataaataatgaagtttcagacaaagattgtgaagagataattaaaatctttagcttaagtggtagcacaaaagcacaagcaattgctttgataaagtcaatttataatatgtttataagcacggacgcaaatatgattgaggtcaatccactaatcttgactaaggaagaaaaaataatttgtttagatgcaaaagtaaattttgactctaacgctttatttagacatcctgaaattgttgggttaagagatttaaatgaagaagatccaacagaaatagaagcaagcaaatatgatcttgcttacataaaattggatgggagtattggttgtatggttaatggagcaggattggccatggcaactatggacataattaaattacatggaaaagagccagctaattttttagatgttggaggtggtgcttcaaaagaaaaagtttcagcagctttaaagataattctgtcagacaaaaatgttaaaggaattctagttaatatttttggaggaataatgagatgtgatgttcttgctcaaggagtggtagatgcagccaaagaaataaatattagtgttccattagttgttagacttgcaggtactaattttaaagagggaaaaaagatattggataattcaggattaaaactaatttctgctgaaaatttagatgatgcagcaaaaaaaattgtagaggcaattaaataa

SEQ ID NO: 310322 - DNA, 859 bp, Unknown
  Bacterial polypeptide expressing nucleotide sequence isolated from the Sargasso Sea
aatgtcggttttggtaaataaaaatactaaggtaatttgtcagggatttactggcgcgcacgggacttttcattcagagcaggctataaaatatggaactaatcttgttggtggagttacgccaaagaaaggtggacaaaaacatttaaacagaccagtttttaatagcgttttagaggcaaaaaatgaagtaggagcagatgcaactatgatttatgtacctgctaaatttgcagcagcagcaatcattgaagctattgatgcatcagttgaacttattgtttgtataacagagggaattccaattcaggatatgcttaaggtcagacaaaaattaagtggatctagtagcagattaattggacctaattgtccaggaataattacgccagatgaatgtaaaattgggattatgccgggaagtattcacaaaagaggaagtgttggaattgtatcaaggtcaggaacattgacatatgaagcagtagcccaaacaactgaaaatggacttggtcaatcaacttgtattggtattggaggtgatcctattaatggaacaaattttatagattgtttagatttatttttaaatgattctgaaacagagtctattttaatgataggtgaaattggaggaacagccgaagaagaagcagctgaatttataaaaaatcataagatcgaaaaaccaattgttggatttatagctggaattactgctcctccaggaaggagaatggggcatgctggtgccattatatcaggtggcaagggtggagctgaagataaaataaaaaaaatggaagaatgtggtattacagttgccaaatcaccatcaattatggaaaaactttatttg

SEQ ID NO: 310323 - DNA, 821 bp, Unknown
  Bacterial polypeptide expressing nucleotide sequence isolated from the Sargasso Sea
tgatagagctagctcaaaaattgcattcataactagtgatcaaggaggtatggatatagaagaagtcgcaaaaaataatccacagaaaattttaacaaccaaagtagaaatgagtgatgaaatttcaaaaaatgattgtgaaaaaattattaggatctttaatttaaatgataatattaaaaatcaagcaatttccttgattaaatcaatctataaaatgtttacaagcactgatgcaaacatggttgaagttaaccctttaatattaactaaagaagaaaaaattatctgtttagacgcaaaagtaaattttgactctaatgctttatttagacatcctgaaattaaagaacttagagacttaaatgaggaagatccaatagaaatagaagctagtaaacatgaccttgcctatataaagttagatggaactattggttgtatggttaatggggctggtttggctatggcgacaatggatataattaaattgtatggaaaagaaccagctaattttttagatgtaggaggtggggcatcaaaggaaaaagtttcagctgctctaaagataattctttctgataaaaatataaaaggaattttaataaatatttttggtggaataatgaggtgtgatattcttgcccaaggtgttgttgatgctgcaaaagaaataaatattaatgttcctctagtagtaagacttgctggaacaaattttaaagagggaaaaaaaatacttgataattcgggtctggaattgatctcagcagaaaatttagatgatgcagcaaaaaaaattgttgaggctataaaataaa

SEQ ID NO: 310324 - DNA, 670 bp, Unknown
  Bacterial polypeptide expressing nucleotide sequence isolated from the Sargasso Sea
tatgtcagttttagttaataaaaatacaaaagttatttgtcagggatttacaggtgcccatggaacttttcattctgaacaagcaattaaatatggaactaatttagttggaggtgttactccaaaaaaagggggacaaaatcatcttaatagacctgtattcaatactgttaaagaagcaagagatagtttaggagccaatgcaacaatgatttatgttcctgcaaagtttgcagcagcagcaattattgaggcaatagaagcctcaatggaactaattgtctgcattaccgaaggaataccagttttggatatgcttaaagttaagaaaaaactagtcaattcaaattcaagattaataggacctaattgtccaggaataattactccagatgaatgtaaaataggaattatgcctggaagtattcataaaagaggatcagtcggaatagtttctcgatctggtacactcacttatgaagcagttgctcaaactactgaaaatgggttaggacaatcaacttgcataggaattggaggagacccaattaatggaacaaattttatagattgtttagatttatttttgaatgatgaagaaacaaaatcaataatgatgattggtgaaattggtggaacagcagaggaagaagctgcagagtttataaaa

SEQ ID NO: 310325 - DNA, 773 bp, Unknown
  Bacterial polypeptide expressing nucleotide sequence isolated from the Sargasso Sea
actgagagctcatggtacttttcattcagagcaggctttaaagtacggtacacaattagtaggaggtgtgactcctaaaaaaggagggcaaaaacatttgggcttaccagtttttaactcagtggctgaagcaaaagaaaaaactaatgcaacagcttcaatgatatatgtccctcctaagtttgcagcatccgcaataatagaagctatagagtctaaaatggaattagtagtttgtataactgaaggtattcctattatcgatatgatcaaagttaaaaaaatattaaaacaaagtaaaaccagattagtcggtcctaattgtccaggagtaattacaccaaatgaatgtaaaatcggtattatgccaggaagtatacacaaaaaaggatcagtaggtattgtgtcaagatcaggtacgttaacatatgaagctgttgctcaaacttcatcaaacggactaggtcagtctacatgtattggtattggaggtgatcctataaatggaacaaattttattgattgtcttgagctttttttgaaagatgaagatactaaatctatagttatgataggggaaatcggtggctctgcagaagaagaagcctcagaatttattaaaaaatcgaagattaaaaagccaatggttgggtttgtggcaggccttactgctccgcctggccgaagaatggggcacgcaggcgcgataatatccgggggtaaaggcggcgcaaatgacaagattgaaacgatgaaatcagcaggaataacaa

SEQ ID NO: 310326 - DNA, 905 bp, Unknown
  Bacterial polypeptide expressing nucleotide sequence isolated from the Sargasso Sea
tatagatgaattaaacaaagaagcaaaagaattactggtaaaagtacttgttacaaatcaaactggaagccaaggaaaaaaagtaaatagattgtatgtggaagagtcatcaaatattgaaaaagaattttatttgtcttgcttggttgatagatctagttcaaaaatagcatttatttcaagtgatcaaggaggaatggatatagaagaggtggctaaagaaaaacctgaaaaaataattactacaaaagttgattttacaaaagaaatttcaaatgaaaattgtgaaaaaattataaaagtttttaaattaaatgatagtttaaaaacacaagcaattgatttaattaaatcaatctacaaattatttttagatctagatgttagtttaatagaaataaatcctttaattttaaccaaggaaaataaaattgtttgtttagatgcaaaagtaaattttgatgataatgcactttttaagcatccagagattttagagttaagagatctcagtgaagaaaatttgactgaaatagaagcaagcaaacatgacttagcatatattaaattagacggtagtataggctgtatggtcaacggagccggcctggctatggctacaatggatataataaagctttatggagaagagcctgcaaattttttggatgtaggtggtggagcatccaaggaaaaagtctctgctgcttttaaaattattttgtcagataaaaatgttaaaggaattttgattaatatatttggaggaataatgagatgcgatgtgttagcccaaggagttgttgatgcagcaaaagaaataaaaattaatgtacctttagttgttagattagctggaactaactatgaagaaggtaaaaaaatcttggatagttcaaattaaa

SEQ ID NO: 310327 - DNA, 775 bp, Unknown
  Bacterial polypeptide expressing nucleotide sequence isolated from the Sargasso Sea
aatggatattgagcatgttgcagaacatacaccagaaaaaatacataaagaatttgtagacccaagattaggtttacaaggttttcaggctagaagagttgcttttaatttaggtttatctggtaaagcttttaaggagatgactaagtttgtttactctttgtataaagcatatgattcaatagacgcttcaatgtttgaaatcaatccggttcttaaaacttctgataataaaattatagcagttgacgcaaaagtttcacttgatgataatgctttatttagacattctgattatgcagaaatgagagatcttaatgaagaagatcctactgaggttgaagcaggtgaagcaggtttaaattttgttaaacttgatggtaatgttggctgtatggtcaatggagcaggtttagctatggctacaatggatattattaagttatccggaggtaatcctgcgaactttttagatgttggaggtactgcaaatgcagaaagagttgaaaaagcctttaaaatcatcttaaaagatgaaaatgtcaaagcaatattgattaatatttttggaggaattgttcgttgtgatcgtgttgcgcaaggagttgttgatgcttataaaaatatgggaaatattccagttcctatcattgttcgtttacaaggaacaaatgcagttgaagctaaaaaattaattgatgaatcaggattaaatgttcattcagcagttgttcttcaagaagctgctgataaagttaaagaggttttggcttaa

SEQ ID NO: 310328 - DNA, 1168 bp, Unknown
  Bacterial polypeptide expressing nucleotide sequence isolated from the Sargasso Sea
atgaatcttcacgagtatcagggtaagcagctgttcgctgaatacggcctgcctgtatccaagggcttcgcggtagacaccccggaagaagccgcagaagcctgcgaaaaaatcggcggcagcgagtgggtcgtcaaggctcaggtccacgctggtggccgcggtaaagccggtggcgtaaagctggtcaagagcaaagaagacgccaaggccttcgccgccaactggctgggcaagcgtctggtgacttaccagactgacgccaatggtcagccggtcagcaaaatcctggtcgaatcctgcaccgacatcgccaaggaactgtacctgggcgctgtagtggaccgctccagccgtcgcatcgtgttcatggcttccaccgaaggtggcgtggacatcgagaaagtggcccacgaaacccctgagaagatcctcaaggccaccattgatccgttggtcggcgctcagccgtaccagggtcgcgagctggctttccagctgggcctggaaggcaagcaagttgctcagttcgccaagatcttcgtaggtctggccaagctgttcaaagatcacgatctggctctgctggaagtcaacccgctggtcatcaaggccgacggcgacctgcactgcctggacgcgaagatcaacatcgacgctaacgccatgtaccgtcagccgaagctgaagactttccacgacccgtcgcaagacgatcctcgtgaagcccacgctgccagcttcgagctgaactacgtggccctggaaggcaacatcggctgcatggtcaacggtgccggcctggccatgggtaccatggacatcgtcaacctgcacggcggcaagccagccaacttcctcgacgtaggtggcggcgcgaccaaagagcgcgtgaccgaagccttcaagatcatcctgtccgacagcaacgttgctgccgttctggtgaacatcttcggcggtatcgttcgttgcgacatgattgccgaaggcatcatcggcgccgtgaaagaagtcggcgtgaagatcccggtggtcgtccgcctggaaggtaacaacgccgagctgggcgccaaggtcctggctgaaagcggcctgaacatcatcgcggcaaccagcctgaccgacgctgctcagcaagtcgtcaaagctgcggagggcaagtaat

SEQ ID NO: 310329 - DNA, 709 bp, Unknown
  Bacterial polypeptide expressing nucleotide sequence isolated from the Sargasso Sea
gatggagggcttctacgcacggcagattgccttcggtctcggcttggaaggcaaacaggttggatcggccgtcaagttgctgatggcaatttacaaggcgtttacagacctcgacgcaagcctcgtcgaggtcaatccgctcgtggtgaccggcgatggggatgtaattgcgctcgacgcgaagatgaacttcgacgacaacgcgctgtatcgtcatcctgagatcgccgagatgcgggatgaggacgaggaagatccaactgagttggaggccttcaaacacgagcttaactatatcaagctcgacggcagtattgggtgcatggtcaacggtgcgggccttgccatggcgaccatggatataataaagctattcggcgctgagccggcgaacttcctggacgttggtggcggcgcgaccaaggaacgagttaccgctgcctttgggatcattttatcggacccaaacgtcgaagggatcttggtcaatatttttggtggcatcatgcggtgcgacgtgatcgccgaaggtgttgtcgcggcggcgcgagaggttagcctgcaggtcccgttggtggtgcgcttggagggtacgaacgtcgatcttggcaagaaaattttagacgattcagggcttgcgattatagccgccgacgatctagccgatgcggccggcaaaatcgtcaaggcggtgaaggagtcggcgtag

SEQ ID NO: 310330 - DNA, 1075 bp, Unknown
  Bacterial polypeptide expressing nucleotide sequence isolated from the Sargasso Sea
gatgaaatgtgaaaaaagcaaagaaattaacactcaaaaatatgtactaaaagcccaaattcatgctgggggacgaggaaaagctggaggcatcaaaatattagataatatagatgatttaactaaagcttcaaaagaaatgcttggtaaaattttggtaactaatcaaactggaccaagtggaaaagaagtaaagagattatacgttgaagaatcatctaaaataaaaaaagagttttatctttcatgtttagtcgatcgtgtaagttctaaaatagcatttatatcaagtgatcaaggaggaatggatattgaagaagttgcaaaatctgatccagaaaaaattgttactacaaaagtagattttcttaaagaaattagtgaagaagactgtaaaaaaataataaaaatatttaatctagatggtcatacatcatctcaaggaattaaacttataaaatcaatttataaaatgtttgtttctactgatgcaaatctagtagaaataaatcctttaattttaaccagtgaaaataatttactttgcttagatgcaaaaatgaattttgatgataatgcaatttttagaaatccagaaattttagaattgagagatttaaatgaggaaaatcctacagaaattgaggcaagtaaatatgatttggcatatattaaattaggtggaagcattggttgtatggttaatggagcaggtttagcaatggctacaatggacataataaaattatatggagaagaacccgcaaattttctagatgtcggtggtggagcctcaaaagaaaaagtatctgctgcattcaaaattattctttcagataaaaatgtaaaaggaatattaataaatatatttggtggaattatgagatgtgatgttcttgctcaaggagttgttgatgctgcaaaagaatttaaaattaatattcccttagttgtcagattagctggaacgaattttgaaaaaggaaaaaaaattttagataattctagtttagatattatttcagcttctgatttatctgatgctgctcaaaaaattgtaaaggaaattaagtaa

SEQ ID NO: 310331 - DNA, 625 bp, Unknown
  Bacterial polypeptide expressing nucleotide sequence isolated from the Sargasso Sea
agcaattgagtcagagatacccttagtgatttgtatcacagagggcatcccggttttggacatggtcagggttaaaagagcattagttggttctaaaacgaggctcattggacctaactgtcctggtgtaataacgccaggagcgtgtaaaattggcattatgcctggacacattcataaggctggaagcgttggaatagtttcacgatcgggaacgctgacctatgaagctgttgcacagacaacggctgttggtttaggccaatcgacatgcataggcataggcggagatccagttaacggtaccaactttattgaatgtctcgaaatgtttttagccgatcctcaaaccgaatctattgtgatgattggggaaattggtggagtggctgaggaggaagctgccgagtttgtaaaaagctcaaaaacctcaaagccaattgttggttttatagccggaatgacagcgcccccaggaagacgtatgggacacgccggtgcgataatagctggaggaaaaggtggcgctaaagaaaaaatgcaagcgctcgccgaggctggcatccacgttgccgaatcgcccgcgaatattgggcagaaaatgattgagattttgagggtttaa

SEQ ID NO: 310332 - DNA, 533 bp, Unknown
  Bacterial polypeptide expressing nucleotide sequence isolated from the Sargasso Sea
aaactcaagattaattggtccaaactgtccaggaataattacacctaatgaatgtaaaattggaataatgccaggtaatattcataaaaaaggttcagtaggaattgtatcaagatcaggaacacttacctatgaggcagttgctcaaacaaccgaaaataaacttggccaatcaacttgcataggcattggtggtgacccaattaatggaactaatttcattgattgccttgatttatttttaaaagatgaccagacggagtccattttaatgattggagaaataggtggaactgctgaggaagaagctgcagagtttgttaaaaatcacaaaattaaaaaaccaatagtcggatttatagcaggtgtaactgctcctccaggaagaagaatgggacatgccggagctattatttcaggcggcaaaggaaatgctgaaaaaaagataaaaaaaatgcaagattgcggtattactgttgcaaattctccatctgaaattggaaaaacgctactaaataaattgtctaattgat

SEQ ID NO: 310333 - DNA, 1165 bp, Unknown
  Bacterial polypeptide expressing nucleotide sequence isolated from the Sargasso Sea
tatggacattcacgaatatcaggcaaagaaaatactctcaaactttggagtaacaattcctagaggtggaattgtttatagtccagaaaatgctgagaataaagctagagaaattggtggatcaagatgggtagtaaaggcacaaattcattctggcgctagaggaaaagctggaggaataattgtttgtaatactccattagaagttgctcaagcaacagataaattattaggaaaaaaattagttacaaatcaaacaggacctgaaggaaaaattgttaacagaatttacattgaagaagcgacagatattgaaaaggaattatatttaggattagtttttgatagaagctccgaaagtattatggttgtcgcatcgacagaaggtggaatgagtgttgaagaaatttcaaaggaaaaaccagaaacaattattagatctaaaattgaagttgcagttggaatgcaaaattttcaagctagagaattagcttttggtttgggaattgaacctgatttaattagaagagcttctgataccattattggatgttataaagcttttagtgaattagatgcaacaatggttgaagttaatccattggtaatttcaaaacaaaaacaaattttagctttagattgtaaaatgagttttgataacaatgcaatgtttagaagaagtcaagtttctgagctaagagataaaacacaagaagattcaaaagaaatttttgcatcggacagaggtttaaactatgtaagtttagatggaaatataggtaatattattaatggtgctggtctagcgatggcatctatggatatgattaaacttgctgggggagctccagcaaattttttagatgtaggaggtggagcaacaccagaaaaaatagttaaggctttcaaattagttacaatggatgaaaaagtgaaagtaattcttgtaaatatttttgctggtatcaatagatgtgattgggttgcagaaggaattgtagatgcgttaaaaaaaattgaaattaaagttccattagttatccgtttagcaggtactaatgtcgaaaagggaaataaaatcttaaaagagagtaaaataaattatatagaggcaaatactttagaggatgcagctaataaagcagttgcagcactcaataaataa

SEQ ID NO: 310334 - DNA, 926 bp, Unknown
  Bacterial polypeptide expressing nucleotide sequence isolated from the Sargasso Sea
taggtatattttaattacaaaacaaactggacaagaaggaaagaaagttaatacattttttattgaagaaggctgtataataaagagagaattttatcttagtcttctaattgacagaaaatcatctcaaatcatgttaatgatatcagatgctggtggaacagatattgaggaggtagcagagtcaaatcctgcaaaaattcactctatatttttttcaaatttagaagaaattaatatagatcaaaatttgaaaaataaaattaatattacatctgatcaatttcagaaattaattatcattataaaaaaattaattgatgcatttaaatcgttagacgctagtagcatagaaataaaccctctagttttagatgataaagaaaatttttttctattagatgcaaaattagctttagatgacaatgcgttgtttcgtcatcaggatctgcaagatttaagagatttatcagaagaaaatgccttagaaactaaagcagcagaaaatggaatgaattatgtaaaattgaatggaacaattggctgtatggttaatggagctggattggcaatggcaacgatggatatgataaaattaaatggacatgagccagcaaattttttagatttgggaggaactgcaaataaagaaagaacaattaaaggatttaaaataattcaatctgataaaaatgttaaatcagttttaataaatatttttggaggaattattcgctgtgatatgatagctaatggaataattgaggcaataaaagaattaaattttaaactaccattagttgttcgttttcaaggtactaatgctaaagaaggtagagatattattaataaatcacaagcgaatattatatctattgatgacttaaccgaagcaacaaaaaaagttgttgatttagctatttaga

SEQ ID NO: 310335 - DNA, 938 bp, Unknown
  Bacterial polypeptide expressing nucleotide sequence isolated from the Sargasso Sea
tatggatatacatgagtatcaggcaaaaaaaatactttcagggtttggtgttacaattcctagaggtggaattgcttacagtcctgaaaatgctgagaataaagctagagagctcggaggatctaagtgggtagtaaaagcgcaagttcattctggagctagaggaaaagcaggcggtataattatttgtaatagttctttagaagtcgcacaagcagccgacaaacttcttggaaaaaaattaattacaaaccaaactggtccagaaggaaaaataactaatagagtttatattgaagaggcaacagatattaaaaaagaattatacttaggtttagtttttgatcgaagttcagaaagtataatggttgtagcatctacagagggaggcatgagcgttgaagaaatttctaaaaaaaaacctgaaactataattagatctaaaattgaagtagctgttggaatgcaaaaatttcaagctagagaaatagcatttggattaaaaatcgaacctaatttaatagcaagagcggcagatacaattattggatgttatagagcttttagtgagttagatgcaactatggttgaagtaaatccattagtaatatcaaatcaagatcaaatattagctttagattgtaaaatgagctttgataacaatgcattgtttagaagaaatcaagtatctgaattaagggataaaactcaagaaaatcctaacgaagtatatgcatctgatagaggactaaattatgtcagccttgatggaaatattgggaatataattaatggtgctggtttagcaatggcctcaatggatatgattaaattagctggtggagaaccagcaaatttcttagatgttggtggaggtgctacacctgaaaaaatagtcaaagctttcaaattaatttcgatggatgataaagtgaaag

SEQ ID NO: 310336 - DNA, 1159 bp, Unknown
  Bacterial polypeptide expressing nucleotide sequence isolated from the Sargasso Sea
aatgaacttacacgagtatcaaggcaaagaaatttttgcaaaatatgatttacccgtttcaaaaggaaaagttgtcacaagccttaatgaggttgagcaagcatgtactgatattggaggaagtcgatgggtagcaaaagcacaggttcatgcaggcggtagaggtaaatctggaggtgttgctctatgtgacaccattgaggaggtagcggattttacaaaaaaatggttaggtaaaagacttgttacgtaccaaactgataaagaagggcagctggtaagttgtattcttattgaggaatgtaccaatatcgcagatgagctttactatagtgcagttattgatagatcttcacgtgaggttgcaataattgcatcctcggagggaggagtaaatatagaaaaagtttccgaggaaactcctgaaaagatcgcctccatatctcttaatggtaaagatgtatcacaaggcgatattgaaaagatatgtagcacactcaaactgaatgacactcaatcttcacagatggagcatattgtaagaaaaacagtttcaatgttctttgaatgtgatcttagccttttggaaattaacccacttgtaataaaagatgatggcaatttgcactgtttagatgcaaagataaatattgattcaaatgcactttttagacaaaaagagttacaagaaatgcatgatccaactcaagaagatccaagagaatctgaggcatcaaaatatgatctaagttatgtttcattggatggaaatattggatgcatggtaaatggagctggattagcaatgggcaccatggatacaataaagtttttcaaagggaatcctgccaactttctcgatgttggaggcacagctactcaagaaagggtagcaaaagcttttaaaataattttggatgatccagaagtaaaagtagttcttgtaaatatttttggaggtattgttagatgtgatttaattgctgaaggtatagttgcagcaattgatgaggtaggagttgaaatacctgtcgttgttaggctggaaggcaacagtgcagaaaaaggactatcaatccttgctaattcgtcttcaaaaatacaaagcaagaatagtttggaagatgcagcaagaactgcagtggagcttgcaaaatga

SEQ ID NO: 310337 - DNA, 907 bp, Unknown
  Bacterial polypeptide expressing nucleotide sequence isolated from the Sargasso Sea
aatgaatattcacgagcatcaagctaaacaaattttaaaacaatttggtgcagtagttcctgagggggtttatggtctcacagttgaggaacttttggaaaaatgtaaatctttaaaaacagacaagtatgtactaaaagcccaaattcacgctggtggaagaggaaaagcaggtggtgtcaaaattttagataattttaatgacctagaaaaatctgcaaaagagttattaggaaaaaaattagttacacatcaaacaggccctgaaggtagagaagtaaaaagactttatgttgaggtttcgtcaaatattgaaaaagaattctatttatcatgtttggtagatagagcttcttcaaagatagcatttatttcaagtaatcagggtggaatggatattgaagaggtagcaattgagtctcctgataaaatttcaacaaataaggttgaattaactgatgaaatttcagatgaggaatgtcagaagattattaagatttttaacttagaaggtaatcctaaaatcgaggcaatttctttaataaaatcaatttataaaatgtttataaaaacggacgcaaacatggttgagattaatccattaatacttaccaaagagaaaaagattatttgtttagatgcaaaggttaattttgatagcaatgctttatttagacatccagaaatcttagaacttagagatttaaatgaggaagacccagctgaaatagaggccagtaaacatgagttagcttacattaaattagatggaagtattggatgtatggttaatggtgctggtttagcaatggcaacaatggatataattaagttgtatggtgaagagccaacaaattttttagatgttggtggaggcgcctcaaaagagaaagttcagcagccttaa

SEQ ID NO: 310338 - DNA, 583 bp, Unknown
  Bacterial polypeptide expressing nucleotide sequence isolated from the Sargasso Sea
gatgaacattcatgaatatcaagccaaaaagattttaaaagacaatggcgctccagttttaaatggtttcgtaatctctaaaatctcagaaattgagaataagttaattcaactaagaggaaaaaaatttgttttaaaagctcaaattcacgctggaggtagaggaaaggctggaggcattaagttagtagaaggaatagataaagttaaagatgaagctaaaaaaatgtttggaaaaattttagttactcatcaaacaggactcaaaggcaaagaggttaaaaagctttacatagaagaagcctcaaatatatctgcagaattttatctttcttgcttagttgacagagcaagttcaaaaattgcttttataagtagcactaaaggtggggtagatattgaaaaagttgctaaagaaaatcctgaagaaattataacaactaagattgacccaacagaagaaattaaagacaaacaaattgaacaaattataaaacccttcaacctagatgaaaaacaaaaaatagagggaaaaaaattaatttattctttacttaaaattttaaaagataaggatgctagt

SEQ ID NO: 310339 - DNA, 883 bp, Unknown
  Bacterial polypeptide expressing nucleotide sequence isolated from the Sargasso Sea
aatgtcaattttagtcaataaagatacgaaacttatatgccaaggatttactggatctcaaggaacttttcattctgagcaggcaattaaatatggaactaatttagtaggaggtgttacaccaaaaaaaggtggtcaaactcatttagataaaccagtttttaatacagttatggaagcaaaaaaaaaagttaatgcaaatgcgacgatgatttatgttccagctagattcgctgcaaacgcaattattgaagcaatcgaggcttccattgaacttatagtttgtattacagagggaataccagtgttagatatgttaaaggttaaagagtatcttaaaaactctaaatcaagactaattggaccaaattgtccaggaattataactcctaatgaatgcaaaattggaataatgcctggtaatatacataaaaaaggatcagtaggtatagtttcgaggtcaggtactttgacatatgaggcagttgctcaaactacagagaatggattggggcaatcaacatgtgttgggataggtggagacccaataaatggaacaaattttatagattgtttggacctttttttaaaagatgatgaaacagaatcaattttaatgataggagaaattggaggaactgcagaggaagaagcagcagaatttgtcaaaaacagtaatattaaaaaaccaattgttggttttgtagcagggctcactgctcccaaaggtagacgaatgggtcatgcaggagcaattatatcaggaggcaagggtggagctactgataaaataaaaaaaatggagcaatgtggcatcgtagtagcaaaatctccagcagaactaggaaaaaccctagcggatatattggcatttgataaataa

SEQ ID NO: 310340 - DNA, 1181 bp, Unknown
  Bacterial polypeptide expressing nucleotide sequence isolated from the Sargasso Sea
ccctccagtggggggttacatgaatatccatgaacatcaggccaagggcctgctggccggcttcggcgtcgctgtgccgcgcggcacagcagccttcacggttgacgaagccgtcgctgctgccaccgatcatggtggtctgatgcatgtggtcaaggcgcagattcatgctggcggacgcggcaaggcgggcggcgtcaaggtcgtcaaatctgtcgaagaggtccgcgaggtggcgaccgagcttctgggcaagactctggtcacgcatcagaccggccctcagggccgagaggtccagcgcctctatatcgaggaaggctgcgacatcggcgacgagctgtatctgtcgttcctggtcgatcgcggcaccagccgggtgacaatcatcgcctccagcgaaggcggcatggatatcgaggaggtcgccgaaacgaaccccgagaaaatcctgtccctcggcatcgatccggccaccggcctgcagccccatcatatccgccgcatcgccggcgtgctcggcctgtcgaaggacacggcaaagcagcttccgggcttcctcggcagtttgtaccgcgctttcaacgagctggatgcgagccttctggagatcaacccgctcgtcgtgaccggaagcggtgatctcctggcgctcgatgcgaagatgagcttcgatgacaacgcgctctaccgtcatcccgatgtgctggcgcttcgcgaccttgccgaggaagacccggccgaagtgcgcgccagcgaattcgaactcaactacatcaagctcgacggcaatatcggctgcatggtgaacggcgccggcctcgccatggcgaccatggacatcatccagctgcagggcggctctccggcgaacttcctcgatgtcggtggcagcgccaccgcagagcgtgtcaccgaagccttcaagatcattctctccgacgagaatgtgaagggcatccttgtcaacatcttcggcggcatcatgcgctgtgacatcatcgccgagggcgttgtcagcgcggcccgcagccttgggctcgacaagccgctggtcgtgaggctggagggcaccaatgtcgaagagggcaagcggatcatggccgagagcggcctcgacatcattgcggcagacaatctggccgacgccgcggcgaaaatcgtcgccgcgacagcctgac

SEQ ID NO: 310341 - DNA, 402 bp, Unknown
  Bacterial polypeptide expressing nucleotide sequence isolated from the Sargasso Sea
aatgaatattcatgaatttcaagcaaaaaaaatattggctggttatggagtcaatattcccagaggtaaagaagcttatagtgtcgctgaagctgtttcagtagcaaaggatataggaggagaaaaatgggttgttaaagcccaaatccatgctggaggaagaggaaaggcaggaggggtcaagattgcagataacttaaaagaagttgaagaaataagtaactctcttttaggtatgcagttagttacccatcaaacaggtccagaaggaaaaaaagtaaataaaatttttattgaagaaggtgttaatattgtttctgagttttatctaggagtagttttagacagaagtaatgaaaaatatgtaatgatggcttctactgaaggaggcactgaaattga

SEQ ID NO: 310342 - DNA, 1048 bp, Unknown
  Bacterial polypeptide expressing nucleotide sequence isolated from the Sargasso Sea
tcccgcgggcgggcgcggcaaaggttcttttttagaaacagatgccggaactaaaggcggggtgcgaattaccaaatcagtggaagaagctgcctccgaagcaaagaaaatgcttggccgtaccttggttacccaccagaccggtccaaccggcaaacaagtaaatagagtgtatattgaggatggctctgacatcaccagagaattatatttagctattttggtagatcgtcaatcgagcagaatttcatttgtatgctctaccgagggtggaatggatattgaagcggttgccgcgacttctccagaaaaaatcttatcattctcaatagatccgaccacatcattccaaccatatcatggccgaaggatagctttcatgttgggactggaaggtaaacaattaaagcagtgtgtttcgttaatgagtaccctttataacctctttgttgataaagatatggagatgttagaaatcaatccattaattgtgtctggctcaggggatctaaaatgtttggatgcaaaaatgggctttgatggaaatgcaacttacagacatgcagatatagcggagctgcgcgatactacggaagaagatccaaaggaattagaagcttcaaaatatgatttgaattacattgctttggatggtgagattggctgcatggtcaacggcgctgggttagcgatggccaccatggacattattaagttatatggggccgagccagcaaatttcttggacgtgggtggcggtgcaacaaaagagaaagttactgaagcgttcaaaataataacatcagatccaaacgttaaaggtattttagtaaatatttttggggggatcatgagatgcgatgtaattgccgagggcgttgtagccgcggtcaaggaagtaggcttaaaggtgccactagttgtcagattagaaggaacaaatgtagaggcaggaaataaaatcataaactcatcaggcttagatgtaattgcagctaataatttaaaagacggcgccgagaaaatagttaaagcggtaaaagggtaa

SEQ ID NO: 310343 - DNA, 1159 bp, Unknown
  Bacterial polypeptide expressing nucleotide sequence isolated from the Sargasso Sea
atgaatattcacgaatatcaagcaaaagaattatttaaagaatttgaaatacctgtatcaacgggaacagtcgctttttctcccaatgaaattgatcaggcggtaaaagatgtttctggacctacatgggttgtaaaagcacaaattcatgcaggaggacgtggaaaaggtggtggagtaaaagttgtacaatctgctgatgaagcaatagaagaatgtaaaaaaatgtttggaatgaatctgattactccccaaacaggccctcaaggaaaaattgttcaaagagtttatattgaaaacggatcagacataaaaaaagaactttacttatcatgtctaattgatcgagctactagtaaaatagcttttatagcttcaaaacatggtggtatggatattgaggctgttgcagaagaaacacctgaagaaattactacagtttttattgagccatcgactggagtttcagaatctgacattttagctattcaaaaatgcttagaacttgatgaatccatgcatgatcaaactaggcacttaatagaaaatttgtataagttttttaaagaaaaagacgcaagtcttgttgagattaatccattaataattaccgataaagacaagctattgtgtctagatgctaaggtaaactttgatgacaacgctctttataggcatccggaaattgaagaacttagagacccaaatgaagaggatgagtatgagcaagaagctgcaaaatttgatttagcatatattaaattagatggaaatataggatgcatggtaaatggtgctgggttagctatggctagtcttgatattattaaattatatggtggggagcctgcaaactttttagacgttggtggtggcgcttcaaaagaaaaagtttcaaatgcctttaaaattatattatccgataaaggtgtaaaagggatattagtaaatatctttggaggtattatgagatgtgatgtgattgcagaaggtattattgctgcagcaaaagatcttagtatctcggttccactagttgtcagactcgagggaacaaacgtagataaaggaaaagaaattttagataattctggtattgatattatatcagcaactgatcttgatgatgcagcaaaaaaaattgtggaactcgtataat

SEQ ID NO: 310344 - DNA, 781 bp, Unknown
  Bacterial polypeptide expressing nucleotide sequence isolated from the Sargasso Sea
atgaatattcatgagcaccaagctaaagaaattttaaaaaaatacggtgcaattgttccagatggattttttgcactttcagtaaaagagcttattgaaaaagcaaaatctttaaagacagaaaaattagtattaaaagcacaaattcatgcaggaggaagaggaaaagctggcggtgtaaaaatattaaatacgatagaagaactaagcaatgctgctaaagaactactaggtaaaaaattagttactcatcaaacaggaccacaaggaagagtggttaaaagactttacgttgagtcatcttctaaaattgataaagaattttatctttcttgtttagttgatagggcaagttcaaaaattgcatttatttcaagtgatcaaggcggaatggatattgaagaagttgcaaaaaataatccagaaaaaatcataacaactaaagttaatttagaagatcaaatatcagataaagactgtgataaaattgttagaatatttaatctagataatagtgaaaaaaaacaagcagtaaatttaattaaatctatatataaaatgttcattgatacagatgcaaatcttgttgaaataaacccattgattttaacaaaagataaaaaaattatgtgcttagacgcaaaaatgaattttgatgacaatgcattatttagaaatccagagattttaaatctaagagatcttaatgaagaagatgaaactgagatagaagcaagcaaacatgatttatcctatataaaattagatggcagcataggat

SEQ ID NO: 310345 - DNA, 799 bp, Unknown
  Bacterial polypeptide expressing nucleotide sequence isolated from the Sargasso Sea
gatgcagcgagagaagttaggcggagaagtctgggtggtcaaggctcagatccatgccggtggacgcggtaagggcggcggagtcaaagtctgccagggtttggaggaagtacaggaaaacgcagaaaaaatcctaggcatgcaactggtgaccaaacagaccggacccgccgggcaaaaagtgctcaaggttctgatcgaagaaggcatggaaatcatcaaggaactttattgctcggtgcttgttgaccgaaccaagcaatctgttgtcatgcttgcatcgaccgagggtggaatggacattgaggaagtggcagccaatacaccggaaaaaatcctcaaaatttttgctgatccatctctaggtctgcttccttatcaagcatcagaactggcttacggacttggaatcgatcaaatcaatcccaaacttctccggcctgctgcaaaacttttcagttcgctttatcaaacttttgtccatgaggattgcagcctggtcgagatcaatcccctggttcttacaggtgacgaccagatagtggccctcgatgctaaactcagctttgatgataacgctttattccgtcaccgtgaaaatgttgatatgagagaccttgctgaagaggatcctctcgaaacggaagccggagagttcgaactgaactacatcaagctcgacggttcgatcggctgcatggtcaacggtgccggtttggcaatgggtacaatggacatcatcaaaacctatggaggagaacccgcgaatttccttgatgtgggtggtaccgcgaccgaa

SEQ ID NO: 310346 - DNA, 847 bp, Unknown
  Bacterial polypeptide expressing nucleotide sequence isolated from the Sargasso Sea
atgagtgtacttatagataaaaatacaaaagctatctttcagggttttacagggtctcaagcaaccatgcatgctgaacaatgtattaattacggaacaaatattgtgggtggagtaacacctggaaaaggtggtatagaacatctcaataggcctgttttcaattcggtgaaagatgcctgctctgaaacaaatgccaacgtcagcgttatatttgtgccagcaagattcaccaaagcagcaataattgaggctgcagaatcaggaataaagttaattatatgtattactgagggtgtcccggtgatcgatatgatcgaggtaattaatgagctaaaaaattatcccgaagtaagattagttggccccaattgcccaggagtaattactcctggagaggcaaaattaggaataatgccagctgacattcacatgaaaggttctgtagggatagtttctcggtctggaactctaacatatgaagcagttaaacagactacagatgctggtataggtcaaagcagctgcattggtataggtggagaccctgtgaatggaacatcatttattgactgtttagaaatgtttgagaaagatcagcaaacagaatcaatagttatggttggtgagataggcggcactgcagaggaagaagctgcagaatatatcaaaacaaatatttctaagccagttgtctcttatattgctggagtaacagcgcctaaaggaaaaagaatggggcatgctggagcaattatctctggaggcaaaggaacggcacaagataaatttaaagctttagaattagcaggagtctcagttgtaactgatttaaatttgattggct

SEQ ID NO: 310347 - DNA, 841 bp, Unknown
  Bacterial polypeptide expressing nucleotide sequence isolated from the Sargasso Sea
ttgtatctcagtttagttatagatagaggggcaaaatgtgtttcaattattctctctgaagcaggcggtatgaatatcgaagaagttgccgaaaagacaccagaaaagattctaaaagctgaattaaatagcaattttaaaatctcatctgatcagatatccctctttgcaagaaatcttgcatttaataaaacacaggaaagcgaattcaaacatattgtagaaaattgttgcaaaatttttaaagacaaagatctaagtcttttagaaattaaccccctcgtcattactagagcgggcgctctgcattgtttggatgctaagttaaatatagacgagaatgctttattcaggcaggagcaaattgcagaaaaaagagatgcatctcaagaggattctagagaatttgaagcaaaacagaatgatttaagttatgttgctctagatggaaacataggttgcatggttaatggtgctggccttgcaatgggtacaatggacacaattaaattatatgatggtgagccagcaaattttcttgacgtgggcggaacagcaaccaaagaaagagtatcttctgcttttaaactaatactttcagataaaaatgttaaggggattttagtcaatatttttggaggaattgtgcgatgtgatcttatcgctgaaggaataattgaagctattaaagaaattaatgttgaaattccaatagttgttagattgcaaggtaatcaatctaacctaggaaagaggcttcttaatgaatcaggtttaaatgtaattggagaagattcattacaactagcagcaaaaaaaatagtggatcttgttaaatgag

SEQ ID NO: 310348 - DNA, 1165 bp, Unknown
  Bacterial polypeptide expressing nucleotide sequence isolated from the Sargasso Sea
tatgaaaatacatgagtatcaaggtaaaacaattttaaatgattatcaaatatgtgttcctaagggcatccctgcttattccattgaagaggcattaaatgcatatgacacacttgattcagattttgttgctataaaagcccaaattcatgctggtggacgaggaaaaggtggaggagtaaaaatagctaaaaatagaattgatgctgaaaatcacatatcagatattctaggaatgaacttagtaacccatcaaacgggtccaaacggtaaaaaagtagaacgaatttacttagagtcaggagttgatattgaaagtgagtactatgctgcaattacattagacagaaataccgagatggatgtattcatggtttcaacagagggtggtgtcgagattgaaaaagtagcatctgaaacaccagataaaattataaaaatatggattgatcctcttgttggcatcaaaacttttcaactaagaaaattagcatttggactgaaactaaaaggagcagcattcaaagaagcagttgatacttttagaaaaatgtataattgttataaaaatactgatgcctccctccttgaaataaatcccttagtcaaaacgaaaaatgagaatattattgcactagattctaaatttaattttgataataatgcactttttagacaaaaattaataatggaaatgagagacctctctgaagaagataaaatggaagttgaagcaagtaattacaatttaaactacataaaattagatggtaatgttggctgtatggtcaatggtgcaggcttagcaatggctactatggacatcataaaacttgctggtggagaacctgcaaatttcttggatgtgggaggaacagcaagctcagaaacagtaaaaaatggattcagaattattttatctgacaaaaatgtaaaatcaattttaatcaatatttttggtggaattgtcagatgcgaccgcgtagctaaaggcgttgtagaggtagttaaagagttagggctaaaagttccgatcgttgtccgcctacaaggaacaaatgctgaagaggctaaaattatcttagagaaaagtaatgtttcagttatcccagctgatggaatgaaggatgcagcagaaaaagctgtgagcaaagcaaaaaattaa

SEQ ID NO: 310349 - DNA, 988 bp, Unknown
  Bacterial polypeptide expressing nucleotide sequence isolated from the Sargasso Sea
atgaacttacatgagtatcaaggcaaagcattatttgcagaatacaacttacctgtatcaaaaggaaaagtggtatttaaagctgaggatataattgatgcatgtaatgaaattggcggttcaaagtgggttgtaaaagctcaagtccatgctggaggtcgaggtaaatctggtggtgttgagttaattagtaatcctgaggacggtgttaaatttgctcaaaaatggcttggaaaaaatttagtaacttaccaaaccgataaaaaaggccaacctgtcaattgtattctagtagaggaatgtaccaatatagcaaaagagctataccttagtgccattattgatagagaatcacaacagattgttttcattggatctagcgagggcggagtaaatattgaagatgttgctaaaaatatgcctgaaaaaattatctatcaaggtttcgtttataaagatgattcactgaatgaaaatgctgaaaatatcgcaaaagttcttaaattgaatgatcaacaaacattacaatttataccaatcatagataacctattaagattatttgttgaaaaggacttgagcttgcttgagattaatccgcttgtgattacagaaaatggagatttacattgtttggatgcaaagataaatattgattcaaatgcactttatagacaaccagaattattagatatgcgtgatgaaacacaagaagatcctaaagaagcagaagctgctaaaaatgatttaagttatgtttctttggatggaaatattgggtgtatggttaatggagcaggcctagcaatggggactatggatactataaaattttttggcggaaatcctgcaaatttcttagatgttggtggtactgcaactcaagaaagagttgctaaagcttttaagataattcttgatgatccagaagtaaaagtagttctggtaaatatttttggcggtattgtgagatgtgatttaattgcag

SEQ ID NO: 310350 - DNA, 1159 bp, Unknown
  Bacterial polypeptide expressing nucleotide sequence isolated from the Sargasso Sea
atgaatatacacgaacatcaagcaaaggaattatttgacggttatgacatacctgtgtccacaggaagcgttgcatataaaaaaagtcagataaatgaagcagtaggaaaagttaaaggcccaatttgggttgttaaagcacaaattcatgcaggtggcagaggcaaaggtgggggcgttaaagtagtttcttcgaaagaagaagctgtaaatgaggctgaaaaaatgtttggtatgaatttaataacgcctcaaacaggcccagcaggaaaagaagtaaaacgtatttatattgaaaatgggtcggatattaaaaaagagttatatctttcttgtttattagacagagcaactagcaaagttgcctttattgtatctaagatgggaggcatggacattgaagcagttgcaaaagatactccagaccatataacaactgttcaaatagaaccttcaataggtgttacagaaaaagatgtaaatacaattagtacagcttttgaactggaaaaagatcttgagggtcaactttctgatcttataaaaaatatgtataaattttttttagaaaaggatgctagtcttgttgaagttaatcctttgattataaccgagactgacaaactattatgtctcgatgctaaagttaattttgacgataatgctttgtatcgccatcctgaaattgaggaattaagggatgaaaatgaagaggatgaatatgaaagagaggcatcaaaatttgatctcgcatatataaagttggatgggaatataggctgtatggttaatggtgcaggcttggcaatggctagcttagatattattaaaatgtatggaggtgagcccgcaaactttcttgatgttggtggcggagcttctaaagaaaaggtttcaagtgcattcaaaattattctttctgataaaggtgtaaaaggcatcttagttaacatctttggtggaatcatgagatgtgacattattgctgaaggaattgttgccgcagcaaaggaattagaaatttctgtaccacttgtagttagacttgaaggtacaaatgttgatgaaggtaaaaagattcttgataattcaagtattgaaattatttctgctaatgatttagatgatgcggcaaaaaaaataaataagctagtctaat

SEQ ID NO: 310351 - DNA, 1162 bp, Unknown
  Bacterial polypeptide expressing nucleotide sequence isolated from the Sargasso Sea
atgaatattcacgagcatcaagctaaacaaatattaaaaaaatatggtgcagtagtcccagaaggagtatttgcactaaatgttgatgatttacttgataaggtaaagtcactcaaaactgaaaaatatgtcctaaaagcacaaatacatgctggtggaagaggaaaagctggaggtgtaaaaattttaaatacaattgaggagctggaattagcagctaaagagttgtttggaaaaatacttataactcatcaaactggcccagagggaagagaagttaaaagattgtacgttgaagagtcctcaaatatagaaaaagaattttatttatcatgccttgtagatagagctagttcaaaaattgcttttatatcaagtgatcaaggaggtatggatattgaagaggtagcgagcaaaacgccagaaaaaattataaccacaaaagttgctattaatgatgaaatttcaaacaatgattgtgaaaaaattataaaaatttttaatttaaataatgatgcaaaaaaccaagcaataactttaattaaatcaatttataaaatgtttattagcacagatgcaaatatggttgaggttaatcctttgattttaaccaaagaagaaaaaatagtttgtttagatgcaaaagtaaattttgactctaatgccttgtttagacatcctgaaattgttgagcttcgagatcttaacgaggaagactcaactgaaattgaagcaagcaaacatgatcttgcttatataaaattagatggaagcattggttgcatggttaatggagcaggcttagcaatggccacaatggatataataaaattgtatggaaaagaaccagcaaattttttagatgtaggaggtggagcatcaaaagaaaaagtttctgcagctttaaaaattattctttcggataagaatgtaaaaggaattttgattaatatttttgggggaattatgaggtgtgatgtgcttgcacaaggagtggtagatgcagctaaggagataaacattagcgttcccttagtggttagacttgcaggtacaaactttaaacaaggtaaagaaatactcgataattctggtttaaagttaatatcagcagaaaatttagatgatgcagctaaaaaaattgttgaggctataaaataaa

SEQ ID NO: 310352 - DNA, 1065 bp, Unknown
  Bacterial polypeptide expressing nucleotide sequence isolated from the Sargasso Sea
tcaaaaaataaggtcattacctctgcagatgatgttgtaaatgcatgtggagatataggtggcaacaagtgggttgttaaggcacaagtacatgcaggcggcagaggcaaagctggaggtgtcaaacttgtgagctcacccgaagaaggagtagaatttgccaatcattggcttggtaaaagactgattacatatcaaacagattccaatggccagcttgtaaattcaattttagttgaagagtgtaccgaaattgcaaaagagctttatttaagtgctgttgttgacagaggatcgcaaaggatagtctttattggctctagtgagggcggagtaaatattgaagaggtggctgaaaatactcccgaaaaaattatctatgagcctattgatcctctaacaggacctatgggatttcaatcaagaaaaatatctaaagttttaggtctagagggtgagcaatcaaagcaatttgcaaaaatgcttccgcagttaacagatctatttgttacccatgatcttagtttgcttgagattaatccattggttattactcaggggggaaaacttcattgcttagatgcaaaaatcaatattgattcaaatgcaatttatcgacagccggaaatccaagctatgcatgatccttctcaagaagatcctcgtgaatcagaagcagcattgaatgatttgagttacgtttctttagacggaaatattggctgcatggttaatggtgcaggtttggccatgggaacaatggatacaattaaatatttcggtggatctccagcaaattttctagatgttggtggcactgcaacacaagaaagagtctcgaaggcctttaaattaattttagcagatcaagaagtgaaggtagttctagtaaatattttcggtgggattgttagatgcgaccttattgcagagggaatcctagctgcaattgaagaggtaggcgtttccattccagtagttgtaagattggagggaaataatgcagatattggaagtaacattcttgctgaatcttcagcagaaattgttagtttaaacagtctt

SEQ ID NO: 310353 - DNA, 871 bp, Unknown
  Bacterial polypeptide expressing nucleotide sequence isolated from the Sargasso Sea
atgagtgtacttattgataataatactaaggcaatctttcagggttttactggctcacaggcaactatgcatgcagaacaatgtatagattacggaacaaatataattggtggtgtaactcctggaaaaggtggtcaagaacatctaaacaaaccagtttttgattcggtaaaagatgcatgtgcttttgacgaaattgatacctcagtaatttttgttccagcaaagtttacaaaatctgcaatacttgaagcagctgaaaatggtataaatttaataatttgtatcactgaaggagtcccagtcttagacatgatagaagttacaaatattttaaaaagttttccaggaacaagacttgttggaccaaattgtccaggagttatttctccaggaaagtcaaaacttggaataatgcctgcttccattcataaagaaggtagtgttggaatagtttcaagatctggaacacttacttatgaagctgtaaaacaaacttcagatgttggtttagggcaaagtacatgcattggaattggtggagatccggttaatggcacttcatttatagactgtctaaaaatgtttgagaatgataatcagactgaatccatagtcatggttggtgaaatcggcggcacagcagaagaggaagcagctgagtacataaaatcaaatatttcaaaaccagttatctcttacattgctggagtaactgctccaaaaggaaaaagaatgggccatgcaggagcaattatttctggtggaaaaggaactgcacaagataaatttaaagcattagaaagtgcaggagtaagagtagttacagacttaaacctcattggatctaagcttaaagagctgctttaat

SEQ ID NO: 310354 - DNA, 618 bp, Unknown
  Bacterial polypeptide expressing nucleotide sequence isolated from the Sargasso Sea
aatcaatatataaaatgtttgtgagcacagatgcaaacatggttgaagtaaatccattaattttgactaaagaaaaaaaaattgtttgtttagatgcaaaagtaaatttcgactctaatgctttatttagacatccagaaattgtaaaattaagagatttaaatgaggaagatcctacagagatagaagctagcaaacataatcttgcttatattaaattaaatggaagtattggatgtatggtaaatggagcaggattagctatggcaacaatggatataattaaattgtatggtaaagaaccagcaaactttttagatgttggaggtggagcatctaaagaaaaagtatctgctgcactaaagattattctctcagacaaaaatgttaaaggaattttaataaatatttttggaggaattatgagatgcgatgttcttgctcaaggggtagttgatgccgctaaagaaattaatatcagcgtacctttagttgttcgattagctggtacaaattttaaagaaggaaaagaaattcttgataactctggattaaaattaatttcagctgaaaatctagatgatgctgctaaaaaaattgtagaagtaataaaataat

SEQ ID NO: 310355 - DNA, 1171 bp, Unknown
  Bacterial polypeptide expressing nucleotide sequence isolated from the Sargasso Sea
tatggatatccacgaataccaagcaaaaaaaatattatcaaactttggagttactattccaagaggtggaattgtctatagtccagaagatgcagaaaacaaagcaagagaaattggtggatcaaagtgggttgtaaaggcacaagttcattcaggtgctagaggaaaagcaggtggaataatagtttgcaattctactctagaggttgcacaagcaacggataagttattaggaaaaaaattagtaactaatcaaactgggcctgaaggaaaaataataaatagaatttatattgaagaagcaactgatattaagaaagaattatatttggggctggtatttgatagaagctcagaatgtataatggtagttgcctcaacagaaggtggaatgagtgttgaggaaatctcacaaaaaaaaccagaaacaataattagatcaaaaattgaagcagctgtgggtatgcaagaatttcaagctagagaaattgcttttggtttaggaatagattctaaattaatttcaagagcagctgaggcaataagaggatgttataaagcattcagtgaacttgatgcaacaatggttgaagtaaatccattggtaatttcagagcaagaacaggtgctagctttagattgtaaaatgagttttgataacaatgcattatttagacgaaatcaagtttctgaactcagagataaaactcaagaaaatccaagtgaagtatatgcgtctgatagaggtttaaattatgtcagccttgacggaaatataggaaatataattaatggtgcaggtttagccatggcatctatggatatgattaagctagcaggtggagaaccggcaaattttttagatgtaggtggaggagcaacaccagaaaaaattgtaaaagcttttcgattaataatgatggataaaaaagttaaagtaattttagtaaacatatttgctggaattaatagatgtgattgggtagccgagggaatagtgcaagctttacaaaaaattgaagttaatatgccattggtaataagacttgccggaacaaatgtagaaaaaggaaataaaatcttaaaagaaagtaatttaaattatattgaggcatcaactttagaggatgcagcaaacaaagcagttaaagcgttaaaggagctaggttaa

SEQ ID NO: 310356 - DNA, 1162 bp, Unknown
  Bacterial polypeptide expressing nucleotide sequence isolated from the Sargasso Sea
atgaatattcacgagcatcaagcaaaacagattttaaaaaaatatggtgctgcagtgccaaatggaatttttggattctcatccgaggaaattgtcgaaaaagctaaaaaactaaatacagaaaaatatgttctgaaagctcaaatccatgccggcggaagaggaaaagctggaggtgttaaaatactagataatattcaagatttaagcttagcttcaaaggaaatgttggggaaagttttgattacacatcaaaccggacctactgggaaggaagtaaaaaggttatatgttgaagaatcttcaaatataaaaaaagagttttatctttcttgtttagttgaccgtgcaagctcgaagatagcattcatatcaagtgatcaagggggaatggatattgaagaagttgcaaaatcaaatccagaaaaaattataactacaaaagtagatttaattgatgaaataaaagaggaagattgtaaaaaaataattaaaatatttaatttagacgaaaaaacatctctacaaggaattaaattaataaaatctatatataaaatgtttatttccacagatgcaaatttagttgagattaatccattaattttaacagaagaaaatgatttactttgcctagatgctaaaatgaattttgatgataattcaatatttagacatccagaaattttagaattaagagatttaaacgaagaagatccagcagagatagaagcaagtaaatatgatttggcatacataaaattagatggaagtattggatgcatggtgaacggagctggtttagctatggcaacaatggatattattaagttatacggagaagagcctgcaaattttttagatgttggtggtggagcatcaaaagaaaaagtttctgctgcatttaaaattattctttcagataaaaatgttaaaggaatattaattaatatatttggtggtatcatgagatgtgatgttcttgcccaaggagttgttgatgctgcaaaagaaattaaaatcgatgtaccgttagttgtaagattagctggaactaattttttagaaggaaaaaaaattttggataattcaggtttgaaaataatttcagcttcagatttatccgacgcagcagaaaaaattgttaaggaaattaaataat

SEQ ID NO: 310357 - DNA, 850 bp, Unknown
  Bacterial polypeptide expressing nucleotide sequence isolated from the Sargasso Sea
ttttaaagaatattatttatcttgtttggttgatagggctacttcaaaaattgcatttataagttctactcaaggaggtgtagatattgaaaatgtagcagctaaaaatcctgagaaaataataacaacaagaacaaacttaaataacggtatagacgaagcaacaattgaaaaagtattaaaaccttttaatcttaattctgaacaaaaaaaagatggaaaaaaattaattaatgctctttataaagtactaatagaaaaggatgctagtctgattgagataaatccattaataattacaaaaaatcaaaagattttatgcctcgatgcaaaaatgaactttgatgataatgctctatatcgtcagcctgaaattttaaaacttagagattttaatgaggaggaaccagctgaaattgaagctagtaaatatgacttagcatatataaaattgagtgggtccattggatgtatggtaaatggcgcaggtttagcaatggcaactatggatattattaaattgtatggccaagaaccagcaaattttttagatgtcggaggcggagcctctaaagagaaagtttctgcagcatttaaattaattctctctgataaaaatgttaaaggtattttaattaacattttcgggggcattatgagatgtgatgttcttgctcaaggagtggttgatgctgctaaagagacaaaaattaatattcctcttgtagtaaggttagctggcacaaattttaaagaaggtaaattaatacttgataaatcaggtttagacatactttcagcagaagatctaaatgatgcagcaaaaaaaattgttaaggctataaaataa

SEQ ID NO: 310358 - DNA, 877 bp, Unknown
  Bacterial polypeptide expressing nucleotide sequence isolated from the Sargasso Sea
tatgtcagttttaataaataaaaatactaaagttatatgccaaggttttactggatctcatggaacgtttcattcagaacaagcaataaaatatggaaccaatttagttggtggtgtaactccaaaaaagggaggacaaatacaccttcaaagaccagtatttgatactgttgaagaagcaaaaaaaaatactggtgcaaatacttcaatgatttatgtacctgcaaaatttgcaggtgcagcaataattgaggctatagaagcatcaatggaattaattgtatgcattactgaaggaataccagttttagatatgcttaaggttaaacaaaaattagaaaaatctaagtcaagattaattggtccaaattgcccaggcattataacacctgatgaatgcaaaataggtattatgccaggaaatattcataaaaaaggttctgtgggtattgtatcaagatctggaactttaacatatgaggcagttgctcaaacaagtgaaaatggaatgggacagtcaacatgtattggtatcggaggtgatcctattaatggaactaacttcattgattgcttagatctatttcttaaagatgaagagacaaagtctattttaatgataggcgaaataggtggaactgcggaagaagaagcagctgattttataaaagagcataaaataaagaaaccaattgtaggttttgtagctggattagcagctcccccaggaagaagaatggggcatgccggtgcaataatttcaggtggcaaaggtggtgctgaacaaaaaatcaaaaaaatggaagaatgcggtattactgtcgcaaaatcaccctcagaaatcggaaaaactttgttgaataaattgtccaattga

SEQ ID NO: 310359 - DNA, 604 bp, Unknown
  Bacterial polypeptide expressing nucleotide sequence isolated from the Sargasso Sea
gatgtttatcgagctagatgcaagtctagttgagataaatccacttattttaactaaagataatcaaattgtttgcttagatgcaaaaatgaagtttgatgataatgctattttcaaacatccagaaataaaagaattaagagacttaaatgaagaagaagaaaccgaaattgaagcaagcaaatatgatttagcatatataaaattagatggaaatattggatgcatggtaaacggagcaggcctagccatggcaacaatggatattattaagttatatggtgaagaaccagctaactttttagatgtcggtggaggtgcttccaaagaaaaagtttcagcggcttttaaaattatcttatctgataaaaatgtaaaaggaatattgataaacatttttggaggaattatgagatgtgatgttcttgcaaaaggattagtagaagcagctagagaaataaaaataaatgtaccattagttgtaagattagctggaactaattttaaagaaggaaaagagatattagaaaattctggattagaaattatttctgcttctgaccttggtgatgcagcaaaaaaaatagtagaggcaataaaataa

SEQ ID NO: 310360 - DNA, 1156 bp, Unknown
  Bacterial polypeptide expressing nucleotide sequence isolated from the Sargasso Sea
ccagtcaaagaaactattttctgatcatggaataccagtactagaaggaaatatagcaagctctccagatgaagctaaatcctcagcagagaagcttaagggagacatttgggtagtaaaagcacaagttcatgctggtggacgcggtaaagcgggtggagtaaagattgctagaagcattgcagaagttcatgaaatggcctctgagatgcttggtactaatctcataacaaagcaaacagacgaaaagggattgcctgtgaatcaggtctatattgagtctggtacatcgattcagagtgaatattatttgagcttgttggttgatcgaacaaaagagtcatggacatacattgcatcaatagaaggcggagttgatattgaggccgttgctgaagagtctccagaaaagatcatcaattacaccattgacccattgaaggggctagaattgtcctctttgaaacaaatggcagaccggatgggtttcaccgatgatgttcactctcaatttgtttcaatcacaaaaaagatgttcgaaatcgccaaagacaaggatgccaacctcattgaggtcaatccccttattttggatgatcacaatcagctgattgccttggatgcaaaaatatcaattgaaagtaacgcattattcagacaagaggagctcctatctttcaaagataactctcaagaaaatgaactggaagtaaaggcttcagagcatgatctgagttatgtatctttggatggaaatattgcatgcatggttaacggcgctggacttgcaatggcaacgatggatctgatcaagctgcatggtggagagccggcaaattttcttgatgttggtggaggcgctacaaccgatagagtaaagatggcaattgatatcattatggaaaacccaaatgtcgatgcgattttaatcaatattttcggcggtattgttcgttgtgatgtcatcgcacaaggcattacagaagcagtgaagtcgacagcgattgatattcccatagttgttcgcttgcagggaaccaatgtggagctaggaacaaggatcctcgaagagtctgggatgaaaattatttcagcgagcgatctcacagatgccgcaataaaggttgtgtcttcagttaaggaggctgtccaatga

SEQ ID NO: 310361 - DNA, 1174 bp, Unknown
  Bacterial polypeptide expressing nucleotide sequence isolated from the Sargasso Sea
tatgaatcttcatgaatatcaagcaaaacaactttttcgcgaatatgggatagccgtatcagatggcattgctgcctcttcagctgaacaggctgaaaaagctgcactttctttaggtgtatctaaatgggttgttaaggctcaagtccatgctggaggaagaggaaaagctggaggcgttgaggtggttcataaaattgaaaaagttagagaatttgctgataaatggctaggaactaacttagttacatttcaaaccgacgcagatgggcagcccgtaaatcagattttagttgaaacttgtaccgaaatagaaaatgaactgtatctaggggcagtaattgatagagcttcacaaagacttgttgtaatggcttctactgaaggtggagtaaatattgaagaagtagctgaacaaacgcctgaaaagatatttaaggtggaaatagatcctattgaaggcacgaatgatatggatgctgatgggctctcttcgcttttgggcctcaatgactctcagagctcacaatttagaagtatctacaaaggattggtaaaactttttgtagaaaaagatctagccttattggaagttaaccctttggtaattactggttccggtgatttgctttgcttagatgccaaattaaatatagattcaaatgctctatacagacaagaagctcttactgaaatgcgagatttttctcaagaagatgaaagagaatcaaaagccgctgaatgggatctaagttacgttgctctcgatggcaatattggatgtatggtaaatggcgctggtttggcaatgggtactatggatattattaagctacatggaggagagcctgctaattttcttgatgtaggtggcacagctgacgcgaaaagggtagctgaagcctttaaaattattttatctgataaaaatgttaacacggtcttaattaacatctttggaggcattgtgcgttgtgacgtaatagccgatggtattgttgaagcacttactgtgatgggtgtatcagttcctgtagtcgtgagactagaaggtaataatgctcaagtaggccttagaaccttagatgaatgtgatttaaatattattccagcttcaaatttacaagaagctgctgaactggcagttaaagcatcaagaggagaaataagttga

SEQ ID NO: 310362 - DNA, 877 bp, Unknown
  Bacterial polypeptide expressing nucleotide sequence isolated from the Sargasso Sea
atgtccattcttatagatgagaactccagagtagttgtacagggcctcacaggaagggagggccaatttcatgcacttaggaatagagcttatggaacaaatgtagtagcaggaactaggcctggaaaaggtggagagaatgtagaaggcataccaatttttgatacgattaatgatgctgtttcagaaacaaaagcagatgtagcattaacttttgtaccaccttcttttgcaaaagaagcagtcttagaagctgcttttggaggttgtaaattaattgtatgcattaccgaaggtattccagcaaaagatgaggcggaaatgtatgatattttaaaaaaagaaacagattccttattgcttggaccaaactgccctggtttaatatctcctggaaaagcaaatgtaggaataatgccacatgaaattacacttcctggcaatattggagtggtatccagatcaggaactttaacttatcaagctgttcatgaacttaccaaacttaatattggtcagtcaacctgtatcggtataggtggagatcctgttccgggaatgtcctttatagatgtgattgaaaaatttgaaaaagatgatgatacaaatggaattgtaatgattggggaaattgggggaactgctgaagaagaagctgcagaatatataaagaaaaatatttcaaaacctgtagtatcttacatagctggagtaactgctccacccggtaagaaaatgggtcatgctggagcaatcgtatcaggaaataaaggaactgcaaaagtaaaaattcaagagttaacatctgctggagcaacagtagttaaaacgccaactgaaattggagaagcaatgaaagaagcaataagtggttgaa

SEQ ID NO: 310363 - DNA, 1168 bp, Unknown
  Bacterial polypeptide expressing nucleotide sequence isolated from the Sargasso Sea
atgaatttacacgaatatcaatcacgaaatctattaaaagattactctatagcatttccaatgggagatatagggcagtctccagaagaaatttataatatcgccaaaaaatatgatggaagagtcgttgtaaaagcacaaattcattcaggtggaagggggaaggctggtggagtcaagctatgtaattcccctgaagaagctaaagagtttgcaaaaaatatcttaggtaaaaatattattaccaatcagaccgattcagatggagttatagttgaaaaattactagttacagaacttacggatattgatagagaattctacttgtctattacaattgacccagattttgaaggacctgtacttataatatcgcctgaaggtggaatggatattgaaaaggtagcagaagatacacctgaaaaaatcataagattaccatttgaccccgtaataggagcaaagccttatgaattaaggaaaattataagaaccttagatctacctaaagaagcaaataatgaatttataaaaatgataaataatttatatgttgcttttttagaaacagacagcaccctaattgaaataaaccctcttgttatagacaaaaaaaataatttgatacccctagattgcaaaataaacattgatgatgacagtttttttaggcaaaaatcaatttttaaacttagagataaaaatcaagaaaaccctatagaaactagagcaaaagattttgatcttgcttatgtaaagttagatcaaggaaatgttggatgtttagtaaatggagctggattagctatggcaacaatggatgtaacaacaaaatcaggttgcttcccagcaaattttttagatgttggtggttcaactgacaaagaaaaaattaaagaggctttcagaatacttgtctcagacaaaaatgttgaatttttattaattaatttatttgctggtatagctagagcagacttaatagctgaaggtgtagttgaagctgcaaaagaaacttcttttgaccttccaattattgtctcaatgagaggaactaattcagaaagaggtttttccatactaaaaaattcagatttagatatacatattgccgaaaatttaggtaatgcagccgaagtactaagtgttttaaataaaaggaaataaa

SEQ ID NO: 310364 - DNA, 811 bp, Unknown
  Bacterial polypeptide expressing nucleotide sequence isolated from the Sargasso Sea
tttcattcagagcaggctataaaatatggaactaatcttgttggtggagttacgccaaagaaaggtggacaacaacatttagacagaccagtttttaatagcgttttagaggcaaaaaatgaagtaggagcagatgcaactatgatttatgtacctgctaaatttgcagcagcagcaatcattgaagctattggtgcatcagttgaacttattgtttgtataacagagggaattccaattcaggatatgcttaaggtcagacaaaaattaagtggatctagtagcagattaattggacctaattgtccaggaataatcacaccagatgaatgtaaaattgggattatgccgggaagtattcacaaaagaggaagtgttggaattgtatcaaggtcaggaacattgacatatgaagcagtagcccaaacgactgaaaatggacttggtcaatcaacttgtattggtattggtggtgatcctattaatggaacaaattttatagattgtttagatttatttttaaatgattctgaaacagagtctattttaatgataggtgaaattggaggaacagccgaagaagaagcggctgaatttataaaaaatcataagataaaaaaaccaattgttggatttatagctggaattactgctcctccaggaaggagaatggggcatgctggtgccattatatcaggtggcaagggtggagcggaagataaaataaaaaaaatggaagaatgtggtattacagttgccaaatcaccatcaattattggaaaaactttatttgataaactgtctaattgaa

SEQ ID NO: 310365 - DNA, 1168 bp, Unknown
  Bacterial polypeptide expressing nucleotide sequence isolated from the Sargasso Sea
ttgaatattcatgaacaccaggctaaagagttattaaaacaatataatatacctacaccctctggatacgttgcattcacaactgaagaagctataaaagtatccaaaaaattaccagggccaatttttgttgtcaaagctcaaattcacgcaggcggaagagggaaagctggtggagtaaaggttgtaaaaaatttagatgaagtaaaaaattcagccgagacaatattaggaaaaaacttaatcacccatcaaacaggtcctgaaggaaaattagttcaaaggctctacattgaggatggatgtgatataagggctgaatattacttttctatggttatagaccgagttactagtagagtttcagtgatagcatctactgaaggtggtatggacattgaacaagtagcaaaagaaactcctgagaaaattttatcttttaatatagacccaacaattggctttcaaccttttcattcaagattaatagcaaatgaacttaaattagaaggttctagttttaagcaagcgagtaaattttttaatcaattatataaactctttactgaaaaagatgctagtttattagagattaacccacttgtattaacttctgaaaatagtctaatcgctttagatgcaaagatgtctttcgacaataatgccttattcaaacaccctgatataatgtcattaagagacgaaactgaagaagatcctgctgagatattggcaagtaaatttgatttagcttatataaaacttgatggaacaataggatgtttagtaaacggtgctggtcttgccatggctacaatggatatcattaagcttaaaggagcttctccagcaaactttttagacgttggggggagtgctactgaggaaaaagttactgaagcttttaaaattattttatctgatccagctgtagaaggtattttagtaaatatttttggaggaattatgcgctgtgacattattgctagtggagtggttgctgctgctaaaacactctcattatcaaaaccattggtagtaagactagctggtacaaatgtggaaaaaggaaaacagattcttagagattctggtttaaaaataatacctgcggatgacttagatgatgctgcaattaaaattgtaagtgctgttaaaggagattaac

SEQ ID NO: 310366 - DNA, 1165 bp, Unknown
  Bacterial polypeptide expressing nucleotide sequence isolated from the Sargasso Sea
atggacattcacgaatatcaagcaaaaaaaatcttatcaagttttggagtaacgattccaagaggaggtattgtttacagtcctgagaatgcagaaaacaaagctagagaaatcggcggatctaaatgggttgctaaagctcaaatacactctggtgcaagaggaaaagcaggtggtataattgtatgtaactcaccattagaagtagcacaagcaacagataaattacttggaaaaaaactagttactaatcaaacaggacctgagggaaaaatagtaaatagaatttatatagaagaagcaactgatattgaaaaagaattatacttaggtttagtttttgatagaagttcagaaagtatcatgattgttgcttcaacagaaggaggtatgagtgtcgaggaaatttcaaaggaaaaaccagaaactataataagatctaaaatagaagttgccgtcggtatacaaaattttcaagctagagagctcgcgtttggtcttggcattgagccagctttaattccacgtgtgtcggatacaatagtcggatgctacaaagcttttagtgaactcgatgcaactatggttgaagtaaacccgttagtaatttcaaaacaaaaacaaatactagcattggactgtaaaatgagttttgataacaacgcaatgttcaggcgtagccaggtttctgaattaagagataaaactcaagaggaaacaaaagaagtttacgcatctgacagaggcttaaactatgtaagtttggacgggaatatcggaaacatcatcaatggtgcgggtctcgcaatggcttcgatggacatgattaagctagctggcgggtctccagctaattttttagatgttggcggaggagcaactcctgaaaaaattgtaaaggcatttagattaataacaatggacgagaaagtaagagtaattttagtaaatatttttgcaggtattaataggtgcgattgggtggcagaaggaattgttcaggctttacaaaaaattgaggtaaaggttcccttagtaataagattagctggaacaaatgtagaaaagggaaatgaaatactaaaaaaaagtaaaattaaatatatagaggcgaatactttagaagatgctgcaaataaagcagttaaagctttagggaaataat

SEQ ID NO: 310367 - DNA, 1159 bp, Unknown
  Bacterial polypeptide expressing nucleotide sequence isolated from the Sargasso Sea
tatggacatacacgaatatcaggcaaaagaaattttatctagttttggagtgacaattccaagaggaggaattgtttacagtccagagaatgcagaaaacaaagctagagaaataggtgggtctagatgggttgtaaaagcacaaattcattctggtgcaagaggaaaggctggaggtataataatatgtaattcttctctagaagtagctcaggcaaccgacaaattgcttggtaaaaaattggtcacaaatcaaacaggaccagagggaaaaatagtaaatagaatttatatagaagaagcaactgacattgaaaaggagctttatttaggtttggtgtttgatagaagctcagaaagcataatggttgtggcttcaacagaaggaggaatgagtgttgaagaaattgctaaagaaaaacccgaaacaattataagatctaaaattgaagtagctgttggaattcaaagttttcaagcaagagagcttgcatttggattaggaatagaatctgatttaatagctagagcatctgatacaattattggatgtgctaaagcgtttagcgaattagatgctacaatggttgaagttaatccattagtcatttcaaaacaaaaacaaatattagctttagattgtaaaatgagcttcgataacaatgctatgtttagaagaaataaagtatcagagttaagagataaatcccaagaggatgagaaagaagtatatgcatcagatagaggcttaaattatgtaagtctagagggaaacattggtaatattattaatggagctggacttgctatggcctcgatggacatgattaaattagctggaggagaacctgcaaactttttagatgttggtggtggagcaacaccagaaaaaatcgtaaaagcttttaggttaataacaatggataaaaaagtaaaagtaattttagtaaatatttttgcaggtataaatagatgcgattgggttgcagaaggcatagtccaggcacttgagaaaatagaaataaaggttccattagttattagattagctgggactaatgttgaaaaaggaaacaaaattttaaaggacagtaaaataaactatattgaggcaagtactctagaggaagctgctaataaagctgtggcggcattataa

SEQ ID NO: 310368 - DNA, 1162 bp, Unknown
  Bacterial polypeptide expressing nucleotide sequence isolated from the Sargasso Sea
aatgaatattcacgaacaccaagcaaaacaaattttaaaaaaatatggagcagctgtgccaaatggagtttttggactaacagtcgaagaattaattgaaaaatcaaaatcattaaaaactaataaatatattttaaaagcacaaattcatgcggggggcagaggtaaagctggaggcgtaaaaatacttgatagtattgaagaattaaaaaaggcatcaaaagaaatgatgggcaaaaaactcattactcatcaaacaggcctagaagggaaagtggtcagaagactatatgttgaggaatcttccaatatagaaaaagaattttatttatcttgtttggttgatagagctagctcaaaaattgcatttatttcaagtgatcaaggaggagtggatatagaagaggtagcaaaaaagaatccagaaaaaattatcactacaaaaatcaattattccaaagaaatttcaaataaagattgtgaaaatataataaaaattttttctttagaacagaaagcacaagagcaagcaaaaaatttaataaaagcaatttacaaaatgtttgtaagtaccgatgctagcatggttgaaattaatccactaattttgactaaagagggaaatttaatttgtttagatgcaaaagttaattttgacgataatgctttgtttaaacatcctgagatagctgaacttagagacctaagcgaagaagatccaattgaaatagaggcaagcaaacatgatttatcttatattaaattagatggaagcataggatgtatggttaatggcgctggtttagctatggctacaatggatattataaaactatatggaaaagaacctgctaatttcttggatgttggaggtggggcctctaaagaaaaagttacggaagcgcttaaattaattctctcggataaaaatgttaaaggaattctaataaatatttttggaggaattatgagatgtgatgtgcttgcacaaggcgtagttaatgcggcaaaagatatggacattaatgttcctttagtagtcagattagcaggaacaaattttaaagaaggaaaaaaaatattagatagttcaggattaaaattaatttcagctgaaaatttagatgatgcagcaaaaaaaattgtaggagctataaagtaa

SEQ ID NO: 310369 - DNA, 1162 bp, Unknown
  Bacterial polypeptide expressing nucleotide sequence isolated from the Sargasso Sea
aatgaatattcacgaacatcaagccaaaaaaattcttaaaaagtacggtgcacccgttcctgaaggtgttcatggtttttccgttgcagagatagttgataaagcaaaaaatttaaatactaaaaaatttgttctaaaagcacagatacatgcaggaggtagaggtaaagcaggaggcataaagatactaaacaatattgatgaattaaaagttgcatctgcagaattattaggaaaaaaacttattacacctcaaacaggaatagacggtaaagaggttaaaagaatatatgtagaggagtcttcagaaatatcaaaagaattttatctttcatgtatagttgatagagcaacttcaaaaatagcatttatttccagtgaccaaggtggcatggatattgaagaggtagcaaaaaacaatcctgaaaagattattactacaagaatagattttcaaacagaaattaagcatgaagattgtgaagaagtaattaaaatatttaaattaaattcagatgcaaataatcaagcgattaaattaattaagtcaatttataaattattcatagagaatgatgctagtcttattgaaattaatcctcttattttaacaaaagataataaaattatttgtttagatgcaaaaataaattttgatgataatgcactttttagaaaccaagaaattttaagcttaagagatttaactgaggaagaggaaaaagaaattgaagcaagcaaacatgatttatcatatataaagttagatggaaatattggatgtatggtcaatggagctggccttgcgatggcaacaatggatatcattaaactttatggagaagagcctgctaattttttagatgttggtggtggcgcatctaaagaaaaagtatcagcagcatttaaaattattttatctgatagaaatgtgaaaggaattttaattaatatttttggtgggataatgagatgtgatatccttgctcaaggtgttgttgatgcagcaaatgaaataaatataaatgtaccattagtagttagacttgcaggtacaaaatttgaagaaggaaaaaaaattttagataattctggactaaagattatatctgcatcagatctatcagatgctgcaaaaaaaatagttaaggctataaaataa

SEQ ID NO: 310370 - DNA, 1174 bp, Unknown
  Bacterial polypeptide expressing nucleotide sequence isolated from the Sargasso Sea
atgaatttacatgaataccaatccaagaagctatttttggatcatggcataccggtattgaaaggagaaatagctaattctcctgatgaagcgaagtcagcagcagagaaacttcagtcaggtatttgggtggttaaagctcaagttcatgccggcggacgcggaaaagctgggggagtgaaaattgcgaagagcatagctgaggtaggagaaagggctgctgaaatgcttgggaccaatttgataacaaaacaaacagatgatctaggactgccagtaagtaaggtctatatagagtcaggcacatcaattcaaagcgaatattatctcagcttgctggttgatcgtactaaagaatcatggacattcattgcatcaaaagagggtggagtcgatattgaagctgttgctgaagaatcaccagataagatcatcaactatacgatcgacccattcaaaggtttggaaatagaatctttaaaagaaatggcagacagaatgggctttattgatgacattcagtctcaatttatttcgatcacaaagaagatgtttgagattgcgaaagaaaaagatgcaaatctgatagaggtgaatcctcttattttggacgatgagaatcagctgattgctctggatgcaaaaataacaatcgaaagcaatgcattgttcaggcaaaaagaacttctattacttaaagatgactctcaagaaaatgaactcgaagtcaaagcttcagaacatgatttaagttatgtttctttggatggaaatattgcatgcatggtcaatggagcagggcttgcaatggcaacgatggatctaataaaactgcatgggggcgagcctgcaaattttctagatgttggcggaggcgctacaacagaaagagtaaaaatggcgattgaaatcattatggaaaatcccaatgttgacgccatcttaatcaatattttcggcggaattgttcgttgcgatgtaattgcccaaggcatttatgaagcagtgaagtcaacaaagattgatattcccattgttgttcgcttgcagggaacaaatgttgaattgggtagaaaaattctcgaagaatcaggaatgaagattatttcagctagcgatcttacagatgctgcaataaaggtagtggcctcagttaaaggaaaagtcgaatgag

SEQ ID NO: 310371 - DNA, 877 bp, Unknown
  Bacterial polypeptide expressing nucleotide sequence isolated from the Sargasso Sea
atgtcaattctagtcaacaaagatacaaaagtaatatgtcaaggatttacaggttcgcatggcacctttcattctgagcaatctattaaatatggaactaatcttgtaggaggcgttactccaaaaaaagggggacaaacacatttagaaaggccagtctttaatacagtacaagaagcaaagaatgaaactggagcaaatgcaagtatgatttatgttcctgcaaaatttgcagcagctgccatcacagaggcaatagatgcttctatggagttaattgtttgtataactgaaggaataccaattttagatatgcttaaggttaagcagaaattgtcaggatctaactctaggttaataggcccaaactgccctggaataataactccagatgaatgtaaaattggaataatgcctggaaatatacataaaaaaggatctgtaggaatagtctcaagatcgggaactttaacttatgaagctgtagctcaaacaacagcaaacggtttaggccaatcaacatgcataggtattggcggagaccctataaatggaacaaattttattgattgtttagatttatttttgaatgatactgaaaccgagtctattttaatgataggtgaaattggtggaacagcagaagaagaagcctctgattttattaaaaatcataaaattaaaaaaccaatggttggatttattgcaggagttactgctccgccaggtcgaagaatgggtcatgcaggcgccataatagcaggagggaaaggtggtgcttcagaaaaaataaaaacaatggaagatgcaggtattacaattgcaaaatcaccagcagatataggaaaaactcttttaaacaaattgtctaattgaa

SEQ ID NO: 310372 - DNA, 853 bp, Unknown
  Bacterial polypeptide expressing nucleotide sequence isolated from the Sargasso Sea
atgagcgttttaattaataaagataccaaagtaatttgtcagggcttcactggtgctcagggtactttccactctgaacaagccattgcttacggcactaaaatggttggtggtgtgactcctggtaaaggcggtcagactcacttaggtttaccagtattcaacacagtaaaagaagcggtagaagcgactggcgcagaagcatcagtgatctacgtaccagctgctttctgtaaagattctatcctggaagctgctaacggcggtatcaaactgatcgtttgtatcactgaaggtattccaactctggatatgctggatgccaaagtaaaatgtgacgaattaggcgtacgcttaatcggccctaactgcccaggcgtgatcactccaggcgaatgtaaaattggtattatgccaggccacattcacttaccaggtaaagtaggtattgtttcacgttcaggtactctgacttatgaagcagtaaaacaaactactgattacggtttcggccaatctacttgtgtaggtattggtggtgacccaatcccaggttctaacttcatcgacatcctgaaattattccaggaagacccacagactgaagccatcgttatgatcggtgaaatcggtggttcagctgaagaagaagctgctgcttacatcaaaaaacacgtgactaagccagttgtgtcttacatcgccggtgtaactgcacctgctggtaagcgcatgggccacgcaggcgccatcatctctggtggtaaaggtacagccgacgagaagttcgctgcactggaagacgcaggcgtgaaaaccgtgaagagcttagccgatatcggtaaagcactga

SEQ ID NO: 310373 - DNA, 889 bp, Unknown
  Bacterial polypeptide expressing nucleotide sequence isolated from the Sargasso Sea
agaggtaaaaggttgtacgtagaagtatcttcaaatataaaaaaagaattttatttatcttgtttagttgatcgagctaactcaaaaattgcatttatttcaagcgatcaaggtggcatggatatagaagaagtagctagaaaaagtccagataaaatcttaactaccaaaattgattttgctaatgaaatttcagataaagattgcgatataatagtaaaaatttttaatttagatgctgagataaataatcaagctaaatctttagttaagtcaatttacaaaatgtttattgaaaccgatgcaagtatggtagaaattaatccactaattttaactaaagaaaataaaattatctgtttagatgctaaaattaattttgatgataatgccctttttcgaaatccagatataaaaaaattaagggatcttagtgaagaagatcctttagaaatagaagcgagtaagcacggtctttcatatataaaattagacggcaatataggttgtatggtcaacggtgcaggactagcaatggctactatggatataattaaactttatggagaggagcctgcaaattttttagatgttggaggaggagcttcaaaagagatagtaacagcaggatttaagatcattctatctgacaaaaatgtaaaaggaattttaataaatatttttggtggtataatgaagtgcgatgttctagctcaaggagttgttgatgctgcaaaagaaataaaaataagtgttccacttgtagtaagacttgcaggaacaaattttcaggaaggtaaagatattttggaaaaatcgaacttaaatattatttctgcatcaaatttgtctgacgcagctaaaaaaattattaaagaaatcaagtaaa

SEQ ID NO: 310374 - DNA, 877 bp, Unknown
  Bacterial polypeptide expressing nucleotide sequence isolated from the Sargasso Sea
aatgtctatattaataaataaaaatacaaaagttatttgccaaggttttacaggcactcatggaacatttcattctgagcaagcattaaaatacggaacaaaattagttggaggtgtaacgccaaaaaaagggggcagtaaacatttgggattaccagtatttaattcagtaatcgaggctaaagagacaactggtgcaaatgcctcaatgatttatgtgcctcccaaatttgctgccgctgcaattatagaggctattgaagctagaatagaactcatagtttgtattacagagggaattcctgtcttagatatgattaaggtaaaaaaattgcttaagaataacaattcaagattaataggaccaaattgcccaggaataattacaccagaagaatgcaagattggaattatgccaggaaatattcataaaaaaggttctgttggtattgtttcaaggtcaggtactttaacttacgaagcagttcatcaaaccacaacaaatggtatgggccagtctacttgtatcggaataggcggagacccaataaacggtacaaattttattgattgtttagatttatttttaaaagatgatgaaaccaactcaatagtaatgataggtgaaattggaggtaccgcagaggaagaggcttcagagttcctaaaaaagtctaaagttaaaaaaccaatggttggttttattgccgggcttacagctccacccggtagaagaatgggccacgcgggcgcgattatatcaggtggaaaagggggagccttagacaaaatcgaaataatgaagtcagctggtattacaatatcaaaatctcctgcagacatcggaaaaactctatataataaacttaatagttga

SEQ ID NO: 310375 - DNA, 1162 bp, Unknown
  Bacterial polypeptide expressing nucleotide sequence isolated from the Sargasso Sea
aatgaacattcatgaatatcaggcaaaaaaattattaaaaaagtttggtgctccggttccaaatggggtgcatggctctaccactgaagaaatactaaataaaacaaaattattaaatacagaaaaatacgttcttaaggctcaaatacattctggtggtagaggaaaagctggaggaattaaaattactaatactttagaggaattaaagaaagcagcagatcaaattttgggtaaaactttagttaccaatcagacaggaccaaaaggcaaaaaagtaaaaaaactatatgttgaagagtcatcaaatatagacaaggaattttatttatcttgcttagtagatagagctaaatctaagattgcattcatttcatgtttagaaggtggaatggatatagaagaaatagcaataaagaaacctgaaaaaattattacaacaagagtcgatgttgaaaaagaaatatcagatacagattgcgagagaattatagaagtatttaaattagagtatgatgcaaaagatcaggctattgatctaataaaatctatttataagatttttatagaaaaagatgcaagtttgattgagataaatccattagttttaacaaaagaaaataatattctttgtttagatgcaaaaattaatttcgatgataatgctatttttagacatccagacattagcgaacttcgtgatttaaatgaggaagatccaattgagattgaagcaaaaaaaaaggaattgtcctatatcaaactagatggaaatattggatgtatggtgaatggagcaggtttagcaatggcaacgatggatataattaaattatttggaggcagtcctgcaaactttttagatgttggtggtggggcatcaaaagataaagtatcagccgcatttaaaatgattctaagcgacaaaaatgtaaaaggtattttaataaatatttttggagggattatgaggtgcgatgtattagcgttgggtgttgttgaagcggcaaaagagatggaaatagatataccaattgttgccagattagctggtacaaattatgaaaaagggaaaaaaattttagaagaatctaaattaaaaattatttcagcatctgatttatctgaagcagcgaaaaagatagtaaaggttactaaataa

SEQ ID NO: 310376 - DNA, 1081 bp, Unknown
  Bacterial polypeptide expressing nucleotide sequence isolated from the Sargasso Sea
catgaaaattcacgaattccaggccaaacaggttctttcacgatatggggttccggtgccccgcagcaaagttgcagaatcggtagaggaagccgtcgatgctgcgagagagttaggcggagaagtctgggtggtcaaggctcagatccatgccggtggacgcggtaagggcggcggagtcaaagtctgccgcgggttggaggaagtccgggaaaacgcagaaaaaatcctgggcatgcaactggtgaccaaacagaccggacctgccgggcaaaaagtgctcagggttctgatcgaagaaggcatggaaatcatcaaggaactttactgttcggtgctggttgaccgaaccaagcagtctgttgtcatgcttgcatcgactgagggtggaatggacattgaggaagtggcagccaacacaccggataaaatcctcaaaatttttgctgatccatcactgggtctgcttccctatcaggcatcagaactggcttacggacttggaatcgatcaaatcaatcccaaacttctccggcctgctgcaaaacttttcagttctctttatcaaacctttgtccatgaggattgcagcctggtcgagatcaatcccctggttcttaccggcgacgaccgggtagtggccctcgatgccaaactcagctttgatgataacgctttattccgtcaccgagaaaatgctgacatgagagaccttgctgaagaggatcctctcgaaacggaagccggagagtacgaactgaattacatcaagctcgacggttcgatcggctgcatggtcaacggtgccggtttggcaatgggtacaatggacatcatcaaaacctatggaggagaacccgcgaatttccttgatgtagggggcacggcgaccgaagaaaccgtagagaagggctttcagatcatcacccaggatcccaacgtacgatgcattctgatcaatatattcggtggcatcgttcgatgtgacatggttgcatccggaatcgtcgaggccttccgtaaagtcaatttgcagattccagtggtggtaagactcgaagggacaatgcagaagaagccc

SEQ ID NO: 310377 - DNA, 631 bp, Unknown
  Bacterial polypeptide expressing nucleotide sequence isolated from the Sargasso Sea
tattgaagctattgacgcatctatagaattaatagtttgtattacagaaggaatacctgttttagatatgcttaaagtaaaaaaaaaattagcagggtctaagtcaagattaattggacctaactgtcccgggattataactcctgatgaatgtaaaattggaattatgcccggaaatattcataaaaaaggctcagttggaattgtatcaagatctggaacattaacctacgaagcagtctaccaaactactaagaatggccttgggcaatcaacatgtattggaataggaggagaccctattaatggaacaaattttatagattgtttagagctttttttaaatgataaagaaacaaaatcaatattgatgattggagaaataggaggtaccgcagaagaagaagcagctgaatatataaaaaatcagaaaattaaaaaaccaatggtaggattcatagcaggtataactgcgcctcccggcagaagaatgggacatgctggtgcaataatatctggaggcaaaggtggtgcggatcaaaaaataaaaaaaatggaagaatccggaataacaattgcaaaatctccatcagaaattggaattacactaataaataaattgaataattga

SEQ ID NO: 310378 - DNA, 1159 bp, Unknown
  Bacterial polypeptide expressing nucleotide sequence isolated from the Sargasso Sea
aatgaatatacacgaacatcaagcaaaggaattatttgacggttatgatatacctgtgtccacaggaagcgttgcatatgaaaaaagtcagataaatgaagcagtaggaaaagttaaaggcccaatttgggttgttaaagcacaaattcatgcgggtggtagaggcaaaggcgggggcgttaaagtagtttcatcaaaagaagaagctgtaaatgaggctgaaagaatgtttggtatgaatttaataacgcctcaaacaggcccagcaggaaaagaagtaaaacgtatctacattgaaaatgggtcggatatcaaaaaagaattatacctttcttgtttattagacagagcgacaagcaaagttgcctttattgtatctaagatgggaggcatggatattgaagcagttgcaaaagataccccagaaaatataacaactgttcaaatagaaccttcaataggagttactgaaaatgatataaatacaattagtaaagcttttgaactcaaaaaagatcttgagagccaactttctgatcttataaaaaatatgtataaattttttctagaaaaagatgctagtcttgttgaagttaatcctttgattataactgagactgacaaactattgtgtctcgatgctaaagttaattttgatgataatgctttataccgccatccagaaattgaggacttaagggatgagaatgaagaggatgaatatgaaagagaggcatcaaaatatgatctcgcatatataaaattggatgggaatataggctgtatggtcaatggcgcaggcttggcaatggctagcttagatattattaaaatgtatggtggtgagcccgccaactttcttgatgttggtggtggagcttctaaagaaaaggtttcgagtgcatttaaaattattctttctgataaaggtgtaaaaggcatcttagttaatatctttggtggaatcatgagatgtgacatcattgctgaaggaattgttgctgctgcaaaagaattagaaatctctgtaccgcttgtagttagacttgaaggcacaaatgttgatgaaggtaaaaaaattcttgataattcaagtatcgaaattatttctgccaatgatttagatgatgcagcaaaaaaaatagtcaagctagtttaa

SEQ ID NO: 310379 - DNA, 877 bp, Unknown
  Bacterial polypeptide expressing nucleotide sequence isolated from the Sargasso Sea
atgtcagtcttaataaacaaagacactaaagtaatttgccagggtttcacaggtgctcatggaacctttcattctgaacaaactattaaatatgggactaatttagttggtggagttactcctaaaaaaggaggtcaaattcacctggaaagaccagtattcaatactgttaaagaagcaaaagatcagacaggtgcaaatgcaacaatgatttatgttcccgcaaagtttgcagcttcagcaattatagaggcaatagactcatctatagaattgattgtatgtataagtgagggaattccaattttagacatgcttaaagtaaaaagaaaactttcgaactctaaatcgagacttattggtccaaactgtccaggtataataactcctgatgaatgtaaaattggaataatgccaggaaatatccataaaaaaggaacagtaggcattgtttctaggtcaggaacattaacatacgaggcagtagcccaaacttcagaaaatggtcttggtcaatctacatgtataggaataggaggagatccaataaatggtacaaattttattgactgtctagatctgtttttaaatgatgaagaaactcaatctatagtcatgattggcgagattggaggaactgctgaagaagaagctgctgaatttataaaaaatcataaaataaaaaaaccaatggttggatttgtagctggaattacagcaccacctggtagaagaatgggtcatgctggcgcaataatatcagggggaaaaggtaacgctgatgaaaaaattcaaattatggaaaaatcaggcattacaatggcaaaatcaccatctgaaattggaataactctattgaataaattgtctaattgat

SEQ ID NO: 310380 - DNA, 1165 bp, Unknown
  Bacterial polypeptide expressing nucleotide sequence isolated from the Sargasso Sea
tatggacattcacgaataccaggcaaaaaaaatactttctgattttggagtaacaattccaagaggtggaatagtatacagcccggagaatgccgagaataaggctagagaaattggtggatctaaatgggttgtaaaagcacaaattcattcaggtgctagaggaaaagcaggtggaataattgtttgtgatacccctttagaagttgcccaagcaactgataaattacttggaaaaaaattagttacaaatcaaacaggacctgaaggaaaaattgtaaatagaatatatatcgaggaagcaacagatatagagcgagaattatatcttggtttggtctttgatagaagttcagaaagtattatggtggttgcatcaacagaaggtgggatgagtgttgaagaaatttcaaaagagaaaccagaaactataataagatcaaaaattgaagttgctgttggaatgcaaagtttccaagctagagaattagcttttggtttaggaattgaacctgatttaattagaagagcatctgagacaattattggatgctataaggcatttagtgaattagatgctacaatggttgaggttaatccattagtaatttcaaaacaaaaacaaattttagctttggattgtaaaatgagttttgataacaatgcaatgtttagaagaaatcaagtttctgaattaagagacaaaacacaagaggactcaaaagaagtttttgcgtctgatagagggctaaattatgtaagcttagatggaaacattggtaatattataaatggtgctggcttagcaatggcatcaatggacatgattaaattagctggaggaagtcctgcaaattttttagacgtaggtggtggagcaacacctgaaaaaattgttaaagcttttaagttagttacaatggatgaaaaagtgaaagttattcttgtaaatatttttgctggtataaacagatgtgattgggtagcagaaggaatagtagaggctctaaaaaaaatcgaagttaatgtgccattggttattagattagcaggaacaaatgttgaaaaaggtaatcaaatattaaaagagagtaagataaattatattgaagcaaacactctagaggatgcagctaataaagcggttgcggctctaaataaataa

SEQ ID NO: 310381 - DNA, 1264 bp, Unknown
  Bacterial polypeptide expressing nucleotide sequence isolated from the Sargasso Sea
catgttcgcccgcgcgaaaatcggtcgaaggaacctcctcgccgcgtcgcgcgacgcgcgaatcatcgcgtcgcgcgcgctcaacgtgcacgaataccaaggcgcggagatcatggcgaaattcggcgtgcgcgtcccgcgcggtgtcccgtgtcgcgcgctggatgagatggacgacgcgatgcgcgcgctcgccggggacgatgtggtggtgaaatcgcagattctcgccggtgggcgcgggctcgggacgttcgcgagcgggttcaagggaggggtgcacgtcgttcccaaatcggaggcgaaggcgacggcggcgaaaatgttgggcgagacgttggtgacgaaacagagcggaccggcggggaaaccggtgaacgtgctgtatctggcggagaaaatgacgctgacgagagagatgtacttcgccgtcatgctcgatcgagcgagcgcgggaccgttggtgatcgcgagcgcggagggcgggacgtccatcgaggatttggcggcgagtcatccggagaaaatcatcaaaatgcgattggacgtcgagcgtgggatgacgcaaacgcaggcggacgagctggtgaagcggttagggatcgccaagcatcaagaggacgcggcgaaacagttgatggcgttgtatgagacgtttgccaagacggattgtacgatgatagaggtgaacccgttggcggaggatcaagacggtcgtgtggtcgccgcagacgccaagctcaatttcgacgataacgccgagtatcgacaaaaagacgtgtttgcccttcgagatcactcccaggaggatccgcgcgaggtgcaggcgagcaagtttgacttgaactacatcggtttagacggcaacatcggatgcatggttaacggcgccggtttggccatggcgaccatggacatcatccaactctacggtggatccccggcgaatttcttggacgtcggtgggaacgcgagcgaggagcaagtcgtcgaggcctttaagattttgaccgccgatcccaaggtgcgcgccatcctggtgaacattttcggcggcatcatgaagtgcgacgtcatcgccgcgggcatcgtcgccgcggccaagcaagtcgatctcaaggttccgctcatcgtccgtctcgagggaacgaacgtcgaggccgggaacgatatcctcaaatcgtccggcatgaccatcatcaccgcctcggatctcgacgacgccgcgcaaaaagcgtgctcgagcctctccgcctcggcgtaa

SEQ ID NO: 310382 - DNA, 883 bp, Unknown
  Bacterial polypeptide expressing nucleotide sequence isolated from the Sargasso Sea
atgtctgtattgataaacaaagatacaaaagttatttgccaggggtttactggaggtcaaggaacttttcattcagaacaagccattgcatacggcactaaaatggttggaggggttacgccaggtaagggtggtactaaacatttaaatcttcctgtttttaatactgtccaagaatgtgttgacgaagtaaatcctgatgcaacagtcatatatgttcctcctccttttgcggctgattcaatattagaggcaatagcatcgaaagtacctctaataatctgtgtcacagaaggcataccagtccaagatatgattaaagttaaacagtttttaaaacagtcaaactccagacttattggtcctaactgtccaggtgtaatcacccctgatcaatgtaaaattggaattatgccaggacatattcatgctcccggtaaaataggaattgtttctaggtctggtacattaacttacgaagctgttgcacaaaccacagctgctggtttaggtcaatcaacgtgtattggcattggtggtgatccaattaatggaacaaattttatagattgcttggatatgtttctaaatgacgaccagacagaagcaatattaatgattggtgaaattggtggaaatgcagaagaagaagcagcaaatttttataaaaatcataaaattaaaaaaccaattgctggttttattgctggaaaaactgctcccccaggaagaacaatgggccatgccggtgcaatagttagcgggggaagtggaggtgcagatgctaaagttaaagtcatgagtgaatgtggttttataatgtcagaatctccatcaggtttgggagaggcggttgtaaaagctatagaagaatggaaataac

SEQ ID NO: 310383 - DNA, 847 bp, Unknown
  Bacterial polypeptide expressing nucleotide sequence isolated from the Sargasso Sea
aatgaatattcacgagcatcaagctaaagaaattttaaaaaaatatggcgcaattgtacccgaaggtgttttttcatactcagttgaagaattattacaaaaggcaaaatcattaaaaacggaaaagtttgttttaaaagcacagattcacgctggcggacgaggaaaggcaggagggataaaaattgtaaatacaatagaagagttaaattcagcagctaaagaaatgttaggaaaaaaattgataactcaccagacgggaccccaaggaagagaagttaaaagactatatgttgaatcatcttcagaaattgaaaaagaattttatctttcatgtttagttgatagagcaagttctaagatagcatttatttcaagtgatcaaggtggaatggatattgaagatgttgcaaaaaataatccaaaaaaaatcgtaaccacaaaaattaatttagacgacaaaatatcagataaagattgtgaaaaaattgtagaaatatttaatttaagtccagacgcaaaaaaaaaagcaataaatttaattaaatcaatatacaaaatgtttattgatatagatgctaatcttgttgaaataaatcccttgattttaactaaagaaaataaaattatttgtctagatgcaaaaatgagctttgatgacaatgcattatttagaaatccagaaattttaaatttaagagatttaaatgaggaagaagaaattgagatagaagcaaataaacatggtttgtcttatataaaattagaaggtagcataggatgcatggttaatggcgcaggtttagcgatggcaacaatggatataataaaattatatggagaagga

SEQ ID NO: 310384 - DNA, 1183 bp, Unknown
  Bacterial polypeptide expressing nucleotide sequence isolated from the Sargasso Sea
atgaaaattcatgaataccaaggcaaggaggtttttaaaaacttttcaatccccactcctagaggattcttaattaaagacattaatagcgctgaaaagattattaagaaagcccatgatgaattcaaatccgataaagctgtgatcaaggctcaaattcatgctggcggccgtggaaaaggaggcggcgtaaaagtggctaatggtctggaatctgcattaaaatatgtaaaggaaatgcatgggatgcaacttgttacccatcaaacgggttcgagtggacaaaaagtaaggaaagtttatatcgaggaagcttctgaaattaaaaaagagttttactgtgcaataactttagacagaaatttaggtaaagatgtttttatggtttcgactgaggggggcgtagaaattgaaaaagttgcagacgaaaccccagaaaaaattgtaaagacctggattgatcctcttattggaatgaaatcataccaagcacgtaagctagcatttggccttaagcttgagggaaatgcatttaaagaatcagtaaaactttttattaaactctacgaatgctacatgaaaaccgatgcttcattggttgaaataaatccattagttttaacagcagatgaaaaaattattgctctagatgcaaaatttaattttgatggaaatgccctgtttaggcagaaagatattttaaaattgcgagatcttgatgaggaagatcctactgaaatagaagcaagcaaatttgatttaaactatattaagctagatggaaacgttggctgtatggtaaacggtgctggtctagcaatggcaacaatggatataattaaaatagcaggtggggatcctgcaaattttttagatgttggaggtgctgccagcgccgaaacagtaaaaaatggattcaagattattttatctgataaaaatgtaaaagctattctaataaatatttttggaggtattgtaaggtgcgatagggttgcaaatggcgttgtagatgcagtcaaagacctagggcttcaagttccagttgttgtcagactcgaaggtactaacgctgaagatgcaaaaaatattcttagtaaatcgggtctttcaataatccctgcgaatgatatgaaggatgcagcagaaaaagttgttgaagcagctactaaaagaggatagt

SEQ ID NO: 310385 - DNA, 949 bp, Unknown
  Bacterial polypeptide expressing nucleotide sequence isolated from the Sargasso Sea
aatgaatattcacgagcaccaagctaagcaaattttaaaaaaatatggtgcagttgttcctgaaggagtatttgcatttacagtcgaagaattagtagaaaaagcaaaatcattaaagacagaaaaattcgttttaaaagcacagattcatgctggaggtagaggaaaagcgggaggagtaaaaattttaaatacgattgaagagttaagtactgcagctaaagaattgctaggtaaaaatttaataactcatcaaacagggcctaagggcagagaggttaaaagattatacgttgaagtttcttccaatatatctaaagaattctatctttcttgtttagtagatagagcaagttcaaaaatagcatttatttcaagtgatcaaggaggaatggatatcgaggaagttgcaaaaaaaacacctaataaaataattactactaaagtagattttgaaaatgaaatttcagatgctagttgcgaaaaaattataaaaatatttaatctaaataataaaaataaaaatgatgctattaaattaattaaatctatttataaaatgtttattagtaccgacgctagcatggtcgaaataaatccattaattttgactaaagaaaatagaatagtttgtttagatgcaaaaattaattttgatgataatgcattgtttaaacataaagaaattagtgatcttagagatttaaacgaagaagattcaacagaaatagaagctagcaaacatgatttagcttatattaaattagatggaagtattggttgtatggtaaatggtgcagggctagctatggcaacaatggatataattaaattatatggtgaacaaccagctaactttttggatgtaggtggtggagcatcaaaagaaaaagtttctgcagcttttaaaataattttgtcagacaaaaatgtaaaaggaattttaata

SEQ ID NO: 310386 - DNA, 877 bp, Unknown
  Bacterial polypeptide expressing nucleotide sequence isolated from the Sargasso Sea
aatgtctattttagtgaataaaaaaaccaaagtaatatgtcagggttttactggctctcatggcacttttcattcagaacaagctataaaatatgggacaaatttagttggcggggtgaccccaaaaaaaggaggacaactacatcttgaaaggccagttttcaattccgttaaagaagcgaaagatcagactgatgcaaacgcaacgatgatatatgtccctgcaaagtttgctgctgatgcaattatagaagctatagatgcatcaatagaattaattgtttgtattaccgagggaataccaattttagacatgttgaaagttaaagatatcttatcaggttcacaatcgaggctcattggaccgaactgcccaggtataataacacctggtgaatgtaaaattggaataatgccaggtagcattcataaaagtggttctgttggaatagtttctagatcaggtactttgacttatgaagcggtagaccaaactacgaaaaatggattaggacaatctacttgtattggaattggtggagatccaattaacggcactaatttcattgactgtctagacttatttctaaaagacgaaaaaacaaagtcaattcttatgatcggcgaaataggaggcaccgcggaggaggaagcctcagagtttataaaaaatcataaagtgaaaaagccaattgtaggttttatagcgggcgtaaccgctcctcccggaaggagaatgggtcatgcaggggccattatttctggtggaaaaggaggtgcaaaagaaaaaattaaaacaatggaagaagctggtattactatagctcggtcaccagcagaaataggtaagactcttttaaacaaattgtcactttaa

SEQ ID NO: 310387 - DNA, 877 bp, Unknown
  Bacterial polypeptide expressing nucleotide sequence isolated from the Sargasso Sea
aatgtcagtattaattgataaaaatacaaaagtaatttgccaagtttttacaggatcccatggtacttttcactctgaacaatctattaaatatggaacaaacatagttgggggagtaacaccaaaaaaagggggacaaattcacttagaaagaccagtgtttaacacagttaaagaagcaaaagatgctactggtgcagatgcaacaatgatatatgtacctgcaaagttcgcttcatcagccatcattgaagccatcgatgcatctattgaattaattgtttgtataagcgaaggaataccaattcttgatatgttaaaagttaaaaaaaaattaaaagactctaactcaagattaattggtccaaactgtcctggaataattacacctaatgaatgtaaaattggaataatgccaggtagtattcataaaaaaggttcagttggaattgtatctagatcaggaacacttacttatgaggcagttgctcaaacaaccgagaataatcttggtcaatcaacatgcataggaattggcggggatccaattaatggaactaatttcattgattgccttgatttatttttaaatgacgaccagactgagtctattttaatgattggagaaatagggggaactgctgaagaagaagctgcggagttcgttaaaaatcacaaaataaaaaaaccaatagttggatttatagctggtgtaactgctccaccgggaagaagaatgggacatgctggagctattatttcaggtggcaagggaaatgccgaagaaaagataaaaatcatggaagattgtggtattacagttgcaaattctccctctgatattggaaaaacgctactaaataaattgtctaattga

SEQ ID NO: 310388 - DNA, 1168 bp, Unknown
  Bacterial polypeptide expressing nucleotide sequence isolated from the Sargasso Sea
atgaatctgcatgaatatcaggcaaaacagctgtttgccgagtatggcctgccggtctccgaaggttatgcctgtgccaccccgcaggaagcggccgaagcggccgacaagattggcggcaacacctgggtcgtcaagtgccaggtccacgccggtggccgcggtaaagcgggcggcgtcaagctggccaagagcaaggacgagatccgtgccttcgcccagaactggctcggcaagaacctggtgacctatcagactgacgccaacggtcagccggtcaccaagatcctggtggaatcttgcaccgacatcgccaaggagctctatctgggcgccgtggttgaccgtggttcgcgccgcgtggtcttcatggcctctaccgaaggtggcgtggagattgaaaaagtcgcccacgaaaccccggaactgattcacaaagccgccatcgatccgctggtaggcccgcagccttatcaggcccgcgagctggccttcaaactgggtctggttggcgagcagatcaagcagttcaccaagatcttcatgggtctgggccagatgttcctggactgcgacttcgccctgctggaaatcaacccgctggtgatcaccgcccagggcaacctgcactgcctggacggcaagatcaacatcgacgccaacgccctgtaccgtcagcccaagctgcgccagatgcacgatccgtcccaggatgacccccgcgaagcgcacgccgcccagtgggagctgaactatgtggcgctcgatggcaacatcggctgcatggtcaacggcgcaggcctggccatgggtaccatggacatcgtcaacctgcatggcggctcaccggccaacttcctggacgtcggcggcggcgccaccaaggagcgggtgaccgaggcgttcaagatcatcctctccgacagcaaggtacaagccgtgctggtcaacatcttcggcggcatcgtgcgctgcgacatgatcgcggaaggcatcatcggcgccgtcaaggaagtgggggtgaaagtgcccgtggtggtgcgtctggaaggcaacaacgccgaactgggtgcccgtaaactggccgacagcggcctcaatatcatcgccgcaacgagtctgactgacgcagctcagcaagtggtaaaagcagcggaggccaaataat

SEQ ID NO: 310389 - DNA, 865 bp, Unknown
  Bacterial polypeptide expressing nucleotide sequence isolated from the Sargasso Sea
ctgatcaacaaagacaccaaggtgatctgccagggctttaccggcggtcagggcactttccactccgaacaggcgattgcctacggtacccagatggtcggcggcgtctccccgggcaagggtggcaccactcatctgggcctgccggtgttcaacaccgtccgtgacgccgtggaagccaccggcgccactgcctccgtcatctatgttccggcgccgttctgcaaggacgccatcctggaagccatcgatgccggcatcaagctcatcgtcaccatcaccgaaggcatcccgaccctggacatgctggacgtcaaggtgaagctgcaggaaaccggcgtgcgcatgatcgggcccaactgcccgggcgtcatcaccccgggtgagtgcaagatcggcatcatgcccggccacatccacaagccgggcaaggtgggcatcgtctcccgctccggcaccctgacctatgaagcggtcaagcagaccacggacgagggcttcggccagtccacctgcgtcggtattggcggcgaccccatcccgggttccaacttcatcgacattctggagatgttccagaatgacccgcagaccgaagccatcgtgatgatcggcgagatcggcggcaatgccgaggaagacgcggctgcctacatcaaggctcatgtcaccaagccggtggtctcctacattgcgggcgtcaccgccccggctggcaagcgcatgggtcatgcgggagccatcatcgccggtggtaaaggcaccgcggccgagaaatttgccgccctggaagatgccggcgtgaaaaccgtgcgctccttggccgatatcggcaaagccctgcgtgaagtgaccggctggtaag

SEQ ID NO: 310390 - DNA, 1168 bp, Unknown
  Bacterial polypeptide expressing nucleotide sequence isolated from the Sargasso Sea
catgaagattcacgagtaccagggtaaggaaatcctgcggaaattcggagtcgcggtaccgcgcggcaagccggcgttctcggttgacgaggccgtcaaggtggcagaagagctcggcggcccggtttgggtcgtgaaggctcagattcacgcgggtggccgtggcaagggtggcggcgtgaaggtggcgaagtcgatcgagcaggtccgcgaatacgcgaaccagatcctcggcatgcagctcgtcacgcaccagaccggtccggaaggccagaaggtcaaccgtctgatgatcgaagaaggcgccgacatcaagcaggaactgtatgtcagcctcgtcgtcgaccgcatctcgcagaagatcgtgctgatgggttcgagcgaaggcggcatggacatcgaagaagtcgccgaaaagcacccggaactgatccacaaggtcatcgtcgagccgtcgacgggcctgctcgacgcgcaggcagacgacctcgccgcgaagatcggcgtgccggctgcttcgattccgcaagcgcgcgcgatcctgcaaggcctgtacaaggcattctgggaaaccgacgcatcgctggctgaaatcaacccgctgaacgtttccggcgacggcaaggtcatcgcactcgacgcgaagttcaacttcgactcgaacgcgctgttccgccacccggaaatcgtcgcgtaccgcgatctggacgaagaagatccggctgaaatcgaagcgtcgaagttcgacctcgcgtacatctcgctcgacggcaacattggctgtctcgtgaacggcgcaggcctggcgatggcgacgatggacaccatcaagctgttcggcggcgagccggcgaacttcctggacgtcggcggtggcgcgacgaccgagaaggtcacggaagcgttcaagctgatgctgaagaacccggatctgaaggcgatcctcgtgaacatcttcggcggcatcatgcgctgcgacgtgatcgcggaaggcgtgatcgccggttcgaaggccgtgaacctgaacgtgccgctcgtcgtgcgcatgaagggcacgaacgaggacctcggcaagaagatgctggccgattcgggcctgccgatcatctcggcggacagcatggaagaagctgcgcagaaggtcgtcgcggcagccgcaggcaagtaa

SEQ ID NO: 310391 - DNA, 889 bp, Unknown
  Bacterial polypeptide expressing nucleotide sequence isolated from the Sargasso Sea
atgaatattcatgaacatcaagcaaaagatattttaaaagattttggggctcccacaactgagggggtaattatatttaattctgaaggtattattgataagattaaagatctaaatactgaccaatttgttttaaaagcccaaatacatgcaggcggaagaggaaaagctggaggggtaaaattagtaaaaaaaaaagatatagttgatgaagcaaaaaagttatttggaaaagttttagtaacaccacaaacaggccctgatggacgggtagtaaagagaatatacattcaaaaagcttacgatataaaaaaagaattatacttatcatgtcttgtagatagacaaagttctaagattgctttcataagtagtactgagggtggtgttgatatagaagcagttgccaaaaaaactcctgaaaaaattattacaacaaaagtagatttaaaacagaatttaagccctgaagaaattaaaaatattttacaaatttatcaattagataaaaaccaaatggagagcgcaataaaattagtgaaagcaatgtatagcgcattaattaaaaaagatgcatctttaattgaaataaatccattagtaataactaaaaataacgaaatactatgcttagatgcaaaaatgaattttgatgataatgcgatttttaagcatccagagatattagaacttagagatttgaatgaggaaaattcatctgaaatagaagctagtaagcatgatttagcttatattaaattagatggatctattgggtgtatggtcaacggcgcaggcttagcaatggcaaccatggatataataaaactttatggagaagagcccgcaaattttttagatgtgggtggtggggcaagtaaagaaaaag

SEQ ID NO: 310392 - DNA, 1162 bp, Unknown
  Bacterial polypeptide expressing nucleotide sequence isolated from the Sargasso Sea
aatgaatattcacgagcaccaagcaaaagaaattttaaagaaatatggagcaatagttccagcaggagttttttcaacaaatgttgacgacttgattgaaaaagcaaaaaatttaaaaaccgaaaagtatgttttaaaggctcaaattcacgctggtggtagaggtaaagctggaggagttaaaattctaaatacacttgaagaattaaaaaattcggcaaatgatctgcttggtaaaacactggtaactcatcaaactggaccagaaggcagagaagttaagcgattatacgttgaagaatcctctaatatagaaaaagaattctatttatcatgtttagttgatagagcgagttcaaagattgcatttatttcaagtgatcaaggtggaatggatattgaagaagtagcaagttcaaatccagaaaaaattattacaactaaagttgatatagctgaagaaatatcagattcagattgtgagttagtaattaaaatttttgatttaaacagtgatgccaaagatcaagcaatttcactaatcaaatcaatttataaaatgtttattagtacagatgcaaatatggttgaggtaaatcctttaattttaacaaaagagggaaagatcgtttgtttagatgcaaaagttaatttcgactcaaacgcattatttagacaccctgaaattcaagaattaagagatttaaatgaagaggatccaactgagattgaagctagcaaacatgatttagcttatatcaagttagatggaagtattggatgtatggttaatggtgcagggctagcaatggcaactatggatatcattaaattatatggtaaagaaccagcaaatttcttagatgttgggggtggagcttcaaaagaaaaagtttctgcagcatttaaaattattctttcagacaaaaatgttaagggaattttaataaatatttttggaggaataatgagatgtgatgtactcgcccaaggggttgtggatgctgcaaaagaaataaatattagtgtacctttggtagtacgtcttgcaggaacaaattttaaagagggaaaagaaattttagataattcaggtttaaaattaatctcagcagaaaatttagatgatgctgctaaaaaaattgtagaggcaattaaataa

SEQ ID NO: 310393 - DNA, 877 bp, Unknown
  Bacterial polypeptide expressing nucleotide sequence isolated from the Sargasso Sea
atgtcagttttggtaaataaatatactaaagtaatttgtcagggatttactggctcgcacggtacttttcattcggagcaggctataaaatatggaaccaatcttgttggtggagttacaccaaagaaaggtggacaaaaacatttagatagaccagtttttaatagtgttttagaggcaaaaaatgaagtaggagcaaatgcaactatgatttatgttcctgctaaattcgcagcagcagcaatcattgaggctattgatgcatcaattgaacttattatttgtataactgaaggaattccaattcaggatatgcttaaggtaagacaaaaattaagtggctctaatagcagattaattggacctaattgtccaggaataattacaccagatgaatgtaaaattgggattatgccgggaagtattcacaaaagaggaagcgttggaattgtatcaaggtcaggaacattgacatatgaagcagtagcacaaacaactgaaaatggacttggtcaatcaacttgtattggtattggtggtgatcctattaatggtacaaattttatagattgtttagatttatttttaaatgatgatgaaacagaatctattttaatgattggtgaaattggaggaacagccgaagaagaagcggctgactttataaaaaatcataagattaaaaaaccaatagttggatttatcgctggaattactgctcctccaggaaggagaatggggcatgctggtgccattatatcaggtggcaaaggtggagctgaagataaaataaaaaaaatggaagaatgtggtattatagttgctaaatcaccatcaattattggaaaaactttatttgataaactgtctaattgaa

SEQ ID NO: 310394 - DNA, 1098 bp, Unknown
  Bacterial polypeptide expressing nucleotide sequence isolated from the Sargasso Sea
cagcagacactgctcaaggtgctgtagaagccgctgaccgaattggcggaaacgagtgggtagttaagtgtcaggtacacgcgggcggtcgcggtaaagctggcggtgtaaagctagttaaaaacaaagacgacattcgcgctttcgctgaaaactggcttggcaaaaatttggtgactttccagactgacgaaaacggtcagcctgtgagcaaaatcctagttgaatcttgcacagatatcgctaacgagctttaccttggtgcagtagttgaccgtacaacccgtcgcgttgtattcatggcatctactgaaggtggcgttgagattgaaactgttgcagaagaaactccagagaaaatccttaaagctgaaatcgacccaattgtaggtcctcagccttatcaagcgcgcgaaatggcgtttgctctaggtctttctggcgtacaaatcaagcaattcactcaaatcttccttggcctagctaagatgtttgaagagcttgatgttgcgcttatcgaaatcaacccgctagttatcaaaactgacggtaacctacactgcctagacgcgaaagtaggtatcgatggtaacgcgctatatcgtcagcctaagctgaaagatatgcaagatccttcgcaagaagatgcgcgtgaagctcatgctgctcagtgggaactaaactatgttgcgctagacggtaatgtaggttgtatggttaacggtgcaggcctagcaatgggtactatggacatcgtaaacctacacggtggcaagccagctaacttcctagacgttggtggcggcgcaactaaagagcgtgtagctgaagcatttaaaatcatcctttctgatgacaatgttaaagcggtattggttaacatcttcggtggtatcgttcgctgtgacatgattgcagaaggtatcattggtgcggttaaagaagttggcgtagaagtacctgtagttgtacgtcttgaaggtaccaatgcagagcttggccgtgaagttctagcgaactctggtctagatatcattgctgctgaatcgctaactgatgcagcgcagaaagttgttgctgcagcggagggcaaataat

SEQ ID NO: 310395 - DNA, 673 bp, Unknown
  Bacterial polypeptide expressing nucleotide sequence isolated from the Sargasso Sea
aatgtctgtattaattaataaagatactaaagtaatttgtcagggtttcactggcggtcagggtacttttcactctgagcaagcaattgcttacggtacgcaaatggttggtggtgtaacaccaggtaaaggcggtactgagcacctaggtcttccagtattcaatactgtacgtgaagcggtagaagcaactggcgcaactgcaacagttatctatgtaccagcacctttctgtaaagattcaattgttgaagctgcagatgcgggtatcgagctaatcgtatgtatcactgaaggtatcccaacgctagatatgctttacgttaaagaatacgtagaagcgaaaggcgttcgcatgatcggtccaaactgcccaggtgtgatcactcctggagagtgtaaaattggtatcatgcctggtcacatccacaagcctggtaaagtaggtattgtttctcgctctggtacacttacgtacgaagcggttaagcaaaccactgacgaaggttttggccagtctacttgtgttggtatcggtggcgacccaattcctggttcaaacttcatcgacatccttcagatgttccaagacgatccacaaactgaagctatcgtaatgatcggtgagatcggtggtacagctgaagaagaagctgcagcgttcattaaagct

SEQ ID NO: 310396 - DNA, 858 bp, Unknown
  Bacterial polypeptide expressing nucleotide sequence isolated from the Sargasso Sea
tatgaaaattcatgaataccagggcaaggaggtttttaaaagcttttcaatccccgctcctagaggatatttaattaaagacattagtagcgctgaaaagattattaagaaagctcatgatgaattcaaatccgataaagttgtaatcaaggctcaaattcatgctggcggccgtggaaaaggaggcggcgtaaaagtggctaatggcctggaatctgcattaaaatatgtaaaggaaatgcatggtatgcaacttgttactcatcaaacgggctcgagtggacaaaaagtaaggaaagtttatattgaggaagcttctgaaattaaaaaagagttttactgcgcaataactttagacagaaatttaggtaaagatgtttttatggtttcgactgaggggggcgtagaaattgaaaaagttgcagacgaaaccccagaaaaaattgtaaaaacctgggttgatcctcttattggaatgaaatcataccaagcgcgcaagctagcatttggccttaaacttgagggagatgcatttaaagaatcagtaaaactttttattaaactctaccaatgctacatgaaaaccgatgcttcattggttgaaataaacccattagttttaacagccgatgaaaaaattattgctctagatgcaaaatttaattttgatggaaatgccctgtttaggcagaaagatattttaaaattgcgagatcttgatgaggaagatcctactgaaatagaagcaagcaaatttgatttaaactatattaagctagatgggaacgttggctgtatggtaaacggtgctggtctagcaatggcaacaatggatataattaaaatagcaggtgggga

SEQ ID NO: 310397 - DNA, 871 bp, Unknown
  Bacterial polypeptide expressing nucleotide sequence isolated from the Sargasso Sea
atgggaattctgatcgacaataatactaaactgctggttcaagggatcaccggatcccagggacaactccacacccgtggatgccgggattatggaaccaacatcgttgccggtgtcacccccggaaaaggcggtcaggattttgaaggaatcccgattttcaataccgtccaggaggccgtgaatgctaccggggccaatgcgagtatgatctttgtcccgcctccttttgctgctgatgcggtaatggaagctgcaggagcaaagattcctctgattgttgccatcaccgaaggggttcctgtgaccgacatggtccgcgccgtcgattttgtcagacgacagggggtcaggctggtagggcctaattgtccgggggtgatcacgccgggacagtgtaaaatcggaatcatgcccggaccgatccatgaacccggaaaagttggggtggtttcccgctcaggaacattgacttacgaagcagtcgggcaactgggacgtgcaggccttggacagtcaagctgcatcggcatcggtggggatccggtcaatgggaccaatttcattgattgtctgcaaatgttcgaagaggactcccagactgaagggatcgtgatgattggagagatcggtggagatgccgaggagcaagcagccgaattcgtcaaacaaaacgtcagcaaacccatcgtcagcttcattgccgggcaaaccgcacctccaggaagaaggatgggacatgccggcgcgatcatttccggaggaaagggaactgcctcggagaagatggcagccctccaggcggcgggaatccatgtcgtgaaaactcctgcggaaatcggcagccgaatgcgtgaagtgttgggttaaa

SEQ ID NO: 310398 - DNA, 622 bp, Unknown
  Bacterial polypeptide expressing nucleotide sequence isolated from the Sargasso Sea
atagatgcatctattgaattaattgtttgtataagcgaaggaataccaattctagatatgttaaaagtaaaaaaaaaattacaaaattctaaatccagattaattggtccaaactgtccaggaataattacacctaatgaatgtaaaattggaataatgccaggcaatattcataaaaaaggttcagttggaattgtatcaagatcaggaacacttacctatgaggcagttgctcaaacaaccgagaacaatcttggtcaatcaacatgtataggaattggtggtgatccaattaatggaactaatttcattgattgccttgatttatttttaaatgacgatcaaacagagtctatactaatgattggagaaataggtggaactgctgaagaagaagcagcagaatttgtaaaaaatcacaaaataaaaaaaccaattgttggatttatagctggagtaactgctccaccaggaagaagaatgggacatgctggtgctattatttcaggcggcaaaggaaatgctgaagaaaagataaaaaaaatgcaagattgcggtattactgttgctaattctccctctgatattggaaaaacgctactaaataaattgtctaattgat

SEQ ID NO: 310399 - DNA, 881 bp, Unknown
  Bacterial polypeptide expressing nucleotide sequence isolated from the Sargasso Sea
aatgaatatacacgaacaccaggcaaaacaaattttaaaaaaatatggagcaactgttcctaatggagtttttggactaacagttgaagaattagttgaaaaatcaaaatcattaaaaactaataaatatattttaaaagcacaaattcatgcaggaggcagaggtaaagctggtggtgtaaaaatacttgatagtattgaggaattaacaaaggcatcaaaagaaatgatgggtaaaaaactcgttactcatcagacaggtcccgaaggtaaggttgtcagaagactatatgtggaggaggcttctaaaatagagaaagaattctatttatcttgtttagttgacagagctagttcaaaaattgcatttatctcaagcgatcaaggaggagtagacatagaagaggtagcaaaaaaaaatccagaaaaaattaatactacaaaaattaattattctaaagaaatctcaaatgaagattgtgaaaatattataagaatctttaatttaaaaaataaagaaaaagatcaagcaaaaaatttaataaaggcaatttacaaaatgtttgtaagtactgatgctagtatggttgaaattaatcctttaattttgacagaggaaggaaatatagtttgtttagacgcaaaagttaactttgatgataatgccttgtttaaacatcctgagatagctgatcttagagatttgagcgaagaagatccaattgaaatagaagcgagtaaacatgatttgtcttatattaaattagatggaagtataggatgcatggtgaatggtgctggcttagctatggctacaatggatatcataaaactttatggagaagaacctgctaattttttagatgttggaggcggagcat

SEQ ID NO: 310400 - DNA, 1186 bp, Unknown
  Bacterial polypeptide expressing nucleotide sequence isolated from the Sargasso Sea
aatgaacctccacgagtaccaagctaaggaactcctaaaaaaatttgaccttcctgtgcctaagggattagtttttattgagaatctatcacaaatagaagaaaatttagaaactttaaaaggccctccgtgggttattaaatctcaaattcatgctggaggaaggggggctggaaaatttaaaaataattttaatgatatgggaggggtacaagtagttttagaaaaaaataaggtttttaaaattgcagactcaatgattaacaatgttttgataacaaaacaaacaggccctaaaggaaaggaagtaaaacgtatttacattgaagaaggttgtaaaataaaaaaagagttttatctcagcatcttaatagatagaaatacctctcagcctatgatgatgatttcagcatctggaggtatggatatagagaaagttgcagaatcaaatccagatgaaatcgattatatttacttttctgatttgacaaatattgtcttaaacaaaaatttaataaaaactttaggtatttcagaaaagcaatttgaagaactgaatactatagtaaacaaactaattaaattatttataaatgtagatgcaagcagcattgagatcaatcctttggttttaaatgatgaaggacattttattttattagattcaaagataagcttagatgataatgcgttatttcgtcatccagagttaaacgaattacaagatataagtgaagaagatccattagagttagaagctactaaaaataatatgaactatgtaaagttagatggttcaattggatgcatggtaaatggagctggtttagcaatggcaactatggatttaattaaacagtttggggaagagcctgcaaattttttagatttaggaggaactgcaaataaagaaagagcagtaaaaggatttaaaattattcaatcggattcaaatgttaaatcagtacttattaatattttcggaggaatcattcattgtgacatgatagcaaatggtattatagaagcagtcaaggaactaaattttaaattaccaattgtagtacgttttcaaggaacaaactctaaagaaggaagagatattattaataagtcaaacttaggaatgacttcaattgatgattttactgaagcagcaaaaaaagtagtagagttagcaaattaa

SEQ ID NO: 310401 - DNA, 877 bp, Unknown
  Bacterial polypeptide expressing nucleotide sequence isolated from the Sargasso Sea
tatgtctgtattaattaataaaaatacaaaagtaatttgccaaggttttaccggatctcatggtacttttcattctgaacaagcaattaggtatggcacaaatttagtaggtggtgttacaccaaaaaaaggtggtcaaaaacatttagatagacctgtttttaatagtgttatggaagcaaaaaaaacagttggcgttgatgcaacaatgatttatgtaccagcaaaatttgcagctgaagcaattatagaagctgtagatgcatctatagaactaatagtatgtattactgaaggtattcctgttcaagatatgcttaaagttaaacaaagattaaataaatcagaaagcagattaattggacctaactgtccagggataattacacctgatgaatgtaaaattggaataatgccaggaaatattcataaaaggggatcagttggtattgtatctagatcaggaactttaacttatgaagctgtagctcaaactactgaaaatggtttaggacaatctacatgtattggtattggtggtgacccaattaatggaactaattttatcgattgtttagatttatttttaaaagatgaagagaccgagtctattttaatgataggtgaaattggaggtactgcagaggaagaagctgctgaatttattctaaatcataaaattaaaaaacctatagttgggtttattgctggaataacagcgcctccaggacgaagaatgggtcatgcaggggcaattatttctggtggaaaaggtggagcagaacataaaataaaaaaaatggaagaatctggaattactattgcaaaatctccatcaataattggaaaaactttatttaataaactgtctaattga

SEQ ID NO: 310402 - DNA, 883 bp, Unknown
  Bacterial polypeptide expressing nucleotide sequence isolated from the Sargasso Sea
aatgtcagtaatagttaacaaagatacaaaagttatttgtcagggtttcactggatcacaagggacctttcattcagaacaggcaattaaatatggcactaacatggttggtggagttactccaaaaaaaggaggaactgagcacttagggttaccagtatttgatacagtaaaagaagctaaagataaaacggaagcaaatgccactgtaatttatgttcctcccccatttgccgcaaaagcaattttagaagcaatagatagtgagatggagctaatagtttgtataacagagggaattcctgttatggatatgctagaggtcaaagataaattaagatcttccaaatcacgcctcattggccccaattgtccgggagtcataactcctgatgagtgtaagattggtataatgccagcgcatattcatcaaaagggaaatgttggaattgtatctaggtctggaacactaacttatgaggcagtttatcaaacaactgtggaaggtcttggacaatccacctgtattggaatagggggcgatccagtgaatggaaccaactttattgattgtttggaacttttcttatccgatccagaaactgagtcaataatcatgattggtgaaattggtggttcagctgaggaagaagcagctgaatttttgagaaaagaaaaggtaaaaaagccaaccgttggatttattgcaggaacgtcagcccctccaggaagaagaatgggacacgctggagcaattgtatctggagggaaaggtggagcagaagataaaattgaagccatgaagagtgctgggattcaaatttcaaattctccagcagctttaggatcaactttacttgaggtattaaagaatcaaaactaa

SEQ ID NO: 310403 - DNA, 877 bp, Unknown
  Bacterial polypeptide expressing nucleotide sequence isolated from the Sargasso Sea
atgagtatattggtaaataaagaaactagattaattgttcaaggtttcaccggatctcaaggaacgcttcattcagaacaatctatagaatatggaaccaatattgtcggtggtgttactccgggaaaaggtggccaacaacatttaggcaaacctgtatttaattctgttaaggaagcagttgaggctgaagagccaaatgcttctataatttttgtaccagcaaagttttgtaaagattcaataatggaatctgcagaagcaggtattagattaatagtttgcattactgaaggcgttccaacacttgatatgctagatataaaaaaatatgtagataacaagggaattcgattaattggacccaactgccctggtgtaattacaccaggggaggctaagcttggcattatgcctggtaatattcatttacctggatcaattggaattatttcaagatctgggactctaacttatgaagctgtaaaacaaactacagatttaggttttggacaaagtagctgtgttggtattggaggcgacccaatacctggatcatcttttatagatatccttaagttattcgaagaagatcaacaaactgaagcgatagtaatggttggagaaattggaggaacggctgaagaggctgctgctgaatacatcaaaaataatataacaaagccagtaatttcatatattgctggacaaactgcacctgctggaaaaagaatgggacatgctggagcaataattgcaggaggaaaaggaactgcaaaagataaaatactcaaattaagagaatgcggtgttcatgttgcagataatttagtcgagattggaagcaaggttgaagaaattcttaagaataattaat

SEQ ID NO: 310404 - DNA, 535 bp, Unknown
  Bacterial polypeptide expressing nucleotide sequence isolated from the Sargasso Sea
tctaattcaaggttaattggtccaaattgtcctggaattattacacctggagaatgcaaaattggaataatgcctggaaatattcataaaaaaggctcagttggaattgtgtctaggtctggaactttaacttatgaagctgtagcgcagactactaataacggtttaggtcagtcaacttgtataggaattggtggcgatcctataaatggaactaattttatagattgtcttgatttgtttttaaatgatgaggaaacaaaatctatattaatgataggtgaaataggtggaactgctgaagaggaagcagcagaattttttagagaccataaattaaaaaaacctatggttggatttatagctggaattacagctccaccaggaagaagaatgggtcatgctggagcaataatttctggaggaaaaggtggagcagaaagtaaaataaaaaaaatggaagattgtggcataacaattgcaaaatcgcctgcagaaattggtaaaacactaataaataaattgtctaattgaa

SEQ ID NO: 310405 - DNA, 446 bp, Unknown
  Bacterial polypeptide expressing nucleotide sequence isolated from the Sargasso Sea
ttcagcagaaattgaagccagtaaatatgatttagcttacattaaattagatggaagtattggatgtatggttaatggagcaggattagcgatggctacaatggacataataaaactatacggtaaagaaccagcaaattttttggatgttggtggaggagcttcaaaagaaaaggtctcagcagctttaaaaataattttatcagataaaaatgttaaagggatattaattaatatttttggtggaatcatgagatgtgatgtacttgctcaaggagtagtagatgctgcaaaagaaataaatattagtgtacctcttgttgtgagattagcaggcacaaattttaaagaaggaaaagaaatactagaaaattctggtgtaaaattaatttcagcagaaaatcttgatgatgcagcaaaaaaaattgttgaggtgataaaataga

SEQ ID NO: 310406 - DNA, 1192 bp, Unknown
  Bacterial polypeptide expressing nucleotide sequence isolated from the Sargasso Sea
atgaatctacacgagtatcaaggtaaagaaattttagagaaatttaatgtaaaagttcagaagggttatgtagctgataatatagaagatgctgttaagtgtgctcaaaaaattcaaaaagaaacaggtactggtatttttgtaattaaagctcaaattcatgctggtggaagaggaaaaggtggtggtgttaagattgcaaaaagtctagaagaggtaaaaaaaatagcttcagaaatccttggaatgaatcttgttacacctcaaactcctcctgagggtaagttagttaggaagattttaattgcagaggatgtttattatgatggtgaatcagaaagatctgagttttatatttccgtattattaaataggtccagttctaagaatatgataatttattctactgagggtggagtagatattgaaactgttgcagaaaaaactccaaatctgatctttcgagaagaggtagaatctgaaaacggactactgccttttcaggcaagaaaaattgcttttaatctaggtctttcaggagaggcttttaaaaatatggtgcagtttattacttctttgtatcaagcttatcaaatgtctgatgcctccttatttgaaataaatccagttttaaaatcatcagataataaaattattgctgttgattcaaaagtaagtcttgatgataatgctctttttcgtcataaagagtatgaagcaatgagagatcttgatgaagagaacccggtagaaattgaggcaagggctgaggggttgaattatgttgatttagatggtaatgttggttgtatggtaaatggtgctggtttggcaatggctactatggatcttattaaacttgctggaggtgagccagcaaactttctagatgtagggggaacagctgatgcggatagagtagaaaaagcatttagattaatattaaatgataataatgtaaaagcaatactagttaacatatttggaggtatagtaagatgtgatagggtagctgagggtattgttttagcatataagaaccttaaacaggtaaatgttcctataatagttagacttcaaggtacaaattcagcagaggcaaaggaaattatagataattctgggctaaatgttttgtctgcaattggctttgatgaagctgcgaaaaaggttcaatctgctataaaatgac

SEQ ID NO: 310407 - DNA, 562 bp, Unknown
  Bacterial polypeptide expressing nucleotide sequence isolated from the Sargasso Sea
ttagtgatcacaaaaaacggagacctgcattgtttagatgcaaaaattaatattgattcaaatgctctatttaggcaaccagaattaatggaaatgcatgatgaatctcaggaagatcctcaagaagcagaagctgcgaagcatgacttaagttatgtatctttagatgggaacattggatgtatggtcaacggtgctggtcttgcaatggggaccatggacacaattaaattttttggaggcaatcccgcaaattttcttgatgttggtggtacggcaactcaagaaagggtagctaaagctttcaaaattatactcaaagatcctgaagtaaaagttgtgttggtaaatatttttggtggaattgtcagatgcgatcttattgctgagggtatagttgctgcaattaaagaagtaggtattgaagtcccagtagttgtgagacttgaaggaaataatgctgaaattggagccaagattcttgaagaatctgatattaaagttgaaagcataaatgatcttggatctgctgcaaagaaatctgttgagcttgcaaaatgag

SEQ ID NO: 310408 - DNA, 496 bp, Unknown
  Bacterial polypeptide expressing nucleotide sequence isolated from the Sargasso Sea
aatgtttagaagagataaagtttctgaattaagagataaaacccaagaagatgaaaaagaggtttatgcgtctgatagaggtttaaattatgtgagtttagagggaaatataggaaatatcattaatggagctgggctagctatggcatctatggatatgattaaattagctggaggagaaccagcaaactttcttgatgtaggtggaggagcaacaccagaaaaaatagttaaagcatttagattaattactatggataaaaaagtaaaagttatattagtaaatatttttgctggaataaatagatgtgattgggttgctgaaggaatagtccaagcacttgaaaaaatagaggttaaagttcctttagtaattagattagcgggaactaatgttgaaaaaggaaataaaattcttcaagatagtaaactagattatattgaagcgaataccttagaggatgctgcaaataaagcagttgcagcactaaaataa

SEQ ID NO: 310409 - DNA, 877 bp, Unknown
  Bacterial polypeptide expressing nucleotide sequence isolated from the Sargasso Sea
atgagcgtattagtaggaaataatactcgcttaattatccaaggaattactggtacagaaggttccttccatggtcagcaaatgattgattatggcacgaatatcgtagctggcgtaactcccgggaaaggtggtcaagaagctttaggtgtacccgtatttaattccgttcaagaagcagtaaaacatcaaggagcaaatacatccgtcatatttgtcccacctaaatttgctgctggggctgtaatagaatcaatagatgctgatttagatttaattgtctgtattactgaaggaataccagctgcagatatggtaaaagtaaatcatgccttagaaaataataatacgcgtcttattggtccaaattgtccaggcatcataactcctggacaagctaaaattggaattatgcctggatttattcataccccaggaagtattggtatcatgtccaggtctggtactctcacgtatgaagctgtacatcagataggagctcatggtttagggcagagtacagtaattggtataggtggagatccaatcattggaacaacatttattgatatgctacaactttttgccgaagatgatgaaacaaatggtgttgtaatgatcggagaaattggcggaactgcagaagaagaagctgcacaatgggtagtagataataatttttctaagcccgtagtctcatttattgctgggcaaacagctccacccggtcgccgtatgggtcatgctggtgcaattattgcgggaggaaaaggaactgcaaatgaaaaaatgaccgagttaaaaaaagcaggtataaccgttgttgaaagtccagctgatattggacaagcaatggtggaagttttaaataagtaaa

SEQ ID NO: 310410 - DNA, 957 bp, Unknown
  Bacterial polypeptide expressing nucleotide sequence isolated from the Sargasso Sea
tgccatcaatattaggaatgaatttggttacacaccaaactggcccagaaggaaagaaagtccaaagattattaatcgaaactggaatcgatattgctaaagaattttatgctggtattgttcttgaccgaaaagagaaaaaatttgtattcatggtttctactgaaggtggcgtagagattgaaaaggtagcagctgaatctcctgagaaaattattaaagagtggattcatccagaagatggactaacgaaagatcaagcaaaaagtttatgtgacgccctcagcttgaaagggattcagcaagattctggaattgaaattttcactgcattatggaaggcatttaatagtcttgattgttctctaatggagattaatccattagttttaactaaaaaagatgaagtcattgccttagatgcaaaaataaattttgatggtaatgggttatttcgtcatccagaattatctgaattacgagatgaaacagaagaagaccctgctgaagcagaagccagttcatacaatctaaactatataaagttagatggaaatgtgggttgtatggtaaatggagctggattagcaatggggactatggatattatcaaacttaaaggtggtgaacctgcaaactttttagatgtaggtggtgtagcaaatcctgaaactgttgcaaatggatttaagattattttatccgatcctaacgtaaaatctattttaatcaatatttttggcggcattgtgcgatgtgatcgtgttgcccaaggtgtaattaatgcgatggaaaccataagtgttaatgtgcctgttgtcattcgattagagggtactaatgctaaagaagcatcaagtttattaaacaaatctccacttaattttattgtcgcaaacagcttaagtgatgcagcagaaaaagcagtaagcgctacaaatatggaatcaaaatgag

SEQ ID NO: 310411 - DNA, 1084 bp, Unknown
  Bacterial polypeptide expressing nucleotide sequence isolated from the Sargasso Sea
atgaatatacacgaacatcaagcaaaacagattcttaagaaatatggagcttctgttccaaaaggtgtttttgctttaagtgttaatgaacttatacaaaaagcaaaaactttaaaaactgaaaaatttgttttaaaagcacaaattcatgctggcggaagaggtaaagccggaggtgttaaaatattaaattctatagaagagctaaaggtatcagcagaagatatgatgggtaaaattttaattactcatcaaactggaccagaaggtagaaaagttaaaagactttatgtagaggagtcatctaatattgataaggaattttatttgtcttgccttatagacagagctagttcaaaaattacatttatttcaagtgatcaagggggaatgaatatagaagaagtagctaagaaaaatccagaaaaaattttaaatacaaaagttaattttaaagatgaaatatcaaaggaagattgtgaggagataattaaaatttttgatttaaataatgatattaaaaatgatgctattttacttattaaatcaatttacaaaatgtttataagcacaaatgctaatatggttgagattaacccattaatattaacaaaagaaaaatcacttgtttgtttagatgcaaaagtaaattttgacgacaatgctttgtttagacatccagagattatggaattaagagatttaaatgaagaagatccaactgaaatagaagctagtaaacatgatcttgcttacataaaattagatggaaatattggatgtatggttaatggcgctggattagcaatggccactatggatataattaaattatatggagaggaaccagcaaattttttagatgttggaggtggtgcctctaaagaaaaagtttcagcagcatttaaaattatcttatcagataaaaatgttaaaggaattttaataaatatttttggtggaattatgcgatgtgatgttttagctcaaggagtaattgatgctgcaaaagaaataaaaataaacgttcctttagttgttaggcttgcaggtacaaattttaaagaaggaaagaatatattag

SEQ ID NO: 310412 - DNA, 1018 bp, Unknown
  Bacterial polypeptide expressing nucleotide sequence isolated from the Sargasso Sea
attcatgcaggaggtagaggaaaggcaggaggagtaaaaattgttgataatatagctcttttggaagaggaagcgaaaaaattgtttggcagaacattagttactcatcaaactggacccttaggaagagaagtgaaaagattatatgttgaaactgcatcagaaatagaaaaagaattctatttgtcttgtcttgttgatagagcttctgcgaaaattgcatttatttccagcgatcagggtggaatgaatattgaggaagttgctgtaaaatcaccagagaaaataataactactaaagtagattttaatgaaagtatttccgaggaagattgtaacaatattattaaaatttttgatttagatagcgatgcaagtaaacaagcaattaatttaataaaatcaatttataaaatgttcattgatacagatgcaaatttagtagagataaatcctctcattttaaccaaaaaaaacaaaattgtatgtttggatgcaaagatgacttttgacgaaaatgcattatttaaacatccagaaattcagaaacttagagattttaatgaagaagaagaaactgaaattgaagcaagcaaacatgatctagcatacattaaattggatggaaatataggatgtatggtaaatggtgctggattagcaatggctaccatggatattattaaattgtatggagaagaacctgcaaattttttagacgtaggcggtggcgcatccaaagaaaaagtttcagctgcatttaaaattatcttatctgacaaaaatgtaaaaggaatactaataaatatttttggaggaataatgagatgtgatgtgcttgctcaaggtgttatagatgcggcaaaagaaataaaaataaaagttcctttagttgtgagactagcaggcacaaatttcaaagagggaaaagaaattttagataattcgggattagagattatttctgcaaatgatttatctgatgcagcaaaaaaaatagtcgaggctataaaataat

SEQ ID NO: 310413 - DNA, 883 bp, Unknown
  Bacterial polypeptide expressing nucleotide sequence isolated from the Sargasso Sea
atgtctgtgttgattaacaaagatacaaaagttatttgtcaaggatttactggaggacaaggaactttccattcagagcaagccatagcatacggaactaaaatggtcggaggagtcaccccaggtaagggtggcactaaacatctagatcttcctgttttcaatactgttcaagagtgcgttgaagaagtaaatcctgatgcaacagttatatatgttcctcctccttttgcagctgattcaatattagaagcaatatcatcaaaaattcctttaataatatgtgttacggaaggtataccagttcaagatatgattaaagttaaacagtttttgaaacagtcaaaatctagacttattggtcctaactgtccaggtgtaattacccctggtcaatgcaaaattggaattatgccaggacatatccattctcctggcaaaataggaattgtctccagatctggaacactaacctatgaggctgttgcacaaaccacaggtgctggtttagggcaatcaacatgtattggtattggtggtgatccaattaatggcacaaattttatagattgcctagatatgtttcttaatgatgagcaaacagaggcaatattgatgattggtgaaattggcggaagtgccgaagaagaagcagcaaatttctttaaaaatcataaaattcaaaaaccaatagcaggttttattgctggaaagactgctcctcctggaagaacaatgggccatgccggtgcaatagttagtggtggaagtggaggtgcagatgctaaagttaaagtcatgagtgactgtggttttatcatgtctgaatctccatcaggtttgggtgaagcagttcttaaagcaatagaagaatggaaataac

SEQ ID NO: 310414 - DNA, 1066 bp, Unknown
  Bacterial polypeptide expressing nucleotide sequence isolated from the Sargasso Sea
aagctagagaaactcgggggatctaaatgggttgttaaagcacaaatccactctggagcaagaggaaaagctggaggaattattatttgtaatagtgaattggaagttgctcaagcgacagataaacttttaggtaaaaaactagtaacaaatcagacgggacctgaaggtaagattgttaataaggtttacattgaagaggcaactgatattaaaaaagaattataccttggacttgtttttgatagaagctctgagtctataatggtagttgcttccacagaaggtggaatgagtgttgaggagatttcaaaacaaaaacctgaatcaataattagatcaaaaattgaggtagctgttggtatgcaacaatttcaagcaagagaaattgcttttggtcttggaattgagcctaagctgatctccagaatggcagaggcaataacaggctgttatagagcttttagtgagctagatgctactatggttgaagtaaatccgatggtaatttcaaatcaagagcaaattttagctttagattgtaaaatgagttttgataataatgcattatttagaagaaaccaaatttcagaattaagggataagacccaagagaatgcaagtgaagtttatgcatctgataggggtcttaattatgtaagtctagatggcaatattgggaatattattaatggagcgggtttagcaatggcttccatggacatgataaagcttgcaggcggagaaccagcaaatttcctagacgtcggtggaggagcaacacctgaaaaaatcgtaaaagcatttaagctaatctcaatggataaaaaagtaaaagttattttagttaatatctttgctggaataaatagatgtgattgggtggcagagggaatagttcaagcgcttcaaaaaatagaaataaaggtaccactagtaattcgcttagccgggacaaatgtcgaaaagggaaataaaatacttaaagaaagtaaaattaattatattgaggctaacacattagaggatgcagcaaataaagcagtaaaggcgttaggaaaataaa

SEQ ID NO: 310415 - DNA, 646 bp, Unknown
  Bacterial polypeptide expressing nucleotide sequence isolated from the Sargasso Sea
attgatctcaagagctgcaaatacaattattggttgctataaagcttttagtgagcttgatgcgacaatggttgaagttaacccattagttgtatcacaccaagatgaaatattagcattagattgtaaaatgagttttgataataatgcaatgtttagaagagacgaaattgcagaacttagagataaaacacaagaaaattcaaatgaagtttatgcttctgacagaggaatgaattatgtaagcttagatgggaatattggtaatattattaatggtgcaggcttagcaatggcttcaatggatatgataaaacttgctggtggtgaacctgcaaattttttagatgttggcggaggtgcaacacctgaaaaaatagttaaagcttttaaattaatctctatggacacaaaagttaaggtaatattagttaatatctttgcagggattaacagatgtgattgggttgcagaaggaattgttcaagctttatcaaaaattgaaattaaacatcctttagttatacgtttagctggaactaacgtcgaaaagggaaatgaaatacttaaaaaaagcaatataaattacattgaagcatcaactttagaagatgcagcaaataaagcagtgaaggctcttggataa

SEQ ID NO: 310416 - DNA, 1165 bp, Unknown
  Bacterial polypeptide expressing nucleotide sequence isolated from the Sargasso Sea
aatggatattcacgagtatcaggcaaaaaaaatactttctggttttggtgttacaatacccagaggtggtattgcttacagtcctgaaaatgcagagaataaagctagagagctaggtggatctaagtgggtagtaaaagctcaagttcattctggagccagaggaaaagctggtggaataattatttgtaatagttctttagaagttgcacaagcagctgacaaactccttggaaaaaaattagttacgaaccaaactggtccagaagggaaaataactaatagagtttatattgaagaagctacagatattaaaaaagaattatatttgggtttagtttttgatcgaagttcagaaagtatcatggttgtagcgtctacagaaggaggaatgagtgtcgaagaaatttctaaaaagaaacctgaaactataattagatctaaaattgaagtagctgttggaatgcaaaaatttcaagctagagagatagcatttggattaaaaattgaacctaatttaatagcaagagcggcagatacaattattggatgttatagagcttttagcgagttagatgcaactatggttgaagtaaacccattagtaatatcaaatcaagatcaaatattagctttagattgtaaaatgagctttgataacaatgctttattcagaagaaatcaagtttctgaattaagggacaaaactcaagagaaccccagtgaagtatatgcatccgatagaggtcttaattacgttagccttgatggaaatattgggaatataattaatggcgcaggtctagcaatggcttcaatggatatgattaagttggcaggtggtgaaccagcaaacttcttagatgttggtggaggagctacacctgaaaaaatagttaaagcttttaaattaatttcaatggatgagaaagttaaagttatacttgtaaatatttttgcaggtataaatagatgtgattgggtcgctgaaggcatagttcaagcattagagaaaatagatataaaagttccaatagtaataagattagctggaacaaatgttgaaaaaggaaacaaaatattaaaagaaagtaaaataaaatacattgaagcaaacactctagaggatgctgcaaataaggctgttaaagcattaggtaattaa

SEQ ID NO: 310417 - DNA, 1165 bp, Unknown
  Bacterial polypeptide expressing nucleotide sequence isolated from the Sargasso Sea
tatggatatacacgaatatcaagcaaaagaaatattatcaaaatacaatgttccagttctacctggttcagttgcattaaagccttcagaggctgtaactgcttttgatcaattgggaactgaaaaatgtgttgtaaaagcacaagtacattcaggtgcacgaggaaaagccggtggaataaaggtctgttcgtcaaatgaagaggttgaagatgctgctgaaaaactattaggaagtaaattagtcactattcaaaccggaagccaaggaaaattaattgaaaagctctacatcgaatctggctgtgatatagaaagagaaatataccttgcgtttgtaatggatcgtgcaaagcaaagaatatctattgttgcatcagctgaagggggtatgacaattgaagagctcgctgttgaaaaacctgacgctattaagaaagttgaaattgatcctgttgttggtttaacgggatttcaggctagagatttagtttttgccttagatatcccaagtgagtgtattaaagatggtgtgaaaatgttaatgggtctatataaggcaatggtcagtttagatgcaaatatgattgagattaaccctttagtaatcaccgcagataaaaaattgttcgctctagatgctaaaatgagttttgatgataatgctttatttagacacgaagatataaaagttttgaatgacaatagtcaaaaagatccaagggaagttgccgctcaagaacatgatctaagttatgttggtttggaaggaaacattggttgtatgataaatggtgcgggcttagctatggcaacaatggatatgataatgcattgtggtggtaagccagcaaacttcttagatattggaggaggagcatctcctgaaagagttgcaaaagcatttgaattagtacttcaagataaagaagttaaagcgatgctagtaaacatatatgctggtattaatagatgtgattggatagctgaaggtatagttaaggcggtttcaagtatgtctctatctgttcctctcatagtcagactttcaggaacgaatgttgaaaagggaactaaaattataactgatagtggtcttccaataatacttgcggatacattgaaagatgctgctgaaaaagctgtagaggctattagctcttaa

SEQ ID NO: 310418 - DNA, 716 bp, Unknown
  Bacterial polypeptide expressing nucleotide sequence isolated from the Sargasso Sea
aatgaatatacacgagcatcaagctaagcaaattttaaaacaatttggtgcaacaatacctgatggtgtttttggtttcacagttgaagagcttttagaaaaatgtaagtcattaaaaacagaaaaatatgttttaaaagcccaaatacatgcgggtggaagaggaaaagctggtggcgtcaaaattttagataatttagatgagcttgaaaaatcagctaaagagcttctaggaaaaaaacttgtaacacatcaaacaggaccagagggaagagaagtaaaaagactttatgtagaagcatcctcaaatattgcaagtgaattttatttatcatgtttagtagatagagctacatcaaaaattgcatttattactagtgaccagggtggaatggatattgaagaagttgctataaaatcaccagataaaatattaacaaataaagttgaacttaatgatgagatttcaaatgaggagtgtgaaaaaattataaagatatttaatttagatggtaattctaaaattgaagctatttctttaattaaatcaatttataaaatgtttttaaaaacagatgcaaacatggttgaaataaatcctctcatattaacaaaagagaaaaaaattgtttgcttagatgcaaaagttaattttgatagtaacgctttgtttagacatccagaaattcaagagctcagagatttaaatgaggaag

SEQ ID NO: 310419 - DNA, 1114 bp, Unknown
  Bacterial polypeptide expressing nucleotide sequence isolated from the Sargasso Sea
aatgaatttacatgagtatcagggtaaggctctctttgctgaatacaatttacctatctcaaaaggtaaaatcatttttaaagcagaagatgtaatagaagcttgtaatgagataggtggatcaaaatgggttgtaaaagctcaagttcatgctggtggaagaggaaaggcaggtggagttgaattaatagatgatcccaatgagggagttaaatttgctaataaatggcttggcaaaaatttaatcacatatcaaactgataaagagggacaaccagtgaactcaattctcatagaagagtgtactgaaattgtaaaagaactatatctgagtgcagtcattgatagagaatcacaaaaaatagtttttattggctcttgtgagggcggagtaaatattgaagaagtagctaagaatgcaccagaaaaaattatttatcagggtgtaacttatggagataaatcattacctgaagatgctaccaatattgcaaaagtcttaaaactagatgaaaaacaaaccgatcaatttttgccgataatagagaatctcttaaggctttttattgaaaaagatctcagtttgttagaaataaacccattagtaattaatgagaaaggagatttgcattgtttagatgcgaaaataaacatagactcaaatgctttatatagacaaccagaacttcaagatatgtatgatgagtctcaagaagatcctcaagaggcagaagctgcaaaaagtgatttaagttatgtgtctcttgatggaaatattggatgcatggtaaatggagctggattagctatgggcacaatggatactattaaattttttggtggtaatccggctaacttcctagatgttgggggtacagcaacccaagagagagttgcaaaggcttttaaaataattttaaaagatcccgaagtaaaagtagttttagtaaatatttttggaggcattgttagatgtgatttgattgcagagggaataattgctgcaataaaagaggtggatataaatatacctgttgtcgttaggcttgaaggaaataatgctgaaaaagggtctaagattttatctaaagctaatataaaaatgaaagtataa

SEQ ID NO: 310420 - DNA, 1165 bp, Unknown
  Bacterial polypeptide expressing nucleotide sequence isolated from the Sargasso Sea
tatggatattcacgaataccaagcaaaaaaaatactttcagattttggagtaacgattccaagaggcggaattgtctatagtccagagaatgctgagaataaagctagagagattggtggatcaaaatgggtagtaaaagcacaaattcactctggtgcgagaggaaaagctggtggaataatagtatgtgatagtccattggaagttgctcaagcaacagacaaattgttaggaaaaaaattagttacaaatcaaacaggccccgaaggtaaaatagtaaatagaatttatattgaagaagcaacagatatagagcgtgaactataccttggtttggtctttgatagaagttcagaaagtattatggttgttgcatcgacagaaggcggtatgagtgttgaggaaatttcgaaagaaaaaccagaaaccattataagatcaaaaattgaagttgctgttgggatgcaaagtttccaagctagagaattggcattcggtttaggaattgaacctgatttaattaggagagcatcagaaaccattattggatgttataaagcatttagtgaattggatgctactatggttgaagtcaatccattagtaatttcaaaacaaaaacaaatcttggctttagattgtaaaatgagttttgataacaatgcaatgtttagaagaaatcaagtttctgaacttagagacaaaacacaagaggacgcaaaagaagtttttgcatctgatagaggactaaattacgtaagcctcgatggaaacattggtaacattataaatggtgctggtttagcaatggcatcaatggacatgataaaattagctggaggaagtcctgctaattttttagatgtgggtggtggtgctactccagaaaaaatagttaaagcatttaagcttgttacaatggatgaaaaagtaaaagtaattttagttaatattttcgcaggtataaacagatgtgattgggtagcagaaggaatagtagaggcactaaaaaaaattgaagttaatgttccattggttattagattagcagggacaaatgttgaaaaaggaaataaaattttaaaagagagtaagataaattacattgaagcaaacactttagaggatgcagctaataaagcggttgcggctctaaataaataa

SEQ ID NO: 310421 - DNA, 493 bp, Unknown
  Bacterial polypeptide expressing nucleotide sequence isolated from the Sargasso Sea
ttttaaacacccagaaattttagaattaagagatttaaatgaagaagaagaaacagaaatagaagcaagcaagtatgatttagcatatataaagttaaatggaagaattggatgcatggtaaatggggccggtcttgcaatggcaacaatggacattattaaattatatggagaagaacctgcaaattttctagatgtaggtggtggagcttcaaaagaaaaggtttcagcagcttttaaaataattttgtcagataaaaatgttaaagggatattaataaatatatttggaggaattatgaggtgcgatgttcttgccaaaggattagtggaagctgccagagaaattaaaataaatgtacctttagtaattagattggctggaactaattatgaagagggaaaaaaaatattagataattcgggattaaaaattatttctgcgtctgatcttggagacgcagcagaaaaggtagttgaggcgataaaataa

SEQ ID NO: 310422 - DNA, 877 bp, Unknown
  Bacterial polypeptide expressing nucleotide sequence isolated from the Sargasso Sea
catgtctattttaattaataaaaatactaaagttatatgtcagggttttacaggatctcatggcacttttcattctgaacaagcaataaaatatggaactgatttagttggaggagttactccaaaaaaaggggggcaaattcatcttaaaagacctgtatttaatactgtcaaagaggcaaaagataatacaggagctaatgcttctatgatttatgtaccagcaaaatttgctggcgaagcaataattgaagcaatagatgcttcattggaattaataatttgtattaccgaaggcattcctgttatagatatgcttaaggttaaacagaaattaagcaaatctaattcaagattaattggaccaaactgtcctggaataattacaccagatgaatgtaaaattggtattatgccaggaagtattcacaaaaaaggttcagttggtattgtatctcgatctggaactttgacttatgaagcggttgctcaaaccaccaatatcggaatgggacaatcaacctgcattggtattggaggagaccctattaatggaacaaactttatagattgtttagatttatttcttaaagataaagaaacaaaatctattttaatgattggagaaataggcggaacagccgaagaggaagctgctgaatttgttaagaatcatgatataaaaaaaccaattgttggttttattgcaggtttagctgctcctccaggaagaagaatggggcatgctggagctataatttcaggcggaaaaggaggagctaaggaaaaaatcaaaaaaatggaagaatgtggtattacagttgcaaaatcaccttctgaaattggaaaaacattaattaataaattgtccaattga

SEQ ID NO: 310423 - DNA, 1165 bp, Unknown
  Bacterial polypeptide expressing nucleotide sequence isolated from the Sargasso Sea
atgaatcttcacgagtatcaagcgaaagaatatttcgaaatatacgacttacctgtatctagaaggtcaataataaagaaatcttctgatattgatgaagctatagaatctatagatttctctaatggttgtgtagctaaagttcaatcacacacaggtggcagaggaaaggttggtggagttaagctttgtaaatcaaaagctgaggttgaagaatttgttgaacaatggctaggcaaaaaaatcgtaactatacagactgattcaggtggactacctgtaaatataatttctcttgaagaattaacggatatagataaagagctttatatgagtttcgttgtagatagaggagaaaagtgtgtatcgatgatagtttctgaagctggaggaatgaatattgaagaagtagcagaaaaaactccagaaaaaattctcaaagcaaaacttaattcagattacttaatagaagaaaaagagataaaggctttagctgattctttaaattttaattctgagcaaacaaatcaattcagtaaaattgtttcaggttgcgcaaaactatttaaagataaggatttaagtcttttagaaataaatccattagtaataaaaacagatggaaatcttcattgtttagacgcaaaaatcaacgtagatgaaaatgctctttatagacaagaagatttattagataagcgcgatcctacacaagaggatcaaagggaatatgaagctaaagaaaatgatttaagttatgtgtcattagatggaaatattggttgtatggttaatggagcaggtttagctatgggcacaatggatactataaaactctatgatggtgagccagcaaactttctagatgtaggcggtacagcaactaaagaacgagtatctaaagcttttaaattaatactttctgatcagaatgttaaaggtattttgataaatatttttggcgggatagtgagatgcgatcttatagctcaaggaattatagatgcaataaaagaaagaagtgtatctgtgccaatagtggttagattgcaaggtaataaatctgaagaaggcaaatcaattttaaatgactctggtttaaatcttatcggagaagattcacttcaagaagcatccaaaaaaatagttgagttagttaaatgag

SEQ ID NO: 310424 - DNA, 432 bp, Unknown
  Bacterial polypeptide expressing nucleotide sequence isolated from the Sargasso Sea
gtaaatttgatttagcctatataaaacttgatggaacaataggatgtttagtaaatggtgctggtcttgccatggccacaatggatattattaagcttaaaggagcttctccagcaaacttcttagacgttggaggaagtgctactaaggaaaaagttactgaagcttttaaaatcattttatctgattcagctgtagaaggtattttagtaaatatttttggaggaattatgcgctgtgacattattgctagtggagtggttgcggcagctaaaacactttcattatcaaaacctttggttgtaagactggctggtacaaatgtagaagaaggaaaaaagattcttagagattctggattaaaaataatacctgctgatgacttagatgacgctgcaaagaaaattgtcagtgctgttaagggagattaac

SEQ ID NO: 310425 - DNA, 1162 bp, Unknown
  Bacterial polypeptide expressing nucleotide sequence isolated from the Sargasso Sea
atgaatattcacgagcatcaagctaaagaattacttaaaaaatttggagcaaatgtacctattggagtatttggattatctgttgaagaggttttaaaaaaagcaaaattattaaaaacagaaaaatttgttttaaaagctcaaattcatgctggaggaagaggaaaagcaggaggagtaaaaatattagagacactcgatgaattagaaaaatcatcgagagagttatttggcaagaagctagtaactcatcaaactggtccagaaggtaaagaggtaaaaagactttatgttgaagagtcgtcaaatattgaaaaagaattttatttatcatgcttagtcgatagggcaagttctaaaatagcatttatatcaagtgatcaaggaggtatagatattgaagaagtagctagtaaatcaccagaaaaaataattacaaccaaaatagatttaaaagatcaaatttcaaatgatgaatgtgaaaaaattattaaaatttttaatttaaatggaaatttaaaaaatcaagcaatatctttaattaaatctatctataaaatgtttgtagacactgatgcaaatatggttgaaattaatccacttatattaacaaaagaaaataaagttttgtgtttagatgcaaaaattaattttgatgataatgcattatttaaacatccagagatattaaatctcagagatctaaatgaagaggatccatcagaaattgaagctagccaatatggtttatcttatatcaaattaaatggaagtattggttgtatggttaacggggcaggattagcaatggcaactatggatataataaaattatatggagaggagcctgcaaactttttagatgttggaggtggagcatcaaaagaaaaagtttctgctgcatttaaaataattttgtcagataaaaatgtaaaaggaatattgataaatatttttggtggtataatgaggtgtgatgtattagcccaaggcatggttgatgcagctaaaaaaatgaatatccatattccactagttgttagacttgctggtacaaattttaaagagggaaaaaaaatacttgataattcgggactcaaattaatttcagctgaaaatttagaggatgctgcaaaaaaaatagttaaggctattagttaat

SEQ ID NO: 310426 - DNA, 1162 bp, Unknown
  Bacterial polypeptide expressing nucleotide sequence isolated from the Sargasso Sea
atgaacttacatgagtatcaaggcaaagcattatttgcagaatacaacttacctgtatcaaaaggaaaagtagtatttgaggctcaagatgtaattgatgcatgtaatgaaattggtggttcaaagtgggttgtaaaagctcaagtccatgctggaggtagaggtaaatctggaggtgtagagttaattagtaatcctgaagatggtgttaaatttgcacaaaaatggcttggaaaaaatttagtaacttatcaaactgataaaaaaggtcagcttgtcaattgtattttagtagaggaatgtaccaatatagcaaaagagctatacctaagcgctattattgatagagaatcacaaaaaattgttttcataggatctagtgagggtggagtgaatattgaagacgttgcaaaaaatatacctgaaaaaattatctatcaaggtttcgtttataaagatgattctctgaatgaaaacgctgaaaatatcgcacaagttcttaaattgaatgatcaacaaacaatacaatttatttccataatagataatcttttgagattatttgttgaaaaagacttgagcttactagagattaatccgcttgtaattacagaaaatggagatttgcattgtttggatgcaaagataaatattgattcaaatgcgctttacagacagccagaattactagaaatgcgtgatgaatcgcaggaagatccaaaagaagcagaagctgctaaaagtgatttgagttatgtttctttggatggaaatattggttgtatggttaatggagcgggcctagcaatggggactatggatactataaaattctttggtggaaatcctgcaaatttcttggatgttggcggtactgcaactcaagaaagagtagctaaggcttttaaaataattcttgatgatccagatgtaaaagtagttctagtaaatatttttggtggcattgtgagatgtgatttaattgcagaaggtattattgccgctattaaagaagttgaagtaaaaattccagttgttgttcgcttggaaggtaataatgctgacattggatcaaaaattttatctaaagctaaaatcaagattgaaagtattaatgatttagctgatgctgctaaaaaaacagtctcacttgcaaaatgag

SEQ ID NO: 310427 - DNA, 694 bp, Unknown
  Bacterial polypeptide expressing nucleotide sequence isolated from the Sargasso Sea
atgaatattcacgaacaccaggcaaaagaattacttaaaaaatatggtgcaaatgtacctaacggagtatttgctttaaccgtaaaagatattttagaaaaagcgaaaaacttaaatagccaaaaacttgttttaaaagcccaaattcatgctggaggaagaggcaaagctggcggagtaaaaatattaaatgacattagtgaattggagaaagagtcaaataatttattaggaaaaaaattaatcacacatcaaacaggaccatctggaaaaatagtaaaaagactttatgtagaggaaccatcagatattgataaagaattttatttatcttgtcttgtagaccgaggtagttcaaaaatagccttcatctccagtgaccaaggtgggatggatattgaagaagtagcaaaaaaaaatcctaacaaaattaatactattaaagttgattttaataaaagtatttcagatttggactgcgaaaaagtaataaaaatttttgatcttaaaccagatcaaagtttagaagctatgaatattgtaaaatcaatatataaactttttatagatctagacgctagtatggttgaaataaatccactaattttgacaaagcagggaaaaattatttgcttagatgcaaaaattaatttcgatgataacgcattatttagacacccagaaatttctgcac

SEQ ID NO: 310428 - DNA, 1108 bp, Unknown
  Bacterial polypeptide expressing nucleotide sequence isolated from the Sargasso Sea
atgaatattcacgagcaccaggctaaagaaatcctaaaaaaatatggcgcagctgtaccaaatggtgtttttggtttttcatctgatgaagttgtagaaaaggctaagaaattaaatactcaaaaatatgtactaaaagcacaaattcatgctggaggcagaggaaaagcaggtggggtaaaaattttaaaaaatatagaagatttaagtaaagcttcaaaagaaatgattggcaaagttctgataacacctcaaacaggaccaaatggaaaagaagtaaaaagattatatgttgaggagtcttctaatataaaaaaagagttttatctttcttgtttagttgatcgtgcgagttcaaaaattgcttttatatcatccgaccagggaggaatggatatagaagaagttgcaaaattaaatccagaaaaaattgtaacaacaaaactagatgttctagaagaaattaatgacgaagattgcaaaaagataattaaaatatttaatttagacgataaaacgtctttacaaggtattaaactaataaaatcaatttacaaaatgtttatttctacagatgcgaatctagttgagattaacccattaattttaacacaagaaaacaatttactttgtttagatgctaaaatgaattttgatgataattcaatttttagacatcctgaaatttcagaattaagagatttaaatgaggaagatccaaccgagatagaagcaggtaaacatgatttagcatatataaaattagacggcagcattggatgtatggttaatggagctggtttagcaatggcaacaatggatataataaagctgtatggtgaagagccagctaattttttagatgttggaggtggagcttcaaaagagaaggtttctgcagcatttaaaattattctttcagataaaaatgtaaaaggtattttaataaatatatttggtggcattatgagatgtgacgttctcgcccaaggagttgttgatgctgcaaaagaaattaaaattaatgttccaatagtagttagattggcaggaacaaattttgaagaaggtaaaaaaattttagataattctgatttagaaattattt

SEQ ID NO: 310429 - DNA, 1093 bp, Unknown
  Bacterial polypeptide expressing nucleotide sequence isolated from the Sargasso Sea
gccggagaacttgacggcccagtgtgggttgtcaaagctcagattcacgctggtgggcgaggcaaaggtacttttagagaaaaagatgctggggaaagtggcggtgttagaattgctaaatctgttgagcaggctgcggaagaagcaaagaaaatgcttggccgtacacttgtaacgcatcaaacaggtcctgctgggaaacaagtaaatcgggtttacatcgagcaaggcgccgaaattgagagtgaattgtatcttgctctgttagttgacagagtaacatctaggatatcttttgtgtgctccacagaaggtgggatggatattgaagatgttgcagctagaaatcctgaaaaaattcattctttttctgtagatccagcaactggatatcaggctttccatggaagaaaaattgcctttgctctaggacttgagaattcgcaagttaaagagtgtataaaactcatgggacaacttttccgagccttcatagaaaaagacatggaaatgctggaaatcaaccctttgattataactagaagcggtaatctaactgtcttagatgcgaaagtaggatttgatagcaatgcgatctacaggcaccaagatattgcggatctaagagataccacagaagaagatccaaaagaattggaagccagtaagtacgacttaaattatattgcactggatggcgagattgggtgtatggttaatggtgccggacttgctatggcaaccatggacatcattaaattatatggcgctgagcccgctaattttttggatgttggagggggcgccacaaaagagaaagtcacagaggctttcaaaataattacgtcagacccaaaagttaaaggaatattagtcaatatttttggcgggataatgcgatgcgatgtgatcgctgaaggagtagttgcagctgtcaaggaggttggtctccaagttcctttggtcgttcgcctggaaggcacaaacgttgaaaaagggaaagacatcattaataattccagacttgatgtcattgctgcaaacgacctgagagatggggcagaaaaaatcgtaagagcagtgaaaggttgag

SEQ ID NO: 310430 - DNA, 883 bp, Unknown
  Bacterial polypeptide expressing nucleotide sequence isolated from the Sargasso Sea
atggccgtgttaatcgacgaaaaaactaaagtgatatgtcaaggctttaccggttcacaagggacatttcactccgagcaagccatagcgtacggaacaaaaatggtgggaggtgttactcctggaaaaggcggcggtgatcatttaggtttacctgtattcaattccgtacacgaagcaaaacacataaccaacgcagatgcttctgtaatatatgtgcctccaccctttgcggcagactctattttggaagcaatagacgctagaatggagctaattgtgtgtattactgaaggtattcctgttcaagatatgctaaaggtaaagagagcacttgaaaattcaagttctattcttgttgggccaaactgccctggagtgattaccccagatgcttgtaaaataggcatcatgccaggccatatccataagcgtggatctgttggagttgtatctagatcaggcactttaacatatgaggccgtaaagcaaacttcagatgtggggttgggacaatcgtcatgtattggaattggaggcgatcccgtaaaaggaacagagcatatagatgtccttgaatggtttttgaacgatgatgaaacagaaagcatcattatgataggagaaataggtggatcagctgaagaagaagccgcccaatttctaaaagatgaggcaaaaaaagggcgaagtaaaccaactgcaggttttatcgcgggtcggacggcaccacccggtaggagaatgggtcacgctggagctatagtggcgggcggcaaaggcggggctgaagataaaatcgaagctatgcaatcagccggtataattgtcgcagaaagtccaggaagtttaggtgaggcagtgttgaaagcaattggttaaa

SEQ ID NO: 310431 - DNA, 855 bp, Unknown
  Bacterial polypeptide expressing nucleotide sequence isolated from the Sargasso Sea
catgaagattcacgagtaccagggtaaggaaatcctgcggaaattcggagtcgcggtaccgcgcggcaagccggcgttctcggttgacgaggccgtcaaggtggcagaagagctcggcggcccggtttgggtcgtgaaggctcagattcacgcgggtggccgtggcaagggcggcggcgtgaaggtggcgaagtcgatcgagcaggtccgcgaatacgcgaaccagatcctcggcatgcagctcgtcacgcaccagaccggtccggaaggccagaaggtcaaccgtctgatgatcgaagaaggcgccgacatcaagcaggaactgtatgtcagcctcgtcgttgatcgcatctcgcagaagatcgtgctgatgggttcgagcgaaggcggcatggacatcgaagaagtcgccgaaaagcacccggaactgatccacaaggtcatcgtcgagccgtcgacgggcctgctcgacgcgcaggcagacgacctcgccgcgaagatcggcgtgccggctgcttcgattccgcaagcgcgcgcgatcctgcaaggcctgtacaaggcattctgggaaaccgacgcatcgctggctgaaatcaacccgctgaacgtttccggcgacggcaaggtcatcgcactcgacgcgaagttcaacttcgactcgaacgcgctgttccgccacccggaaatcgtcgcgtaccgcgatctggacgaagaagatccggctgaaatcgaagcgtcgaagttcgacctcgcgtacatctcgctcgacggcaacattggctgtctcgtgaacggcgcaggcctggcgatggcgacgatggacaccatcaagctgttcggcggcgagcgggcgaa

SEQ ID NO: 310432 - DNA, 1174 bp, Unknown
  Bacterial polypeptide expressing nucleotide sequence isolated from the Sargasso Sea
atgaacattcacgagtatcaagcaaaagaaatactatctagatttggcgtatcaatacctaaaggtggagttgcatatagcccagagaatgcaaaagacagggcgactgaacttggaggagatctatgggtagtcaaagcacaaatacactccggggctagagggaaagccggcggtataattgtttgtaaatcagaacaagaagtatctgatgcagctaataaactacttgggaagacgcttgtaacccatcaaacaggacctgagggtaaaacagttcaaagaatctacgtagaagagggcacagatatcaaaaaagaattttatcttggattggtttttgatagaagcactgagagtatcatggttgttgcatcctctgagggaggaatgagtgttgaagagattgcagaagagaaacctgaatcacttattaaaacaaggattgaagctgcagtaggaatgcaagcctatcaggcaagggagattgcttttgcactaggtttggaatcgaaagcgattaatagatgtgctcaagctattttgggtgcgtataaagcttttagtacgtctgacgctactatggttgaaataaatcctttagttctgactggggatgaccatgtgcttgccctagactgcaagatgtcgtttgatgacaatgcattatatagaaatcctgagctagctgaactcagagataaatctcaagaagatccaaaggaaacatatgctgcagaccgaggccttaactacattccacttgatggtgacataggcaatataataaacggagccggtttagctatggcctctatggatatgattcagctagctggtggacaacctgctaacttccttgatgtgggcggaggtgcgacccctgaaaagtttgttaaagccttcaagctgatttcaggtgaccctaaagtcaaagtaattttaataaatatctttgctggaataaatagatgtgattgggtagcacaaggaattgttgatgcacttaatcaaataacaatcagccaaccattagttatcagattggctggcacaaatgttgatgagggtataaaaatactcaaagacagtaaaattacctatacagaagctttcactctggaagatgcagctaataaagctgtaaaagcattaaaagaacttgaagcataaa

SEQ ID NO: 310433 - DNA, 877 bp, Unknown
  Bacterial polypeptide expressing nucleotide sequence isolated from the Sargasso Sea
aatgtcaattctcatagatgaaaatacaaaagttgtagtacaaggtctgaccggtagagaaggccaatttcatgctctgagaaatagagattatggaaccaaaattgtagctggaacaagaccaggaaaaggtggggaaaatgttgagggcattcctatatttgatgatgttgaaaaagctgtcagtgaaacaaatgctaatgttgctctcacctttgtcccacctgcatttgcaaaagatgcagtgttagaagctgcatttggtggatgtgaattaatagtatgtataactgaaggaataccagcaaaagatgaagctgaaatgtatgacattctgaaaaaagaaacaaaagcctctcttttaggtccaaattgtccaggtttaatatcaccgggtaaggcaaatgttggaattatgcctcacgaaattacattgccgggaaatataggagtagtttcaaggtcaggaactttgacttatcaagctgttcatgagttaacaaatcttaatattggacaatcaacgtgtataggtattggtggagatccagtacctggaatgtcattcatagatgtaattgagaaatttcaagcagatagtgaaacagaaggtatcgttatgattggagagattggtggtacagctgaagaggaagcagcagattttattaaacaaaatgtcacaaaacctgttgtgtcatatatagctggagtaacggcacctcctggtaaaaaaatgggccatgctggagcaattgtttcaggaaacaaaggcaccgcagaagcaaagattcaagctttaactgatgctggtgcaatagttgttaagacgccaactgaaataggaaaagcgatgaaggatgttataaatggctga

SEQ ID NO: 310434 - DNA, 1135 bp, Unknown
  Bacterial polypeptide expressing nucleotide sequence isolated from the Sargasso Sea
aatggacttatttgaatatcaaggaaaatctttatatcaaaaatttaatataaatcatcccaattcaaaactaattaaaaacctaaatgatttaaatgacccaattaatcttaattttcccgttgttgtgaaagcccaggtacaagttgggggaagaggaaaagcggggggtatcaaggtagctaaagacattaacgagttaacacaatattctgaagaaatattaggtatggatataaaaggccacaaggtagaaattcttctcttagaggaagcatcaaatattttagaggaatactatatctcgtttactttagacaggtcagaaaaaaaatatctaattatgttgagtgctaaaggaggtatggacattgaacaagttgcagaggaaaatccagatgacttagttaagtttcatgtaagtccatcagaaaaattaacgtcatcaactatttccgaattaattaacaaagctaatttgaataaagatcatgaagaaagtctttctgaaataatagaaaacttatatttgatgttcacagaaggagattgtgatcttgtagaggtcaatcctcttgcaataacagacaacggagtaatggcacttgattcaaaagtatcattggatatgaatgcaaaatataaacatccatattttgatgattttgaacaagaaataccaattcctgaatccgagaaaaatgcgaaagaaaaaggtttaaattttataaaacttgatggatctgttggaattattggaaacggtgcaggtttagtaatgtctacacttgatgttgttgctgaaaatggaggtaaagcagccaactttcttgatattggtggcggagcaaaagctgagactgtaagttccgctcttgaagttttagaggctgatcaaaatgtaaagtcagtattgataaatatatttggtggaataacaaggtgtgatttagttgctgaaggaataatcgaggcaactaaaggaaaagaacttgtatggccaattatcattaggctagacggaacgaattctttagaaggactagagatattaagagcaaaccctaatgaaaaaatattcatagaagagtcaatggattcagctgcaaaattggcagttcagaaaggtctttaa

SEQ ID NO: 310435 - DNA, 1162 bp, Unknown
  Bacterial polypeptide expressing nucleotide sequence isolated from the Sargasso Sea
atgaatattcacgagcaccaggcaaaaaaaatattaaaaaattatggcgcaaaagttcctaatggtatttttgcttctaatgtaaaagatttattggaaaaagccaaaactttggaaacagaaaaatatgttttaaaagctcaaattcatgcaggaggaagaggaaaggcagggggtataaaattagtaaataatttagaggaattagaaaaagaagcgaaaaatttaataggaaaaattttggtaacacatcaaactggtcctaatggaagaaaggttcagaggctttatgtagaagaagcatcatctataaataaagagttttatctgtcgtgtctggtagatagagagagctctaaaattgcatttatatcaagtgatcagggaggaatggacatagaagaagtagcaaaaaataatccagaaaaaattttaacaacaaaagttgaatttaaagatcaaatttctgatgaagactgtaaacaaattttagaagtatttaatttagataaggaagcatatgaagaagcacaaaaactaattaaatcaatttataaaatgtttattgaaaaagatgcaagcctagttgagattaatccacttatcttaaccaaagataataaaattgtctgtttagatgcaaaaatgaaatttgacgataatgcactttttaaacatccagaaataatagatcttagagattttaatgaagaagaagaaacagaaatagaggcaagcaaatatgatctagcatatattaagttggatggaaaaataggatgtatggtaaacggagctggccttgcaatggcaacaatggatattattaaattatatggagaagagccagcaaactttttagatgtgggaggaggagcttcaaaagaaaaagtttcagcagcttttaaaataattttatcagataaaaatgtcaaaggtatattaataaatatatttggaggaataatgagatgtgatgttcttgcaaaaggattagttgaagcagcaagagaaattaaaataaatgtaccattagtaattagattggctggaactaattataaagaaggtaaaaaaatattagataattccggcctaaaaattatttcagcatcagatcttggagatgcagcagaaaaagtagttaaggaaataaaataaa

SEQ ID NO: 310436 - DNA, 469 bp, Unknown
  Bacterial polypeptide expressing nucleotide sequence isolated from the Sargasso Sea
atgaatatccatgaatatcaagcaaaacaatttttgagagaatatggaattccagttttagatggaagaattatttataaagcagaagaggccaagacggcggcgggagaattggatggaccattatgggttatcaaggctcaaatacatgcaggtggaagaggaaaaggtaagtttattgaagaaagtgctggagttgaaggtggagttagacttgcaaaatcagcatctgaagctgcagaacaggcacaaaaaatgcttggaagaactttagtaaccaaacaaactgggcaatctggaaaagaagttagaagaatatatattgaagatggttgccaaatagctaaagagttttatctagctgtattaatcgataggacaacttctagaatagcatttgtagcttctaaagaaggtggcatggacattgaggaagttgccaccaaaactccagaaagaataatcaaat

SEQ ID NO: 310437 - DNA, 868 bp, Unknown
  Bacterial polypeptide expressing nucleotide sequence isolated from the Sargasso Sea
atgtctgtattgataaataaagatacaaaagttatttgccaaggatttaccgggggacaaggaacttttcattcggagcaagctattgcatacggaactaaaatggttggtggagttaccccaggtaagggtggtaccaaacatttaaatcttcctgttttcaatactgtccaagagtgtgttgaagaagttaatcctgatgcaacagttatatatgttcccccgtcttttgccgctgactcaatattagaagcaatatcatcaaaaatacctttaataatatgtattaccgaaggtatacctgtgcaagatatgattaaagttaaacagtttttaaaacagtcaaaatctagacttataggccctaactgccctggcgtaatcacacctgatcaatgcaaaattggaattatgccaggacatattcatactcctggtaaaataggaattgtttccagatctggtacgttaacttatgaggctgttgcacaaaccacagctactggtctagggcaatcaacatgtattggcattggtggtgatccgattaatggaacaaatttcatagattgcttagatatgtttcttaatgacgagcaaacagaggcaatattgatgattggtgaaattggtggaaatgccgaagaagaagcagcaaatttttttaaaaatcataaaattaaaaaaccaattgctggtttcattgctggaaaaactgctcctccaggaagaacaatgggccatgccggtgcaatagtcagtggtggaagcggaggtgcagatgcaaaagttaaagtcatgagtgagtgtggttttataatgtcagaatctccatcaggtttgggagaagcggttgtaaaagcaatag

SEQ ID NO: 310438 - DNA, 931 bp, Unknown
  Bacterial polypeptide expressing nucleotide sequence isolated from the Sargasso Sea
aaaaaattagttacaaatcaaacaggacctgaaggaaaaatcgtaaatagaatttatattgaagaagctacagatattgaaaaggaattatatttagggttggtttttgatagaagctcagaaagtattatggttgtcgcatcaacagaaggtggaatgagtgttgaggaaatttcaaaggaaaaaccagaaacaattattagatctaaaattgaagttgcagttggaatgcaaaattttcaagctagagaattagcatttggtcttggtatagagccagacttaattaggagagcttctgatactattattggatgctataaagcttttagtgaattagatgcaacaatggttgaagttaacccattggtcatttcaaaacaaaaacaaattctagcattagattgtaaaatgagttttgataacaatgcaatgtttagaagaagtcaagtttctgaactaagagataaaacacaagaagattccaaagaaatatttgcatcagatagaggcttaaactacgtcagtttagatggaaatataggtaacattatcaacggtgctggtcttgcgatggcctctatggatatgattaagttagctggaggagctcctgcaaatttcttagatgtaggaggtggagcaacgccagaaaaaatagttaaagcttttaaattggttacaatggatgaaaaagttaaagtaattcttgtaaatatttttgctggtatcaatagatgtgattgggttgcagaaggaattgtagatgcattaaaaaaaattgaaattaaagtgccattagttattcgtttagcaggtactaatgttgaaaaaggaaataaaattttaaaagagagtaaaataaattatatagaggcaaatactttagaggatgcagctaataaagctgttgcagcactaaataagtaaa

SEQ ID NO: 310439 - DNA, 835 bp, Unknown
  Bacterial polypeptide expressing nucleotide sequence isolated from the Sargasso Sea
atgaacttacacgagtatcaaggcaaagaaatttttgcaaaatatgatttacccgtttcaaaaggaaaagttgtcacaagcctcgatgaggttgagcaagcatgtactgatattggaggaagtcgatgggtagcaaaagcacaggttcatgcaggcggtagaggtaaatccggaggtgttgctctatgtgacaccattgaggaggtagcggatttttcaaaaaaatggttaggtaaaagacttgtaacatatcaaactgataaagaggggcagctagtaagctgtattctcgttgaggaatgtaccaatatcgcagacgagctttactatagtgcagttgttgatagatcttcacgcgaggttgcaataatcgcatcctcggaggggggagtaaatatagaaaaagttgccgaggaaactcctgaaaagatcgcttccatatctctcaatggtaaagatatatcacaaggcgatattgaaaagatatgcagcacactcaaactgaatgacactcaatcttcacagatggagcatgttgtaagaaaaacagtttcaatgttctttgaatgtgaccttagccttctagaaattaacccacttgtaataaaagaagatggcaatttgcactgtttagatgcaaagataaatattgattcaaatgcactttttagacaaaaagagttacaagaaatgcatgatccaactcaagaagatcccagagaatctgaggcatcaaaatatgatctaagttatgtttcattggatggaaatattggatgtatggtaaatggagctggatttagcatgggcaccatggatacaataaagtttttca

SEQ ID NO: 310440 - DNA, 844 bp, Unknown
  Bacterial polypeptide expressing nucleotide sequence isolated from the Sargasso Sea
aatgaatattcacgaacaccaggctaaacaattattaaaaaaatttggcgccattgttcctaatggagaagcttgttttacagtacaagaggttttagaaaaagcaaaaaaactcaatcttaaaaaatatgttttaaaagcacaaatacatgcaggcgggagaggtaaggcgggtggagttaaaatattggataatttatctgatctagaaaaagctgcaagagatttgttaggaaaaaaattaattacacatcagacaggaccaagtggcaaagaagttaaaagactttatctagaggagccatccaacataaaaaaggaattctatttatcctgtcttattgatagggcaagttctaaaattgcttttatttctagcgatcagggtggaatggacatcgaagaagttgcaaaaagtgatcctaataaaatcaacactgtaaaaattagttttaaggaaaatattgaagatgaggattgtaaaaaaattattcgtaatttcaatctagacgataatgccaatctaaaatgtatcaagattattcaatcaatttacaaaacatttgtttctacagatgcaagcttaattgaaatcaatccactaatacttacaaaggaaaacaacattgtgtgtctggatgcaaaaataagctttgatgacaatgcaattttcaaacatccggaattactggaattaagagatttgaatgaagaggatcctacagaaatagaggcaagcaaacacgatttagcctacataaaattagatggatctattggatgtatggtaaacggagcaggattagcaatggctacaatggatataattaaactgcatggtcaa

SEQ ID NO: 310441 - DNA, 709 bp, Unknown
  Bacterial polypeptide expressing nucleotide sequence isolated from the Sargasso Sea
atgtcagtattaattgataaaaatacaaaagtaatttgtcaaggtttcacgggatcccatggtacttttcactctgaacaatctattaaatacggaacaaacttagtcgggggcgtaacaccaaaaaaaggtggacaaattcacttagaaagaccggtgtttaacacagttaaagaagcaaaagatgccactggtgctgatgcaacaatgatatatgtgcctgcaaagtttgcctcatcagccatcattgaagccatcgatgcatctattcaattaattgtttgtattagcgaaggaataccaattttagatatgttaaaagtaaaaaaaaaattacaaaactctaaatccagattaattggtccaaactgtccaggaataattacacctaatgaatgtaaaattggaataatgccaggcaatattcataaaaaaggttcagttggaattgtatctagatcaggaacactaacctatgaggcagttgctcaaacaaccgagaacaatcttggtcaatcaacatgtataggaattggtggggatccaattaatggaactaatttcattgattgccttgatttatttttaaatgacaatcaaacagagtctatactaatgattggagaaataggtggaactgctgaagaagaagcagcagaatttgtaaaaaatcacagaataaaaaaaccaaattgttggatttatagca

SEQ ID NO: 310442 - DNA, 454 bp, Unknown
  Bacterial polypeptide expressing nucleotide sequence isolated from the Sargasso Sea
gaggaagaagccactgaaattgaagcaagcaaacatgacttggcatatataaaattagatggaagtataggatgtatggtaaacggtgcaggattagcaatggctacaatggatatcataaagctatatggtgaagagcctgcaaattttttagatgtaggaggtggggcatcaaaagaaaaagtttctgctgcattcaaaattattttatcagataaaaatgttaaaggaatattgataaatatttttggtggaattatgagatgtgatgtactcgcgcaaggtgttgtagatgcagcaaaagaaattaaaattgaagttccgttagtagtaagattagcaggaacaaactttgaagaaggaaaaaagatattacagaactcgggtttaaaaattatatctgcaaatgacttatcagatgctgcaaaaaaagttgtagaggcaataaaataat

SEQ ID NO: 310443 - DNA, 552 bp, Unknown
  Bacterial polypeptide expressing nucleotide sequence isolated from the Sargasso Sea
tatcaaaatcaattttagctttagattgtaaaatgagcttcgataacaatgctttatttagaagaagtcaagtttctgagttgagagataaaactcaagaaaatccaaatgaagtttacgcctcagatagaggtttaaattatgtaagcttagacggaaatataggtaacataataaatggcgctggtttagccatggcttccatggatatgataaaactagcgggcggagagcctgcaaattttcttgatgttggaggtggcgctacacctgaaaagatagtcaaagcttttaaattaatttcaatggacgaaaaagtaaaagtaatattagttaatatatttgcaggaattaatagatgcgattgggttgctgaaggaatagttcaggcacttgaaaaaatagatgttaaagtaccattagtcattcgccttgcaggaacaaatgtagaaaaaggtaataaaattcttaaggatagtaaaataaactacatagaggcaaatactttagaagatgcagctaacaaagccgtaaaagcattgggaaaataaa

SEQ ID NO: 310444 - DNA, 1030 bp, Unknown
  Bacterial polypeptide expressing nucleotide sequence isolated from the Sargasso Sea
attgaaagcacaaattcatgctggaggcagaggtaaagctggtggagttaaaatagtaaatgatttaaaaagtcttgaaacagaagcaaaatctttgcttggaaaaaaattaatcactcatcagacaggacctagcggaagaattgttaaaagattatatgtcgaagtttcatctaacattgataaagaattttatttgtcttgcgttgtagatcgtgcaagctcaaagatagcttttatctcaagtgatcaaggtggtatggatatagaggaagtcgcaatgaaatctcctgagaaaattttaacaacaaaagtagatttagataacgaaatatctgatgaaaattgtaataaaataataagtatttttaatttagatgaagaaacaaaagtacaaggaattagtctaatcaagtccatatacaaattatttatagaaacagacgctaatttaattgaaattaatcctttaattttaacaaaagaaaaagagttgatttgtttagatgcaaaaatgaattttgacggaaatgctttatttagacatccagagctaattgagttgagagaccttaatgaagaagaggaaacagaaatagaagctagcaagcatgatttagcatatattaaacttgatggaacaattggatgtatggttaatggagctgggctcgcaatggcaactatggacataattaaattatatggaaaggaaccagcaaattttttagatgttggtggcggggcttctaaagaaaaagtggcagctgcttttaaaataattttatcagataaaaatgttaaaggaatattgattaatatttttggtggaataatgagatgtgatgttcttgcccaaggtgttgtggatgctgcaaaagaaataaaaatgaatgttcctttagttgtaagattagccggaacaaattttgaagagggaaaaaaaatacttgataattcaggtcttgagttaatttctgcatctgatttatcagatgctgccaaaaaaattgtagaggctattaaataa

SEQ ID NO: 310445 - DNA, 1165 bp, Unknown
  Bacterial polypeptide expressing nucleotide sequence isolated from the Sargasso Sea
aatggatatacacgaataccaggcaaaaaaaatactttcagattttggtgtttctattccaagaggaggtattgcatatagtccagagaatgctgaaaacaaagctagagaaattggtggcacaaagtgggtagtgaaagcacaaatacattcaggagcgagaggtaaagctggtggaataattgtttgcgatacacctttagcagttgcccaagcaacagacaagctattaggaaaaaaattagttactaatcaaacaggacctgaaggtaaaatagttaatagaatatatattgaagaggcaacagaaattaaaaaagagttatatttaggtcttgtttttgatcgtagttccgagagcattatggttgtagcatcaacagaaggcggtatgagtgttgaagaaatagcaaaacagaaacctgaaactataataagatcaaaaatagaagttgctgttggaatgcaacaatttcaagcaagagaaattgcttttggtttaggtatcgaaccacagttgattagaagagctgctgaaacgataactggatgttatagagcatttagtgaactagatgctacaatggttgaggtaaatccattggtaatttctaatcaagatcagatacttgcactagattgcaagatgagttttgataacaatgcgttatttagaagaaatcaagtttcagaactaagagataaaacccaagaaaactcaaatgaagtttatgcatcagatagaggattaaattatgtaaatctagaaggaaatattggaaatataattaatggtgcaggattagcaatggcttcaatggatatgataaagcttgcaggtggtgaacctgcaaatttcttagatgttggaggtggagcaacaccagaaaaaatagttaaagcctttaaattaatttccatggatgaaaaagtaaaagtcatattggtcaacatttttgcaggaattaacagatgtgattgggtagcagaaggtatagttcaagcattacaaaaaatagaaataaaagtacctttggtaattagattggctggtaccaatgttgaaaaaggaaataaaattctaaaagaaagtaaaattaattatattgaagctaatacattagaagatgccgcaaataaagctgtcaaagctttaggaaattaa

SEQ ID NO: 310446 - DNA, 601 bp, Unknown
  Bacterial polypeptide expressing nucleotide sequence isolated from the Sargasso Sea
agttttattgtttgtataacagaaggtgttccaactttggatatgttggaagtaaaaaagattgttgatggtttagacattactcttattggtcctaactgtcctggtgttatcacccctggagttgggaaaatgggaattatgcctggtgagattcatcttcctggaagagttggaattatatctagatcaggaacacttacctatgaagcagtgaagcaaacgactgatctaagtctggggcaatctagttgtgttggaataggcggtgacccaattcctggctcttcttttattgatattttggagctttttgaagctgatgatcaaacagacgcaattgtcatggttggagagattggaggaagcgctgaagaggaagctgctgaattcatttcacagaatgtcactaaaccagttgtttcatatattgctggtcagactgcaccaccgggtaaaagaatgggccatgcaggtgccataatttctggaggtaagggtacggcagaggataaaatcaaaaaacttaatgagagcggtgttgttgttgcaaaaaatcttcttgaaataggctctactataaagtcactgatgtcttgag

SEQ ID NO: 310447 - DNA, 1162 bp, Unknown
  Bacterial polypeptide expressing nucleotide sequence isolated from the Sargasso Sea
aatgaatattcacgaacatcaggcaaaacaaatcttaaaaaaatatggagcgattgttccacaaggtgtttttgctctttctgttgatgaattagtggaaaaagcaaaatcattaaatacaaagaaatatgtactaaaagctcagattcatgccggaggaagaggtaaagctggaggtgtaaaaattttagatactattgaggaattaagtgaagctgcaaaagaattaatgggaaaaactttaataactcaccaaacaggcccagaaggtagagaagtaaaaagattatatgtcgaagagtcttcaagtatagaaaaagagttttatctctcttgcttagtagatagagctagttcaaaaattgcttttatatccagtgatcaagggggaatggatattgaggaagtagctaaaaatactccagaaaaaattattactacgaaagttgatttaaataacgaaattttagaaaaagattgtgaaaaaatagttaagatttttaatttaaaagatactacaaaaatacaagcaatatctttaataaaatcaatttatcaaatgtttataaaaacagatgcaaatatggttgaaataaatccattaattttaacaaaagaagaaaaaataatttgtttagatgcaaaagtaaattttgattccaatgccttatttaggcagccagaaattgttgagttaagagatttaaatgaggaagatacgagtgaaattgaagctagcaagcatgatttagcttatatcaaattagatggaagtattggttgcatggttaacggagcaggtttagccatggcaactatggatataataaagttgtatgggaaagaaccagctaattttttagatgtaggaggaggcgcttcaaaagaaaaagtttctgcagctttaaaaattattttatctgataagaatgttaaaggaattttaataaatatttttggaggaataatgagatgtgatgttcttgcccaaggagttgttgatgcagctaaagaaattaacataagtgttcctttagtagttagacttgcaggtacaaacttcaaagaaggaaagaaaattttagataattcaggattaaaattaatctccgctgaaaacttagatgatgcagctaaaaaaattgtagaggcaattaaataa

SEQ ID NO: 310448 - DNA, 1162 bp, Unknown
  Bacterial polypeptide expressing nucleotide sequence isolated from the Sargasso Sea
aatgaatatacacgagcatcaagccaaacaaatcctaaaaaaatatggtgcagtagtcccagaaggagtatttgctttaaatgttgaggaactgcttgagaaagtaaaatcacttaaaactgaaaaatacgttctcaaagcacaaatacatgctggtggaagaggaaaagctggaggtgtaaaaattttaaatacaattgatgagctagaattagcagctaaagagttgctcggtaaaacacttattactcatcaaacaggcccagagggaagagaagttaaaagattatatgttgaagagtcctcaaacatagaaaaagaattttatttatcgtgtcttgtagatagagctagttcaaaaattgctttcatatcaagtgatcaaggaggcatggatattgaggaagtagcaagtaaaacaccagaaaaaattttaactacaaaagttgatattaatgaagaaatttcaaatactgattgtgaaaaaattataaaaatttttaatttaaataatgatacaaaaaaccaagctataaatttaattaaatcaatttataaaatgtttataagtactgatgctaatatggttgaggtcaatcctttgattttgactaaagaagaaaaaatagtttgtttagatgcaaaagtaaattttgattcaaatgccttgttcagacatcctgaaattgttgagcttagagaccttaatgaggaagaatcaacagaaattgaggcaagcaaacatgacctcgcttatataaaattagatggaagtataggctgtatggtcaatggagcaggattagcaatggctacaatggatataataaaattatatggaaaggagcctgccaattttttagatgtgggaggcggcgcatcaaaagaaaaagtttctgcagctttaaaaattattctttctgataagaatgttaaaggtatcttaattaatatttttgggggaattatgaggtgtgatgtgcttgcacaaggggtagtagacgctgctaaggagataaacattagtgttcctttagtggttagacttgcaggtacaaattttaagcaaggtaaagaaatacttgataattctggtttgaagttaatatcagcagaaaatttagatgatgctgctaaaaaaattgttgaggcgataaaataa

SEQ ID NO: 310449 - DNA, 427 bp, Unknown
  Bacterial polypeptide expressing nucleotide sequence isolated from the Sargasso Sea
atgagcgtcctgatcaataaagacaccaaagtcatctgccagggcttcaccggctcgcagggtactttccactccgaacaagccatcgcctacggcaccaagatggttggcggcgtgactccgggcaaaggtggcactacccacctgggcctgccagtgttcaacactgtgaaagaagccgtcgaagccaccggcgctgacgcttcggtcatctacgttccggctccgttctgcaaggactcgatcctggaagctgcattcggcggcatcaagctgatcgtctgcatcaccgaaggcattcctaccctggacatgctggatgccaaagtcatctgcgacgagctgggcattaccctgatcggcccgaactgcccgggcgtgatcactcccggcgagtgcaagatcggcatcatgccgggtcacatcc

SEQ ID NO: 310450 - DNA, 559 bp, Unknown
  Bacterial polypeptide expressing nucleotide sequence isolated from the Sargasso Sea
atgaatattcacgagtaccaagctaaaaacttactcaaaaaatatagaattaaagtaccagacggtgttttttcagacaaagttaatgatttattagaaaaagccaaatcacttaaaaccgataaatttgttcttaaggcacaaattcattccggaggaagaggcaaggctggtggtgttaaaattttcgataattttaaggaattgcaaaatggggctatgaacttaatgggaaagattttgattactaaccaaactggtcccgagggaagaaaggtgaataaattgtatgttgaagagatttccaagatagataaagaactttatttagcatgtttaattgatagatcttcatcaaaaataatatttatatcaagtgatcaaggtggaatggatattgaggaagtagcaaaaaaaaatccaaaaaaaatccataccacaaaaataaattcttttaatatgatcaaagatgatgaatgcgaaaatatcgttaaaatatttaaacttgaaaaaagtgaaaaaactaaagcaaaagatttgataaaagaaaatttataga

SEQ ID NO: 310451 - DNA, 889 bp, Unknown
  Bacterial polypeptide expressing nucleotide sequence isolated from the Sargasso Sea
aatgaacattcatgagcatcaagcaaaagaacttttaaatttaaataaagtaaatgttgctagaggaatgccagccttctctgtaaacgaagctttaactgctgcaaaaaaacttggtggcccaatttgggttgtaaaagctcaaatacatgctggaggaagagggaaggcaggtggagttaaggttgttaatagtcttgatgaagtaaaaaatgcagcagaggaaatacttggaaagattcttgttacaccacaaactggtgctcaaggcaaagaagtaaaaaggttatatattgaagaaggttgcgatattaaaaaagaattgtacctgtctgttttagttgataggaactcaggttgtattacatttattgcctctacagaaggggggatggatattgaaaaagtcgccgaagaaacacccgaaaagattttaaagcttggaattaccccatctactgggtttcaggattttcatggtagaagattggcctcggctttaaatatttcaggaaaatcaataaggccagctacgttgtttctaaaaaacatttataatacttttgttgaaaatgacgcatcgcttattgaaataaatcctttagtaattaatacaaaagatgagctaatagcacttgatgccaaaatgtcatttgatgataacgcactttttcgtcattctaaaatcattgaaatgagagatcctagtgaagaagatccacttgaacatagagcatcagagtatgatttgtcatacattaaattagatggaaatattggatgtatggttaacggagcaggtcttgcaatggcaacgatggatattattcaacttgaagggggttcacctgctaattttctagatgtaggaggaggcgcgacaaaagag

SEQ ID NO: 310452 - DNA, 874 bp, Unknown
  Bacterial polypeptide expressing nucleotide sequence isolated from the Sargasso Sea
atgtcagtattaatagataaaaataccaaagttatttgccaaggatttacaggctctcaaggaactttccactcagaacaagcaattaaatacggaaccctgatggtcggtggcgtgaccccaaagaaaggtggtcaagaacacttaggtcttccagtatttaatagtgtcaaggaggctaaagacagtactgtagcaaatgcaactgtgatatatgttccacctccctttgctgcaggtgctattattgaagctatcgatgctgatatggagttaattgtttgtataactgagggtgtcccagtactcgatatgatgcaggtaaaaagaaaattagaaaaatcaaaatcgcgtttaattggtccaaactgtccaggaataattacaccagatgaatgtaaaataggtattatgcctggccatattcatcaaaaaggaaaaataggcattgttagtagatctgggactcttacttatgaagcagtcgctcaaacatctgcagtaggtctaggacaatcaacttgtattggtattggtggagatccaattaacggtacaaactttatagactgtcttgatctatttttaaaagaccctgaaactgagggtattattatgataggagaaattggtggtactgctgaagaagaggccgcagagtttataaaaaaatctgaaattaaaaaaccagttgcatcttttatagctggtgcaagcgctcctgctggaaaaagaatgggtcatgctggcgccattatatccggaggaaaaggtactgctgagtcaaagtttagtgctttagaggaggcaggagttcatatctcaaaatcaccagcaaaattaggcgaaacaattaaagaggcactaagttaat

SEQ ID NO: 310453 - DNA, 339 bp, Unknown
  Bacterial polypeptide expressing nucleotide sequence isolated from the Sargasso Sea
ttattaaattacatggtggtagtcctgcaaatttcttagatgttggaggtggagctacaaaagaaagagtagctaaagcattctctattattttgcaggatccaaatgtgaaagcaattttggtaaatatttttggtggtatcatgaaatgtgacatcattgctgaaggtgttgtagctgcagctaaagagctgtctatagaggttccattggtagtaagattagaaggaaccaatgttgacctaggaaaagaaattttaaataaatctgggctctcaataatatctgctgataatttagatgatgcagcccaaaaagcagttaaggctttaaattaaa

SEQ ID NO: 310454 - DNA, 749 bp, Unknown
  Bacterial polypeptide expressing nucleotide sequence isolated from the Sargasso Sea
aggtcaaaaccacctaaatttaccggtttttgatactttagatgaagcaatagacgtgacctcagctaatgcgtctgtaatttacgttcctcctgcgtttgcagctgattcaattttagaagcaattgacgctaaaattgatttaattgtttgtataactgagggaattcctgttcttgatatggtgaaagttaaaaatgcattaaaatattctagttcaagactaattggacctaattgcccgggtattattacacccaatgaatgtaaaattggtattatgcctggtcatatacacaaaaaaggtaaaattggaattgtatcaaggtcaggtacattaacatacgaggccgttggacaaaccacagctgctggtcttgggcaatccacatgtgttggaattggtggtgaccctttaaacggaactaattttattgattgtttaaatctttttctctcagatgaagaaactgatgctattattatgattggtgaaattggaggaactgctgaagaagaagcatcagaatttttgaaatcttcaaaaattaaaaaaccagttgcgggtttcatagcgggtagaactgctcctccaggaagaagaatgggacatgctggcgctatagtctcaggcaaaagtggaggtgcagaggccaaaattgatgcaatgagaagcgcgggaattaatgtaactgatagccctggtatgcttggtgaagctattattgaagctatgaagaaattttaaa

SEQ ID NO: 310455 - DNA, 1168 bp, Unknown
  Bacterial polypeptide expressing nucleotide sequence isolated from the Sargasso Sea
gatgaaaattcacgaattccaagctaaagaacttttgtctgattacaatgtgccaatacaaagaggccacgttgtttattcttcaaatgagattgaaaaaacaatagataaagttcaaaatgaattcaactcagatgctgttgtagttaaagcgcaaattcatgctggaggtcgtggtaaaggtggtggagtaaaattctgtccgtcaacagaatcagctattgtatctgctaatgaaattcttggcatgaatttaatcactcatcaaactggcgaagaaggtaaacttgtaaatcaaatattaattacagaagcactagatattgaaaaagagttttattttgcattaatgtttgatcgagcaaaaaatgctgatgtcttcatagtatcaacagaaggcggagttgatattgaagaagtagcagaaaaaactcctgaaaaaattattaaggcttgggtaaataatgatacctaccctcttgatgatgcaattaatacaattataaattcattaagtcttaattcatttaatgatgcttttgaaatttttaagaatatttataattgctattcaaattcagattgcaatttattagaaatcaatcctcttgtaatcactgaagaccaaaaaattattgcactagatgcaaaagttgatattgattccaatgcactatttagacaagaaaaaattgcaaaatttcatgacacatcagaggaagaccctttagaactaaaggcttcagaatatggattaaattatattaagcttgatggaaatgttggctgcatggttaatggagctggccttgctatggcaacaatggatatagtaaaacatcatggcggtgaaccagctaattttttagatgttggaggtgcggctaatgttgatacaattaaaaatggctttaaaattattctctctgaccctaacgtaaaatcagttttgattaatatttttggtggtatcgttagatgtgacagagtagctaatggagtcattcaagctgtaaaagaattaaatttaaatgttggtgttgtcgttagactccaagggactaatgcaaaactggcaaaacaaattttagatgaatcagatatagaacttataagcgctgaaacaatagatgaagctgctaaaaaagcagttggattggtatcataa

SEQ ID NO: 310456 - DNA, 664 bp, Unknown
  Bacterial polypeptide expressing nucleotide sequence isolated from the Sargasso Sea
atgaaaattcacgaatttcaggctaaagagcttttatcttattacaatgtgccaattcaaagaggccatgttgtttattcttcaaatgagattgaaaaaacaatagagaaagttcaaaatgaattcaactcagatgctgttgtagttaaagcgcaaattcatgctggaggtcgtggcaaaggtggtggagtgaaattctgtccatcaaaagaatcagctattgaatctgctaatgaaattcttggcatgaatttaataactcatcaaactggtgaagaaggtaaacttgtaaatcaattattaattactgaagcactcgatattgaaaaagagttttattttgcattaatgtttgatcgagcaaaaaatgctgacgttttcattgtatcaacggaaggcggagttgatattgaagaagtagcagagaaaactcctgaaaaaattgttaaggcttgggtggataatgatacccaccttcttgatgatgcagttaatacaattatagatgcattaagtcttaattcgtttaatgatgcttttaaaatttttaagaatatttataattgctattcaaattcagattgcaatttactagaaattaatcctcttgtagtcactgaagaccaaaaaattattgcactagatgcgaaagttgatattgatt

SEQ ID NO: 310457 - DNA, 839 bp, Unknown
  Bacterial polypeptide expressing nucleotide sequence isolated from the Sargasso Sea
gtatttaattgataggaagactaaagcaatatgtctgatagcttcatcagagggaggaatggacattgaagaggttgctgataaaaatccagaaaagatagctaaaatatatttggacgcatccagaaaagaactcaatagtgaaaatattgatgaagttttgaggattttagaccttgatactgcacacaaaggaaaattaacggctgttttaaataatttacttttattatttatagagaaagatgcgagtctaattgaaattaatccctttgtcttatccactgaaggtcatttgatctgcctagatgcaaaaatgaattttgactcaaatgctctttttcgacatcaagatattttgagcttgagagatcctgaggaggaagatcccctagaaattgaggcttcaaatcacggattaagttacgtaaagcttgatggcacaattggctgcatggtaaatggtgcaggtttggcaatggcaacaatggatattataaagttatatggagaggagccagcaaattttttagatgtgggcggcggcgctaccaaagagcaagttatgaatgcatttaaaattatcctaagtgataaaaatgtgaagggaatacttgttaatatatttggcggaataatgcgctgcgaaataattgcacaaggaataatagagactgcaagcgagctaaatttatctataccattggttgtgagattggagggtaccaatgtggatttaggtaaaaaatatctggaagagtctggtttaaatattatacccgcaaatgatttagacgaggctgccaaaaagatagtagatgcagtatcaaaggtatgat

SEQ ID NO: 310458 - DNA, 1162 bp, Unknown
  Bacterial polypeptide expressing nucleotide sequence isolated from the Sargasso Sea
atgaatattcatgagcatcaagcaaaagaaatcttaaaaagatatggtgcggtagttccaaaaggagtttttgccttaaatgtagaagagttaatccaaaaggcaaaatctcttaatactgaaaaatttgttcttaaagcacaaattcatgccggtggaagaggcaaggcgggaggagtaagaattttaagtaacttagaagaattaaaagttgcagcaacagaacttttaggaaaaacacttgtaacacaccaaacaggtatggagggcagagaagtaaaaagattatatgtagaagagtcatcaaatattgataaagagttttatttatcatgtttggttgatagagctacttctaaaattgcttttatatcaagtgatcaaggtggaatggatatagaggaagtagcaaaaagtaatcctgaaaagattataacaacaaaagttgagatgaaagatgaaatttctgaaaaagaatctgaagaaataatcaagatatttgatttaagtgaaaatacaaaaaaacaagcaaaaacacttattaaatcaatttataaaatgtttattggaactgatgcaaacatggttgagattaatcctttgatattgactaaggaagaaaaaataatttgtttagatgcaaaagttaattttgactctaacgctttatttagacatccagaaattattgaattgagagatttgaatgaagaaaattcaacagaaatagaagccagcaaacacgatctcgcttacatcaaattagatggaagtattggctgtatggttaatggagcaggattagctatggcaaccatggatataatcaagttatatgggagagaacctgctaattttttagatgttgggggtggtgcttcaaaagaaaaagtctctgcagctttgaaaataattttatcggataaaaatgttaaaggaattttaattaatatttttggaggaataatgagatgtgatgttcttgcccaaggagtggtagatgcagctaaagaaataagcattagtgttccactagtcgttagacttgctggaactaattataaagaaggaaaaaagatattagatagctcaggattaaaattgatttctgctgataatttagatgatgcagctaaaaagattgtagaggcaataaagtaga

SEQ ID NO: 310459 - DNA, 1168 bp, Unknown
  Bacterial polypeptide expressing nucleotide sequence isolated from the Sargasso Sea
atgaatttgcatgagtatcaggcaaaatccttatttgccgaatatggtttaccagtgtcagaaggttttgcttgtgatacagcccaagaagctgtagaagcagctggccgtattggcggaaatttatgggttgttaagtgtcaagtacacgcaggcggccgcggtaaagcgggtggcgttaaagtcactggcgataaagaagaaatcagagcctttgccgaacactggttaggcaaaaatctggtgacttatcaaacagatgagaaaggtcagccagttgctaaaattttagtagaaagctgcaccgacatcgctaacgaactgtacttaggtgcagtagttgaccgtagcacccgtcgtgtggtgtttatggcatcaactgaaggcggtgttgagattgagaaagtggccgaagaaacgccagaactcattcacaaagcgatcatcgatcccctgacgggtcctcagccataccaagcgcgtgatcttggcttcaaactgggcttaaacccaactcaaatgaagcaattcaccaagattttcatgggtctggcaacgatgttcgttgatcacgatttcgcactgctggaaatcaacccactggttatcaccactgaaggtaacctgcactgcttagacggcaaaattggtattgatggcaacgcactgttccgtcaaccaaaaatcaaagcaatgcacgatccatcacaggatgacgcccgtgaagctcacgctgcaatgttcgaactgaactatgttgcgttggacggaaacgtaggttgtatggtgaacggtgctggtctggcgatgggtacgatggacatcgttaacctgcacggtggcaagccagctaacttcctcgacgtaggtggtggcgcgacgaaagaacgtgttgctgaagcattcaagatcattctgtctgatagcaatgtgaaagccgttctggttaacatcttcggtggtatcgtacgttgtgacatgatcgcagaaggtatcattggcgcggttaaagaagttggcgttaaagttccagttgtagtgcgtttagaaggtactaacgctgaattaggccgtgaagtattagctaaatcaggtcttgatatcattgcagctaacagtctgactgatgcggctgagcaagtagttaaagctgcggagggcaaataat

SEQ ID NO: 310460 - DNA, 874 bp, Unknown
  Bacterial polypeptide expressing nucleotide sequence isolated from the Sargasso Sea
atgtctgtattaattaacaaagataccaaggtaatttgccaaggctttaccggtggtcaaggtactttccactctcaacaagctatcgattacggtacgcaaatggtcggtggtgtatctccaggtaaaggcggcagcgagcacttaggtctgccagtgttcaacactgtgaaagacgctgtggctgcgactggcgcaacggcttctgttatctacgttccagcgcctttctgtaaagacgctatcctcgaagctatcgacggtggtattgagcttatcgtttgtatcactgaaggtatcccaacactggatatgctggaagtgaaagtgaagctagaagaaactggcgttcgcatgatcggtccaaactgcccaggtgttatcaccccaggtgaatgtaagattggtattatgccaggtcacatccacttaaaaggtaaagtgggtatcgtttctcgttctggtacgctgacctatgaagcggttaagcaaaccactgacgaaggtttcggccaatctacttgcgtaggtattggtggtgacccaatcccaggcactaacttcatcgacgtattggaaatgttccaaaacgatccacagactgaagccatcgtaatgattggtgaaatcggtggtactgctgaagaagaagcggcggcatacatcaaagctaacgtgactaaaccagttgtttcttacatcgcgggtgttactgctcctgcgggtaagcgtatgggtcacgcgggtgcaattatcgctggcggtaaaggtactgctgctgacaaatttgctgcattagaagcagcgggcgtgaccactgtccgctcgttagcggatatcggcaaagcgctgcgtgctaaaaccggttggtaat

SEQ ID NO: 310461 - DNA, 1159 bp, Unknown
  Bacterial polypeptide expressing nucleotide sequence isolated from the Sargasso Sea
gatgaatattcatgaatatcaagcgaaagcaattttaaaaaaatttaatgttcctgtgcctaaaggagaaattcttttatctaaggataatatcgttgaagctgcacaaaatgtatcggataatgtttgggtggtaaaggctcaaatccatgcaggtggacgtggaaaaggtggaggagttaaaattgccaagtcaattgaagaagtcgaaaactatgttgatcaaattatgggcatgcaactagtaactcaccaaactggacctgaaggaaaaaaagtaaggcgagtttatatagaagaaggctcaaatattgttgacgagatttatttatctttattggttgataggcaatcatctcaagtaagttttattgtttctactgaaggtggagtaaacatagaagaggttgcagaagaaacacctgagaagataactactgtttctattgatcctttggatggcgttacacctcaagacatcgatactctttctttagctttaaatctcgatggtgatttaaaatctcaagcttcaagtttatttaagaacttgtattcagcttttgttgagacagatatgagccttcttgaaatcaacccattggtaattacaaaggaaaataatataatttgcttagatgcaaaggttaattttgattctaatgctttatttaggcatcctgaatatcaagatttactagatccttcagaggaagatgcagcggaattaaaagcatcagaatttggcttaagttacataaaattagatggaaatattggttgtctcgtaaatggtgcaggcttagctatggcaacaatggatataattaaactatatggagctgaaccggcaaactttctagatgttggaggggctgcaaccaaagaccttgttacagaagcatttaaaattattctttctgatgatagcgttgaaggaattttagttaatatttttggtggaattatgagatgtgatgttgttgccgaagggattataagtgctgcaaatgaagttaatatatctgttccacttgttgtaagacttgagggaacaaatgttgagctcggtaaaaagattattcaagagtctgatttatcaattatcagtgcctctgatcttgatgatgcagcaaagaaaataacagaagctatatag

SEQ ID NO: 310462 - DNA, 1048 bp, Unknown
  Bacterial polypeptide expressing nucleotide sequence isolated from the Sargasso Sea
atgaatattcacgaataccaagctaaagaaatattaaaaaaatttgggttgccagttctcaatggcaaatcatacgaaaaaaatattgatttacttaaggttgatttgaatgatttaaaaggtcctccctgggtagttaaatctcaaattcatgcaggcggaagaggagctgggtattttaaaaattcatttaatgataaaggtggtgttcaagtaatttttgagaaagatcaagtaaaaaaaatagcttcctcaatgatgggaaatgttcttgtaacaaaacaaactggcgagataggaaaaactgtcaatcgcatatttattgaagaaggatgtgaaattgaaagggagttttatctaagcctacttgttgatagaaatacttcaaaagtaatgatgatgatctctgctgctggtggcatggatattgaggaagtggctgctaataatcctgaaaaaattataaatatgcattttgataactttaaaaatgttaccttagactccaatcttcaatcaacacttgagatcagccaaagtcaatttgatgaattaaatataattactaataaattattacttgtttttagctctatagacgcatcaacaattgagattaacccgttggttttaaataaaaaaggctcttttgtattattggatgcaaaaataagtttagatgataacgcattattcagacatccagatttattagaattaaaagacctaacggaggaagatcctctggaacttcaagcggcagaacatgatatgaattacgttaagcttgatggctcaattggatgtatggttaatggagcagggttggctatggcaactatggatatcatcaagcaatttggagaagagcctgcgaattttctagatttagggggaacggcaaataaagatagagttattatgggttttaagacaattcaatctgatccaaatgtaaaatcaattttaataaatatctttggaggcattattcattgtgacatgattgctaatggtattgttgaagctgtaaaagaacttaacttta

SEQ ID NO: 310463 - DNA, 1165 bp, Unknown
  Bacterial polypeptide expressing nucleotide sequence isolated from the Sargasso Sea
atggatatccacgaatatcaagcaaaaaaaatactttcagattttggtgtaactataccaaggggtggtattgcatatagtccagagaatgctgaaaataaagctagagaaataggtggaaataaatgggtcgttaaagcgcaagtacattctggagcaagaggaaaagctggaggaataattttgtgtgatacacctttggctgttgctcaagctacagataagcttttaggaaaaaaattagtaaccaatcaaactggaccagaaggaaaaataataaatagaatttatatagaagaagcaacggatattaagaaagagctatatttaggattagtttttgatagaggttctgaaagtatcatggttgtagcctctacagaaggaggtatgagcgttgaagagatttcaaaagaaaaaccagagacaattattaggtcaaaaattgaagtagctgttggaatgcaacagtttcaagcaagagaaattgcttttggtttaggcataaagccagaactaataagaagagcaacagagacaataataggatgttatcgtgcatttagcgagttagatgcaacgatggtagaagtaaacccactagtgatctcaaatcaagatcaaattttagctttagattgtaaaatgagttttgacaataatgctttatttagaagaaaccaggtttctgaattaagagataaaacacaggaaaatgcaaatgaagtttatgcatctgatagaggtttaagttatgtaagtcttgatggaaatataggaaatataattaatggagcaggtttagcaatggcttcaatggatatgataaaattagcaggtggtgcgccagctaattttttagatgttggagggggagcaacaccagaaaaaatagtcaaagcatttaaattaatttctatggatgaaaaagtaaaagttatattagttaatatatttgcaggaataaatagatgtgattgggttgctgaaggtatagttcaggcactagaaagaatagaaattaaggtacctttggtaataagactagcaggaacgaatgttgaaaaaggtaaccagattttaaaggatagtaaaattaattatatagaagcaaatactttagaagacgcagctaataaagcagtgaaagcactgggaaattaat

SEQ ID NO: 310464 - DNA, 855 bp, Unknown
  Bacterial polypeptide expressing nucleotide sequence isolated from the Sargasso Sea
tatgaatattcatgaacatcaagcaaaagatattttaaaagattttggagcacctgtaacagagggagtgattatatttaattctgatgatattattgataaaattaaagatctaaataccgatcaatttgttttaaaagcccaaatacatgctggtggtagaggtaaagctggaggggtaaaattagttaaaaaaaaagatatagtagatgttgcaaaacagttgtttggtaaagttttagtaacaccccaaactggtcctgagggacgagttgtaaaaagaatttatattcaaaaggcttatgatattaaaaaagaattatatctatcatgtcttatagatagacaaagttctaaaattgctttcataagtagcactgagggtggtgtggatatagaagctgtagcaaaaaaaaatcctgaaaaaattataacaacaaaagtagatcttagactcaatctaaaccctgaagaaataaaaaatatattacaaatttatcaattagacaaaaaccaaatgaatagcgcaacaaaattggttaaagcgatgtatagcgcgttaattaaaaaagatgcatctttaattgaaataaatccattggtaataacacaaaataacaaaatactctgcctagatgcaaaaatgaattttgatgataatgctatttttaaacatccagaaatttcaaaactcagagatttaaatgaagaaaatccatctgagattgaagctagcaaacatgatttagcttatattaaattagatggatctatagggtgtatggttaacggtgcaggtttagcaatggctaccatggataaaataaaactttttggggaggaacctgcaaattt

SEQ ID NO: 310465 - DNA, 1162 bp, Unknown
  Bacterial polypeptide expressing nucleotide sequence isolated from the Sargasso Sea
aatgaatattcacgaacaccaagcaaagaatatacttagaaaatatggagctaaagttccggatggagtttatgctctagatgtaaatgaattattggaaaaagctaaaaatcttaaaactgataaatatgtgttgaaagcacaaattcatgctggaggcagaggtaaagctggtggagttaaaatagtaaatgatttaaaaagtcttgaaacagaggcaaaatccttgcttggaaaaaaattaatcactcatcagacaggacctagtggaagaattgttaaaagattatatgtcgaagtttcatctaacattgataaagaattttatttgtcttgcgttgtagatcgtgcgagctcaaagatagcttttatctcaagtgatcaagggggtatggatatagaggaagtcgcaatcaaatctcctgagaaaattttaacaacaaaagtagatttagataacgaaatatctgatgaaaattgtaataaaataataagtatttttaatctagatgaagaaacaaaagaacaaggaattagtctaatcaagtccatatacaaattatttatagaaacggatgctaatctaattgaaattaatcctttaattttaacaaaagaaaaagagttgatttgtttagatgcaaaaatgaattttgatggaaatgctttattcagacatccagagctaattgagttgagagacctcaatgaagaagaagaaacagagatagaagctagcaagcatgatttagcatatattaaacttgatggaacaattggatgcatggttaatggagctgggcttgcaatggcaactatggacataattaaattatatggaaaggaaccagcaaattttttagatgttggtggtggggcttctaaagaaaaagtggcagctgcttttaaaataattttatcagataaaaatgttaaaggaatattgattaatatttttggcggaataatgagatgtgatgttcttgcccaaggtgttgtggatgctgcaaaagaaataaaaatgaatgttcctttagttgtaagattggccggaacaaattttgaagagggaaaaaaaatacttgataattcaggtcttgagttaatttctgcttctgatttatcagatgctgctaaaaaaattgtagaggctattaaataa

SEQ ID NO: 310466 - DNA, 877 bp, Unknown
  Bacterial polypeptide expressing nucleotide sequence isolated from the Sargasso Sea
aatgtcagtattaattgataaaaatacaaaagtaatttgccaaggttttacaggatcccatggtacttttcactctgaacaatctattaaatatggaacaaacttagttgggggcgtaacaccaaaaaaaggtggacaaattcacttagaaagaccggtgtttaacacagttaaagaagcaaaagatgctactggagcggatgcaacaatgatatatgtacctgcaaagtttgcttcatcagccatcatagaagctatagatgcatctattgaattaattgtttgtataagcgaaggaataccaattctagatatgttaaaagtaaaaaaaaaattacaaaattctaaatccagattaattggtccaaactgtccaggaataattacacctaatgaatgtaaaattggaataatgccaggcaatattcataaaaaaggttcagttggaattgtatcaagatcaggaacattaacctatgaggcagttgctcaaacaaccgagaacaatcttggtcaatcaacatgtataggaattggtggtgatccaattaatggaactaatttcattgattgccttgatttatttttaaatgacgatcaaaccgagtctattttaatgattggagaaataggtggaactgctgaagaagaagcagcagaatttgtaaaaaatcacaaaataaaaaaaccaattgttggatttatagctggagtaactgctccaccaggaagaagaatgggacatgctggtgctattatttcaggcggcaaaggaaatgctgaagaaaagataaaaaaaatgcaagattgcggtattactgttgctaattctccctctgatattggaaaaacgctactaaataaattgtctaattga

SEQ ID NO: 310467 - DNA, 1174 bp, Unknown
  Bacterial polypeptide expressing nucleotide sequence isolated from the Sargasso Sea
atgaatcttcatgaatatcaagcaaaacaactttttcgcgattatgggatagccgtatctgatggcgtcgctgcatcttcagctgaacaagctgaaaatgctgctctttctttaggagtatctaaatgggttgttaaggcccaagtccatgctggaggaaggggaaaagctggaggggttgaggtagttgataaaattgaaaaagttagagaatttgctgataaatggataggaactaacttggtaacttttcaaaccgacgcagacgggcagcctgttaatcaaattttagttgaaacttgtactgaaatagaaaatgaactctatctaggtgctgttattgatagagcttcacaaaggcttgttgtaatggcttctactgaaggcggtgtaaatatagaagaagtagctgaaaagacgcctgaaaagatatttaaggtagaagtagatcctattgaaggcactaatgacatggatgctgataaattatcttcgcttttgggcctcaatgactctcagagttcccaatttagaagtatttacaatggaatggttaagctctttttagaaaaagacctggctttattggaagttaatcctctagtaattactggttccggtgatttactttgcttagatgccaaaataaatatagattcaaatgcgctgtatagacaagaagttctcaatgaaatgcgagatactactcaagaagatgaaagggaatcaaaagctgcagaatgggacctaagctacgttgctctagacggaaatatagggtgcatggtaaatggcgcaggcttagcaatgggaactatggatattatcaagctgcatgggggagaacctgctaattttcttgatgtgggtggcacagctgatgcgaaaagagttgctgaagcatttaaaattattttatctgacaaaaatgttaacaccgtcctaatcaatatctttggaggtattgttcgttgcgatgtgatagctgacggcattgttgaagcccttacggtaatgggagtttcagtaccagtggtggtaagacttgaaggcaataatgctcaagtaggccttaagactttggatgaatgtgatttaaacattatcccagcttcaaatttacaagaagctgctgaactagcagttaaagcatccaaaggagaaatcagttgag

SEQ ID NO: 310468 - DNA, 613 bp, Unknown
  Bacterial polypeptide expressing nucleotide sequence isolated from the Sargasso Sea
tatgtacgaagctttaatttctaacgacgcttcattaatagagataaatccattagtaattacaaaaaataatgaaatactttgtctagatgcaaaaatgaattttgatgataatgcaatttttaaacacccagaaatatataagttaagagacttgaatgaagaagatcctacagagattgaggccagcaaacatgatttggcttacataaaattagaaggctcgataggttgcatggtaaatggtgcgggtttggcaatggcgactatggatataatcaaactttacggggaagaacctgcaaattttttagatgtgggaggaggcgccagtagagaaaaagttaccgcagcatttaaaatactactttcagacaaaaatgtaaaaggtgtcctaataaatatttttggcggtataatgcaatgtgatgttcttgctcaaggtgttgttgaagcagcaaaggatgtaaaattaaaagttcctttagttgttcgcttggctggtactaattttaaagaaggaaaaaaaattcttgatgcatcaggtttaaaaatactatcagcagacaatcttaacgatgcagcaaaaaaaatagttaaggctataaaataa

SEQ ID NO: 310469 - DNA, 877 bp, Unknown
  Bacterial polypeptide expressing nucleotide sequence isolated from the Sargasso Sea
aatgtcaattttagttaacaagaacacaaaagtaatatgccagggttttacaggaaaacatggcacatttcattctgaacaggcgattaaatatggaactaatttagttggaggtgtaacgccaaaaaaaggtggtcaaatgcacctatcaaagccagtttttaattctgttagagaagcaaaagaaaaaactggtgcaaatgcttcaatgatttatgtgcctgctaaattcgcagcctctgcaattatagaagctgctgaagcttcaatagaattaataacatgtattacagaaggaataccagttttagacatgctaagagttaaaaaaaaactaatcaattctaattcaagattaattggtccaaattgtcctggaataattactccagaagaatgtaaaattggaataatgccaggaaatattcataaaaaagggtctgttggaattgtatcaaggtctggaactttaacttacgaagctgtggcacagactacaaataatggattaggacagtcaacatgtataggtattggtggagatcccataaatggaacgaactttatcgattgtttagatttatttttaaatgatcaagaaacagagtccatattaatgataggtgaaataggtggaacagctgaagaagaagctgcagaattttttaaaaaccataaaataaagaaacctatcgttggctttatagctggaatgacagcgccaacaggaagaagaatgggtcatgcgggagctataatttctgggggaaaaggtggagcagaagataaaataaaaaaaatggaagattgcggtataacaattgcaaaatcacctgcagaaattggcaaaacactattaaacaaattgtctaattga

SEQ ID NO: 310470 - DNA, 467 bp, Unknown
  Bacterial polypeptide expressing nucleotide sequence isolated from the Sargasso Sea
ttcgcaagaggacccaagagaagctaaagcagctgaatgggacttgagctatgtagctctagatggaaacatcggatgtatggtgaatggagcagggctggctatgggcactatggatatcattaaattgcacggaggtgaacctgccaatttcttggatgtcggaggaacggcagactctaaaagagttgctgaggcttttaagataatcctctccgatgagaatgtgaataccgtcttaataaacatatttggaggaatagttagatgtgatgttattgcagatggaatagttgaagctctaactgtaatgggcgtttctgtaccagttgttgttagattggaaggaaatagtgcggaaaaaggtctcaaaattcttgatgaatgtgaactgaatataatcccggcttcaaatttagaagaagctgcaagccttgccgtcaaagcatccaagggagagatataat

SEQ ID NO: 310471 - DNA, 877 bp, Unknown
  Bacterial polypeptide expressing nucleotide sequence isolated from the Sargasso Sea
aatgtcaattttagtaaataaaaacactaaattgatttgtcagggttttacagggtcgcatggtacatttcattcagatcaagctatcaaatatggcacaaatttagtcggaggtgttacacctaggaaaggtggccaaacacatttaggaaaaccagtatttaattctgttaaagatgcagtcaaagaaaccggagctaatgcatctatgatttatgtgccagcaaaatttgcaagctctgcaattattgaggctatagaggcatcattagaacttatagtttgtattactgaaggcatccctgtcttagatatgatacaaatcaaaaaatatttaagcaattcaaaatcaagattaatcggacctaattgtccgggaattatcacacctgatgaatgtaaaattggaataatgccaggcaatattcataaaaaaggaacagttggaattgtttcaagatcaggaactttgacttatgaagcggtcgatcagactacaaaaataggacttggacaatcgacatgcgtcggaataggtggtgatcctataaatggaactaactttattgactgtttagatttatttttaaaggataaaaatacagagtccatagttatgattggtgaaattggcgggactgctgaagaagaagcatccgaattcataaaaaatcatcaaataaaaaaacctattgttggatttatagcgggcattactgcccctcctggacgaagaatgggtcacgcaggcgccataatttctggtggaaaaggaggagctgaagaaaaaattaggacaatggagggtgctggaattaccattgcaaaatccccctcagatattggaattacactaaaaaacaaattgtcactttaa

SEQ ID NO: 310472 - DNA, 1162 bp, Unknown
  Bacterial polypeptide expressing nucleotide sequence isolated from the Sargasso Sea
aatgaatatccacgaacatcaggctaaacaaattttgagaaagtatggaataaaagttcccgaaggaatttttgctcataatgttaaagagctaatagaaaaagcaaaatcattaaatacagaaaaatatgtattaaaagcacagatacatgctggtggtagaggaaaagctggtggtgttaaattaactgcaaatttagatgagttagaaaaagaagccacagaattattaggtaaaacattaataactcatcaaactggtccaaaaggaagagaagtaaaaagactttacgttgaagaaacatcaaatattgatcaagaattttatctatcttgcttagttgatagagcaacatctaaaattgcctttatatctagtgatcaaggagggatggatatagaggaagttgcaagtaaaaatcctgaaaagattataaccacaaaagtagaatacagtgatgaaatctcaaatgaaaattgtcagaaagtgattgagatttttaaattagataaagatgcaaattcccaagctattaatttgattaagtctatttataaaatgtttatcgaaaatgatgcaaatttagttgaaattaatcctcttattttaaccaaaaaaaataaacttatttgtttagatgcaaaaatgaattttgatgacaacgctctttttagacatcctgaaattttaaaattaagagatttaaatgaagaagaaaaaacagaaatagaggcaagtaaacatgatttagcttatataaagctagatggaagtattggttgtatggttaatggagcaggtctcgcaatggctacaatggacattataaaattatatggagaagagcctgctaattttttagatgttggaggaggagcatctaaagaaaaagtttctgctgcttttaaaataatattatctgataaaaacgtaaaaggaatattaattaatatatttggtggcataatgagatgtgatgtacttgcagaaggagttgttgaagccgctaaagaaacaaaaatagaggtaccattagttgtcagattggcaggaacaaattttagagaagggaaaaaaattttagataattcaggattaaaaattatttcagcatctgatttggctgatgctgctaaaaaagtggttgatgcaataaaataa

SEQ ID NO: 310473 - DNA, 390 bp, Unknown
  Bacterial polypeptide expressing nucleotide sequence isolated from the Sargasso Sea
ttggtaatataattaatggtgcaggcctagctatggcctcaatggatatgattaaattggcaggtggagaaccggcaaatttcttagatgttggtggaggagctacacctgaaaaaatagtcaaagcttttaaattaatttccatggatgagaaagtgaaagttatacttgtgaatatttttgcaggtataaatagatgtgattgggttgcagaaggtatagttcaagcattagagaaaatagaaattaaagttccaatagtaataagattggctggaacaaatgttgaaaaaggaaacaaaatattaaaagaaagtaaaataaaatacattgaagcaaacacactagaggatgctgcaaataaggccgttaaagcattgggtaattaaa

SEQ ID NO: 310474 - DNA, 1165 bp, Unknown
  Bacterial polypeptide expressing nucleotide sequence isolated from the Sargasso Sea
atgaaccttcacgagtatcaagcgaaagaatatttcgaaacatatgacttgcctgtatctaggaggtcaataataaagaaatcttccgatattgatgaagctattgaatctatagatttctctaatggctgtgtagctaaagttcaatcacacacaggtggtagaggaaaggttggtggagttaagctttgcaaatcaaagcttgaggttgaagaatttgtcgaacaatggctaggtaaaaaaatcgtaactatacagactgattcaggtggattgcccgtaaatataatttctcttgaagaattgacgaatatagataaagagctttatatgagttttgttgtagatagaggagaaaagtgtgtatcgatgatagtttctgaagctggaggaatgaatattgaagaagtagcagaaaaaactccagaaaagattctcaaagcaaaacttaattcagattacttaatagaagaaaaagaaataaaggctttagctaattctttaaattttgattctgagcaaacagatcaattcagtaaaattgttttaggttgcgcaaaattatttaaggacaaagatttaagccttttagaaataaatccattggttattaaaaccgatggaaatcttcattgcttagatgcaaaaataaatgttgatgaaaatgctctttatagacaagaagatttattagataaacgtgatcctacacaagaagatcaaagagagtatgaagccaaagagaatgatttaagttatgtgtcgctagatgggaatattggttgcatggttaacggagcaggcttagctatgggaacaatggatactataaaactctatgatggtgaaccagcaaactttctagatgtaggcggtacagcaactaaagagcgagtatctaaagcttttaaattaatactttccgatcagaatgttaaaggtattttgataaatatttttggcgggatagtaagatgcgatcttatagctcaaggaattatagatgcaataagagaaagaagtgtatctgtgccaatagtggttagattgcaaggcaataaatctgaagaaggtaaatcaatcctaaatgactctggtttaaatcttatcggagaagattcgcttcaagaagcatccaaaaaaatagttgagttagttaaatgag

SEQ ID NO: 310475 - DNA, 520 bp, Unknown
  Bacterial polypeptide expressing nucleotide sequence isolated from the Sargasso Sea
atgagttttgataacaatgcattgtttagaagaaatcaagtttccgaattaagggataaatatcaagaaaaccctaatgaagtatatgcatctgatagaggtcttaattacgttagcctagatggaaatattgggaatataattaatggtgcaggtttagctatggcctcaatggatatgattaaattggcaggtggagaaccggcaaatttcttagatgttggtggcggagctacacctgaaaaaatagtcaaagcttttaagttaatttccatggatgagaaagtgaaagttatacttgtgaatatttttgcaggtataaatagatgtgattgggttgcagaaggtatagttcaagcactagagaaaatagaaattaaagttccaatagtaataagattggctggaacaaatgttgaaaaaggaaacaaaatattaaaagaaagtaaaataaaatacattgaagcaaacacactagaggatgctgcgaataaggctgttaaagcattgggtaattaaa

SEQ ID NO: 310476 - DNA, 979 bp, Unknown
  Bacterial polypeptide expressing nucleotide sequence isolated from the Sargasso Sea
aatgaatattcacgagcatcaagctaaacaaattttaaaacaattcggtgcagcagttcctgagggagtttatggtttcacaatagaagaacttttagagaaatgtaaatctttaaaaacaaataaatacgtgctaaaagcacaaattcatgctggcggaagaggaaaagcaggtggtgtcaaaattttagataatttaaatgatcttgaaaaatctgcaaaagaattgtttggaaaaaaattagttacacatcaaacaggcccagagggaagagaagtaaaaagactttatgttgaggtttcgtcaaatattgaaaaagaattttatttatcatgtttagtagatagagcttcttcgaaaatagcatttatttcaagtaatcagggtggaatggatattgaagaggtagcgattaaatctcctgataaaattttaacaaataaaattgagttaattgatgaaatttcagatgaggagtgtgagaagattatagagatatttcacttagaaggaaatcctaagatcgaagcaatttctttaataaaatcaatttataaaatgtttataaaaactgatgcgaatatggttgagattaatccattgatacttaccaaagagaaaaagattatttgtttagatgcaaaagtcaattttgatagcaatgctttatttagacagccaaaaattttagaacttagagatttaaatgaagaggaaccagctgaaatagaagctagtaaatatgagttagcttatattaagttagatggaagtattggatgtatggttaatggtgctggtttggcaatggcaacaatggatataattaagttgtacggcgaagagccagctaattttttagatgttggtggaggtgcctcgaaagagaaagtttcagcagcttttaaaataattttatcagacaagaatgttaaaggaatattaataaatatttttggggggaattatgagatgtga

SEQ ID NO: 310477 - DNA, 502 bp, Unknown
  Bacterial polypeptide expressing nucleotide sequence isolated from the Sargasso Sea
aatggcactttttagacaaaaagagttacaggaaatgcatgatccaactcaagaagatccgagagagtctgaggcatcaaaatatgatctaagttatgtttcattggatggaaatattggatgcatggtaaatggagctggattagcaatgggcaccatggatacaataaaatttttcaaaggtaatcctgccaactttctcgatgttggaggcacagctactcaagaaagggtagcaaaagctttcaaaataattttggatgatccagaagtaaaagtagtacttgtaaatatctttggaggtattgttagatgtgatttaattgcgcaaggtatagttgcagcaattgatgaagtaggagttgaaatacctgtcgttgttaggctggaaggcaatagtgcagaaaaaggactatcaatcctttctaattcgtcttcaaaaatacaaagcaagaatagtttggaagatgcagctagaactgcagtggagcttgcaaaatga

SEQ ID NO: 310478 - DNA, 699 bp, Unknown
  Bacterial polypeptide expressing nucleotide sequence isolated from the Sargasso Sea
aatgagcatcctaattgataaagatacaagagtgcttgttcagggttttacagggtctcaaggaacgcttcattcatctcaatctatagaatatggaactaatgttgtgggtggcgtaactcctggaaaaggtggagcctctcacttagatttacctgtttttaattcagttaaggaggcggttgaacaagtacaaccaaatgcatcattaatatttgttccagcacccttttgtaaaggtgcaattctcgaagccgcagatgctggaataaagtttattgtttgtataacagaaggtgttccaactttggatatgttggaagtaaaaaagattgttgatggcttagacattactcttattggtcctaactgtcctggtgttatcactcctggagttgggaaaatgggaattatgcctggtgagattcatcttcctggaagagttggaattatatctagatcagggacacttacctatgaagcggttaagcaaacgactgatttaggtctggggcaatctagttgtgttggaataggcggtgacccaattcctggctcttcatttattgatattttggagctttttgaagctgatgatcaaacagacgcaattgtcatggttggagagattggaggaagcgctgaagaggaagctgctgaattcatttcacagaatgtcactaaaccagggtttcatat

SEQ ID NO: 310479 - DNA, 877 bp, Unknown
  Bacterial polypeptide expressing nucleotide sequence isolated from the Sargasso Sea
aatgtcagttttggtaaataaagatactaaagttatatgccaaggatttacaggatcacacggaacttttcattctgaacaagcaattaaatatggcaccaatttagtaggcggtgtaacacctaaaaaaggtggacagattcacttagaaagacccgtgtttaatactgttgaagaagcaaaaaacaaaacaggcgccaatgcaagcatgatttatgttcctgcaaagtttgcttctgcagcgataatcgaagctataaatgcttccatagaattaattgtttgcataactgaaggaataccgattttagatatgttaaaagtaaaacaaatattatctaaatctaactcaagattaattggaccaaattgcccaggaattattactccagatgagtgtaaaattggaataatgcctggcaacatacataaaaaaggttccgtaggtattgtttcaagatcaggaactttaacttatgaggctgtagctcaaacgacagttaatggattgggacaatctacttgtataggaattggtggtgacccaattaatggcacgaattttatagattgtttagatttatttcttaatgatccaaaaacagaatctatattaatgattggagaaataggaggaactgctgaagaggaagcctctgagtatataaaaaatcataaaataaaaaaaccaatggttggtttcattgcaggcataactgcgcccccaggaagaaaaatgggacatgcaggagcaataatttctggaggcaaaggtagcgcaaacgataaaattaaaacaatggaggatgcaggaataacaatagcaaaatcaccagcagatattggaaaaacacttttgaataaattgtctaattga

SEQ ID NO: 310480 - DNA, 877 bp, Unknown
  Bacterial polypeptide expressing nucleotide sequence isolated from the Sargasso Sea
atgtcggttttggtaaataaaaatactaaagtaatttgtcagggatttactggctcacacggaacatttcattcagaacaggctataaaatatggaactaatcttgttggtggagttacgccgaagaaaggtggacaaaaacatttagacagaccagtttttgatagcgttttagaggcaaaaaataaagagggagcagatgcaactatgatttatgtacctgctaaatttgcagccgcagcaatcattgaagctattgacgcatcagttgaacttattgtttgtataacagaaggtatcccaattcaggatatgcttaatgtcagacaaaaattaagtggatctagtagcagattaattggacctaattgtccaggaataatcacaccagatgaatgtaaaattgggattatgccgggaagtattcacaaaagaggaagtgttggaattgtatcaaggtcaggaacattgacatatgaagcagtcgcccaaacaactgaaaatggacttggtcaatcaacttgtattggtattggtggtgatcctattaatggaacaaattttatagattgtttagatttatttttaaatgatgatgaaacagaatctattttaatgataggtgaaattggtggaacagctgaagaagaagcggctgactttataaaaaatcataagattaaaaaaccaatagttggatttattgctggaattaccgctcctccaggaaggagaatggggcatgctggtgccattatatcaggtggcaagggtggagctgaagataaaattaaaaaaatggaagaatgtggtattacagttgccaaatcaccatcaattattggaaaaactttatttgataaactgtctaattgaa

SEQ ID NO: 310481 - DNA, 739 bp, Unknown
  Bacterial polypeptide expressing nucleotide sequence isolated from the Sargasso Sea
ttgaacattcacgaataccaatcaaaacagatttttaaagagtacggacttcccgtacccaactctttaactgcaaacacaaccgaagaagtattagtctccgcaaaagaaatttccgatacaaattgggtcgtcaaagctcaagttcatgccggagggagaggaaaagcaggcggggtaaaagtaacggataacttaaaagaagttgaagaattcgccgacaagtggataaacaataagttagtaacttaccagacagatgatcagggtcagccagtatcttgtattttagtagaggagtgtactgagataaaaaaagaattttatcttggggcagtaatagatagatcaacaagatccttagcagttatggcttcttctgagggaggcatggacatagagagagtggcgaaggatcatcccgaaaaaatatttaaagtctttcttaagtctccatcagtaggaaatgaagatcatttgcctcttacagaaggtcttgaattatctgaagaacaaacaaaagaattcaaagatattttcagaaacttggttacactttttttcgaaaaagatttatctttggttgagattaacccactagttcttaatggatcagacaacttagtatgcttagatggaaaaattaatatcgattctaatgctctgtttagacaggatgaaattttagaattaagagatatctctcaagaggaagaaaatggagttaagagcttctgaa

SEQ ID NO: 310482 - DNA, 1159 bp, Unknown
  Bacterial polypeptide expressing nucleotide sequence isolated from the Sargasso Sea
atgaatattcatgaatatcaagctaaggatttatttcgtaagtttaatgttgcaacatcggaaggcaaagttttcgaaaatgaaaatgacgctgaggaatatgctaaatcactagacgttgaagagtatgttgtaaaagctcaaatacatgctggtggaagaggaaagggtggtggtgtgaagttggtgaagaccccggaagaggttagggagatggttaaatccatgttaggaatgaccttagtaactcatcaaactggacccgaaggaaaattagtgaacaaagtctatgttgaggctgcctcaaatattaagaaggagtattacctttcttttgtaactgatagagccacagaaaagaatgttataattgcaagccctgaagggggagtagatatagagaaagttgcagaagagacacctgaaaagcttttaactcagccaatagatcctgtagtcggaattcagccatttcatattagaaagattggatattttcttggatttgataaaggtcaagttaaacaattgggccccttaatccaagggatgtataaccttttcgtagaaacagactgtagcttagttgaagttaatccattaattgttactgacaaagatgaagtaaaagcattagatgcaaaaattaattttgatgataatgctgagtttagacataaagaatataaagagttgcatgatccaactgaagaggagccatcagagttagaggccaaagagtggggattcagttttgtaaaacttgatggtaacattgggtgcctggttaatggagcaggacttgcaatgtcaactatggatataattaaacatcatggtgcagaacccgcaaatttcttagatgttggaggcggtgcaactgttgaacaagttacacaagcatttaaaatgattctaagagacgaaaatgtcaaagctatattagttaatatatttggcggaataatgaaatgcgataccattgctgatggaataatggttgcggccaaagaagttggcatcaaagtgcctctagtagttagattagagggaacaaatgttgaattaggaaaaaaaatgcttgaggaatcaggtttaaatatttccacagcatctactatgaaagatgcagcgctgaaagttgtagaattaatttaaa

SEQ ID NO: 310483 - DNA, 877 bp, Unknown
  Bacterial polypeptide expressing nucleotide sequence isolated from the Sargasso Sea
aatgtcagtgctagtaaataaaaatacaaaagtaatttgtcagggttttacaggatctcatggtacttttcactctgagcaagcaatacagtatggaacaaatcttgtaggtggggtaactcctaaaaaaggaggccaaaaacatttagaaaggccagttttcaacacagtattggaagcaaaaaaagaagtaggtgctgatgctactatgatctatgttcctgcaaagtttgcagcagccgcaatcattgaagccattgatgcatcaatagatctaatagtttgtattacagaaggtattccagttcaggacatgcttaaagtaagacaaagtctagcagactcaaaaagtcgtcttataggaccgaattgccctggaataattacacctgatgaatgtaaaattggaataatgccaggaaatattcataaaagaggttcagttggaattgtttctagatcaggaacactaacttacgaggcagttgctcaaactacagaaaatggcttaggtcaatcaacttgtattggtattggaggagatccaattaacggtacaaatttcatagattgtttggatttatttttaaatgatgatgagacagagtcgattttaatgattggagaaataggtggcacagcagaagaagaggctgcagaatttgtcaaaaatcataaaattaagaaaccaattgttggatttattgctggaattactgctccacctggtcgaagaatgggtcacgctggtgccattatatctggtggcaaaggtggcgcaaaagataaaataaaaaaaatggaagaatgtgggattacagttgcagaatcaccatcaattattggaaaaacattgtttaacaaactgtctaattga

SEQ ID NO: 310484 - DNA, 959 bp, Unknown
  Bacterial polypeptide expressing nucleotide sequence isolated from the Sargasso Sea
aatgaacatacacgagcatcaagctaaacaaattttaaaaaaatttggagcaatcgtaccagaaggtgtgtttggtttaacagttgaggatcttttagagaaatgtaagtcattaaaaacagaaaaatatgttttaaaagctcaaatccatgcaggtggaagaggaaaagctggaggtgttaaaattctgaacaatcttgaagaacttgagaaatcggccaaagagctttttggaaaaaaattaataactcatcagacaggacctgaaggaagagaggttaaaagattatatgttgaagcttcatcagatattgagaaagagttttatttatcgtgtttggtagatagagctacttcaaagattgcttttatctctagtgatcaaggtggaatggacattgaggatgtagcaagcaaatcacctgataaaattttgacaactaaaatagaattaaaagatgaaatttcgaatgaggaatgtgaaaagattattcaaatattcaaattagaaaatagtccaaaaaacgaggcaatatctttaattaaatcaatttataagatgtttattgaaaccgatgcaaatatggttgagataaaccctttaatactcacaaaaaaaaagaaaattatttgtttagatgcaaaaataaattttgatagtaacgctttatttagacatcctgaaattttagaactaagagatttaaatgaggaagatcctaccgagatagaagctagtaagcacgacttagcttatataaaattagatggcaacattggatgtatggttaatggagctggtttagcaatggccactatggatataataaaattatatggagaggagccagcaaattttttagatgttggtgggggagcatcaaaagaaaaagtctcagcagcttttaaaataattttgtcagataaaaatgttaaaggtatattaatcaatatttttg

SEQ ID NO: 310485 - DNA, 1165 bp, Unknown
  Bacterial polypeptide expressing nucleotide sequence isolated from the Sargasso Sea
aatggacatacacgaatatcaggctaaaaaaattttatctgattttggagtaaaaataccaactggtggtattgtatacagtcctgagaatgcagaaaataaagcaagagaaattggaggctctaaatgggtcgttaaagcacaagttcattctggagcaagaggtaaagctggtggtattatagtttgtaattcacctttagaagttgcagatgcaacagataaattattaggtaaaaaacttgttacaaatcaaacaggaccagagggtaaaataataaatagaatttatattgaagaagctacagacataaagcatgaattatatttaggcttggtatttgatagatcttcagagagtattatggttgttgcttctactgaaggtggaatgagtgtagaagaaatttcaaaagaaaagcctgaaacaattattagaagcaaaatagaggttgctgttggtattcaacaatttcaagctcgagagatagcatttggtttaggtattgagcctaaattaatttcaagagtagcaaatacaatagtgggttgctataaagccttcagtgaacttgatgcaactatggttgaggtaaatcccttagttgtttctcaacaagatgaaatatttgcactggattgcaagatgagttttgataataatgcaatcttcagaagagatgatatctcagaacttagagataagactcaggaaaattctaatgaagtttatgcttctgacagaggtatgaattacgtaagtttggatggaaatattggtaatattattaatggagctggattagcaatggcatctatggatatgattaaattagctggaggtgaacctgcaaactttttagatgtaggtggaggagctacacctgaaaaaatcgttaaagcatttaagcttatttctatggacaaaaatgtaaaagttatcttagtaaatatttttgcgggaattaatagatgtgattgggtcgctgatggtattgttcaagctctagaaaaaatagaaatttctctacctttagttattagattggcaggaacaaatgttgaaaagggtaatgaaattttaaaaaaaagtaatataaattatattgaagctagcacattggaagatgcagcgaacaaggctgttaaggcactaggtaaataa

SEQ ID NO: 310486 - DNA, 881 bp, Unknown
  Bacterial polypeptide expressing nucleotide sequence isolated from the Sargasso Sea
ttctattttagttgaagaatgtatgaccatcgctaaagaactttatttaagtgcagtaattgatagagaatcccaaaaaatagtatttataggatcaagcgagggtggtgtaaatattgaagatgttgctaaaaaatatcctgaaaaaataatttacgaaggtgtagtttatggagataaagccctttcagaaaatgcagaaaatatagctaaggtactcaaattaaataaagatcaaacaaatcaatttatacctatgattgagaatttattgagattatttgtagaaaaagatttaagccttttagaaataaaccccttagtaataactgaaaatggagatttgcattgtttagatgcaaaaataaatattgattcaaatgctttgtacagacaacctgatttagctgaaatgtatgatcaatcccaagaagatcctcaagaagctgaggctgcaaaaaatgatcttagttatgtttcattggatggaaatattggctgtatggtaaatggcgctggcttggcaatgggcacgatggataccattaaattttatggaggaaatcctgcaaattttctcgatgttggaggaactgcaactcaacaaagagtggctaaggcttttaaaattatccttgatgatcctgatgttaaagttgttcttgttaatatatttggtggcattgtaagatgcgacttaattgccgagggaattatttcagcaatcaaagaggttgatgtgaaaatacctgttgtcgttagattggaaggaaataatgccgaaaaaggatcacaaattttatcaaaggcaagtattaaaattgatagcataaataatttagctgatgcagcaaaaaaagcagttgattttgcaaaatgag

SEQ ID NO: 310487 - DNA, 1052 bp, Unknown
  Bacterial polypeptide expressing nucleotide sequence isolated from the Sargasso Sea
aatgaatattcacgagcaccaggcaaaaaaaatattaaaaaattatggcgcaaaagttcccaatggtatttttgcttctaatgtaaacgatttattagaaaaagctaaaactttggctacagaaaaatatgttttaaaagctcaaattcattcaggaggcagaggaaaggcaggaggcataaaattagtaaataatttagaggaattagaaaaagaagcaaaaaatttaataggaaaaattttggtaacacatcaaacaggctctaatggaagaaaggtgcagagactttatgtagaagaagcatcattaatcaataaagagttttatttgtcatgtctggtagatagagagagttctaaaattgcatttatatcaagtgatcaaggcggaatggacatagaagaggtagcaaaaaataatccagaaaaaattttaacaacaaaagttgaatttaaagaccaaatttctgatgaagactgtaaacaaattatagaaatatttaatttagatcaggaagcatatgaagaagcgcaaaaactgattaaatcaatttataaaatgtttattgaaaaagatgcaagtctagttgaaattaatccacttatcttaaccaaagataataaaattgtttgtttagatgcaaaaatgaagtttgatgataatgcactttttaaacatccagaaataattgatcttagagatttaaatgaagaagaagaaacagaaatagaagcaagcaaacatgatctggcctatattaagttagatggaaaaataggatgtatggtaaacggcgctggccttgcgatggcaacaatggatattattaaattatatggagaagaacctgcaaactttttagatgtaggaggtggagcttcgaaggaaaaagtttcagcagcttttaaaataattttatcagataaaaatgttaaaggtatattaataaatatatttggaggaataatgagatgcgatgttcttgcaaaaggattagttgaagcggcaagagaaattaaaataaatgtaccattagtaattagattggctg

SEQ ID NO: 310488 - DNA, 1162 bp, Unknown
  Bacterial polypeptide expressing nucleotide sequence isolated from the Sargasso Sea
aatgaatattcacgagcatcaagctaaacaaattttaaaaaaatatggtgcagctgtacctgaaggcgttttttcacactcagtcgaagaactattacaaaaagcaaaatcattaaaaacagaaaagtttgttttaaaagcgcagattcatgcaggtggacgaggaaaagcaggagggataaagatcgtaaatacaatagaagagctaaattcagcagctaaagaaatgcttggaaaaaagttgataactcatcaaacgggaccccaaggaagagaagttaaaagactgtacgttgagacatcttctaaaattgaaaaagaattttatctttcatgtttagttgatagagtaagttcaaagattgcatttatttcaagcgatcaaggtggaatggatattgaggatgttgcgaaaaatcatccaaaaaaaattgtaactacaaaaattaatttagatgatgaaatatcggataaggattgtgaaaaaattgtagaaatatttaatttaagtccagatgcaagaaaacaagcaataaatttagttaaatcaatatacaaaatgtttattgatatagatgcaaatctagttgaaataaatcctatgattttaactaaagaaaacaaaattatatgtctagatgcaaaaatgagctttgatgacaacggattatttagaaatccagaaattttaaatttaagagacttaaatgaggaagaagagacagagatagaagcaagcaaacatggtttgtcatatataaaattagaaggtagcataggatgtatggtcaatggtgcaggtttagcaatggcaacaatggatataattaagttacatggagaagaaccagcaaattttttagatgtaggtggaggagcatcaaaagaaaaagtttcagcagcatttaaaataattttatcagataaaaatgtaaaagggattttgataaatatttttggtggcataatgagatgtgatgttcttgcacaaggagttgtagatgctgctaaagaaattaaaattgaagttccattaattgtgagattggcaggaacaaaatttgaagagggtaaaaaaatattagataattcaggtttagaaattatatctgcaactgacttggctgatgcagcaaaaaaagttgttaattctataaaataa

SEQ ID NO: 310489 - DNA, 1174 bp, Unknown
  Bacterial polypeptide expressing nucleotide sequence isolated from the Sargasso Sea
atgaatatccacgaatatcaagctaaagaaatattatctaaatatggagtttcaattcccaaaggagggctggcatacagtccagaaaatgcaaaagatcgtgctaccgagcttggaggagatttatgggtagtaaaagcacaaattcattccggagctagaggtaaagctggaggtattattgtttgtaaatcagagcaagaagtttctgatgcagcaaataaacttcttggtaaaaccctagttactcatcaaaccggaccagaaggcaaaacggttcaaagaatctatgtcgaagaaggaacagacataaaaaaagagttttacttaggattggtttttgacagaagtactgagagcattatggtggtagcttcttctgaagggggtatgagcgttgaggaaatagcacaagagaaacctgaatctttaatcaagactaagattgaagctgcagtaggtatgcaggcttttcaagcaagagagatagcatttaaattgggcttagaggcaaaagcgattaaccgttgtgcccaagcaatccttggtgcctacaaagccttcagcatgtcagatgccactatggtagagattaatcctctggtgcttactggtgatgatcatgttgtcgccttagattgtaagatgtcatttgatgataatgcattatttcgaaatccagagctagcagaattaagagataaatctcaagaggatccaaaagagacttatgctgccgatagaggtctaaattatattcctttagacggtgatattggaaatataataaatggtgccggtcttgcaatggcctctatggatatgattcaactcgcaggtggacagcctgctaactttttagatgttggcgggggtgctacacctgagaaatttgtaaaagcatttaaacttatttctggtgatcctaaagttaaagttatcttgattaatatcttcgctggtataaataggtgtgattgggtagctcaaggtatcgtagacgctctcaatcaaatcaatatttcccaacctcttgtgataagacttgctggcacaaatgttgatgaaggtataaaaatacttaaagatagtaaaatagaatatattgaggcatttactctggaagatgcagccaacaaagctgttaaagcactgaaagagctaggagaataaa

SEQ ID NO: 310490 - DNA, 956 bp, Unknown
  Bacterial polypeptide expressing nucleotide sequence isolated from the Sargasso Sea
tatggacattcacgaatatcaggcaaagaaaatactttcaaattttggagtaacaattccaagaggtggaattgtttacagtccagaaaatgctgaaaataaagctagagaaattggtggatcaagatgggttgttaaagctcaaatccattctggtgcaagaggaaaagccggagggataattgtttgtaacactccattagaagttgctcaagcaacagataaattattaggaaaaaaattagtaacaaatcaaacaggacctgaaggaaaaattgtaaacagaatttatattgaagaagctacagatatcgaaaaggaattatatttaggattggtttttgatagaagctcagaaagtattatggttgttgcatcgacagaaggtggaatgagtgtagaagaaatttcaaaggaaaaaccagaaacaattattagatctaaaattgaagttgcagttggaatgcaaaattttcaagccagagagttagcatttggtcttggtatagagccagacttaatcagaagagcttctgatactattattggatgttataaagctttcagtgaattagatgcaacgatggtagaagttaatcctttggttatttcaaaacaaaaacaaattttagcattagactgtaaaatgagttttgataacaacgcaatgtttagaagaagtcaagtttctgagctaagagataaaacacaagaagattcaaaagaaatttttgcatcggacagaggtttaaactatgtgagtttagatggaaatataggtaacattattaacggtgctggtcttgcgatggcatctatggacatgattaaacttgctggaggagcacctgcaaattttttagatgtaggaggcggagcaacaccagaaaaaatagttaaggcctttaaattagtaacaatggatgaaaaagttaaagtaattcttgtaaatatct

SEQ ID NO: 310491 - DNA, 1003 bp, Unknown
  Bacterial polypeptide expressing nucleotide sequence isolated from the Sargasso Sea
atgaatattcacgaacatcaagcaaaaaaaattttaaaagagtttggagctcccgtttctaatggtgttgtaatactttctataaaagaaatagaggaaaaaataacacaattaaaaagtaaagagtttgttttaaaagcccaaattcatgcaggaggacgaggaaaagctggaggagtaaaactaattaaaagtctagaagaattaaaacaagaggccactaaaatgatgggcaagagattaattacacatcagactggacctgaaggtaaagaagtaaaaaggctttatattgaagaagcatcagaaattgaaaaagagttctatttatcatgtgttgttgatagagaaagttctaaaatcgctttcattagcagcaccgagggaggtatggatatagaaaaagtagcttcagaaaatccagaaaaaatagttacgactaaaatcgatctcaaaaatgaattagaaaaaaaagatatagaaaaaataatttctccatttaaatttgatgaaaataaaaaagaagaagcagaacatttattaaatgcaatttttaaaattttaattgaaaaagatgctactttaattgagattaatccacttattataacaaaaagtcagaagatattatgcttagatgccaaaatgaattttgatgataatgcaatttttagaagaccagatattttgaaactacgagattttaatgaggaagatcctattgaaatagaggcaagcaaacatgatcttgcttatataaaacttaatggttcaattggatgtatggtcaatggagcgggcttagctatggcgaccatggatatcataaaactttatggacaagaacctgcaaattttttagatgtaggtggcggtgcttcaaaagaaaaagtttctgcagcatttaaattaattttgtcggataaaaatgtaaaaggaattcttataaatatttttggtggtataatgcaatgtgatgtgcttgctaaaggtgtagtagacg

SEQ ID NO: 310492 - DNA, 1168 bp, Unknown
  Bacterial polypeptide expressing nucleotide sequence isolated from the Sargasso Sea
atgaatttgcatgagtatcaggcaaaatccctatttgccgaatatggtttaccagtgtcagaaggttttgcatgtgatacagcccaagaagctgtagaagcggcaggccgtattggcggaaatttatgggttgttaagtgtcaagtacacgcaggcggccgcggtaaagcgggtggcgttaaagtcactggcgataaagaagaaatcagagcctttgccgaacactggttaggcaaaaatctggtgacttatcaaacagatgagaaaggtcagccagttgctaaaattttagtagaaagctgcaccgacatcgctaacgaactgtacttaggtgcagtagttgaccgtgctacccgtcgcgtagtgttcatggcgtcaactgaaggtggtgttgagattgagaaagtggccgaagaaacgccagaactcattcacaaagcgatcatcgatccactgactggtcctcaaccataccaagcacgtgatcttggcttcaaactgggcttaaacccaactcaaatgaagcaattcaccaagatcttcatgggtctggcgactatgttcgtcgatcacgatttcgctctgctggaaatcaacccactggttatcaccactgaaggtaacctgcactgcttagacggtaaaattggtatcgatggtaacgcactgttccgtcaaccaaaaatcaaagcaatgcacgatccatcacaagacgacgcccgtgaagctcacgctgcaatgttcgaactgaactatgttgcgctggacggaaacgtaggttgtatggtgaacggtgctggtctggcgatgggtactatggacatagttaacctgcacggcggcaagccagctaacttcctcgacgtaggtggtggcgcgactaaagaacgtgttgctgaagcattcaagatcattctgtctgacagcaatgtgaaagccgttctggttaacatcttcggtggtatcgtacgttgtgacatgatcgcagaaggtatcattggcgctgttaaagaagttggcgttaaagttccagttgtagtgcgtttagaaggtactaacgctgaattaggccgtgaagtattagctaaatcaggtcttgatatcattgcagctaacagtctgactgatgcggctgagcaagtagttaaagctgcggagggcaaataat

SEQ ID NO: 310493 - DNA, 874 bp, Unknown
  Bacterial polypeptide expressing nucleotide sequence isolated from the Sargasso Sea
atgtctgtattaattaacaaagataccaaggtaatctgccaaggctttaccggtggtcaaggtactttccactctcaacaagctatcgattacggtacgcaaatggttggtggtgtatctccaggtaaaggcggtactgagcacttaggtctaccagtgttcaacactgtgaaagacgctgtggctgcgactggtgcaaccgcttctgtaatctacgttcctgctcctttctgtaaagatgcaattcttgaagcaatcgacggtggtatcgagctgatcgtatgtatcactgaaggtatcccaacactggatatgctggaagtgaaagtgaagctagaagaaacaggcgttcgcatgatcggccctaactgcccaggtgttatcactccaggtgaatgtaagattggtattatgccaggccacatccacttaaaaggtaaagtgggtatcgtttctcgttcaggtacgctgacctatgaagcggttaagcaaactactgacgaaggtttcggccaatctacttgcgtaggtattggtggtgacccaatcccaggtactaacttcatcgacgtattggaaatgttccaaaacgatccacagactgaagccatcgtgatgatcggtgaaatcggtggtactgctgaagaagaagcggctgcttacatcaaagctaacgtgactaaaccagttgtgtcttacatcgcgggtgtaactgctcctgctggtaagcgtatgggtcacgcgggtgcgatcattgctggcggtaaaggtactgctgctgacaaatttgctgcattagaagcagcgggcgtgacaactgtccgctcgttagcggatatcggcaaagcgctgcgtgctaaaacgggttggtaat

SEQ ID NO: 310494 - DNA, 499 bp, Unknown
  Bacterial polypeptide expressing nucleotide sequence isolated from the Sargasso Sea
tcgtcacccagatgttgaagagcttagagatcctgatgaagaggatccagcagaattagctgctaataaaattggattaacctatattaagttggatggaaatattggctgcttagtaaatggtgctggtttagcaatggctacaatggatataattaagttatatggtgaggaacctgctaactttttggatgttggaggctcagctacaaaagataaagtaacagaagcatttaaaataattttatccgataagaatgttaaaggtattttagttaatatttttggaggaataatgcgctgtgatgtagttgcagaaggtgttttagctgcagctagagaaattaatatttctgtaccacttgttgtaagacttgaagggacaaatgttgaagaaggcaaaaggattattgaagattctgaaatggaagtgataagtggttcagatttagatgatgctgctcaaaagatcactaaagcaatatcagaggtaaagtaa

SEQ ID NO: 310495 - DNA, 1162 bp, Unknown
  Bacterial polypeptide expressing nucleotide sequence isolated from the Sargasso Sea
atgaatattcacgagcatcaagcaaaagaaattttaaaaaaatatggtgcaattgtacctgaaggtgttttttcgcacacagttaaagaattattacaaaaggcaaaatcattaaaaacagaaaactttgttttaaaagctcagattcatgctggcggacgaggaaaagcaggagggatcaagattgtcaatacaatagaagatctaaattcagcagctagagaaatgttaggaaaaaaactgatcactcaccagacaggacctcaaggaagagaagttaaaagactatatgttgaaacatcttcggaaattgaaaaagaattttatctttcatgtttagttgatagagcaagttctaagattgcatttatttcaagcgatcaaggtggaatggatattgaggaggttgcaaaaaataacccaaaaaaaattgtaaccacaaaaattaatttagaagataaaatatcagatcaggattgtgaaaaaattgtagaaatatttaatttaagtctagatgcaaaaaaacaagctataaatttaattaaatcaatatatacaatgtttattgatatagatgcaaatctagttgaaataaatcctttgattttaactaaagaaaataaaattatttgtttggacgcaaaaatgagctttgatgacaatgcattatttagaaatccagaaattttaaatttaagagacgtaaatgaggaagaagagatagagatagaagcaagtaaacatggtttatcttatataaaattagaaggcagcataggatgtatggttaatggtgcaggtttagcaatggcaacaatggatataattaaattacatggggaagagccagcaaactttttagacgttggtggaggggcatcaaaagaaaaagtttcagcagcatttaaaataattttatcagataaaaatgtaaaaggaattttaataaatatttttggtggtataatgagatgtgatgttcttgcacaaggagttgtggatgctgccaaagaaatcaaaattgaagttcctttagttgtaagattagctggaacaaaatttgaagaaggaaaaaaaatattaaataattcgggtttagaaattatatctgcatcgaatttatctgatgcagcaaaaaaagttgttaattctataaagtaaa

SEQ ID NO: 310496 - DNA, 478 bp, Unknown
  Bacterial polypeptide expressing nucleotide sequence isolated from the Sargasso Sea
aatgaaaattcacgaatatcaaggtaaggaaatttttaagtcatacgacatcccaattcaagatggatatgtcatagataaaattgatgatgcgttaccaactattaaaaaagttcaaaacaactttaaaactgaagcagtagttgtaaaggctcaaattcatgcaggtggacgtggcaaaggtggtggtgtaaaatactcacctacaactgacgatgcctttaaaaatgtaaaaaagatgttaggaatgaatctaataactcaccaaacaggagaaaatggtcaaaaagttaaaaaaatctatataactcaagcgttagatataaaaaaagaattttactgtgctattacacttgatcgatctaaagcaaaagatgtatttatggtttcatctgaaggtggagttgaaattgaaaaagtagcagaagaaactcctgaaaaattattaaagtatggattgatcctcttattggtatga

SEQ ID NO: 310497 - DNA, 641 bp, Unknown
  Bacterial polypeptide expressing nucleotide sequence isolated from the Sargasso Sea
ttcagcaattatagaggcaatagattcttctatagaattgattgtatgtataagtgagggaattccagttttagacatgctaaaagtaaaaagaaaactttcgaactctaaatcaagacttattggtcccaactgtccaggtgtaataactcctgatgaatgtaaaattggaataatgcctggaaatatacataaaaaaggaacagtaggcattgtttctagatcaggaacattaacttacgaggctgttgcccaaacttcagaaaatggcctgggtcaatccacatgtgtaggaataggtggagatccaataaatggtacaaattttattgattgtctagatctgtttttaaatgatgaagaaactgagtctatagtcatgattggtgaaatcggaggaactgctgaagaagaagccgctgaatatataaaaaatcataagattaaaaaaccaatggttggatttgtagctggaattacagcaccacctggtagaagaatgggtcatgctggtgcaataatatcagggggaaaaggtaacgctgatgaaaaaattaaaattatggaaaaatctggtattacaatggcaaaatcaccatctgaaattggaataactctattgaataaattgtctaattgat

SEQ ID NO: 310498 - DNA, 1174 bp, Unknown
  Bacterial polypeptide expressing nucleotide sequence isolated from the Sargasso Sea
gatgaatctacacgaatatcaagctaagaagttatttaaggattatgacatatccgtttcagaaggcttgccggcttcctctagccaagaagctgaaaagatagctttatctctaaatgttgataagtgggtagtaaaagcacaagtccatgctggaggaagaggtaagtctggaggagttgaattagttgatagcattgagaaagttaaagcttttgctgataaatggcttggaaaaaatttagtaactttccaaacagatgagaaaggtcaacctgtaaaccaaatcctaatagaaacagtaacagatattgataaagagctttatttaggtgctgtgattgatagagcttcccaaaggctcgttgttatggcatcgacggagggaggagtgaatatcgaagaggttgccgaggagacaccagaaaaaatacataaagctgaaatagatcctattcaaggtccaaatcaaccgcaagcagaacaattagctaatagcttgaacttaaatgaagtgcaaactttacaatttattgagatttttaatggtctagtgagattgtttatagataaagatttatccctagttgaggtgaatcctttagtgattacatcctcaggagatttaatttgtttagatgcaaaaataaatgtagattcaaatgctctttacagacaggaacaaatcctggaattaagagatccctctcaagaagatcccagagaggcaagtgcagcagagtgggatctaagttacgttgctttagaaggaaatattggctgtatggtcaatggtgcaggtttggcaatgggtaccatggatatcatcaagttacacggtggcgagcctgctaattttttggatgtcggtggcacagctgattcaaaaagagttgctgaggcgtttaagattatcctctcagatgaaaatgttaatacggtattgataaatatctttggtgggattgttcgttgtgatgttattgctgacgggatagtagaggccttaacagtaacgggagtttcagtccctgtaatagttagattagaaggaaataatgctcacaaaggattgaagatacttgacgaatgcgacctgaatatcatccctgcatcaaatttagaggaggcagcaagtttagctgtaagagcatcaaagggagatatagggtga

SEQ ID NO: 310499 - DNA, 328 bp, Unknown
  Bacterial polypeptide expressing nucleotide sequence isolated from the Sargasso Sea
aatgaatatacacgaatatcaagctaaagaaatattatccaaatttggagtttcaattcccaaaggaggactggcatacagtccagaaaacgcaaaagatcgtgccactgagcttggaggagatttatgggtagtcaaagcacaaattcattccggagcaagaggtaaagctggaggcattattgtttgtaaatcagagcaagaagtctcagatgcagcaaataaacttcttggtaaaacactagtgactcatcaaactggaccagaaggaaaaacggttcaaagaatctatgtcgaagagggaacagatataaaaaaagagttttac

SEQ ID NO: 310500 - DNA, 583 bp, Unknown
  Bacterial polypeptide expressing nucleotide sequence isolated from the Sargasso Sea
tagtttaattgaaataaatcctctcataataaataaagagcaaaaattagtttgtttagacgcaaaaatgaattttgatgataatgcaatttttagaaggccagaaatccttaaattaagagacttgaatgaagaggaaccagccgagatagaagctagtaagcatgatttagcttacataaaattaagtggctctattggttgcatggttaatggcgctggtttagccatggctactatggatataatcaaattatatggtcaagaacctgctaattttttggatgtggggggaggagcttcaaaagagaaagttacagctgctttcaaacttatattagcagatcacaatgtaaaagggatactaataaatatttttggtggaataatgcggtgtgatgtactagcgcaaggagttattgatgcggctaatcaagtaaacttatctgttccccttgttgtaaggttggcgggcacaaattataaagagggaaaagaaattcttgaaaaatcaaacctaaagatcttatctgcttctgatttgaatgatgctgcaaagaaaatagttgaggccataaaataa

SEQ ID NO: 310501 - DNA, 1165 bp, Unknown
  Bacterial polypeptide expressing nucleotide sequence isolated from the Sargasso Sea
tatggacattcacgaatatcaagcaaagaaaatactttcaaattttggagtaacaattccaagaggtggaattgtttacagcccagaaaatgctgagaataaagcaagagaaattggtggatcaagatgggttgtcaaagcacaaattcactctggtgcaagaggaaaagctggagggataattgtgtgcaataccccactagaagttgcgcaagcaacagataaattacttggaaaaaaattagttacaaatcaaacaggacctgaaggaaaaattgtaaacagaatatatattgaagaagctacggatattgaaaaggaattatatttaggattagtttttgatagaagctcagaaagtattatggttgttgcatctacagaaggtggaatgagtgtagaagaaatttcaaaggaaaaaccagaaacaattattagatctaaaattgaagttgcagttggaatgcaaaattttcaagctagagaattagcatttggtcttggtatagagccagacttaatcagaagagcttctgatactattattggatgttataaagctttcagtgaattagatgcaacgatggtagaagttaatcctttggttatttcaaaacaaaaacaaattttagcattagactgtaaaatgagttttgataacaatgcaatgtttagaagaagtcaagtttctgagctaagagataaaacacaagaagattcaaaagaaatatttgcatcagacagaggtttaaactatgtaagtttagatgggaacataggtaatattattaacggtgctggtctagcgatggcatctatggatatgattaaattagctggaggagctcctgcaaattttttagatgtaggaggtggagcaacacctgaaaaaattgttaaggcctttaaattagttacaatggatgaaaaagttaaggtaattcttgtaaatatttttgctggtatcaatagatgtgattgggttgcggaaggaattgtagatgcattaaaaaaaattgaaattaaagttccattagttatccgtttagcaggtactaatgtcgaaaaagggaataaaatcttaaaagagagtaaaataaattatatagaggcaaatactttagaggatgcagccaataaagcagttgcagcactaaataaataa

SEQ ID NO: 310502 - DNA, 459 bp, Unknown
  Bacterial polypeptide expressing nucleotide sequence isolated from the Sargasso Sea
taaatgaggaggaagaaacagagatagaggcaagcaaacatgatttagcctatataaaattagatggtagcattggatgtatggttaatggtgcaggtttagcaatggctactatggatataattaaactttatggagaagaaccagcaaattttttagatgttggtggtggcgcttctaaagaaaaagtttcggcagcatttaaaattattttatcagataaaaatgttaaaggaattttgataaatatttttggaggaataatgaggtgtgatgttcttgctcaaggagttgtagatgctgcaaaggaaattaaaattgaagttcctttagttgtaagattagcgggaactaaattcgaagaaggtaaaaaaattttagataattctggtttaaagcttatatctgcatcagatttatcagacgcagcaaaaaaagtagtagaagcaattaaataaa

SEQ ID NO: 310503 - DNA, 1195 bp, Unknown
  Bacterial polypeptide expressing nucleotide sequence isolated from the Sargasso Sea
aatgaacattcatgaatatcaggccaaaggcctgctccgaaattatggggcacccgttgcagacggtcgtattgtagtcaaatctgaagatgcaaaaacggctgccggagagcttgacggcccagtctgggttgtcaaagctcaaattcacgccggtgggcgaggcaaaggcacttttattgaaaaagatgcaggcgagagcggtggggtcagaattgctaaatccgttgagcaagcagcggaagaagcaaaaaaaatgctcggccgtacacttgtaacgcatcaaacaggtcccgctgggaaacaagtaaatcgagtttatatagagcaaggggccgaaattaaaagtgaattatacctcgctcttttagttgatagagtaacgtccagaatatcttttgtatgctccacagagggcggaattgatatagaagatgttgcggctagcaatcctgaaaaaattctttctttttctgtagatccagcaactggatatcaggctttccatggtagaaagattgcctttgctctgggacttgagaattcgcaagttaaagagtgcataaaactcatgggacaactgttccaagcatttatagaaaaagatatggaaatgttggaaattaatccgctgatcgttactaaaaacgatacgcttagtgttttggacgcgaaggtaggatttgatagcaatgcaatctaccggcaccaagatattgctgatctaagagataccacagaagaagatcctaaagagttggaggctagtaagtacgacttaaattatatcgctttggatggcgagataggttgtatggttaatggtgcgggacttgctatggcaacgatggatatcattaaactatatggagctgagccagcaaactttttggatgttggagggggcgcgacaaaagaaaaagtaacagaagccttcaaaataatcacgtccgacccaaaagtaaaaggaatattagtcaacattttcggcggaattatgcgatgtgatgttatcgctgagggagtagttgcggcggtgaaagaggttggtctgcaagttcctttagtcgttcgcctagaagggacaaacgtggaaaaagggaaagacatcataaataattccggacttgatgtcatagctgcgaatgacctgagagatggggcagaaaaaatcgtaagagcagtgaaaggttaa

SEQ ID NO: 310504 - DNA, 478 bp, Unknown
  Bacterial polypeptide expressing nucleotide sequence isolated from the Sargasso Sea
tatggctgtgttaattgacgaaaaaaccaaagtgatttgtcaaggctttacaggttcacaaggaacatttcattccgagcaagccatagcgtacggaactaaaatggtgggaggagtaacccctggaaaaggcggcggcgatcatttaggtttgcccgtatttaattccgtgcacgaagcaaaacacataacaaacgcagatgcttctgtaatatacgtacctccgccctttgcggcagattctattttggaagcaatcgacgctcagatggaccttattgtttgcattactgaaggtatccctgttcaggatatgctaaaagtaaagagagcactcgaaaactcaacttctattcttgttgggccaaactgtcctggagtaataaccccagaagcttgtaaaataggcatcatgccaggccatatccataagcgtggatctgttggggttgtatcaagatcgggcactttaacgtag

SEQ ID NO: 310505 - DNA, 722 bp, Unknown
  Bacterial polypeptide expressing nucleotide sequence isolated from the Sargasso Sea
aattgaatttaataatgaaggtcctgatttagatgaaattgaaaaaataatttcaattttcaaattaagtgaagatcaaaaaaaaattgctatcaaattaataaaatctctatacaaaatagtagtacaaaaagatgctaccttgattgaaataaatccattaataataacaaaagaagataagattgtttgtttagatgctaagatgaactttgatgataatgctatttttcgaagaccagaaattcttaatctcagagaccttaacgaagaagagccagcggaaatcgaggctagtaagtacgatctagcatatataaaattgaatggttcaattggatgtatggttaacggagcaggtctagcaatggcaactatggatataattaaattatatggcgaagagccagctaattttttagatgtaggtggaggggctagcaaggagaaagttactgccgcatttaaattaatattagcagacaaaaatgtgaaaggaattttaattaatatttttggcgggataatgaggtgtgacgtacttgctcaaggagtagtagatgcagcaaaacaagttaacctttcagttccgcttgtagtaagattagctggaacaaattttaaagaaggaaaagaaattcttgaaaaatcaaatttaaaaatcttatctgcatctgatttaaatgatgcagcaaaacaaatagttaaagcaataaaataaa

SEQ ID NO: 310506 - DNA, 411 bp, Unknown
  Bacterial polypeptide expressing nucleotide sequence isolated from the Sargasso Sea
ctttaacttatgaagcagtagctcaaactactgaaaatggtttaggacaatcaacatgtattggtattggtggtgacccaattaatggaacaaattttattgattgtttggatttatttttaaaagatgatgagaccgactctattttaatgataggtgaaataggtggaaccgcagaggaagaggctgctgagtttgtaaaaaatcatgaaattaaaaagcctattgttggatttattgctggaataactgcaccttcaggacgaagaatgggtcatgcaggggcaattatttccggtggaaaaggtggtgcagaagataaaataaaaaaaatggaagaatctggaattacagtcgctaaatcaccatcaataattggaaaaactttatttaataaactgtctaattgaa

SEQ ID NO: 310507 - DNA, 262 bp, Unknown
  Bacterial polypeptide expressing nucleotide sequence isolated from the Sargasso Sea
aatgataggtgaaataggtggaacagctgaagaagaagctgcagaattttttaaaaaccataaaataaaaaaacctatcgttggctttatagccggaatcacagcgccaccaggaagaagaatgggtcatgcgggagcgataatttctgggggaaaaggtggagcagaagataaaataaaaaaaatggaagattgtggtataacaattgcaaaatcacctgcagaaattggcaaaacactattaaacaaattgtctaattga

SEQ ID NO: 310508 - DNA, 877 bp, Unknown
  Bacterial polypeptide expressing nucleotide sequence isolated from the Sargasso Sea
atgtcagttttaattaacaaagataccaaagtaatttgtcaaggttttacaggtgcccatggaacttttcattctgaacaatctattaagtatggaactaatttagttggtggagttactcctaaaaaaggaggtcaaattcatttggaaagaccagtatttaatactgttaaagaagctaaagatcagacaggtgcaaatgcaacaatgatttatgttcctgcaaagtttgcagcttcagcaattatagaggcaattgattcatctatagaattgatcgtatgtataagtgagggaattccagttttagacatgctaaaagtaaaaagaagactttcgaactctaaatcgagacttattggtcccaactgtccaggtataataactcctgatgaatgtaaaattggaataatgcctggaaatattcataaaaaaggaacagtaggaattgtttctaggtcaggaacattaacttacgaggctgtagcccaaacctcagaaaatggcctcggtcaatctacctgtataggaataggtggagatccaataaatggtacaaattttattgattgtctagatctgtttttaaatgatgaaaaaactgagtctatagtcatgattggtgagatcggaggtactgctgaagaagaagctgctgaatttataaaaaatcataagataaaaaaaccaatggttggatttgtagctggaattacagcaccacctggtagacgaatggggcatgctggtgcaataatatcagggggaaaaggtaacgctgatgaaaaaattaaaattatggaaaaatctggtattacaatggcaaaatcaccatctgaaattggaataactctattgaataaattgtctaattgat

SEQ ID NO: 310509 - DNA, 577 bp, Unknown
  Bacterial polypeptide expressing nucleotide sequence isolated from the Sargasso Sea
atgattctcaagcgggtgtggcggagtgttcaaagagcgactttcggtcgagcgtccatgaacatccacgagtatcaaggaaagcaactgttccgagaagcaggcttgtccgtacaagacggagtgcattgtacatcagtcgaacaagccttggctgcatacgacagcttgggtagcaaggttgtcgctgtcaaaagtcaaattcacgctggtggccgaggaaaggggacattgtatcatccagacagcggtgatctagttatggaaggtggagtgaaaatcgcattcagtcgggaagatgttgagaactatgctgaaaatatccttggcaatattctcgtcacaaagcaaacaggtgccgaaggaaaaatagtcaacaacctctacgtcgaaggtggttgcaatattgcccatgaatactacctcgcaatcttggtcgatcgagaagaaaagatgccactcattatggcctcaaaggaaggtggagtggatattgaagaggtcgcagaaaaaacaccagaggcgattttcaagatttatgtcgaccccgttgttggcttacagcgagctgatgcag

SEQ ID NO: 310510 - DNA, 889 bp, Unknown
  Bacterial polypeptide expressing nucleotide sequence isolated from the Sargasso Sea
cttgtacgtagaagctgggtgtaatattgagcgagaaatttatattgccttcgttcttgaccgttcaaaagaaagtgtcacagttgttgcttcagctgaaggcggcatggaaattgaacaacttgctgttgagaaacctgattcaataatcaaagtagcagttgaagctgcagttggtatgcaaccatttcaggcacgtgaaattgtttttgcattaggtttggataaaacacaagtaaatcaagcagtgacaactattcttgggtgttatcgtgcaatgcgtgatctagacgcaaatatggttgaaataaatcctttggtcgtaacaaaagagggaaacttattggcggtagatgccaagatgggtttcgatgaaaatgcactttttcgtcacagtaatatttctgaattgcgtgataaatcacaagaagatgtacgtgaaatgaatgcagctgatcgtggactgagttatgtaggtttagatgggaatatcggttgtataatcaatggcgcaggtttggctatggctacgatggatatgattatgcatgcaggaggtgaaccagctaattttcttgatattggtggcggagcttctccggaacgagtaagcaaggcatttaatcttgtgctttctgatgacaatgttaagtgtattttgataaatatttttgctggcattaaccgctgtgactgggtagctgaaggtattattcaagctgttcaaaaaattgatctaaaagttccggtcgttgttagattatctggtaccaatgtagaacagggtcgtaagatgcttgaagatagtggtctgccacttattatggctgagacacttagagaaggtgctgataaagctgtgactgaatggaaaaaggctggtaaataa

SEQ ID NO: 310511 - DNA, 1162 bp, Unknown
  Bacterial polypeptide expressing nucleotide sequence isolated from the Sargasso Sea
aatgaatattcacgagcaccaagctaagcaaattttaaaaaaatatggtgcagttgtaccagaaggaattgttgcattttcagttgaagaattggtagaaaaagcaaaatcattaaaaacagaaaaatttgttctaaaagcacagattcatgctggtggcagaggaaaagctggtggagtaaaaattttaaatacaatagaagagctaagtgtagctgctcaagaattattgggtaaaaatttgataactcaccaaacaggacccaaaggtagagaagttaaaagattatatgttgaggtttcttcaaatatattaaaagaattttacttatcttgtttagtagatagatcaagttcaaaaatagcatttatttcaagtgatcaaggaggaatggatatagaagaagttgcaaacaaaacgcctaataaaataattactactaaagtagattttgaaaaagaaatttcagatgcaagttgtgaaaatattataaaaatatttaatttaaataatgaaaataaaagtgaagcaataaaattaattaaatctatatacaaaatgtttataagtacagatgctagtatggttgaaataaatccactaattttgactaaagataaaaaaataatttgtttagatgcaaaaattaactttgatgacaatgcattatttaaacataaagaaattgccaaacttagagatttgaatgaagaagaaccaacagagacggaagctaataaacatgatttagcttatataaaattagatgggagtattggatgtatggtaaatggcgcaggattagctatggcaacaatggatataattaaattatatggtgaagaaccagcaaattttttagatgtgggaggaggtgcatcaaaagagaaagtttctgcagcttttaaaatcattttgtcagataaaaatgtaaaaggaatcctgataaatatttttgggggtattatgaaatgtgatgtgttagcacaaggtgtagttgatgcagctaaagaaattaaaattcatgtaccgttagtcgttagacttgccggtactaattttgaaaaaggtaaaaaaattttagataattccggtttaaaaataatttcagcatccaatttatcagatgcagcaaaaaaaattgttaaagaaataaaataa

SEQ ID NO: 310512 - DNA, 1162 bp, Unknown
  Bacterial polypeptide expressing nucleotide sequence isolated from the Sargasso Sea
aatgaatatacacgagcatcaggcaaaacaaattttaaaaaaatttggtgcgattgtaccagaaggtgtatttggtttaacggttgaggaacttttaaagaaatgtaagtcattaaaaacagaaaaatatgttttaaaagctcaaattcatgcaggtggaagagggaaagcgggaggtgttaaaattctgaataatctcgaagaacttgagaaatcagccaaagagcttttaggaaaaaaattaataactcatcagacaggacctgaaggaagagaagttaaaagattatatgttgaagtttcatcagatatcgagaaagaattttatttatcatgtttggtagatagagctacttcaaaaattgcttttatctctagtgatcaaggtggaatggacattgaggaagtagcaagcaaatcacctgacaaaattttgacaactaaagtagaattaaaagaagaaatttcaaatgaggagtgtgaaaagattattcaaatatttaaattagagaacaatccaaaaatcgaggcaatatctttaattaaatcaatctataagatgtttgttgaaaccgacgctaatatggttgaaataaaccctttaatactcacaaaagaaaaaaaaattatttgtttagatgcaaaggtaaattttgatagtaacgctttgtttagacatcctgaaattttagaacttagagatttgaatgaggaagatcctactgaaattgaagctagtaaacatgacctagcttatatcaaattagatggcagcattggatgtatggttaatggagctggtttagcaatggccactatggatataataaaattatatggagaagagccagcaaattttttagatgttggcgggggagcatcaaaagaaaaggtctcagcggctttcaaaataattttgtcagataaaaatgtaaaaggtatattaatcaatatttttggtggcataatgcgatgtgatgttctagctcaaggcgttgtagatgctgcaaaagaaatgaaaatcaatgttcctttggtagtcagactagctggtacaaattttaaagaaggtaaagaaatattagataattcaggtttaaaattaatatctgctgaaaatttagatgacgcagccaaaaaaattgttgaggcaattaagtaa

SEQ ID NO: 310513 - DNA, 1159 bp, Unknown
  Bacterial polypeptide expressing nucleotide sequence isolated from the Sargasso Sea
aatgaatattcatgagtatcaagcaaaagcaattttaaaaaattttaatgtcccagtacctaaaggtgagattctcctctctaaagataatattttggaagcagccaaaaatgtatctgataatctttgggttgtgaaagcacaaattcatgctggtggaagaggtaaaggcggaggagttaaaattgcgaaatccttagaagaggttgaaactctagttgatgaaataatggggatgcagttgattactcatcaaactggacctgaaggaaaaaaagttagaagagtttatatagaagaaggatcaaatatttcagatgaattgtatttatctcttttggtagataggcagtcatctcaagttagtttcattgtatcaactgaagggggagttaatatagaagaggttgcagaagaaacccctgagaaaataactacagtttctattgatccagatgccggtgttactgatgatgatgtagaaaatttatcttcagctttgaatttagatggtgatttaaaagcacaaggatcagatttatttagaagcctttacactgcttttgttgagagcgatatgagtcttcttgaaataaatcctttagttattacaggagagaataatataatttgtttagatgcaaaggttaattttgactctaatgcattgtttagacatcctgaataccaagaattgattgatccttcagaagaagacgaggctgaattaaaagcatcagaatttggtcttagttatattaaacttgatggtaatataggatgtcttgttaatggcgcaggtttagccatggcaacaatggacatcattaaactttatggagcggaacctgcaaactttttagatgtaggaggtgccgcgacaaaagaattagtaaccgaagcttttaaaattatcctatcagataagaatgttgaaggaattctagttaatatttttggtggcattatgagatgtgatgttgtcgctgaaggtattattagtgcagctaatgaagttaatatttcagtaccattagtagttaggcttgagggaacaaatgtagaccttggaaaaaagattatcgaagattctgatttatcaattattagtgcttcagatcttgatgatgcatcgaaaaagataacagaagctatatag

SEQ ID NO: 310514 - DNA, 877 bp, Unknown
  Bacterial polypeptide expressing nucleotide sequence isolated from the Sargasso Sea
tatgtcagttttaatagataaaaataccaaagttatttgtcagggtataacaggttctcagggaacttttcattcacagcaggccatcgaatatgggactaaaatggtaggcggtgttaaacctggggctggaggaagtaaacaccttgatctaccagtatttgataatgttaaagacgcagtttcagaaaccggagcaaatgcatcagtcatttatgttcctcctccttttgcgggcgctgctattctcgaggctgttgatgcggaaatagatcttgtcgtatgtattactgaaggaattcctgtttctgatatggttaaagtaaaaaaagctttatctaattcaaaatcaagacttattggacctaattgcccaggtattattacacctgatcagtgtaagattggcattatgccgggtcatatccatcaaaaaggcacagttggtattgtctctcgctcaggtacattaacttatgaagctgttggtcaaactactgcatgtggtttaggtcaatcaacttgtattggtatcggcggtgatcctgttaatggcaccaattttattgattgcttagacttatttctttcagataatgaaacagagtcaattattatgattggtgaaataggaggtacagctgaggaagaagctgctgagtttttaaaaaattcaaaaataaagaaacctattgttggctttatagcaggcttaactgcaccgcccggaagaagaatgggtcatgctggtgcaattatttctggcggtaaaggaggagctgatgataagattgaagccctgaaagatgcaggagttgtaatttcaaattcaccagcaggattaggtaaaactttattaagtgtattaggaaaataa

SEQ ID NO: 310515 - DNA, 643 bp, Unknown
  Bacterial polypeptide expressing nucleotide sequence isolated from the Sargasso Sea
atgaatattggaacaaaactaattggcgctatgtttgaggcactaatttctaaagatgcttcattaatagaaataaatccattagttgtaactaaaagtaataaaatactgtgtttagatgcaaaaatgaattttgatgacaatgcaatttttaaacatccagaaatatttaagcttagagatttaaatgaggaagatccaactgagattgaagcgagtaagtatgatctagcctatataaaattagatggctcaataggctgtatggttaacggtgcaggtttagcaatggcaacaatggatatcatcaaactatatggtgaagagcctgcaaattttttagatgtgggaggtggagctagtagagaaaaagttacagcagcttttaaaattttactttcagataaaaatgtcaaaggtgttttaattaatatttttgggggaattatgcagtgcgatgtacttgcaaatggagtcgtagaagctgcaaaagatgtaaaattacaagttccgttagtagttcgcttggctggcactaattttaaagaaggaaaaaaaattcttgatgaatcaggtctaaaaattttatcagcagataatttaaatgatgctgccaaaaaaattgtagaggctataaaataaa

SEQ ID NO: 310516 - DNA, 799 bp, Unknown
  Bacterial polypeptide expressing nucleotide sequence isolated from the Sargasso Sea
aatggttgtagcttccacagaaggaggaatgagcgttgaagaaatatcaaaagaaaagcctgagaccattataagatcaaaaattgaagttgcagttggtatgcaaaaatttcaagctagagaaatagcttttggtttaggagttgctccagaattaataaatcgaacagcagatacgattattggttgttacagagcatttagtgagctagatgctacaatggttgagattaatcctttagctgtttctggtcaagggcaaatacttgccctagattgcaaaatgagttttgacaataatgcattatttagaagaaaccaaatatctgaactaagagataaaacacaagaaaacccaagcgaggtttatgcgtcagatagaggtttaaattatgtaagtttagacggaaacattggaaatataattaatggcgcaggtcttgctatggcgtcgatggatatgattaaattagcaggtggtgaacctgcaaacttcttggatgttggaggaggagccacaccagaaaaaatagtaaaagcatttaaattaatttcaatggacaaaaaagttaaagttattttagttaatatatttgctggtattaatagatgtgattgggtagcagaaggaatagtacaagctttaaataaaattgaaataaatgttccacttgtgattagattagcaggcacaaatgtagataaaggaaataaaattttgagagagagtaaaattaaatatattgaggcaaattcacttgaggatgcagcgaataaagctgttaaaattctaaaataa

SEQ ID NO: 310517 - DNA, 579 bp, Unknown
  Bacterial polypeptide expressing nucleotide sequence isolated from the Sargasso Sea
gagttccagttcttgatatgatgcaagtaaaaagaaaattggaaaaatcaaaatcgcgtttaattggacccaactgccctggaataattactcctgatgaatgcaaaataggcattatgccaggtcatattcaccaaaaaggaaaaataggagttgttagtagatctggcacattgacatatgaagcagtagcacaaacttctgctgtaggtctaggtcaatcgacttgtattggtattgggggagatcctattaacggaacaaactttatagattgccttgatctctttttaaaagatccagaaaccgaaggaatcataatgatcggagagattggtggaactgctgaagaggaagctgcagaatttattaaaaaatctgaaataaaaaaaccagttgcttcttttatagctggtgctagtgctcctgctggaaaaagaatgggtcatgcaggtgcaattatttcgggtggaaaaggcaccgcagagtcaaagtttagtgctttagaagaagcaggagttcatatatccaaatcaccagcaaaactaggtgagacaatcaaagaagctttaaactaat

SEQ ID NO: 310518 - DNA, 553 bp, Unknown
  Bacterial polypeptide expressing nucleotide sequence isolated from the Sargasso Sea
tccgcgccgtcgattttgtcaacggcagggggtcaggttggtagggccgaattgcccgggggtgatcactccgggacagtgtaaaatcggaatcatgcccggactgatccatgaacccggtaaagttggggtggtatcccgctcaggaacattgacttacgaagcagtcgggcaactgggacgtgcaggccttggccagtcaagctgcatcggtatcggtggggatccggttaatgggaccaatttcattgattgtctcaaaatgttcgaagacgactcccagaccgaagggatcgtgatgatcggtgagatcggcggagatgccgaggaacaagcagccgatttcgttaaacaaaacgtcagcaaacccatcgtcagcttcattgccgggcaaactgctcctccaggaagaaggatgggacatgccggcgcgatcatttccggaggaaagggaactgcctcggagaagatggctgctctccaggcagcgggaatccatgtcgtgaaaactcctgcggaaatcggcagccgaatgcgtgaagtgctgggttaa

SEQ ID NO: 310519 - DNA, 1162 bp, Unknown
  Bacterial polypeptide expressing nucleotide sequence isolated from the Sargasso Sea
atgaatctgcatgaatatcaaggcaaattattatttgctgaatataatttacctgtttcaaagggagaggtcatatttgatgcgaaaaacgcaacagatgcatgcaataagattggtggaacaaaatgggtagttaaagctcaagttcatgctggaggaagaggtaaagcaggaggagtagagttaatagattcaccagatcaggctgaagtatttgcaaaaaaatggcttggccaaaaattagttacttatcagacagacaaagatggacaattagttaattcaatattaattgaagagtgcaccaacatttcaaaagaattatatttaagtgcagttattgatcgagattcacaaaaaattgtttttataggatcaagtgaaggtggtgtaaatattgaggaagttgctagaaataccccagaaaaaattatctatcaaggtgttgaatttaaagatcaatctttaccggagcatgccaagaatatagcaaatgttttgaaacttaatgatgaacaaacaaatcaattcattcccatgatagacaatttattaagattatttgttgaaaaagatctaagtttattagaaataaacccattagttattaattctaatggcgaccttcattgtttagatgcaaaagtaaatatagatactaatgcattatttagacaaccagaattactagaaatgcatgatgaaactcaagaagatccaagagaagcagaggcagcaaaaaatgacttaagttatgtttcactagatgggaatatcggttgtatggtaaatggcgcaggtttagcaatgggtactatggacacaataaagttttttggtggcaatcctgcaaattttttagatgttggaggcacagccactcaagatcgtgttgcaaaagcatttaaaatcattctaaaagacccaaatgtaaaagttgttttggttaatatatttggaggaattgtaaggtgtgatgtaatagctaaaggtattattgctgctattaaagaagttgatataaaagttccagtagtggttaggcttgagggaaataatgctgatatcggagctaaaattctatctaaagctaatataaaaattgaaagtataaataatttgtctgatgcggcaaagaaagcggttgagttagcaaaatgag

SEQ ID NO: 310520 - DNA, 877 bp, Unknown
  Bacterial polypeptide expressing nucleotide sequence isolated from the Sargasso Sea
atgagtatattagtaaataaagaaactagattaattgtccagggttttacaggatctcaaggaactcttcattcagaacagtcaatagagtatggaactaatattgttggaggtgttactccaggaaaaggaggtcaagagcacctagggaaaccagttttcaattctgttaaagaggcagtagataaagtcgagccaaatgcttctattatttttgtacctgcaaaattctgcaaagattcgatattggaggctgcagaagcaggcattaagttaataatttgcattacagaaggggtaccaactttagatatgcttgatgtaaaaaaatatgtagataatattggggctagattgataggccctaactgtccaggtgttataactccaggggaagcaaagctaggtattatgcctggcaatattcatttacctggctctattggtatcatttcaagatcaggaacactcacctatgaagctgttaaacaaacaacagatttagggttcgggcagagtagttgtgttggtattggcggagatccaattccaggatcatcttttatagatatgcttaaattatttgaagaagatactcaaacagaagcaatagtaatggttggagagattgggggtacagcagaagaagctgctgcagaatatattaaaaataatatatctaaaccagtaatttcatacatagctggtcaaactgcacctgctggaaaaagaatgggtcatgcaggagcaattattgctggaggaaaaggaactgctgcagataaaatttctaaattaaaagagtgcggtgtgcatgtggcagataacttagttgaaatcggaaacaaagttgcagaagtcctcaagattaattagt

SEQ ID NO: 310521 - DNA, 893 bp, Unknown
  Bacterial polypeptide expressing nucleotide sequence isolated from the Sargasso Sea
aatagttaatagagtttatattgaagaggcaacagatattaaaaaagaactttacttaggtctagtttttgaccgaagttcagaaagtattatggtagtagcttccacagaaggaggtatgagcgttgaagaaatttcaaaggaaaagccagaaacaattatacgttcaaagatagaagtagctgttggcatgcaacaatttcaagctcgagaaattgcttttggtttgggcatagaatctaaactgatttctagaatggcggatacaataataggatgttatagagctttcagtgaacttgatgcaactatggtagaggtaaaccctatggtgatatcaaatcaagatcaaattttagcattggattgtaaaatgagttttgacaacaatgctttgtttagaagaactcaagtctcagaattacgagataaatcacaggaaaatcctagtgaagtttacgcgtcagatagaggattaaattatgtcagtctggatgggaatattggaaatatcattaatggagctggattggccatggcatcaatggacatgatcaaattggcaggaggtgaaccagcaaattttttagatgtaggcgggggtgcaacaccagataaaattgttaaagcttttaaactgatttcgatggatgaaaaagtaaaagtgatactcgttaacatctttgctggtataaatagatgtgattgggttgcagaaggcatagttcaagcgttagaaaaaattgaaataaaagtgccattagtcataagattggcggggactaacgttgaaaaaggtaacaaaattttaaaagatagtaaaattaaatacattgaagcaaatacattagaggatgctgcaaataaagctgttaaagcattgggtaactaat

SEQ ID NO: 310522 - DNA, 1158 bp, Unknown
  Bacterial polypeptide expressing nucleotide sequence isolated from the Sargasso Sea
caagcctaaacaattattttagagattatgggatagctgtttccgagggcttagctgcttcttctgctgatgaagcagagaaagcagctttatctcttggcacttcaaaatgggttgtgaaagcccaagtccatgctgggggaagaggaaaagctggcggcgtagaagtagttgatcaaatagaaaaggtaagagaattcgcagataaatggatcggaactaatttagttacttttcaaactgatcaaaacggtcagcctgtaaaccagattttagtagaaacctgtaccgatatagacaatgaactttatcttggagcagttattgatagagcttcccaaagattggttgtaatggcctctactgagggcggagtaaatattgaggaagtggctgaacagacccctgataaaatctttaaagtagaggttgatcctattgaaggtactaatgataaggatgctgactacctttctttacttctggaacttaatgaatcgcaagtctctcaatttagaaccatctacaacggattggttaagctttttttagaaaaagatttatctttgttagaagttaaccctttggtcattactagttccggtgacttaatttgtttagatgccaaaataaatattgattctaatgccctttacagacaagaagctcttagtgagatgcgcgatagttcgcaagaagatgaaagagaatcgaaagcagcagaatgggatctgagctatgttgctttagacggaaatattggctgcatggtgaacggtgctggtttggcaatggggacaatggatattatcaaactgcacgggggagagcctgctaattttctagacgtgggcggaacagctgatgctgaaagagttgctgaagctttcaaaataatactatctgatgacaacgttaatactgtccttattaatatttttggaggaattgttcgttgtgatgtcatagctgatggtatcgttgaagcgcttactgtgatgggtgtatccgtgccagtagttgtaaggcttgagggtaataatgcaaagttaggtcttcagaccttagatgaatgtgatttaaacattatcccagcttcaaatttgcaagaagctgcggaactggctgttaaggcttctaaaggagagataaattgag

SEQ ID NO: 310523 - DNA, 1063 bp, Unknown
  Bacterial polypeptide expressing nucleotide sequence isolated from the Sargasso Sea
agcaagagaaataggtggaaataagtgggtagtaaaagcacaaattcattctggcgcaagaggtaaagcaggtggaataattgtgtgtgatactcctttagcagttgctcaggcaactgataaacttttaggaaaaaaattagttactaaccagacaggacccgaagggaagattgtaaatagaatttatattgaagaagctacagaaattaaaaaagaattatatttaggtcttgtttttgatcggagttctgaaagtattatggttgttgcttcaacagaaggaggaatgagtgttgaagaaatcgcaaaacaaaaacccgaaaccataattagatcaaaaattgaggttgctgttggaatgcaacaatttcaagcaagagaaattgcatttggtttgggtattgagccacatttaattagaagagctgccgaaacaataactggatgttatcgagcatttagtgaacttgatgcaacaatggttgaagtaaatccattggtaatttccaatcaagatcaaattttagcattagattgtaaaatgagttttgacaacaatgctttatttagaagaaaccaagtttcagaattaagagataaaacacaagaaaattctaatgaagtttatgcatcggatagaggattaaattatgtaagtctagaaggaaatattggaaatataattaatggagcaggattagcaatggcctcaatggacatgataaaattagctggaggagaaccagctaatttcttagatgtcggaggtggtgctactcctgaaaaaatagtcaaagcttttaaattaatttctatggatgaaaaagttaaagttatactggttaacatttttgcaggaattaatagatgtgattgggttgcagaagggatcgttcaagcattacaaaaaatagaaataaaagtgcctttagtaattagattagcaggtacaaatgttgaaaaaggaaataaaattttaaaacaaagtaaaattaattatatagaggctaacacattagaagatgcagctaataaagctgttaaagctttaggaaattaa

SEQ ID NO: 310524 - DNA, 937 bp, Unknown
  Bacterial polypeptide expressing nucleotide sequence isolated from the Sargasso Sea
ttatttggaaaagttttggtaacaccacaaactggtcctgaaggacgagtagtaaagagaatatatattcaaaaagcatatgatataaaaaaagaattatacttatcatgtcttgtggatagacaaagttcaaagattgcctttataagtagtactgaaggtggtgtagatatagaggctgttgcaaaaacaaaccctgaaaaaattattacaacaaaagtagatttaaaacaaaatttaagctctgaagaaatagaaaatattttacaaatttttcaattagataaaaatcaaacaactaccgcaacaaaattagtgaaagcaatgtataatgcattaattaaaaaggatgcatctttagttgaaataaatccattagttataacaaaaaacaacgaaatattatgtctagatgcaaaaatgaactttgatgataatgcgatttttaaacatccagaaatattggagctcagagacttaaacgaggaagatccatccgagatagaagctagtaaacatgatttagcttatatcaaattagatggatcaatagggtgtatggttaacggtgccggattagcaatggcaacaatggatataataaaactttatggcgaagaaccagcaaattttttagatgtcgggggaggagcaagcaaagaaaaagttacagctgcttttaaaattttattatcagataaaaacgtaaaaggtgtattgataaatatatttggtggaattatgcaatgtgatgttcttgctcaaggagttgtagatgcagcaaaagatctaaaattaaacgttcctttagtagtaagattagcgggcaccaattttaaaaaaggaaaaaaaattcttgacgagtcaaacctaaaaattttatcagctaataatcttaatgatgctgcgaaaaagattgtagaggctattaaataaa

SEQ ID NO: 310525 - DNA, 880 bp, Unknown
  Bacterial polypeptide expressing nucleotide sequence isolated from the Sargasso Sea
atgtctgttcttataaacaaatctacaaaagttctttgtcaaggattcaccggaagtcaaggcacctttcactcagaacaagcgatttcctatggaacgaatatgataggaggggttacacctggcaaaggaggttcaaagcatcttgggttgcctgtgtttaatacagttatagaagctgttaacgaattagatgttgatgcatctgttatatatgtccccccgcgttttgcagctgactcaattcttgaagctatagatgctaaaatacctttgatcatttgtattacggaagggattcctgtacaggatatgattaaagtaaaaaagtttttaagtacctctaaaagtagattagttggacctaattgtcctggaataattacccctggagaatgtaaaatagggataatgccaggacatattcacttgcctgggaaaattggtattgtttctagatctggaactttaacatatgaggccgttgcacaaacaactgatgtaggtttaggtcaatcaacatgtgttggtatagggggagacccactaaatggaacaaatttcattgattgtattgaactttttttgttggatgagcaaacagaaggaattttaatgattggtgaaattggtggtacagctgaagaagaagcggctcaatatgttaaaaatcataagataaaaaaaccaatcgctggatttatcgcaggtaaaactgcacctcctggaagaactatggggcatgctggagctattgttagcggaggaagtggggatgccgaaacaaagattgaaacttttaaaagttgtggaatagaagtagctatttctccttccgatttgggaggggctatagtaagagcaataaagggtttctaaa

SEQ ID NO: 310526 - DNA, 321 bp, Unknown
  Bacterial polypeptide expressing nucleotide sequence isolated from the Sargasso Sea
cagctaacttcctggacgttggcggtggcgcgactaaagaacgcgttgttgaagcattcaaaattatcctgtctgatgacgctgtgaaagccgtattcatcaacatcttcggtggtatcgtgcgttgtgacatgatcgctgaaggtgtaataggcgcagtgaaagaagttggcgtaaaagtaccagtagtagttcgtctgcaaggtaacaacgctgaactgggtgctaaggtgctgggtgaaagcggcctgaacattatcgctgacacagacctgacaagcgctgcacagaaagttgtagctgcagcggctaaggcataag

SEQ ID NO: 310527 - DNA, 1189 bp, Unknown
  Bacterial polypeptide expressing nucleotide sequence isolated from the Sargasso Sea
atgaatctgcacgaataccaagcgaaaatattattaaaaaataataacgttagagttttaaatggctacccagtgttagatgatagagatataggaactgctgtagactctatccaaacacccgttatggttgtgaagtctcaaattcatgcaggtggaagaggcgcgggaaaatttacagatagtggtgatgacaaaggtggtgtgagagtttgcttctcaaaagatgaagccaaagacaatgcaaaaaaaatgtttggtaaaactttagttacaaaacaaactggtccaagtggaaaacaggtaaatagactttatattgaggaagggtgtgatatcaaaaaagagtactatctaagtatgctcgtggatagagcgacatcttcaatttcaattatagcatctactgagggtggcatggaaattgaggaggtagcagaaaagcaacctgaaaaaattattactgttaatgtccctggggacagtattattgaccaaaatagtttaaataaattaactgagggtctaaagatagatcaaaacctatcaaatgatttttgtgatcaaattcaaaaaatttacaatagctttttatcctcagatgcctctttagtagaagttaatccttttgtattgactggtgagggtaattttttggctttagatgcgaaggtatcaatagatgataatgcgctttataaacataaagatgtagcttcaatgagagatgaaactgaagaggaccctgcagagattgaggcttcaaaacatgagcttaactacgtcaaattagatggtcaaattggatgcatggtaaatggagctggtcttgcaatgggaacaatggatataataaaattacatggtggcagtccagcaaattttctagatgtaggaggaggagctacaaaagagagagtggcaaaagctttttctataattctgcaagatccaaatgtaaaagctattttggtaaatatttttggtggcattatgaaatgtgacattatcgctgagggtgtggtagctgcagctaaagagctatctattcaagttccattggtagtaagattagaaggaaccaatgttgacttaggaaaagaaattttaaataaatctgggctgtcaattatttcggcagataatttagaagatgcagctcaaaaggcagttagggctttaaactaaa

SEQ ID NO: 310528 - DNA, 874 bp, Unknown
  Bacterial polypeptide expressing nucleotide sequence isolated from the Sargasso Sea
atgtcagtattaattaataaaaacacaaaagttatttgccagggttttactggttctcaaggtacatttcactcagaacaagctataaaatatggaactcaaatggttggtggggtgacaccaaagaaaggtggtcaagagcatttaggacttcctgtgtttaatagtgttaaagaggcaaaagacaacacagatgcaaatgcaactgtaatatacgttccacctccttttgcagctggtgctataattgaagcgattgatgcagacatggaactaattgtttgtataactgaaggagttccagttcttgatatgatgcaagtaaaaagaaaattggaaaaatcaaaatctcgtttaattggacccaactgccccggaataataactcctgatgaatgcaaaataggcattatgccaggtcatattcaccaaaaaggaagaataggagttgttagtagatctggcacactgacatatgaagcagtagcacaaacttctgctgtaggtctgggtcaatcgacttgtattggtattgggggggatcctattaacggaacaaactttattgattgccttgatctttttttaaaagatcccgaaaccgaaggtatcataatgatcggagagattggtggaactgctgaagaagaagctgcagaatttattaaaaaatctgaaataaaaaaaccagttgcctcttttatagctggtgccagtgctcctgctggaaaaagaatgggtcatgcaggtgctattatttctggtggaaaaggcaccgcagagtcaaagtttagtgctttagaagaagcaggagttcatatatccaaatcaccagcaaagctaggtgagacaatcaaagaagctttaaactaat

SEQ ID NO: 310529 - DNA, 1162 bp, Unknown
  Bacterial polypeptide expressing nucleotide sequence isolated from the Sargasso Sea
atgaaccttcacgaatatcaaggcaaagccctatttgcagaatataatttacctgtttcaaagggaaaaattatatatagtgctgatgaagtgacagatgcatgcaatgaaataggtggcacaagctgggtagtcaaggctcaggttcatgcaggaggcagaggaaagtctggtggagttcaattaattaacactcctgaggatggcataaaatttgcagaaaagtggcttggaaataaccttgtaacctatcagactgatgccaagggacaacctgtcaattcaattctaatagaagaatgtacaaatatttctcaagaactttatttaagtgctgttattgacagagattcacaaaaaatagtgtttattggctccagcgaaggaggtgtaaatattgaagatgtagcaaaaaacatgcctgaaaaaattatttatcaaggtgtagtttatggagataaatctttacctgatagcgctttaaatattgcaaaagttttaaaattaaatgatgttcaaactaatcaatttatttcaatgattgacaatcttctaagattatttgtagaaaaagatctgagtttattggaaatcaacccacttgttataactgagagcggagatctattatgtttggatgcaaaagttaacatagactcaaatgcactttttaggcatcctgaattactagaaatgtatgatgaaacccaagaagaccctcaagaggcagaggctgcaaaaaatgatttaagttatgtttctttagatggaaatataggctgtatggtaaacggagctggcttagcgatggggacaatggatactattaaattttatggaggcaatcctgcaaattttctggatgttggaggaactgcaactcaagaaagagttgctaaagcatttaagataattctcgaagatccagacgtgaaagttgttttagtgaatatatttggaggtattgtaaggtgcgatttaattgctaaaggaattattgcagctatcaaagaagttgaagtaaaaataccagttgtagttcgattagaaggtaatagtgctgataaaggttcaaaaattttatcaaaagcagatattaaaatagatagtattaatgacttagctgatgcagccaagaaagcagtggaactcgctaaatgag

SEQ ID NO: 310530 - DNA, 874 bp, Unknown
  Bacterial polypeptide expressing nucleotide sequence isolated from the Sargasso Sea
atgagtattctagttaacaaagataccaaattgattgttcaaggtttcacagggtctcaaggtacccttcattcagaacaatctatcgaatatggaacaaatattgttggcggcgttacacctggaaaaggaggtatggaacatttaggaaaaccagtatttaattctgtgaatgaagctgttgaagaattagatccaaatgcatcaattatttttgtaccagcaaaattttgtaaggaatccataatagaatcagctgaagctggtattaaattaattgtctgtattactgagggcatccctacacttgacatgcttgaagtaaaaaaaagaattgatgatttaggagtaagattaattggaccaaattgcccaggtgtaattacacctggtgaggcaaaattaggaattatgccaggtaatattcataaaccaggttcaataggtattatttctagatctggaaccctaacttacgaggcagtaaagcaaacaactgatcttggttttgggcaaagcagttgtgtgggcattggtggcgatccaattccaggatcatcattcatagatatgttaaagctttttgaggatgatgatcaaactgaagcaattgttcttgttggagagattggtggcaatgctgaagaggctgcagcagaatatatcaaaaataatgttactaagcctgttatttcatatattgctggacaaactgcgcctgctggtaaacgaatgggacatgcaggagcaataatcgctggaggaaaaggtaccgcaaaagataaaatcgaaaaactaaaggaatgtggagtccacattgcagataatttagtttctataggttctaaagtggcagaggttcttcaacactaat

SEQ ID NO: 310531 - DNA, 877 bp, Unknown
  Bacterial polypeptide expressing nucleotide sequence isolated from the Sargasso Sea
atgtcagttttaataaataaaaatactaaacttatatgccaaggcttcacaggcgcccatggaacatttcattctgaacagtcaataaaatatgggacaaatctagttggaggcgtaactccaggtaaaggaggacaaacacacttaaataaacctgtttttaattctgtaaaagaagcaaaaggtaagactaatgcaaatgcaacaatgatttatgtccctgcaaaatttgctgctgcagcaataatcgaggcaattgaggctaagatcgaattgatagtttgtataactgaagggattccaatcttggatatgttaaaagtaaaagaaaaattatcaaactcagcttccagactaattggaccaaattgtccaggaattatcactccagacgaatgtaaaattggtatcatgccaggaaatattcataagaagggatccgttggtatagtctcaagatcaggaactctaacttatgaggctgtcgcacaaacaactgaaaacggattaggtcagtcaacatgtatcggaataggaggagatccaattaacggaaccaattttatagattgtttagacttgtttttaaacgatccagagactgagtctattttgatgattggtgaaattgggggaactgcagaggaagaagcagcagaatttattaaaaatcataaaatcaaaaagcctatggtaggatttattgctggtatcacagcacctcctggacgaagaatgggacatgcgggagcaataatttctggtggcaaaggaggagcttcagataaaattgatacaatgacagatgcaggtattaccattgcaacatctcctgcagaaatgggaattacattaaaaaataaattgggtctttaat

SEQ ID NO: 310532 - DNA, 1192 bp, Unknown
  Bacterial polypeptide expressing nucleotide sequence isolated from the Sargasso Sea
catgaatttacatgaataccaaggaaaacaattattagaaaaatttaatgtttccattcaaagaggctatgtagcaaataatcccgatgaggctgttgagtgcgcaaaaaaactttcaaatgaaacaggaacagaaatttttgttgttaaagctcaaattcatgcaggtggaagaggaaagggtggaggagtaaaaattgctaaatctttggatgaggtaagatctatatcttcagaaataattggaatgaatcttgtgactccacaaactcctaaagaaggtaagctagtaaataaggttttaattgctgaagatgtatattatgatggtgagggggatagaaaagagttttatatgtcagtgttactgaatagatcatcttcaaaaaatatgattgtatactcaacagagggtggagtagatattgaggcagttgctgaaaatactccagatctaatttttaatgaagaaattgaccctggttctggaattcttccttttcaagctagaaaaattgcatttaatcttggtttaaaaggccaagcttttaaaaatatggtaaaatttgttaccaatctctacaatgcatacactgggtcagatgcatcactttttgaaattaatcctgttcttaaggcagctgatgataaaattatagctgtagattctaaagtaactattgatgaaaacgctctttttagacactctgaatatgaatcaatgcgggaccttagtgaagaaaatcctgttgaagttgaggctagagagtcggggctaaattatgttgacttagatggaaatgttgggtgtatggtaaatggagctggcttagcaatggcaacaatggatttgattaaacttgctggaggtgagcctgctaattttcttgatgttggtggaactgctgattcaagcagggttgaaaaagcatttagattaattctaaaagactcaaatgtaaaagcaatactggttaatatatttggtggaatagtaagatgtgaccgtgtagctgagggtatagtttctgcttataaaaatcttggcaatattgatatacctattatcgttaggcttcaaggaactaattctgataaagcaaaagaaataattgatggttcaggtttaaatgttctctctgcaattgcctttgatgaagccgcaaataaagttcaagctgctttaagctga

SEQ ID NO: 310533 - DNA, 434 bp, Unknown
  Bacterial polypeptide expressing nucleotide sequence isolated from the Sargasso Sea
aggcaacattggatgcattgtcaatggagcaggcctagctatggctacaatggatacgatcaagttggctggtggtgagccagctaactttcttgatattggaggtggagctacacctgagagagtcgctaaagcttttcgtttggtaatgtctgatgacaacgtacaagcggtattggttaacatatttgctgggataaaccgttgtgactgggtcgcagagggtgtggttcaggcattgcatgaagttcaaatcaatgtaccagttatcgttcgcttggcaggtacgaatgttgaaaaaggacaaaagatcctaactaagtctggtcttccaattataatagcaacaacattaatggaggcagctgagctttcagtccaagcttggcagacttacactgctggtgaatttaagtcgagggcagaaaaatgag

SEQ ID NO: 310534 - DNA, 827 bp, Unknown
  Bacterial polypeptide expressing nucleotide sequence isolated from the Sargasso Sea
aatgaatatccacgagcaccaggcaaaagaaatacttaaaaagtatggcgcggttgtacccgaaggcgtttatgctcttaatgtaaatgaattaattgaaaaagtaaaaaatctcaaagccgataagtatgtattaaaagctcaaattcatgcaggaggtagaggaaaggctggaggagtaaaaattgttgataatattgctcttttggaagaggaagcgaaaaaattgtttggtaaaacattagttactcatcaaactggaccctcaggaagagaagtgaaaagattgtatgttgaaactgcatcagaaatagaaaaagaattctatctgtcttgtcttgttgatagggcttctgctaaaattgcatttatttccagcgatcagggtggaatgaatattgaggaagttgctgtaaaatcaccagagaaaataattactactaaagtagattttaatgaaagtatttcagaggaagactgtaacaaaattattaaaattttcgatttagacaacgatgcaagtaaacaagcaatcaatttaataaaatcaatttacaaaatgttcattgatacagatgcaaatttagttgagataaatcctctcattttaaccaaaaaaaacgaaattgtatgtttggatgcaaagatgacctttgacgaaaatgcattatttaaacatccagaaattcagaaactaagagattttaatgaagaagaagcaactgaaattgaagcaagcaaacatgatcttgcatacattaaattggacggaaatatagaatgtatggtaaatggtgctggattagcaatggctactatggatatta

SEQ ID NO: 310535 - DNA, 772 bp, Unknown
  Bacterial polypeptide expressing nucleotide sequence isolated from the Sargasso Sea
atggatatagaaaaagtagcagaggaagaccctaaaaaaattattacattaaaatttgaaatatctgaaaaacttgatgataaaaagttaaatgagttggtagaaatttttaaattaagtgatagtcaaaaaaaagaagcaatgaatttattagaaagtatttataggattttaatagaaaaagatgcaaatttaatagaaataaatcctctaataattacaaaaaaaaataatttaatatgtcttgatgctaaaatgaatttcgatgacaatgctttatatagacagccagacatattagaattaagagatttaaacgaggaggagccagctgaaattgaagcaagtaaaaacgatctagcatatataaaattaaacgggagtattggttgcatggttaacggtgcaggtttagcaatggcgacaatggatataataaaactatacggcaaggaacctgcaaactttttagatgttggtggcggagcttcaaaagaaaaagtaacagctgcttttaaattaataatatctgataaaaatgtaaaaggtattttaataaatatattcggtggaataatgagatgtgatgtcctagctcaaggtgtcatagatgctgtcaaagagactaaccttaaagttcctttggtcgtaagattagccggaacaaaatttaaagaaggtaaaaaattacttgatgattctggtttaaaaattttgtctgctaatgacttaaatgatgcagcaaaaaaaattattaaggctgtaagttaat

SEQ ID NO: 310536 - DNA, 1036 bp, Unknown
  Bacterial polypeptide expressing nucleotide sequence isolated from the Sargasso Sea
tatggacattcacgaatatcaagcaaagaaaatactttcaaactttggagtaacaattcccagaggtggaattgtttacagccctgagaatgccgagaataaagcaagagaaattggtggatcaagatgggtagtaaaagcacaaattcattctggtgcaagaggaaaagcaggagggataattctttgtaataacccgttagaagttgctcaagcaacagataaattattaggaaaaaaattagttacaaaccaaacaggacctgaaggcaaaattgtaaacagaatttatattgaagaagctactgatattgaaaaggaattatacttaggattagtttttgatagaagctcagaaagtattatggttgttgcatcgacagaaggtggaatgagtgtagaagaaatttcaaaggaaaaaccagaaacaattattagatcaaaaattgaagttgcagttggaatgcaaaatttccaagccagagaattagcatttggtttagggattgaaccagacctaataagaagagcttctgatactattattggatgttacaaagctttcagtgaactagatgccacaatggttgaagttaatccattagttatttcaaaacaaaaacaaatattggctttagattgtaaaatgagttttgataacaatgcaatgtttagaagaagtcaagtttctgagctaagagacaaaacacaagaagactcaaaggaaatttttgcatcagacagaggtttaaactacgtcagtttagatggaaatataggtaatattattaacggtgctggtcttgcgatggcatctatggatatgattaaattagctggaggagctcctgcaaattttttagatgttggaggtggagcaacaccagaaaaaatagttaaggcctttaaattagttacaatggatgaaaaagttaaagtaattcttgtaaatatttttgctggtatcaatagatgtgattgggttgcagaaggaattgtagatgcgctaaaaaaaattgaatcaaagttccattag

SEQ ID NO: 310537 - DNA, 791 bp, Unknown
  Bacterial polypeptide expressing nucleotide sequence isolated from the Sargasso Sea
aaaatatgggacaaatctagttggaggcgtaactccaggtaaaggaggacaaacacacttaaacaaacctgtttttaattctgtaaaagaagcaaaagataagactaatgcaaatgcaacaatgatttatgtccctgcaaaatttgctgctgcagcaataatcgaggcaattgaagctaagatcgaattgatagtttgtataactgaagggattccaatcttggatatgttaaaagtaaaagaaaaattatcaaactcagcttccagactaattggaccaaattgtccgggaattatcacaccagacgaatgtaaaattggcatcatgccaggaaatattcataagaagggatctgttggtatagtctcaagatcaggaactctaacttatgaagctgttgcacaaacaactgaaaacggattaggtcagtcaacatgtatcggaataggaggagatccaattaatggaaccaattttatagattgtttagacttgtttttaaacgatccagaaactgagtctattttgatgattggtgaaattgggggaactgcagaggaagaagcagcagaatttattaaaaatcataaaatcaaaaagcctatggtaggatttattgctggtatcacagcacctcctggacgaagaatggggcatgcaggagcaataatttctggtggcaaaggtggagcttcagataagatcgatacaatgacagatgcaggtattacaattgcagaatctcctgcagaaatgggaatcacattaaaaaataaattgggtctttaat

SEQ ID NO: 310538 - DNA, 469 bp, Unknown
  Bacterial polypeptide expressing nucleotide sequence isolated from the Sargasso Sea
ttaagggatttaaatgaagaagagccagcagaaattgaggcaagtaagcatgatctggcttacataaaactaaatggatcaattggatgcatggtcaatggtgctgggctagcaatggctactatggatattataaagttgtatggtcaagagcctgcaaactttttagatgtaggaggaggagcgacaaaagaaaaagtaacagctgcattcaaattaatattggccgataaaaatgtaaaaggtattttgataaatatatttggaggtattatgagatgtgatgtacttgcccagggagtcgttgatgctgcaaaacaagtaaatttgtcagttccccttgttgttagattagctggtactaattttaaagagggaaaaaaaattttagaggagtcaaagctaaaaattttatctgcatcagacttaaatgatgcagcaaaaaaaattgttgatgcaataaagtaaa

SEQ ID NO: 310539 - DNA, 1132 bp, Unknown
  Bacterial polypeptide expressing nucleotide sequence isolated from the Sargasso Sea
tcttaaaggtaaatcgtataacaaaaaacttgagacacttgattttgatatagaagaattaaaaggaccaccttgggtcgtaaaatcacaaattcatgctggtggaaggggtgctgggcatttcaaaaattcttttaatgataaagggggcgttcaagttgtttttgaaaaagaaaaagtgtcttcaattgctcaatcaatgatgggtaacgtactaataacaaaacaaacaggggagacaggcaaaacagtcaatcgtatttttattgaagaaggttgtgatatcgacagagaattttatctaagtctattagttgatagaaataattcaaaagtaatgatgatgatttctgctgctggtggtatagatattgaggaagtagcagcaaccaatcctgaaaaaataataaatattcattttagtaaatacaaagatatttcattggatgaaagtcttcaaataaaattggaaattactaaaaatcaacttgatgaacttacatcaattattaataaactattagatgcttttatctccattgatgcttcgacaattgaaattaatcctttggttttaaataaggaaggtaattttattctactggatgcaaaaattagtttagatgataatgctttatttcgacatcctgaattaactgacttaaaagatttaactgaggaagatcctctagaattacaagctgctgaacatgatatgaattatgttaagcttgatggatctattggatgtatggttaacggtgctggtttagctatggcaacaatggatattattaagcaatttggagaagagcctgcaaactttttagacctaggtggaactgcaaataaagacagagttattatgggtttcaaaactattcagtctgactcaaatgtaaaatctatattaattaatatttttggtggaattattcattgtgatatgattgccaagggtatcatcgaggcagttaaagaactaaagtttaatcttccactagttgtacgtttccaagggacgaatgcaaaagaaggtagagatttgattaacaattctaatcttggattaatatctattgatgattttactgaagcagcaaaaaaagtagtggatttggcgaaagattaa

SEQ ID NO: 310540 - DNA, 1105 bp, Unknown
  Bacterial polypeptide expressing nucleotide sequence isolated from the Sargasso Sea
tttgccgtcgatacagcagaacaagcagttgttgccacagagaagattggcggttcaagatgggttgtaaaggctcaggtgcacgctggtgggcgaggcaaggcaggtggagttcaactggttgatagtggtcaagaagctaaggctttcgctaataaatggctcggacaaaacttagtcacttatcagaccgatgccaatggccagccagttaacaagatattggttgaggagtgtgtatcgattgagcgagagctctatttgggcgctgtaatagatcggacaacccgtcgaatagtgtttatggcatcgaccgaaggtggtgttgaaattgaaaaggtcgcctcagaaactccagaaaaaatactcaaggccacgatagatcctttgacaggacctctctcttatcagggaagaaatttagctttcgaattaggtctatcagacgcacaaattaaacagtttaccgctctattccttggcctctcaaaactctttatagatttagacctctctttattggagataaatccgttagtaatcacgagcgagggcgatctaaactgtcttgatggcaaaattaacgtggacggtaatgcgctttttcgtcaaccaaaactagaaagcatgcaagactcatctcaagacgatgaaagagaggcgagagctgcagaatgggacctgaattatgttgccttagatggcaacattggttgtatggttaatggtgcaggtctggcgatggggactatggatatagttcagctttacgggggaaagcctgcaaattttcttgatgttggcggagcagcaagtaaagagcgcgtcacggaggcgttcaaaattatcttgtcagacaaaaaagtgtcggccgtgctagtgaatatttttggcggcattgtcagatgtgacttgatagccgaaggggtaatcggtgctgtcaatgaagttggagtatcagtccctgtggttgtgcgactggaggggaataatgccgaattaggtcgcgaagttttagataaaagtggtctaaatatcttagctgcatcaagtctgtctgatgcagctgagaaagcagtcagtgctgtgggagatgagaaatgag

SEQ ID NO: 310541 - DNA, 973 bp, Unknown
  Bacterial polypeptide expressing nucleotide sequence isolated from the Sargasso Sea
aatgaacatacacgagcatcaagcaaaacaaatcctaaaaaaatatggggcagttgtaccagaaggagtatttggtcttacagttgaagatcttgttgaaaaagcaaaatcattgaacacaaaaaaatatgttttaaaagcgcaaatccatgcaggtgggagaggaaaagcaggaggagtaaaaatattagatactattgaagagttgagtgaggcagcaaaagagatgatgggaaaaatcttagttactcatcaaacaggtcctgaaggaagagaagtaaaaagactatatgtcgaagaatcatcaaatattgataaagagttttatttgtcttgtttagtcgatagagctagttctaaaatagctttcatatctagtgaccagggtggaatggacattgaagaagtagcaagtaacttgcctgagaaaatcataacaactaaagttgatattggtaatgaaatttccgacaaagattgtgaagagataattaaaatttttaacttaaatgatagtgcaaaaacacaagcaatttcgctaattaaatcaatttatcaaatgtttataagcacagatgcaaatatggttgaggttaatccattaatcttaaccaaggaagaaaaagtaatttgtttagatgcaaaagtaaactttgattcaaatgctttatttagacatcctgagattgttgagttaagagatttaaatgaagaagatccaacagaaatagaggccagcaaacacgatctagcttatataaaattggatggaagtattggttgtatggttaatggggcaggtttagctatggcaactatggacataattaaattatatggaaaagagccagctaattttttagatgttggcggcggtgcctcaaaagaaaaagtttcagcagccttgaagataattctatcagacaaaaatgttaaaggaattttaattaatatttttggagggataatgaga

SEQ ID NO: 310542 - DNA, 1186 bp, Unknown
  Bacterial polypeptide expressing nucleotide sequence isolated from the Sargasso Sea
aatgaacctccacgagtaccaagctaaggaactcctaaagaaatttgaccttcccgtgcctaagggaatagtttttattgaaaatctatcgcaaattgaagaaaatttagaaaccttaaaaggtcctccttgggtagttaaatctcaaattcatgcaggaggaaggggagctggaaaatttaaaaataaatttaataatatgggaggagtacaagtagtttcagaaaaaaataaggtttttaaaattgcagaatcaatgattaacaatgttttaataacaaaacaaacgggtgataaaggaaaggaagtaaaacgtatttacattgaagaaggttgtaaaataaaaaaagagttttatcttagcatcttaatagatagaaatacttcgcagcctatgatgatgatttcagcatctggaggtattgatatagaagaagttgctgaatccaatccagatgaaattcattatatttacttttctgatttgaccaatattgttttaagaaaaaatttaatcaaaactttagatatttctgaaaagcaatttgaggaacttaatattatagtaaaaaaactaattaaattatttataaatatagatgcaagcagcattgagatcaatcctttggttttaaatgatgaaggacattttattttattagattcaaagataagcttagatgataatgcgttatttcgtcatccagagttaaacaaattacaagatataagtgaagaagatccattagagttagaagctactaaaaataatatgaactatgtaaagttagatggttcaattggatgcatggtaaatggagctggtttagcaatggcaactatggatctaattaaacaattcggagaagagcctgcaaattttttagatttaggaggaactgcaaataaagaaagagcagtaaaaggatttaaaattattcaatcggattcaaatgttaaatcagtacttattaatattttcggaggaatcattcattgtgacatgatagcaaatggtattatagaagcagtcaaggaactagattttaaattaccaattgtagtacgttttcaaggaacaaactctaaagaaggaagagatattattaataagtcaaacttaggaatgacttcaattgatgattttactgaagcagcaaaaaaagtagtagagttagcaaaataa

SEQ ID NO: 310543 - DNA, 520 bp, Unknown
  Bacterial polypeptide expressing nucleotide sequence isolated from the Sargasso Sea
aatgagttttgacaacaatgctttatttagaagaaatcaagtttcagaattaagagacaaaactcaagaaaactcaaatgaagtttatgcatcagatagagggttaaattatgtaaatttagatggcaatattggaaatataattaatggagcaggtttagcaatggcttctatggatatgattaaattagctggaggagaacctgctaatttcttagatgtcggtggtggagctacccctgaaaaaatagttaaagcatttaaattaatttctatggatgaaaaagttaaagtcatattagttaacatttttgcaggaattaatagatgcgattgggtagcagaaggtatagttcaggcattacaaaaaatagatataaaagttcctttagtaatcagattagcgggaaccaatgttgaaaaaggaaaccaaattctaaaagaaagcaaaattaattatatagaagctaatacattagaagatgcagcaaataaagctgtcaaagctttaggaaattga

SEQ ID NO: 310544 - DNA, 935 bp, Unknown
  Bacterial polypeptide expressing nucleotide sequence isolated from the Sargasso Sea
gatgaacttacatgaatatcaaggcaaattattatttgctgaatataatttaccagtttctaaaggaaaagttatatttgatgcaaaggatgctattgacgcttgtgatgaaattggaggcgataaatgggttgttaaggcacaagtgcatgctggcggaagaggtaaatctggaggtgtccaacttattgataatccagagcaagcaattgaattcgcacaaaagtggttaggaaataggcttataacatatcaaacagatgcagttggacaaattgttaattctatccttatagaagaatgcactgacattgctcaagagctgtacttaagtgcggtcatagatagggatacacaaaagatagtttttattggttcaagtgaaggtggagtaaatattgaggaagttgcaaaaaattctccagaaaaaataatttatcaaggagtagatcttgatgataaagattttagtcaacatgccgaaaatattggcaaagtattgaagttaaatcctgatcaacaaaatcaattttcaccgatgctagacaaccttgtaaggctttttgttgaaaaggatcttagtcttcttgaaattaatcctttagtgatcacaaaaaacggagacctgcattgtttagatgcaaaaattaatattgattcaaatgctctatttaggcaaccagaattaatggaaatgcatgatgaatctcaggaagatcctcaagaagcagaagctgcgaagcatgacttaagttatgtatctttagatgggaacattggatgtatggtcaacggtgctggtcttgcaatggggaccatggacacaattaaattttttggaggcaatcccgcaaattttcttgatgttggtggtacggcaactcaagaaagggtagctaaagctttcaaaattatactcaaagatcctgaagtaa

SEQ ID NO: 310545 - DNA, 697 bp, Unknown
  Bacterial polypeptide expressing nucleotide sequence isolated from the Sargasso Sea
gaagccgacgaactcgccacgaagatcggcgtgcccgccgcttcgctgccgcaagcacgcgcgatcctgcaaggcctgtacaaggcattctgggaaaccgacgcatcgctggccgaaatcaacccgctgatcctgaccggcgacggcaaggtcatcgcgttggacgcgaaattcaacttcgattcgaacgcactgttccgtcacccggaaatcgtcgcgtaccgcgatctggacgaagaagatccggctgaagtcgaagcatcgaagttcgacctcgcgtacatctcgctcgacggcaacatcggctgcctcgtgaacggcgcaggcctcgcaatggcaacgatggacaccatcaagctgttcggcggcgaaccggcgaacttcctggacgtgggcggtggcgccacgaccgagaaggtcacggaagcgttcaagatcatgctgaagaacccgaacctgaccgcgattctggtcaacattttcggtggcatcatgcgctgcgacgtgatcgcggaaggcgtgatcgcggcgtcgaaggccgtgtcgctgaaggtgccgctcgtggtccgcatgaagggcacgaacgaagacctgggcaagaagatgctggctgaatccggcctgccgatcattgcggcagacagcatggaagaagcggctcagaaggtcgtcgcggccgctgcgggcaaggcgtaag

SEQ ID NO: 310546 - DNA, 1168 bp, Unknown
  Bacterial polypeptide expressing nucleotide sequence isolated from the Sargasso Sea
atgaatatccacgagtaccaaggcaaggaaatcctgcgcaaatacaatgtgccggttccgcgcggcactccggccttctcggtcgacgaagccatcgaggctgcagaaatcctgggcggcccggtgtgggtcgtgaaggcacagattcatgcgggtggccgtggcaagggcggtggcgtgaagattgccaagagcatggaccaggtcaaggaatacgccagcagcatcctgggcatgacgctggagacgcaccagaccggtccggaaggcaagctggtcaagcgcctgctgatcgaagaaggcgcggacatcaagaaggaactgtacgtgtcgttggtggtggaccgtgtgtcgcagcaagtggcgctgatggcctcgagcgagggcggcatggacatcgaagaagtcgccgtaacgcatccggaaaagatccacacactgctgatcgatccgcaaactggcttgcaagacgctcaggctgacgacatcgctagcaagatcggcgtgccggatgcttcgctcgcgcaagcccgccaagccctgcatggcctgtacaaggcattctgggaaaccgatgcttcgcaagccgaaatcaacccgctgatcctgaccggcgacggcaaggtcatcgcgcttgacgccaagttcaacttcgactcgaacgcgctgttccgtcacccggaaatcgtggcgtaccgcgatctggatgaagaagacccggctgaaatcgaagcctccaagttcgacctggcctacatctcgctcgatggcaacatcggctgcctggtgaacggtgccgggctggccatggccacgatggacaccatcaaactgttcggcggtgagccggccaacttcctcgacgtgggcggcggagccaccacagagaaggtgaccgaagccttcaagctgatgctgaagaacccgtacgtgaaggccatcctggtcaacatattcggcggcatcatgcgttgcgacgtgatcgccgaaggcgtgatcgctgcggcgaaggcggtgtcgctgtcggtgccgctggtcgtgcgcatgaagggtaccaacgaagaccttggcaagaagttgctggccgactcgggtctgcccatcatcgccgcagacacgatggcagaggccgccgagaaggtcgtggccgcagccgccggcaagtaaa

SEQ ID NO: 310547 - DNA, 877 bp, Unknown
  Bacterial polypeptide expressing nucleotide sequence isolated from the Sargasso Sea
atgtcagtattaattgataaaaatacaaaggtaatttgccagggatttacaggatctcatggcacttttcactctgaacaatctattaaatatggaacaaacttagttgggggagtaacaccaaaaaaaggtggacaaattcatttagaaagaccagtatttaacacagttaaagaagcaaaagatgcaacaggtgcagatgcaacaatgatatacgtgcctgcaaagtttgcttcatcagccatcattgaagccatcgatgcatctattgaattaattgtatgtatcagtgaaggaataccaattctagatatgttaaaagtaaaaaaaaaactacaagactcaagctccagattaattggtccaaactgtccaggaataattacacctaatgaatgtaaaattggaataatgccaggtaacattcataaaaaaggttcagttggaattgtatcaagatcaggaacacttacctatgaggcggttgcacaaacaactgaaaataatcttggtcaatcaacatgtataggaattggtggcgatccaattaatggaactaatttcatcgattgccttgatttatttctaaatgacgatcaaacagaatctatactaatgattggagaaataggtggaactgcagaagaagaggcagcagaatttgtaaaaaatcataaaataaaaaaaccaattgttggatttatagctggagtaactgctccaccaggaagaagaatgggacatgcgggtgctattatttcaggaggtaaaggaaatgcagaagaaaagataaaaactatgcaagattgtggtattactgttgctaattctccatctgatattggaaaaacgctactaaataaattgtctaattgat

SEQ ID NO: 310548 - DNA, 703 bp, Unknown
  Bacterial polypeptide expressing nucleotide sequence isolated from the Sargasso Sea
gaaatttccgaggttgattgtaagaaaattattaaggtttttgaattagacgataatgctagttttgaagctataagcttaataaaagcaatttataaattgttcgtagaaaatgatgcaaatttagtagaaataaacccacttattctaacgaaagaaaataaagtagtttgtcttgatgcaaaaatgacatttgatgaaaatgcattatttaaacatccagagattcaagaattaagagattataatgaggaagaagccactgaaattgaagcaagtaaacatgacttggcatatataaaattagatggaagtataggatgtatggtaaacggtgcgggattagcaatggccacaatggatatcataaaactttatggtgaagagcctgcaaattttttagatgtaggaggtggagcgtcaaaagaaaaagtttctgctgcattcaaaattattttatcagataaaaatgttaaaggaatattgataaatatttttggtggaattatgagatgcgatacacttgcacaaggtgttgtagatgcagcaaaagaaattaaaattaaagtaccattagtagtaagattagcaggaacaaactttgaagaaggaaaaaaaatattagagaattctgatttaaaaattatatctgcaaacaacctatctgatgctgcaaaaaaagttgtagaggcaataaaataat

SEQ ID NO: 310549 - DNA, 1168 bp, Unknown
  Bacterial polypeptide expressing nucleotide sequence isolated from the Sargasso Sea
atgaaagtgcatgagtatcaagggaaagaaattttcaaaaaatatggtatcccgactccaaaaggaatccctgcttttagcgttgaagaagcactaaaggcttatgataagctcgaatcaaatattgtcgttgtcaaagcccaaatacacgctggaggtcgtggtaaaggtggcggagtgaaattggcacataatcgtgatgatgtaaaatccttagcatctgatatattagggatgaaacttgtaacacatcagacagggccaaatggtaaagaagtacaacgtcttttgatagagtcaggagctgatatttctagagagttctacgctgcgataaccttggatagaagtaaagaaatggatgtctttatggtatcaaaagaaggtggtgttgaaattgaaaaagttgctgcggaaactcctgaaaaaatcgtgaaagtgtggatagaccctttggtaggactaaaatctttccaagtaagaaaattatcttatggtcttggtcttgaaggaaatgcttttaaagaggcttgttcaattttcaaaaaaatgtatgaatgctatcaatctaccgatgcttcacttttggaagtaaatcctttgattgaaacaaatgataaacaaattattgcattagattcaaaattcaattttgatggtaatgcactttttagacaaaaagatatatatgagatgagagatctatcagaagaggatgaaatggaagttgaggctggtagctataaccttaattatataaagttggatggaaacgtaggatgcatggttaacggggctggcctagcaatggctaccatggatataataaaacttgctggtggcgatccagctaattttttggatgttggaggcacggcaagtgcagaaacagtaaagaatggtttccgtataattttatcagatgataatgttaaagctgttcttatcaatattttcggaggtattgtacgctgtgatagagttgctaatggtgtggtccaagctgttaaagaattaggtctagaggtaccagtagtagtaaggctagaaggaacaaacgcagaagaagcacaggatatccttaatagttcaggtgtatcaattatacctgcaaaagggatgaaagatgcagctgagaaagtagttagtgctgcgataaacttatagg

SEQ ID NO: 310550 - DNA, 1171 bp, Unknown
  Bacterial polypeptide expressing nucleotide sequence isolated from the Sargasso Sea
tatgaacttacatgagtatcaagcgaaggggttattcgctgaatatggactgccagtatccgagggttatgcggtagacacggcggaggaagctgttgaggccgcgaaaaaaataggaggcgatcgttgggtcgtcaaagttcaagtacatgcaggagggcgaggcaaagcaggcggggtcaagctagtcgattcattagaagaagtccgtgagtttgctaatcagtggattggtaagaacctggttactattcaaacggatgagaatggtcaaccggttagtaaaatatttgtagagagttgtacggaaatagagactgaactgtatttgggggctgtaatcgatcggggctctaggcgtgtcgtgtttatggcttctaccgaaggtggtgtggagattgaaaaagtagctgaagaaacccctgagaagattctgcgagtagcgattgacccttttgtgggtgcgcaaccctatcaggggagagatctggcttttagacttggactaaaagacaaacagattcgccaatttgcagacctattcatgggtttgtcaaagttatttatggagctggattgctcgctgctggagatcaatcctttggttattacctccgaaggcgacgttcattgtcttgatgctaaagtaaacattgatggaaacgcgctgtacaggcaaaagcgtatttccgagatgaacgacccctcacaagaggatgagagagaagcgcaagccgcggagtacaacctaaattatgtggctttggatggaaatattgggtgtatggtcaatggagcagggctggccatgggaaccatggatctggtgaaacttcatggggggaatcccgcaaattttttggatgtgggcggcggcgcgactaaggaagcagtagcggaagcctttaagattattttgtcagatgaagcagtgaaggctgttttaattaatattttcggtggaattgtcagttgtgcgacgatagcggaaggaattataggtgctgttaaagaggttggggtagccgttcccgtcgttgtccgtttcgagggtaataattcggagttgggcaaaaagacactttctgaaagtgggttaaatattataccgggcgattctttggtggatgctgctcaaaaagcggttgccgcggctgggggtacatcatga

SEQ ID NO: 310551 - DNA, 1162 bp, Unknown
  Bacterial polypeptide expressing nucleotide sequence isolated from the Sargasso Sea
aatgaatattcacgaacatcaagcaaaacaaatcttaaaaaaatatggtgcgagtgttccaaaaggtgattttgcttttacagtaaacgagttaattgaaaaagcaaaaaagattaagactgaaaaatatgttttaaaagcacagatacacgctggaggtagaggtaaagctggaggagtcaaaatattgaataatattgaggaattaactgaagctgcaaaagagatgttgggtaaaactcttattactcaccagactggtccaaatggcaaagaagtaaaaagactttatattgaagagtcgtcgaaaattaagaaagaattttatttgtcttgtcttattgatagagcaagttcaaaaattgcatttatttctagtgatcaaggaggaatggacattgaagaagtagctaaaaagagtcctgaaaaaataattacgactaaagtagattatcttgaggatattgatgatgaaaattgcaaaaaaattatcaaaatttttaatctaaaagacaatacaatgttacaaggaataaatctaattaaatcaatttataaaatgtttatatctactgatgcaaacttagttgaaataaatcctttaatattaacggaagatgataatctaatctgtttagatgccaaaatgaattttgatgataattcaatttttaggcaaccagagattcaaagcctaagggatttaaatgaggaagatccatcagaaattgaagcaagcaaacatgatttagcctatataaaattagatggatcaattggctgtatggtaaatggagcaggattagcaatggcaaccatggatataattaaattgtttgggcaagagccagcaaattttttagatgtgggtggtggagcctcaaaagaaaaagtttctgcagcctttaaaattatactttcagatccaaatgttaaaggaatattaataaatatttttggaggcattatgagatgcgatattcttgctcaaggagttgttgaagcagcaaaagaaattaatatcaatgtaccacttgtagttagattagctggaacaaactataaagaaggtaaactaattttagataactcagggttaaaaataatttctgcatcagatttgtcagatgcggctagcaaaattgtaaaagcaataaaataa

SEQ ID NO: 310552 - DNA, 679 bp, Unknown
  Bacterial polypeptide expressing nucleotide sequence isolated from the Sargasso Sea
atgaatatccacgagcatcaggcaaaagaaatattatcagaatttggggcacctgttacaaatggttttgttatttttaaaccccaagagataaatgaaaaaataaataaattaaaatctaacaaactagtagtaaaagcacaaatccatgctggtggaaggggtaaagctggaggtgtaaaattagttgatagatcagaagttaattccgaagttcaaaaaatgttaggaaaagttcttgttactcaccaaactgggcccgaaggaaagaaagttaaaagaatttatatacaagaagcatacgatattgaaaaagaattttacttatcatgcttagttgatagagaaagttctaaaatagcttttataagtagtactgaaggtggtgtagatattgaatccgtagcaaaaaataatcctgaaaaaattttaactacaaaagtagatttaaaagataatttaagtgatgatgatattcaaaaaattattaaaatattttctttagataaacatcaaaaaaaagatgctgaaaatttagtcaatgcattatttaataccttaatatcaaaagatgcttcactaatcgaaatcaatccacttgttattacaaaacaaaaaaaattaatctgtttagatgaaaaaatgaatttcgatgacaatgcaatgtatcggagaccta

SEQ ID NO: 310553 - DNA, 340 bp, Unknown
  Bacterial polypeptide expressing nucleotide sequence isolated from the Sargasso Sea
atggggggcgagcctgcaaattttctagatgttggcggaggcgctacaacagaaagagtaaaaatagcgattgaaattattatggaaaatcccaatgttgacgccatcttaatcaatattttcggtggaattgttcgttgtgatgtaattgcccaaggtatttatgaagcagtgaagtcaacaaagattgatattcccattgttgttcgcttgcagggaacaaatgttgaattgggtggaaaaattctcgaagaatcaggaatgaagattatttcagctagtaatcttacagatgctgcaataaaggtagtggcctcagtcaaaggaaaagtcgaatgag

SEQ ID NO: 310554 - DNA, 743 bp, Unknown
  Bacterial polypeptide expressing nucleotide sequence isolated from the Sargasso Sea
tcctgaaaaaattttaaaagctaagttagatgaaaattttgagctagaaaatacagaaataatgaaaatatctgatcttcttaactttaacgagaaacaaaaagatcaatttaaaacaatagttgacgggtcagctaaattatttaaagaaaaagacttgagtcttttagagattaaccctttagtagtaaaggccaatggtgatcttctttgcctggatgcaaaaatcaatgtagatgaaaatgctctttttcgccaagaggaaattgaattaaaaagagactcaactcaagaagattcaagagaatatgaggcgaaagtaaatgatttgagttatgtatccctagagggaaatattggttgtatggtaaatggagctggtttagctatgggaacgatggatactattaagctttatgacggtgagcctgcaaattttttggatgtgggcggaacggcaacgaaagagagagtatcaaaagcacttgagcttattctttcagataaaaaagtaaaaggaatattagtcaatatttttggtggaatagtaaggtgtgatttgatagcacaaggaataattgatgccgtggaggaaataaaagtatccattccaatggtaataaggcttcaaggaaataaagcagatgagggcaagaggcttcttaatgaatcgggtttaaatattattggagaggactctttacaagaagcttcaaaaaaaatcgtgaacttagtcaaatgag

SEQ ID NO: 310555 - DNA, 757 bp, Unknown
  Bacterial polypeptide expressing nucleotide sequence isolated from the Sargasso Sea
gtagcttctgatagtccaaacaaaataatcacaactaaagtagaaataagtgagagcatagatgataataaagtagaaaaaattttatcccctttcaattttaacaaagatcaaaaacgtgaagccataaaactaataaaaagtttatacaaattattaattgaaaaggatgcaacactaatcgaaattaatccattgattttaacaacaaatggaaaaattatttgtttggatgctaaaatgaattttgacgataatgcaatttttagaagacctgaaattttaaagttaagagatttaaatgaggaagatcctacagaaattgaggcaagcaaacatgatcttgcttatataaaacttaatggttcaataggatgcatggttaatggagcaggtttagcaatggctacaatggatataataaaactctatggaaaagaaccagctaattttttagatgttggtggaggagcttcgaaagaaaaagttgcagcagcatttaagcttataatgtctgataaaaatgtgagaggtattttgataaatattttcggtggaattatgagatgtgatgttctcgctcaaggtgttgtagatgcagctaaagaaattaacctttcagtacctttagtagttagattagctggtacaaattttaaggaaggaaaagatatattggataagtcaaatttaaagatattatcagcagacaatttaaacgatgctgctaaaaaaattgtagaggcaattaattaat

SEQ ID NO: 310556 - DNA, 801 bp, Unknown
  Bacterial polypeptide expressing nucleotide sequence isolated from the Sargasso Sea
aaattgcttttatagtttctaaaatgggaggtatggatattgagggtgtagctgaagatacaccagaaaatattacaacagttcaaatcgaaccagcagttggcgtaactgacgagagtattaataagattctttacgcctttgagcttggagagaattatgtaactcagttatccaatctaatcaaaaatatgtataaattttttttagaaaaagatgccagtctagttgaaatcaatcctttgattgtgacagaaactaataaactcctatgtcttgatgcgaaggtaaattttgatgacaacgctctttatcgtcatccagaaatcgaaaagctacgtgatgagaatgaagaagatgtatatgaaagagaggcatcaaagtatgatctagcttatataaaactcgacggaaatattggatgcatggttaatggtgcaggtttagccatggctagtttagatataattaaaatgtatggtggtgagcctgctaattttctagatgttggcggaggagcatcaaaggaaaaggtatcaagtgcattcaaaatcattctttcagacactggtgtaaaaggtattttagtaaatatttttggaggaattatgcggtgtgatatcattgctgaaggtatagttgcagctgcaaaagaacttaaaatttctgtaccccttgtcgttagacttgaaggtacaaacgtaaatgagggtaaaaaaattcttgaaaattctagtatagaaatcattccagctagcaatctagatgatgcagcaaagaaaattgtaaagctggtttaat

SEQ ID NO: 310557 - DNA, 703 bp, Unknown
  Bacterial polypeptide expressing nucleotide sequence isolated from the Sargasso Sea
tgaaatttcagataaagattgtgataagataattaaaatttttgatttaaatgataatgctaaaaaacaagcaatatctttgataaaatcaatttacaaaatgtttattagcactgatgcaaacatggttgaagttaaccctttaatattaactaaagaagaaaaaattatctgtttagatgcaaaagtaaattttgactcaaacgccctatttagacatcctgagattacagagcttagagatttaaatgaagaggatccaactgaaattgaagctagtagacatgaacttgcttatataaagctggatggaagtattggttgtatggttaatggagctggcttggctatggcaaccatggatataataaagctttatggaaaagaacctgcaaattttttagatgttggaggtggggcatcaaaggaaaaagtttctgctgctctaaagataattctttctgacaataatgttaaaggaatcctcataaatatttttggtggaataatgagatgtgatattctcgcccaaggtgttgttgatgctgcgaaagaaataaatattagcgtccctttagtagtaagactcgcaggaacgaattttaaacagggaaaagaaatactagatagttccggtcttaaactaatttctgctgaaaatttagatgatgcagcaaaaaaaattgttgaggcaataaattaa

SEQ ID NO: 310558 - DNA, 631 bp, Unknown
  Bacterial polypeptide expressing nucleotide sequence isolated from the Sargasso Sea
aataactttaattaaatcaatttataaaatgtttattagtacagatgcaaatatggttgaggtcaatcctttaattttaactaaagaagaaaaaatagtttgtttagatgcaaaagtaaattttgactcaaatgctttgtttagacatcctgaaattgttgagcttcgagatcttaacgaggaagattcaactgaaattgaagcaagcaaacatgaccttgcttatataaaattagatggaagtattggttgtatggttaatggagcaggcttagcaatggccaccatggatataataaaattgtatggaaaagaaccagcaaattttttagatgtaggaggaggagcgtcaaaagaaaaagtttctgcagctttaaaaattattctttcagataagaatgtaaaaggaattttgattaatatttttgggggaattatgagatgtgatgtgcttgcacaaggagtggtagatgcagctaaggagataaacattggcgttcccttagtggttagacttgcaggtacaaactttaaacaaggtaaagaaatacttgataattctggtttaaagttaatatcagcagaaaatttagatgatgcagctaaaaaaattgttgaggctataaaataa

SEQ ID NO: 310559 - DNA, 1042 bp, Unknown
  Bacterial polypeptide expressing nucleotide sequence isolated from the Sargasso Sea
tgttgttgtaaaagctcaaattcatgcaggtgggcgtggaaaaggtggcggcgtaaaatattcttcttcaacagaagaagcattaaaaaatgtgaaaaaaatgttaggaatgaacttgataactcatcaaacaggtgataaaggccaaaaagttaaaaaagtttatataactgaagctctggatataaaaaaagaattttattgtgcaattacacttgatcggtctaaagctaaagatgtatttatggtttcatcagaaggaggtgttgaaattgaaaaagttgcagaagaaacacctgaaaaaatcattaaagtatggattgatccattaattggaataaaatctttccatgcaataaaattggctaatgggcttggcttgtcaggtgaagctcataaaatagctataaaggttttcattaatatgtacaaatgctacatgggtaccgatgcttctattgttgaaataaatccactaattcttactgaggataataaaatagtagctttagatgctaaatttaattttgatggaaacgcaatttttcgacataataatatcgctgagctaagagatactaatgaagaagatccgactgaattagaggccagtaaatatgatttaaattacatcaaattagatggaaatgttggatgcatggtcaatggagctggtttagctatggcgacaatggatattattaaacttgcaggaggtgaaccagcaaactttttggatgttggaggtgctgcttcagctgaaaccgtaaaaaatggctttaaaataatcctgtctgataaaaatgttcaggctattttaattaatatttttggtggcattgttcgttgtgatcgtgttgcaaacggtgttattgaagctgttaaggaattggggttaaaagtccctgtagttgttcgattagaaggtacaaattcagaagatgcgaaaaatatactatctaaatccggtttagatattatacccgcaaatgatatgaaagacgcagcagagaaagttgtcaatagcgcaataaataactaa

SEQ ID NO: 310560 - DNA, 435 bp, Unknown
  Bacterial polypeptide expressing nucleotide sequence isolated from the Sargasso Sea
tgggaatagtttctcgctctggaaccttgacgtacgaggcagttaagcagacaaccgacaaaggctttggtcagagttcttgtgttgggatcggcggtgacccgatacctggtagtcactttatagatatcctttcgctgtttcaggaagattcaagtactgaagcgatcgtgatggtgggagaaataggtggtacggctgaagaagaggcggcagcctatattaagtcgaacgtgacaaaacctgttgtcagctacatagcaggagttacggctccacctgggaaaaggatgggtcatgctggagcaatcatagcgggcggtaaaggcacggcggatgaaaagtttgccgctctcgaggatgctggcgtaaagacagttcgtagccttggagagattggggatgcattgtctgagatgacaggttggccctagg

SEQ ID NO: 310561 - DNA, 754 bp, Unknown
  Bacterial polypeptide expressing nucleotide sequence isolated from the Sargasso Sea
tccagagaagatcgtcaactatacgatagacccattaaagggtctagaaataggctctttaaaagaaatggcagacagaatgggctttattgatgatattcagtctcaatttatttcgatcacaaagaagatgtttgagattgcaaaagaaaaagatgcaaatctgatagaggtgaatcctcttattttggacgatgagaatcagctgatagctctggatgcaaaaatatcaattgaaagcaatgcattgttcagacaaaaagaactcttattactcaaagatgactctcaagaaaataaacttgaagtcaaagcttcagaacatgacttaagctatgtttctttggatggaaatatcgcatgcatggtcaatggagcggggcttgcaatggcaacgatggatctaataaaactgcatggaggcgagcctgcaaattttctggatgtcggtggaggcgctacaacagaaagagttaaaatggcgattgacatcattatgaaaaatcccaatgtcgacgccatcttaattaatatttttggtggaattgttcgttgcgatgtaatcgcccaaggcatttatgaagcagtgaagtcaacaaacattgatattcccattgttgttcgattgcagggaacaaatgttgaattgggtacaaaaatcctcgaagaatcaggaatgaagattatttcagctagcgatcttacagacgcagcaatgaaagtagtggcctcagtcaaaggaaaagtcgaatga

SEQ ID NO: 310562 - DNA, 1055 bp, Unknown
  Bacterial polypeptide expressing nucleotide sequence isolated from the Sargasso Sea
aataaatggcaaggttgttataaaagctcaagtccatgcaggtggcagaggtaaagctggcgggataaaaatcgttgataatcctttagatgcaaaaaaagttgctcaagatatgataggcggaacattaaaaacttttcagtcaggaggaactaaattccctattaataaagtttatgtagaggaggcttctgatattttaaaagagttttatcttgcagttacaatggattttgatgaaaaatgtcctgtcataattttatctactgaaggaggaatgaatatagaggaagttgcagaaaaaactccagataaaataatgaaaattcatgtaaacccgcttatagggccctctccatacaaggtgagaaacttattatcttcgcttaatctagaaaaaaaaatttctcagcaaatttctaacataattcaaaacctttacagaatatttaaatctttagattgcacattaattgaaatcaatccattagcaattactagccaagaaaaagtaatagccttagatgccaaaattacaattgatgatgattctatttttaggcattcagatattgaagagttatttgatgaaacccaaatgaatcaatctgaattaaaagcattaagaaatgatttagcttatataaagcttgatggaggcaaggttggatgcatggttaatggggcaggtttagctatggcaacaatggatataactatgaaagctggcactgctccagcaaattttttagacgtaggaggcagtgcctctgaagaaagaattgaggaagcctacaaaatcattgcttcagataatgatgtggaagtaattttagttaatttatttgggggcattttaagatgtgatgtggcggcaaaaggcattattaatggatttgaaaattataacaaatctattcctatggtagtggtattaagaggtacaaattctgaggatgcaaaattgttactggaaaattctgaactagatataagctttgcagaagatttaccaacagctgctagtgaaataacaaaaaagctaaagaaataat

SEQ ID NO: 310563 - DNA, 508 bp, Unknown
  Bacterial polypeptide expressing nucleotide sequence isolated from the Sargasso Sea
tgatgaaaatgcattatttaaacatccagaaattcagaaacttagagattttaatgaggaagaagaaactgaaattgaagcaagcaaacatgatcttgcatacattaaattggatggaaatataggatgtatggtaaatggtgctggattagcaatggctactatggatattattaaattatatggagaagagcctgcaaattttttagatgtaggtggtggtgcttctaaagaaaaagtttcagcagcatttaaaattatcttatctgacaaaaatgtaaaaggaatactaataaatatttttggaggaataatgagatgtgacgtactcgcacaaggtgttgtagatgcagcaaaagaaattaaaattaaagttcctttagtagtgagactagcaggcacaaatttcaaagagggaaaagaaattttagataattcaggattagagattatttctgcaaatgatttatccgatgcagcaaaaaaaattgttgaggcaattaaataa

SEQ ID NO: 310564 - DNA, 906 bp, Unknown
  Bacterial polypeptide expressing nucleotide sequence isolated from the Sargasso Sea
ctgataaaaaaggtcagcttgtcaattgtattttagtagaggaatgtaccaatatagcaaaagagctatacttaagcgctattattgatagagaatcacaaaaaattgttttcataggatctagtgagggtggagtgaatattgaagatgttgcaaaaaatatgcctgaaaaaattatctatcaaggttttgtttataaagatgattctctgaatgaaaatgctgaaaatatcgcaaaagttcttaaattgaatgatcaacaaacaatacaatttatttccataatagataatcttttaagattattcgttgaaaaagacttgagcctgttagagattaatccgcttgtaattacagaaaatggagatttgcattgtttggatgcaaagataaatattgattcaaatgcgctttatagacagccagaattactagaaatgcgtgatgaatcgcaggaagatccaaaagaagcagaagctgctaaaagtgatttgagttatgtttctttggatggaaatattggttgtatggttaatggagcgggcctagcaatgggaactatggatactataaaattctttggtggaaatcctgcaaatttcttggatgttggcggtactgcaactcaagaaagagtggctaaggcttttaaaataattcttgatgatccagatgtaaaagtagttctagtaaatatttttggtggcattgtgagatgtgatttaattgcagagggtattattgccgctattaaagaagttgaagtaaaaattccagttgttgttcgcttggaaggtaataatgctgatattggatcaaaaattttatctaaagctaaaatcaagattgaaagtattaatgatttagctgatgctgctaaaaaagcagtctcacttgcaaaatgag

SEQ ID NO: 310565 - DNA, 859 bp, Unknown
  Bacterial polypeptide expressing nucleotide sequence isolated from the Sargasso Sea
ggctctgatatagaaaaggaattatatctctcatgtctgctagaccgatcaactagtaaagttgcatttatagtttctaaaatgggaggcatggatatagaagcagtcgccgctgatacgcctgaaaatattacgacagttcaaattgaaccatcaataggtgttacaaatactgacattgaaatgattcaaaaggcttttgaaatagatgatgatttaaatcatcaattgtctgatctgattaaaaatatgtatttattttttattgaaaaagatgcaagtcttgttgaagttaatcctctgatagtcacaaatacaaataaacttttatgtttagacgcaaaagtaaactttgatgataatgcaatttatcggcaccctgaaattgaagaattaagagatgaaaatgaagaagatgaatatgagagggaagcagcaaagtatgaccttgcctatattaaattggatggaaatataggatgtatggtaaatggagcaggacttgcgatggctagtcttgatattattaaaatgtatggcggagaacctgcaaatttcttagatgttggcgggggcgcgtcaaaagaaaaagtctcgagtgcttttaaaatcatactttcagaccagggtgttaaagggatactcgtgaatatatttggtggcattatgagatgtgatgttattgccgagggaattgtttctgcagcaaaggaattaaaaatttctgttcctcttgttgttagattagagggtactaatgtggaccaaggaaagcagatccttgaaaattcagggatagaaatcatttcggcaaatgaccttgatgatgctgcaaaaaaaatagttaagcttgtttaat

SEQ ID NO: 310566 - DNA, 481 bp, Unknown
  Bacterial polypeptide expressing nucleotide sequence isolated from the Sargasso Sea
tccgtttacgttgaccagtgggactgggagcgcgtaatgggcgatggagagcgccacagcggcacgctgaaagcaaccgttgaagcgatctatgccgggatcaaagcgaccgaagacgccgtcagtaaagcgtttggcctcacgcctttcttgccggagacgatccagtttgttcacagccaggagcttttaagccgctatccggatcttgatgccaagggccgcgagcgggcgatcgcgaaagagctgggcgcggtattcctgatcggtatcggcggcaagctttccgatggccagcgtcacgacgttcgcgcgccggattacgatgactggagcacgcctgctgctgaaggctatgccggtctgaacggtgatattctggtgtggaacccggtgcttgaagatgcattcgagctctcttcaatggggatccgcgtggatgccgaagcgctgaagcgtcagctcgcgatgaccggcgacg

SEQ ID NO: 310567 - DNA, 994 bp, Unknown
  Bacterial polypeptide expressing nucleotide sequence isolated from the Sargasso Sea
catgaaacagcactacattcgcagccagcaacagatcagcttcgtcaaagagatgttctcccgccaactcgcccagcaactgggtctgatggaggtgcaagcccccatcctgagccgggtcggtgatggcactcaagacaacctctctggccacgagaatgcggtgcaggtcaaggtgaagaccctgcctgagcacagctacgaagttgtccattcactggccaaatggaagcgccagaccctgggtcgcttcggtttcggcccgggcgaaggcatctacacccacatgaaggcgctgcgtccggacgaggatcgcctcacccccatccactccgtctacgtggatcagtgggactgggagaaggtgatgccgagcgagcgccgggacctggcctacctgcaggaaaccgtgcgcggtatctgggccgccatcaaggctaccgagcgcgcggtctgcgccgagcacgagctgacccccttcctgccggccgagatccatttcctgcacagcgaagagctgctgacccgctacccggacctcgatgccaaggggcgcgagcgtgccatcgccaaggagctgggtgccgtgttcctgatcggcatcggcggtgccctctcccacggcgagcgccacgacgtgcgtgccccggactacgacgactggagtagccacagcgagctggggctggccggtctgaacggtgacatcctggtgtggaacccggtactgcaggacagtttcgagatctcctccatggggatccgggtcgacgccgaggcgctgcgccgccagctggccatcaccggtgatgaggatcgcctgcagtacgactggcaccaggatctgctggccgcacggatgccgcaaaccatcggcggcggcatcggccaatcccgtctggccatgctgctgctgcaaaaagagcacatcggtcaggtccaggtcggcgtctggccggccgagatgaaagccgccgtgcaaggcatgctgtaa

SEQ ID NO: 310568 - DNA, 226 bp, Unknown
  Bacterial polypeptide expressing nucleotide sequence isolated from the Sargasso Sea
aggattgcctcatatggttctgataatgatatgagacttacgggcttgcatgaaactcaaagcattgagaaattctcatatggtgtaagtgatagaggtgcaagtataaggataccggttgctacagttgaaaatgattggaatggatatcttgaagacagaagacctgcttcaaatgcagatccatacaaaatactatctcatatagtaggaactcttacataat

SEQ ID NO: 310569 - DNA, 943 bp, Unknown
  Bacterial polypeptide expressing nucleotide sequence isolated from the Sargasso Sea
tatgaatacttttgaatatatatggcttgatgggtatcagccagaaccaatgatgcgaagcaaagttaaagccactgaggacgatactcctccagattggtcttttgatggatcttcaactcagcaagctgaaggtggaagttctgactgcttactgttaccggtgcaaacctatgcaaatcctaatggacatgatttagttatgactcaagtacaagctgctgaccactctgttcacccatctaatactagagctgcagcagcagaagtaactacagatgagtggtggtttggctttgaacaagaattcttttttactgatccgcaaaccggagaacctcttggttgggaagatggaacaccaagagagcaaggcgaatattattgtggagtcggagcaggaaatgtagttgggagagaaatctcagatgctcatttagaagcttgtttagatcttggcataaccctgacgggaacaaatgcagaggttgctcttggccaatgggaatatcaatgttttgggaaaggcatcaaagcagctgatgatctctgggtatcaagatatcttctttataaaattgctgaagagtatggtgttggtgtaaatattcatccaaaacctaaaacaggagattggaacggctcaggaatgcattgcaatttctcaaatgaggcaatgagaactgctggttctgaagaacttttctcttcaatgtgtgacaagttaggcgaagtccacgaagaaggcattgcttcttacggctcggataatgatatgagacttacgggtctgcatgaaacacaaagcatcgataagttctcttatggtgtcagtgatcgtggagcaagtattagaattccggtttacactgttgagcacgactggaacggataccttgaagatagagaccagcatcaaacgctgatcctttatagatattag

SEQ ID NO: 310570 - DNA, 873 bp, Unknown
  Bacterial polypeptide expressing nucleotide sequence isolated from the Sargasso Sea
ttgctgatatgcaggaagatggtgcaggatttgctggctttgccagttggcttgatatgaccccagcgcatcctgatatgttagctgtgccggatccagagagcgtaatacagcttccttggaagagagatgttgcatggttggcagcagattgttttattgatgccgatccagttaaacaggctccaagaaatgttctaaaatctctgattagtaaaactttagaaagcaacttaagagtaaagacaggtatcgaagctgaattttttctccttttacctgatggctcagatatttctgatccttatgataacgctgtcaagccgtgctatgatcagcaagcactaatgcgcagatacgatgtgattgctgaaatttgtgactacatgcttgagcttggttggggtccgtaccaaaatgatcatgaagatgctaacgggcaattcgaaatgaatttcgaatttgatgatgtcttaaagactgcagacaaacattcgttctttaaatttatggttaaatcaatagctgagaagcatggattgagggccaccttcatgccaaaaccggtggagcatttgacaggtaatggttgtcatgcacacatctcggtttgggatttgacgggccaaaataatgtctttgctgatgatagtgaagagctggggctttccaaaaaaggattaaattttctggggggaataattaatcatgcaacatccatgactgcaattaccaaccctaccgttaattcttacaagagaattaacgctcctcggacgctaagtggtgctagttgggctccaaataccgttacttggacttcgaataataggacacatatggttagagttccaggtgccaggaagatttgaa

SEQ ID NO: 310571 - DNA, 686 bp, Unknown
  Bacterial polypeptide expressing nucleotide sequence isolated from the Sargasso Sea
tatgagcaaatctaaattagaatatatatggcttgatggttacaaaccaactcaaagcctaagaagcaaaacaaaaatagtatctgactttgatggaaaattatcaagttgcccaatgtggtcttttgatggttcctctacacttcaagctccaggaggttcttcagattgtttacttaaaccagttgctatatatccagatcctgaaagaaagaatgggttcttagttatgactgaagttttaaatgcagatggaactgcacacgagtccaatgggagatcaacaattgatgatagtgataacgatttttggtttggttttgaacaagagtatttcttgatcgatactgaaacaaatctaccattaggattcccaaaagaccagacacctcaaggacaattttattgttctgttggaggcgcaaatacatttggaagagaaattatggaccgtcatcttgatgtttgtcttgaagctgggatcaatgtagaaggtactaatgctgaagtagcagctggtcaatgggaatttcaaacttttgccaaaggtgctcaacaagctggtgatgaaatgtgggttgcaaggtatttattggagagaatagcagaagactatgcaatcaaaatcgaataccaccctaaacctttaggcaacactgattggaatggatcgggtatgcatgcaa

SEQ ID NO: 310572 - DNA, 881 bp, Unknown
  Bacterial polypeptide expressing nucleotide sequence isolated from the Sargasso Sea
aatggatacgagcgatccttcaatattttttgataatgatggtatttctaatcattatcatgattttcaaaataatgttcttccaaaatggaatcatggaataggaagagaaaaagagcttaaagatttcatagataaaattaaattagatgctggagataatgaatttaattgcattttagggttaagtggtggagttgatagcagctacatgttgcatcactgcgttaaaaatttaggactaaatcctctcgtattccatgttgatgcaggatggaattcagagctagctaacaaaaatattcaatcattagttagtaaattgaatataaatttatataccgaagtagttaattggaaagatgttcaggatttacagcattgtttttttaaagcaggtgttccacacctagacacaccacaagatatggcttttgtggcagtgttatataaatttgcaaaaaaacataatataaaatggattttaaatggaggaaatttaagtaccgaaagtgtccagatacctttaaagattctttactacgcgacagatatgaaacacaacaaagatatcatgaaaaaatttgcaacaagagatctttctaattttccatttagcagtatttggcatcacaaactttatttaccgtattttaaagggatcaaagtatttaaaccgttaaacttttttgaatataagaaaaaagatgcaatagatacactaaaaaatgaatatggatggactccctacccacaaaaacactttgaatcaagatttacaaagtttttcgaaggttattggttaccatcaagatttggttttgatatgcgaagagtgcaattttcatcacttattttaagtggccagatggaacgtgatg

SEQ ID NO: 310573 - DNA, 826 bp, Unknown
  Bacterial polypeptide expressing nucleotide sequence isolated from the Sargasso Sea
tttgaatatatatggcttgatgggtatcagccagaaccaatgatgcgaagcaaagttaaagctactgaggacgatactcctccagattggtcttttgatggatcttcaactcaacaagctgaaggcggaagttcagactgcttacttttaccagtgcaaacctatgcaaatccaaatggtcatgatttagttatgactcaagttcaagctgctgaccattccgtgcatccatctaatacgagagctgcagcggcagaagtaactactgatgagtggtggtttggatttgaacaagaattcttttttactgatccgcaaactggagaacctttaggttgggaagacggcacaccaagagagcaaggagaatactattgtggagttggagcaggcaatgtagttggtagagaaatctcagatgcgcatttagaagcttgtttagatcttggcataacccttacgggaacaaatgcagaggttgctcttggtcaatgggaatatcagtgttttggaaaaggtatcaaagcagctgatgatctttgggtatcaagatatcttctttataagattgctgaagaatatggcgttggtgtaaatattcatccaaagccaaaaacaggtgactggaacggatctggaatgcattgtaatttttcaaatgaggcaatgagaactgctggttctgaagaacttttctcttcaatgtgtgacaaattaggcgaagttcatgaggaaggtattgcatcttatggttcggataatgatatgagactaacaggtcttcatgagacacaaagcatcgaaaaattctcttatggtgtcagtg

SEQ ID NO: 310574 - DNA, 241 bp, Unknown
  Bacterial polypeptide expressing nucleotide sequence isolated from the Sargasso Sea
atgagctcaagtaaagttttaaaaatgatgaaagacaataagattgattatgtcgatcttagattttccgatccaagaggtaagttgcaacatttaactatggattcgacagttgttgataatgacatgcttaatgagggagtattttttgatggctcgtctattgccggctggaaagcaattaatgagtcggatatgattttaaaacctgatcttagcagaacaataatagatccattta

SEQ ID NO: 310575 - DNA, 655 bp, Unknown
  Bacterial polypeptide expressing nucleotide sequence isolated from the Sargasso Sea
tatgaatacttttgaatatatatggcttgatgggtatcagccagaaccaatgatgcgaagcaaagttaaagccactgaggacgatactcctccagattggtcttttgatggatcttcaactcagcaagctgaaggtggaagttctgactgcttactgttaccggtgcaaacctatgcaaatcctaatggacatgatttagttatgactcaagtacaagctgctgaccactctgttcacccatctaatactagagctgcagcagcagaagtaactacagatgagtggtggtttggctttgaacaagaattcttttttactgatccgcaaaccggagaacctcttggttgggaagatggaacaccaagagagcaaggcgaatattattgtggagtcggagcaggaaatgtagttgggagagaaatctcagatgctcatttagaagcttgtttagatcttggcataaccctgacgggaacaaatgcagaggttgctcttggccaatgggaatatcaatgttttgggaaaggcatcaaagcagctgatgatctctgggtatcaagatatcttctttataaaattgctgaagagtatggtgttggtgtaaatattcatccaaaacctaaaacaggagattggaacggctcaggaatgcat

SEQ ID NO: 310576 - DNA, 481 bp, Unknown
  Bacterial polypeptide expressing nucleotide sequence isolated from the Sargasso Sea
tgcttttgcaaatgcaacaacaaatagttacaagagattaattccaggatttgaggctccagttttacttgcttactcggctagaaatcgttcagcatcatgtagaatccctattacacttagcaaaaaaggagcaagatgtgaaattagatttccagatgcttctggtaacccatatttaacttttgcatcaatgttaatggcaggaattgatggtattaaaaataaaattgatccaggtaaatcttttgataaagatttgtatgccttatcagaaaaagaattaaagaaagttcctacagtttgtggatctttaagagaggcaatggaaagtttggacaaagatagaaaattcttaactcaaggaaatgtatttacggacgatcaaatcgatgcgtatattgctttaaaatttgaagagatacacaactttgaacatacgcctcaccctattgagtttgatatgtattacagttgttaa

SEQ ID NO: 310577 - DNA, 715 bp, Unknown
  Bacterial polypeptide expressing nucleotide sequence isolated from the Sargasso Sea
tgttttttttaagtttatggtaaaatctattgctgagaaacacggattaagagcaacgtttatgcccaagccatttgatgaattaaccggaaatggttgtcatgcacacgcatctttatgggacttaaagaagaagcaaaatcattttcttgataaaaataatgagcttggattatccaaaatgggctaccactttattggtgggataatgaaatctgttgattcattttctgcttggttcaacccatcattaaatagctatgatcgtttgaatgcgagaacaaccaattcaggatcaacatattcacctactgctgtaacctattctggaaataatcggactcatatgatcagaataccagatgcaggaaggatagaatttagacctgctgatggtgcagttaatccctatctcttgcaagctgggctgattgctatgggattggatggaataaaaaataaaagaaatcctggcaagaggatagatgtgaatatgtattcacaaggtcacaagttaaagagaattaaaaaactacctcagtctcttatggagtcacttaataaatttaaagccagtgaagttgtaaaaaaatctataggtgcaaaagttgtcacgcaatatataaaacttaaaaaaagagagcttgcagaacacaataaaattagtgatgaaaataaaaaagaatgggaaagaaaaaatattattgattgctaa

SEQ ID NO: 310578 - DNA, 574 bp, Unknown
  Bacterial polypeptide expressing nucleotide sequence isolated from the Sargasso Sea
tttggtagagaaattatggaccgccatttagatgtatgtcttgatgctggaattaatgtagaaggaacaaacgcagaggttgcagcagggcaatgggaatttcaaacttttgctaagggtgcaaaagaagctggagatgaaatgtgggtagctagatatcttctagagagaatagctgaagattatgcaattaaaattgaatatcaccctaaaccacttggagcgactgattggaatggttcaggtatgcatgctaacttttccaacaccactttaagaacatgcggttctaaagaaacatatgaaaaaatatgtgaagcatttaggccggttgttgatgactgtattgcagtttacggagcatataacgatcaaagacttacaggtgaccatgagacacaatcaataacagagtttagctatggtgtttcagacagaggtgcatcgatccgaattccaataatgactgttgaaagcggatggaaaggatggttagaagacaggagaccttcttcaaacgctgatccttacaaagttgcagcaattatagtaaagactgtaaaaagcgcttaat

SEQ ID NO: 310579 - DNA, 160 bp, Unknown
  Bacterial polypeptide expressing nucleotide sequence isolated from the Sargasso Sea
aaaaaattttcttatggtgttagcgatagaggagcaagcattagaatccctatttacactgttgaaaacaactggaatggttatttagaagatagaagacctgcttctaacgctgacccttataaaataattaatcatattgtttctaccttgaaatagt

SEQ ID NO: 310580 - DNA, 789 bp, Unknown
  Bacterial polypeptide expressing nucleotide sequence isolated from the Sargasso Sea
aatgaaaacttacgaatatatatggcttgatggatacacaccagagtcatcaatgagaagcaaggttaaggccacaaaagatgaaacgccacccgattggtcatttgatggatcttcaacacaacaagccgaaggaggaagttcagactgcttacttttgccagttcagacatatgaaaatccaaatggacatgatttagtgatgacacaagttcaatcagcagatcactccactcatccatctaattttagagctgctgctgctgaagtggtaaccgatgaatggtggtttggatttgaacaagaatactttcttactgatcctgaaaccggtgagccacttggatgggaaaatggagaacctggcccacaaggcccatattattgtgcagttggtgctggaaatgtaataggaagagaaatctcagatgctcatctttatgcatgtttagatctaggaatagagttaacaggaactaatgctgaagttgctttaggccaatgggagtaccaatgttttggcaaaggtattaaagctgctgatgatttatgggttagtagatatcttttatataaaatagcagaagattttggtgttggagtgaatattcatcctaaaccaaaaactggtgactggaatggatcaggtatgcattgtaatttttcaaatgaagcaatgagaacttcaggatctgaagaattatttaactcaatgtgtgaaaaattaggtgaagtccatgaagaaggtattgcttcttatggttctgacaatgatatgagattaactgg

SEQ ID NO: 310581 - DNA, 823 bp, Unknown
  Bacterial polypeptide expressing nucleotide sequence isolated from the Sargasso Sea
aatgtcagattataaaacatatgaatacatttggttagatggttacaaacctgaagccaacatgcgaagtaaagtaaaagctactgatgaagacacaccaccagattggtcatttgatggttcttcaacactacaagcagaaggtgggagctcagactgtcttctacttcctgttcaaacttattcaaatcctaacggtcatgattttgtgctaactcaagttcatgctgcagatcatacgacacatccttctaacttcagagctgctgctgaggaagttgttacagatgaatggtggtttggttttgagcaagagtttttcttcacagatcctactactggtgaacctttaggatgggaagatggaactccacgagaacaaggtgaatattattgtggtgtgggagctggcaatgtggttggaagagaaatatcagatgcacatttacaagcttgtctagatattggtattaccctaacaggaacaaatgcagaggtagctttgggtcaatgggaatatcaatgtttcggtaaaggaataaaagcagctgatgatttatggatgagtcggtacctgctttttaaggttgctgaggaatttggcgttggagtgaatatccatccaaagccaaaaacaggagactggaatggatccggaatgcactctaatttttcgaatgaagagatgcgtacaaatggttctgaagagcttttcacatcttattgcgaaaaacttggtgaagtacatgaagaaggaattgcatcttatggttctgataacgatatgaggcttactggtcttcacgaaacacaaagcattgaa

SEQ ID NO: 310582 - DNA, 829 bp, Unknown
  Bacterial polypeptide expressing nucleotide sequence isolated from the Sargasso Sea
agaataaaacatgagagtatcaagttcatagatctccaatttactggtttaacaggtagatttcatcatactacaatttctgcagatacttttaccccacaacaaatggaagatgggttaccaaaattagacggatcatcaattgtaggatttacagatattgctgactctgatttaatattaaaaccagacccaagtacatttgcaattattccatggcttacagaaaaaaagactgctagattgttgtgtgatgtgtattggggcggaggaagaggtcgtcttgaaagtgatcctcgaggaatttgccaaaaagcagaagcatttgtcaagacacaaggatttgattttagtaattggggaccagaagtagagttttttgtatttgataaagtacattgggatgttttaacaccctacaaaggacaatcgtattcaattgaatcttctgaatcaccatggagccaagaaggaactgggtatcctatgggattacaagaaggatattacccaagtactccatcagacactcttgcaccattcagaaatgaatgtgtggatgttttgaacgataattttggaattttatgtgataatcatcatcacgaagtagcaactgcaggacaatgtgagattgatataaaatatgatttaatgactaattctgctgacggggcacaatcatacaagtatgttgtaagaaatgttgcacaacaatttggaaaagtagcaacaatgatgccaaaaccaatttcaatggatgcaggttcaggtatgcacacaaatgttagtttatggaaaaaagatgagaaaatacgttttatgataa

SEQ ID NO: 310583 - DNA, 466 bp, Unknown
  Bacterial polypeptide expressing nucleotide sequence isolated from the Sargasso Sea
actaaccctactgtaaattcgtataagagactaaatgctcccagaacggcttctggtgctacatgggctcctaattcggtcacttggacaggtaataataggacccatatggtaagagtcccagcgcccggccgttttgagctaaggcttgccgatggggcaacaaacccctacctacttcaggctgtaattctagcagctggcttggatggcctagaaaagaaatctgatccaggaccacattacgatatagatatgtactcggatgaacacttagtcaaagatgccgctaaacttccgttgaatttacttgatgcgttacgtgcttttgacaaaagcacagggctaaaggaagctctcgggcttgatttttcaaaggcttttttgaaattaaagcacgatgaatggagagcttttacggctgacttttcagaatgggaaaaaaataacgctttagatgtttagc

SEQ ID NO: 310584 - DNA, 285 bp, Unknown
  Bacterial polypeptide expressing nucleotide sequence isolated from the Sargasso Sea
taatggcaggtcttgatggtatcaaaaataaaattgatccaggtaagtcttttgaccaggacctttatgcattaactgaaaaacaagttaaaaaagttcctacagtttgtggatcattaagagaagctatggaagctcttgataaagatagaaactttttaaaacaaggtaatgtatttactgatgatcagatagatgcttacattgagttaaagtatgaagaaattcataactttgaacatacgccgcaccctatcgagttcgatatgtattatagctgttaaa

SEQ ID NO: 310585 - DNA, 760 bp, Unknown
  Bacterial polypeptide expressing nucleotide sequence isolated from the Sargasso Sea
agatctaatgaaacagaaatgatagcctttcctgacccaacaacattccaaattctcccttggagaccagatgaaccttctgtagctaaaataaattgtgatattttgaataaagatggaagtccttcaaattttgatagtagatttattttaaaaaataaggttgaagaactaataaataatgggcttaatttttatgttgcacctgaaattgaatattattatttagaaagctctgaatctatggaacctattgatgaaaaaacatatttcgatcaaattggaatacatggagatttgggttcagatcttaggcgtaatacagtcttgggtcttgaaaaaatgggaataccaattcaaaagtttcaccatgaagtctctcctgggcaacaagaaatcagtttaaggtatagtgattcagttacaatggcagatagctttcaaacttttaaaattattgttaaggaaatagctatgttatcggatgtatttgctactttcatgccaaaaccatttgaagaatttgaaggaaatggaatgcatttgcacatttcattatttaaggatgacaaaaatttatttactcaaaattcctctaaatcaggtatttctaaggatggggaattttttacagccggcctgttaaaacatgttacagactttatgataatttctaatcaatgggtaaattcttacaagagattagtttctaaaaatgaatcaccatcgcatataagctggtcaaacacaccaaacaatt

SEQ ID NO: 310586 - DNA, 466 bp, Unknown
  Bacterial polypeptide expressing nucleotide sequence isolated from the Sargasso Sea
tatgaagtttgattgtaaaagtcctaaagagttattaaataaaataaaggatcttaacattaatatggtagatctaagatttacagatttaccaggaacaactcaacattttactatacccataagttacctaaatgaagatgtcttcgaagaaggtttgggttttgatggctcatcagttagaggatttcaagaaattcaaaatagtgatatgattgttttacccgatgtcaattctgcatacattgatcctttttattcagaaaagactctagctcttcattgtaatataaaagatcctgttacgcttgaagattatacaagagatccaagaaatatagctaagaaagcagaaaattacttaaaaacttctggtatagcagacacagcctactttggtccagaagctgaattttttgtttttaataacgttcaatatgattctggttcaaacttttctttttat

SEQ ID NO: 310587 - DNA, 850 bp, Unknown
  Bacterial polypeptide expressing nucleotide sequence isolated from the Sargasso Sea
ggtaaatctatatcagacccgagagatatccaatcaaaaccttgttatgatcaatctgccttgatgagaagatatgatttaataaaggaaatttgtgactgtatgattgaacttgggtggaatccttatcaaaatgatcacgaagatgctaacggtcaatttgaaatgaattgggattactctgatagtttgattactgctgatagacacactttttttaagtttatggtaaagtccttggcagaaaaacatggtttacgtgctacattcatgcctaaaccatttgaaaacctaactggtaatggttgtcacgctcatatttctttatgggatggtaagtcaaatatgttcctagaaaaaggtgatagattaggtttgagcaaattagcatataattttttaggtggaataattaagaatacgacttctctagcagcattctttaacccaacaattaatagttacagaaggataaatgcaccgccaacaaaatcaggtgcgagttggtcaccaagcagtatttcttatactgggaacaacagaactcatatgattagagttccagatccaggtagatttgagcttagattgatggatggatcttcaaatccatatttacttcaagcaggagttatggccgcaggtctagatggcataaataataaaactgatccaggagaaccattattttgtaatatgtatacagatcacaaaaattatccaaatttagaaaggcttccaaatgaacttgaagaatctttagaaaatttagagaataacaaaatattaagagatgcttttggagaaaaagtaatttcaagctatgtgaaactaaaaaagcaagagattg

SEQ ID NO: 310588 - DNA, 275 bp, Unknown
  Bacterial polypeptide expressing nucleotide sequence isolated from the Sargasso Sea
catgaagataaaagcagaatatatatggattgacggtctaactccaaccgcaaaattaaggagtaaaacaaagataattgaacaaggaacagagcctccaatttggggctttgatggttcaagtacacaacaagctacaggtgaccaatctgattgcgtattaaaaccagttgctcaatttccagacccaattagaggtggagacaatatattagtaatgtgtgaagttatgaatgtagatatgactcctcacgcgtcaaatacaagagcagcat

SEQ ID NO: 310589 - DNA, 807 bp, Unknown
  Bacterial polypeptide expressing nucleotide sequence isolated from the Sargasso Sea
caatatcagaccctaaagatatacagtcaaaaccttgttatgatcaatctgcattaatgagaagatatgaattaattaaggaaatttgtgattgtatgattgaacttggatggaacccatatcaaaatgatcatgaggatgccaatggacaatttgaaatgaattgggactattcagatagtttaatcacggccgatagacatacattctttaaatttatggttaaatctttagctgaaaagcatgaattaagagcaacttttatgcccaaaccattcgaaaacttaacaggaaatgggtgtcatgctcatatttctttatgggatggtaaatcaaacaaatttttagaaaaaggagataggctaggtttaagtaagttagcttataattttttaggtggaataataaaaaatgcaacatctttagctgcattctttaatccaacaatcaatagttacagaaggataaatgcacctccaacaaaatcaggagcaagctggtcaccaagcagtatttcttacactggaaacaacagaactcatatgattagagttccagatccaggaagatttgaacttagattgatggacggatcctcaaacccatatttgttacaagcaggagttatggctgcaggtctagatggtataaataataaaactgacccaggtgaaccattattttgtaatatgtatacagatcataaaaattatccaaatttagaaagacttccaaatgagcttgaggagtctttagaaaatttagagaatagtaaagtattaagagaggctttggagaaaaagtaat

SEQ ID NO: 310590 - DNA, 295 bp, Unknown
  Bacterial polypeptide expressing nucleotide sequence isolated from the Sargasso Sea
agaagtagtggttctgaagaattgttcacttcaatgtgtgaaaagttaggtaaagttcatgaagaagggattgctgtctatggaactgataacagtatgagacttactggactccatgaaacgcaaagtattgataaattttcttttggcgtaagtgacagaggtgcaagtattagaatacctgtgtatacagttgaacataattggaatggttatcttgaagacagaagacccgcttcaaatgctgatccatacaaaattgtttcacatatcgttggcacattgacaaaataaa

SEQ ID NO: 310591 - DNA, 223 bp, Unknown
  Bacterial polypeptide expressing nucleotide sequence isolated from the Sargasso Sea
tgcagcttatgggtcggacaataatatgaggcttaccggccttcacgaaacacaaagtatcgacaaattttcttatggtgtgagtgatagaggtgctagtatacgtattccagtttatactgttgaacataattggaatgggtaccttgaagatagaaggccagcatcaaatgctgatccatacaaaattgtatcacatatagttgggactttgactaaataa

SEQ ID NO: 310592 - DNA, 283 bp, Unknown
  Bacterial polypeptide expressing nucleotide sequence isolated from the Sargasso Sea
catgaagataaaagcagaatatatatggattgacggtctaactccaaccgcaaaattaaggagtaaaacaaaaataatagaacaagggacagagccaccaatttggggctttgatggttcaagtacacaacaagccacaggtgaccaatctgattgcgtattaaaaccagtagctcaatttccagacccgattagaggtggagataacatattggtaatgtgtgaagttatgaatgtagatatgacccctcacgcatccaaatacaagagctgcattggttga

SEQ ID NO: 310593 - DNA, 784 bp, Unknown
  Bacterial polypeptide expressing nucleotide sequence isolated from the Sargasso Sea
aatgaataaatatgagtatatatggcttgatggatttgaaccagagcctagtttaagaagtaaaattaaagtaactgatggagagccaccagaatggtcttttgatggatcttccacacaacaagctgaagggggaagttctgactgtctactacttcctgtagagcaatatgagaatccaactaacgatgggtctctagttatgtgccaagttcatacgggagaacatgaagttcatccttctaatacaagagcagctgctgaagcagtagttagtgatgaatggtggtttggttttgaacaagagtatttctttacggacaacaaaggcaatcctttagggtgggaagatggaactccaagacctcaaggagattattactgcggagttggtagcagcaatgtggttggcagagagatctctgaagctcatcttgatgcatgtttagatgcaggcattgaattaacgggaacaaatgctgaagttgctctcggacaatgggaatatcaatgcttaggaaaaggaataaaagcaggagatgacctttgggttagtcgatacttattacacaaagtagctgaagagttcggtgtaagcgtaaatattcatccaaagccaaaaacaggtgactggaatgggtccggaatgcatacaaacttttctaatgaagaaatgagaacatctggatcggaagaactctttaattctatgtgtgaaaaacttggtgccgttcatgaggaaggcatagcttcatatggatccgacaatgatatgaggctaact

SEQ ID NO: 310594 - DNA, 496 bp, Unknown
  Bacterial polypeptide expressing nucleotide sequence isolated from the Sargasso Sea
atgattattgcagaatatgtttggctagatagagattttaaattccgttctaaatcacgaacacttcaaaatccgtcagtaattccagaatggaattatgatggatcttctacaggacaagcagaaggtaatttttctgaaattattttaagacctagagcacgttttaattgtccatttagaagaggaactaatatattagtattatgtgatacattttatccagatggaaaccctacaagtgaaaattttagatataatgcgaataagacatttgaattatcacttgaagataaaccatggtttggtttagaacaagaatatttcatgataaatcctaaaactaaaaaaccttttggatttccaaatgaatgtttaccagaaaaacaaggtaaatattattgtggaactggaatggataatgtatttggacgtaaaatagcagatttacattatcaaatgtgtttagaagcaggaataaaaatatcaggaatta

SEQ ID NO: 310595 - DNA, 265 bp, Unknown
  Bacterial polypeptide expressing nucleotide sequence isolated from the Sargasso Sea
atgaaaataaaagcagaatatatttggatagatggtaaaactcctaccagtaaagtaaggagtaaaacaaagatacttgaacaaggaatagagccaccaatctggggttttgatggttcaagtacagaacaagcgacaggagataattcagactgtgttttaaggcctgtttcaacgtttaacgaccctataagaggcggagacaatatattagttatgtgtgaagttttaaatgttgatatgactcctcacacattcaaataca

SEQ ID NO: 310596 - DNA, 175 bp, Unknown
  Bacterial polypeptide expressing nucleotide sequence isolated from the Sargasso Sea
actcaaagcattgacactttttcgtatggcgtcagcgacagaggggcaagcatcagaatacccatctatacagttgaaaacgactggaatggctatttagaggatagaagacccgcttccaatgcagacccatataaaattatttcgcacattgttggtacgctgacacaataaa

SEQ ID NO: 310597 - DNA, 179 bp, Unknown
  Bacterial polypeptide expressing nucleotide sequence isolated from the Sargasso Sea
catcgatttaaaattcacagacatccatggtaaatggcaacatttaactcttacatcagacatgatagaagaggattcatttacagaaggtctagcatttgatggttcatcaataagaggttggaaagcaattaacgcctccgacatgtcaatggttccagatgcaagtacagcatgga

SEQ ID NO: 310598 - DNA, 330 bp, Unknown
  Bacterial polypeptide expressing nucleotide sequence isolated from the Sargasso Sea
aatgagtgcaagagatgttttaaaactaatgaaatctaaagaaatagaatatttagatttaagatttactgaccctagaggaaaacttcaacacttaacaatggactcaacaatagttgatgaaggcatgttaaatgatggtgttttttttgatggttcatctattgcaggatggaaagcgattaatgagtcagacatgattttaaaacctgacttaagtagaaaagtaatcgatccttatacttctcataatactctaattttgttttgtgatatcctagatgcagttaacagacacccatatgaaagagaccctagaggtatcgcata

SEQ ID NO: 310599 - DNA, 715 bp, Unknown
  Bacterial polypeptide expressing nucleotide sequence isolated from the Sargasso Sea
atgaaatttaactgctcagcaccagctgaattattaaaacaaatcaaagatttggatattaagatggtagacatgaggtttactgatgttcctggaactactcatcattttactattccaattaaatttttagaagaagacatttttgaagatggtcttggttttgacggatcttcagtgcgaggtttccaagctatagaaaacagtgatatgatagttgtccctgatgtgacaacagcctacatcgatcctttcttttcagaaaaaacaatagctttttattgcgatattaaagacccaatcactaaagaaaactattcaagagatcctagaaatatagcaaaaaaagccgagggttatttaaaatcttcaggcatgggagatactgcatattttggtccagaagcggaattttttatttttaatgatgttaaatatgactcaggatcaaacttcgcttttcatgaagtggactcaaatgaaggaacttggaatacaggaaaggatgaagggccaaatttaggtcataagcctcgacataaagaaggttatttccctctacctccagtagatagcatgcatgatgtaagaactgaaatggtaattactatgcaagatataggtcttacagtagaggcacatcaccatgaagttgctactggtggacaacaagagattgatttagaatttgctcctctggtttcaatggctgatg

SEQ ID NO: 310600 - DNA, 274 bp, Unknown
  Bacterial polypeptide expressing nucleotide sequence isolated from the Sargasso Sea
aatgagcgcgaaagacgtattaaaattaatgaaatctaaggaaatagaatatttagatttaagatttacagaccctagaggaaaactgcaacacttaacaatggactcaacaatagttgatgaaggaatgttaaatgatggtgttttttttgacggttcatctatcgctgggtggaaagcaatcaacgagtctgatatgattttaaaacctgatttaagtagaaaagttatcgatccctatacttctcataatactctaatttttattttgtga

SEQ ID NO: 310601 - DNA, 191 bp, Unknown
  Bacterial polypeptide expressing nucleotide sequence isolated from the Sargasso Sea
tatgagtgcaaaagatgttttgaaatttatatcttcgaaagaagttgaatatgtagatcttagatttacagaccctagaggaaaacttcaacatttaactatggatggaaaaatggttgatgaagaaatgttgaatgaaggagtattttttgatggttcttcaatagctggttggaaagcaattaatgagt

SEQ ID NO: 310602 - DNA, 296 bp, Unknown
  Bacterial polypeptide expressing nucleotide sequence isolated from the Sargasso Sea
ctctgcaatgatgctcgctggtcttgatggtataaaaaacaaaattgatccaggtgaggccattgatagagatttatatgcattaagtaaagaagagcttaaagatatacctcatgtggctgttaccttaaacggcgcactgaaggcattggatgaagatcgtgcattcttaactgatactggtgtattttgtgacgatgtgattgatgcttatattgatctgaagaaggaacatgttgaacaattacgcatgagcacgcatcctttagaatttcaattgtactatagtgtctaaa

SEQ ID NO: 310603 - DNA, 115 bp, Unknown
  Bacterial polypeptide expressing nucleotide sequence isolated from the Sargasso Sea
acctgtatacactgttgagcacaattggaatggctaccttgaagatagaaggcctgcatcaaatgcagatccatataagatcttatctcacatagtaggtacattaactaaataa

SEQ ID NO: 310604 - DNA, 270 bp, Unknown
  Bacterial polypeptide expressing nucleotide sequence isolated from the Sargasso Sea
tatgggtactgcgaatgaagtactaaaaaaatttaaaaatggtgaagtcaagtatctcgatatgagatttactgatccaaaaggcaaacttcaacatttgacgatggatggtacggtagtagacgatgatctcctaaacagtggagtgttctttgatggatcctctatttcgggctggaaggctattaatgagtccgacatgatacttatgcctgatctgtccacaacagtgatggatccttttactgctcaaccaactttaattgtttt

SEQ ID NO: 310605 - DNA, 838 bp, Unknown
  Bacterial polypeptide expressing nucleotide sequence isolated from the Sargasso Sea
aagagatctcccatttgaagaaaacacacctttatttctggcggaattaactgacgctgaagtctgtccaagagggttacttaaaaaggtattaagcttgatggaaaaagataaaatcttttcaagatcagcgtttgaatatgaattctttttattctctgaaaattctcactccataagagaaaaagaatttaaaaagctaaacaatttcacacccggaatgtttgggtattcagtactaagaaactcagtagaatcagatttgtacaacgaattacttcaactttgtatatctatggatatgccactagaaggacttcatactgaaacggggccaggtgttcttgaagctgcaatacttgtcgatgagtccttgaatagtgcagataaagcaaccttatttaaaacgttttcaaaagtcatgttccaaaaaaagggcttgatagcaaacttcatggcgaaatggtccgcagattatccaggtcagtcaggacatatccatctatcgcttcaagatgaaaaaggcaaatccatcttcgcctcttcaaaagatgaattacctaagagtctgttatattttattggtggtttacaaacttacatgcgggaattttcagttatgatcgccccaaccgtaaattcttacaaaagactttgtcctggggcgtgggcgcctataaatatgacttggggtatagaaaatagaacttgcgcattccgagtaattaaaggagattctaatagccaacgtatagagaataggctacctggagcagactcgaacccttacttggcacttgcggctacgctaggggctggttatttgggtataaaggag

SEQ ID NO: 310606 - DNA, 797 bp, Unknown
  Bacterial polypeptide expressing nucleotide sequence isolated from the Sargasso Sea
aagaaaaaatggatacttagttatgactgaagttttaaatgctgatggaactcctcacgagtcaaatggcagagcaacaattgacgatagtgataatgatttttggttcggttttgaacaagaatattttctttgggatacagaaactaaccttcctttaggttttccaaaagatcaaactcctcaagggcaattttattgttcagtaggaggggcaaatacttttggtagagaaattatggaccgtcatctagatgtttgtcttgatgctggaattaacgtagaaggaacaaacgcagaggttgctgctgggcaatgggaatttcagacttttgctaaaggtgcacaagaagctggagatgagatgtgggtagctagatatcttttggaaagaatagctgaagattatgcaattaaaattgaatatcaccctaaaccacttggagcaactgattggaatggttctggtatgcatgctaacttttcaaacaccactttaagaacatgcggttctaaagaaacatatgaaaaaatatgtgaagcatttaggccggttgttgatgactgtattgcagtttacggagcatacaatgatcaaagacttacaggtgaccatgagacacaatcaataacagagtttagctatggtgtttcagacagaggtgcatcgatccgaattccaataatgactgttgaaagcggatggaaaggatggttagaagacaggagaccttcttcaaacgctgatccttacaaagttgcagcaattatagtaaagactgtaaaaagcgcttaat

SEQ ID NO: 310607 - DNA, 538 bp, Unknown
  Bacterial polypeptide expressing nucleotide sequence isolated from the Sargasso Sea
cttaaatgctgatattaatgttgaaggtataaatgctgaagtagctgctggccaatgggaatatcaaatttttgctaaaggagctaaaaatgcaggtgatcaagtatgggtagccaggtatttagctgaaagaaatgctgaaaaatggggatttagtattgatcttcaccctaagcctattaaaggtgattggaacggttcaggtatgcatgctaatttttcaaatggagttatgagaacatgtggtgatgaaaaagtatttaatagaatatgtgaaggatttgatggaaaaaatattaaaaaacatatgtctgtttatggagcacataatgaagaaagattaacaggtctacacgaaactcaatctatcgataaattttcatatggaatttcagatagaggtgcatcaataagaataccaattggaactgttgaagatggatggaagggtagacttgaagatagaagacctgcttccaatggtgatccttatcaaattgctgctgtaattgtatctactacaaaagctgctctctaa

SEQ ID NO: 310608 - DNA, 928 bp, Unknown
  Bacterial polypeptide expressing nucleotide sequence isolated from the Sargasso Sea
attcgcagtatcctatggactccaagccaaacttgagtacatctggttagatggatatgaaccgacacagagcatgcgaagtaagacaatgattagatctaatttcgggggtacagtagaagagtgcccgatgtggtcattcgatggctcatcaacccaacaggcagaaggcggtgattccgactgtctcctaaagcccgtcttcatttgcccagatcctgatagaatcaatggttaccttgtaatgtgtgaagtcttgaatgctgatggaacgcctcacgcttcaaacggaagggcaacaatagatgaagacgacgatgacttctggttcggatatgagcaagagtacttcctatgggatcctgaatccaacctaccacttggattccctcgagaccaaactcctcaagggcaattctattgctcagtcggagcaatgaacactttcggaagagatgttatcgaagcccatctagacatgtgcctggatgctggtttgaatgtcgaagggataaacgcagaggttgctgtagggcaatgggaataccagatattcgcaaagggagccaaagaagcaggcgatcagatatgggtctcaagataccttgcagaaagaaatgcagaaaaatatgggctagcaattgaatggcatccaaagcccctcggagctactgactggaatggttcaggaatgcacgtcaacttcagtgatggaaggatgagagatgaaggtggagaggagctcatgagtcagatttgtgaggcctttggtcagaatatcaagaagcatatcgatgtctacggggcacacaacgagcagaggctaaccggtcttcatgagactcaaagcatacacgaattctcatatggggtgtctgatagaggtgcctcaattcgaattcctatcggcacaatcgaagatggttgg

SEQ ID NO: 310609 - DNA, 824 bp, Unknown
  Bacterial polypeptide expressing nucleotide sequence isolated from the Sargasso Sea
tatgtctgataataaaatactagaatatatttggcttgacggttatcagccagagcctactcttagaagtaaaattaaagtaactaatgatgactcagctccaaattggtcatttgatggttcttcaacacaacaagccgaaggaggaagttcagattgtattttaattccagtccaaacgtataagggccccctgttttctgattcactaataatgtgtgaagttcaaaatggcgatcatgaagttcatccgtcaaatactagagcagcggcagctagcattgtatctgatgagtggtggtttggctttgaacaagaatacttttttactggtgataatggagagccgctaggttgggaagatgggactcctcggcctcaaggtgattactactgcggtgttggagcgggaaacgtagaaggtagagatatttctgaggcacacctcgaagcttgcttagaagctggtatcgaattgacaggaactaacgctgaggttgctctagggcagtgggaataccaatgctttggcaaaggaataaaagcagcagacgatctttgggtgtcaagatatttactttacaaaattgccgaagattttggcgtgggtgtaaatattcatccaaagccaaaaacaggtgactggaatggttcaggaatgcatactaatttttccaatgaagaaatgagaacagctggctcagaagatctttacaattcactttgtgataagcttggtcaagtacacaaagaaagaatagctctatacggttcagataaacatatgagactgaccggtcttcacgaaacacaaagtattgaaa

SEQ ID NO: 310610 - DNA, 376 bp, Unknown
  Bacterial polypeptide expressing nucleotide sequence isolated from the Sargasso Sea
ttggatcttcgcagtaagacccgcacgctcgaaggcccattccgcagtgtggaggacttaccagcttggaactacgacggttcttcgaccaaccaggctcctggccaggactccgaggtgatactcgtccctcgaaaggtataccgcgaccccttcagggcgaccgcgatggacaaagaccacatactcgaccacgacaggaaaaactcctccgtgcacaatagggcgctctacgtcgagcatcgatcgcttgacaagccggcgctctcccccgtggcggaacccgagcggagctccgcgacccgccccgagatactcgacggctgccgcaacctcctcgtcatgtgcgatacgtacgattcgagcggacggccca

SEQ ID NO: 310611 - DNA, 739 bp, Unknown
  Bacterial polypeptide expressing nucleotide sequence isolated from the Sargasso Sea
atgagtaaatctaaacttgaatatttatggttggatggatacaagccaacccaaagcctccgaggtaaaacaaaagttgtatctgattttagtggtaaactagaagattgtccagtatgggcttttgacggtagttcaactcaacaagcacctggcggttcttcagattgtctactgaaacctgttgcaatatatcctgatccagttagaaaaaatgggtttattgttatgaatgaagttttaagttctgatggttcacctcatgaatcaaatggaagagcgactattgatgatgatgatgatgatttttggtttggatttgagcaggaatatttcttgtgggatcctgaaaccaacctaccattaggtttccctaaagaccaaaccccacaaggtcaattttattgttcagttggtggaaaaaatgctttcggtagagaaattatggatagacatttagatatatgtatcgatgctggaatcaacattgaaggaaccaatgctgaagttgctgctggtcaatgggagttccagatttttgcaaaaggtgcagcgaaagctggagatgaaatctgggtagctcgttactttttagaaagattagccgaagattatggtctagcgattgagtatcatcctaaaccattaggagcaactgattggaatggttcaggtatgcatgccaacttttcaaattcaactctaagaacttgtggttccaaagaaacttatgaagcta

SEQ ID NO: 310612 - DNA, 876 bp, Unknown
  Bacterial polypeptide expressing nucleotide sequence isolated from the Sargasso Sea
aatgaaaacttacgaatatatatggcttgatggatacacaccagagtcatcaatgagaagcaaggttaaggccacaaaagatgaaacgccacccgattggtcatttgatggatcttcaacacaacaagccgaaggaggaagttcagactgcttacttttgccagttcagacatatgaaaatccaaatggacatgatttagtgatgacacaagttcaatcagcagatcactccactcatccatctaattttagagctgctgctgctgaagtggtaaccgatgaatggtggtttggatttgaacaagaatactttcttactgatcctgaaaccggtgagccacttggatgggaaaatggagaacctggcccacaaggcccatattattgtgcagttggtgctggaaatgtaataggaagagaaatctcagatgctcatctttatgcatgtttagatctaggaatagagttaacaggaactaatgctgaagttgctttaggccaatgggagtaccaatgttttggcaaaggtattaaagctgctgatgatttatgggttagtagatatcttttatataaaatagcagaagattttggtgttggagtgaatattcatcctaaaccaaaaactggtgactggaatggatcaggtatgcattgtaatttttcaaatgaagcaatgagaacttcaggatctgaagaattatttaactcaatgtgtgaaaaattaggtgaagtccatgaagaaggtattgcttcttatggttctgacaatgatatgagattaactggccttcatgaaactcagagcattgatacattttcatatggcgtaagtgacagaggcgcgagtattcgaatactgtatacactgttgag

SEQ ID NO: 310613 - DNA, 621 bp, Unknown
  Bacterial polypeptide expressing nucleotide sequence isolated from the Sargasso Sea
agggttcgggaatgcatacacacctttctctatttagtgaaggaaaaaatgttttccacgacccatcaggaagcctctcctcaataggacaatcatttgttgcaggtcttctatatcacgctcgagagataaccgccataacaaaccaattagttaactcatataaaagaattaatgagggatacgaggctccacgttatgtttcttgggctcgtaataacagatcatcactggttcgaatccctgtgcataaacaagataagcccgattcagcaagaattgaatacagggcggtagaccctgcttgcaacccctatctagcattttctgtaatgctttcagctggtttaaaaggaattgaagagaattacgaactgccacccgaagcaacaacaaatctctatgaaatgagtcgggcagaacaaaaagagttaggggttgctagcttgccggcaaatctttccgaagctttagatgaaatggaagcatcagagctagtaagagaagcactcggagaccatatctttgagtggtttctacgaaataaaagaacagagtggaatgagtatcaacgtcaagttacaccttttgaaatcgaccaatatcttcctaactggtagc

SEQ ID NO: 310614 - DNA, 427 bp, Unknown
  Bacterial polypeptide expressing nucleotide sequence isolated from the Sargasso Sea
atgaaaatattagagtatatatggcttgacggttataagcctgagccatctttaagaagtaaaattaaagttactaaggatgaaactccaccagattggtcatttgacggatcctccactcagcaagctgagggtggaagctctgactgtttaattcttccagtgcaaacttatgatggccctctttttgcggaccagcttgtcatgtgtgaggttgaaactggtgagcataaagcgcatccatcaaatatgagagcgggggctgatcaagttgtaacagatgagtggtggtttgggtttgagcaggaatatttttttacagatatcaatggcgagccattaggatgggaagacggtacacctagaccgcagggagattattattgtggtgttggcgagtccaatagtgcagggcagagaaatatca

SEQ ID NO: 310615 - DNA, 199 bp, Unknown
  Bacterial polypeptide expressing nucleotide sequence isolated from the Sargasso Sea
tatgaggcttactggtttacatgagacacaaagtatcgatcagttttcatatggagtaagtgatagaggcgcgagtataagaattcctgtgtatactgttgagcacaattggaatggatatttagaggacagaagaccggcttctaacgccgatccttacaaaatacttgctcacattgtaggaactcttacaaagtag

SEQ ID NO: 310616 - DNA, 793 bp, Unknown
  Bacterial polypeptide expressing nucleotide sequence isolated from the Sargasso Sea
aatgtcagattacaaaacatatgaatacatttggttagatggttatcaacctgaagccaacatgcgaagtaaagtaaaagctactgatgaagacacgccaccagattggtcgtttgatggttcttcaacacaacaagcagaaggtggaagctcagattgtcttcttcttcctgttcaaacttattcaaatcctaacggtcatgattttgtgctaactcaagttcatgctgcagatcacactgtgcacccttctaacttcagagctgctgctgaagaagttgttactgacgaatggtggttcggttttgaacaagagtttttcttcacagatcctactacaggtgaacctttagggtgggaagatggaactcccagagagcaaggtgaatattattgtggtgtgggggctggaaatgtggtcggaagagaaatatcagatgcacatttacaagcttgtttagatataggtattaccctaacaggaacaaatgcagaggtagctttgggtcaatgggaatatcaatgtttcggtaaaggaataaaagcagctgatgatttatggatgagtcgatacttactttttaaggttgctgaggaatttggcgttggagtaaatatccatcctaagccaaaaacaggagactggaatggatctggaatgcactctaatttttcgaatgaagagatgcgtacaaaaggctctgaagaactttttacatcttattgcgaaaaacttggtgaagtacatgaagaaggaattgcatcgtatggttctgataacgatatgagacta

SEQ ID NO: 310617 - DNA, 736 bp, Unknown
  Bacterial polypeptide expressing nucleotide sequence isolated from the Sargasso Sea
atgaaattaaaaagctcgactccaaaagatttaatgtctgaaattaaagatatggacattaagatggttgatatgcgctttactgatataccaggaacaactcaacattttacaataccaattaaatttttagacgaagatatattttctgatggacttggttttgatggatcttcagtaagaggtttccaagaaattcaagacagtgatatgattgttttgccagatgcaacaacagcttatattgatccatttttttcagaaaaaactttagcattacattgtaatattaaagatcctgtaactttagttgattatagtcgtgacccaagaaatattgctaaaaaagcagaaggatatttaaaatcatctggtattggtgacacagcattttttggaccagaagcagaattttttgtctttaacaatgttcagtttgattctggatcaaactttgcatttcatgaagttgactctgttgaaggtacttggaatagtggtgctgatgaaaatccaaacctaggacataaacctagacataaagaaggttattttcctttaccaccagtagatacacttcaagatgtaagaactgaaatggtgatgactatgcaagacattggtcttactgttgaagcacatcaccatgaagttgcaacaggcggacaatgtgaaattgatttagaattttcaccattgttgaagatggctgatgatatgatgaaatataagtatg

SEQ ID NO: 310618 - DNA, 325 bp, Unknown
  Bacterial polypeptide expressing nucleotide sequence isolated from the Sargasso Sea
aatgcattgtaatttctcaaatgaggcaatgagaactgctggttctgaagaacttttctcttcaatgtgtgacaagttaggcgaagtccacgaagaaggtattgcctcttatggctctgataatgacatgagacttacaggtctgcatgaaacacaaagcatcgataagttctcttatggtgtcagtgatcgtggtgcaagtataagaatcccagtctacacagttgagcatgactggaacggataccttgaggacagaagaccggcatctaatgctgatccttacaagatattagctcatatagtaggaactctttctaaataa

SEQ ID NO: 310619 - DNA, 547 bp, Unknown
  Bacterial polypeptide expressing nucleotide sequence isolated from the Sargasso Sea
atgaaaaaactagaatacgtatggctggatggatatcagccagaaccaatgatgaggagcaaagttaaggttattgatggagaaattccaggaaatagcggctctgatttaccagattggtcttttgacggttcatcaactcaacaagctgaaggcggtgactctgattgtatactcaagccagtaacaacttaccctggccctttacactcagatagtttggtgatgtgtgaagtgatgtcgccagataagtctccacacccttccaatacaagaaatgcatgcattgatcttctctcagatgagtggtggtttggttttgaacaagagtatttttttactaaccccgaggatggaacaattcttggttgggaagatggaacgccaagaccgcaaggagattattattgtggtgttggtgctggcgatgtttatggcagagagatttctcaggcacacatggatgcttgtatagatgctggcattaaaattaccggaaccaatgcagaagttgcactaggccaatgggaataccaatgttttgaaa

SEQ ID NO: 310620 - DNA, 349 bp, Unknown
  Bacterial polypeptide expressing nucleotide sequence isolated from the Sargasso Sea
atgagctcaagagatgttataaaattaattaaagataaagatattgaatatattgatctaagatttactgatcctagaggtaaacttcaacacttaacattagataaaactattgtagatgaagaaatgttaaatgaaggagttttttttgatggttcttctattgctggatggaaagcaattaacgagtctgatatgattttaaaacctgatttaagtagaaaagttattgatccctatacttcacataatacattaattttattttgtgatattttagatgcagttaaaaaagatccttatgaaagagatcctagaggaatagcaaaaaaagctgaggcatattgaa

SEQ ID NO: 310621 - DNA, 181 bp, Unknown
  Bacterial polypeptide expressing nucleotide sequence isolated from the Sargasso Sea
acacgaaactcaaaaaattactgagttttcttatggtgtgagcgatagaggagcaagtattagaatcccagtttataccgtagagcatgattggaacggatatctagaagatagaagaccagcttctaatgcagatccatacaagattctttcacatattgtagggactcttacaaagtaa

SEQ ID NO: 310622 - DNA, 895 bp, Unknown
  Bacterial polypeptide expressing nucleotide sequence isolated from the Sargasso Sea
tttggactattatgtagcagtaagctctgatacatattatagggatgatccatacgttgtaactgcaacatttactgaaggtcttgatggttacgagacagaggttaatgataattatgaacaagccgacaccattgtcttaggcgatgttactggtattgttggtagtgtaagtaacagagcagataaagactggtatgtatttgatgtagcatcaccaagcatatttacagttgatttgaatagcacgaccccgggtgatccgtctggttatgattattttgatatcacagtgtatgactctactttgcaagctatatcgtataggaatggttctggcagggattattatgatggtgatttagcttttgatgtatcagcaccaacatcgggtttatattatgtagaagttacggatagcacatatcatacggatgcaccatatactttgagtgttcttccaaatgacactccactttatgactatgagactgagtctaatgattatgttgatcctaatggtgacgatgtcatgagttttggaaagggtatgtatggttctcttttaagtcgtcaggatgttgatttttaccagcttgatgtaacagcgccagggattattaatttagattttaggtctatatcacaaaacacgtctaattatgacacttggaatgtagcattatatacttcggagtcattttacagtaatgttccacttgcagaaggttcaggtggtactgaaggatttagttttgaagttgctgcgtcggatacaagtttggactattatgtagcagtaagctctgatacatattatagggatgatccatacgttgtaactgcaacatttactgaacaagttaacttagcaaatgaaacggagcctaacaat

SEQ ID NO: 310623 - DNA, 496 bp, Unknown
  Bacterial polypeptide expressing nucleotide sequence isolated from the Sargasso Sea
tgcgaaagctattaatgctttttcgaatagcacaacaaatagctataaaagattaattcctggttttgaagctccagttctattagtttattctgctagaaacagatcggcttcatgcagaatacctatcactttaagtaaaaaagcatcaagatgtgaaataaggtttccagacgctgctggaaatccatatttaacattttccgctatgttaatggcaggaatagatggtatcaaaaataaaattaatccaggaaaaccagtagatgaggatttatacgcaatgtccgaagataaagtaaaaaatattcctacagtatgtggatctctacgagaagcaatggaaaatcttgatacagatagaaaatttttaactcaaggcggtgtatttaccgacgatcaaatcgacgcttatattgcattaaaatttgaagaaatttacaaactcgaacacacaccacaccctatggagtttgaaatgtattacagctgctaa

SEQ ID NO: 310624 - DNA, 753 bp, Unknown
  Bacterial polypeptide expressing nucleotide sequence isolated from the Sargasso Sea
aatatgttgacatcaggtttactgatcccagagggaaactgcagcacgttacggtaatggcagatcaggtagactcagattttattgaagaaggttttatgtttgatggatcttctattgctggatggaaatcaatcgaggcgtctgatatgaagttaatgatcgatactgatagtgcttacgttgacccattttatgcagaaaaaactctgtgcgttcattgctcggtcgttgagcctgatacaggtgaagcatatgaacgtgaccctcgcgggactgctgaaaaagcagaagcatatttaaaatcttcgggtgtaggcgatgtggcgtacatgggaccagaagcggaattttttctttttgataatgtaaaattttcaaatgaaatgaataaggtatcttttgaagttgatgctctagacgctgcatggaacacagatacagattatgaaatgggaaacactggtcaccgtcctggtgttaagggtggctattttcctgtaaatccgatagacgacggacaagatataagatctgaaatgctttcaacaatgaaacgtttgggaatgaaagttgataagcaccatcacgaagtagcttcatgccagcacgaacttggtctaatttttaatagccttacaaagcaaggtgatgaacttcaaaacctctctcctcgagctgcgcgagcgccgccttcgccgcggccgggggtgggagtgggccgccctcctggcgggggctgcaggtcctagg

SEQ ID NO: 310625 - DNA, 274 bp, Unknown
  Bacterial polypeptide expressing nucleotide sequence isolated from the Sargasso Sea
gctatttagttcaatgtgtgaaaagttaggtgaggtccacaaggaaggaatatctttatacgggtctgataacgacatgcgattaactggtctgcatgaaactcaaagtatagatacattctcctacggagtaagtgatagaggtgccagtatcagaattcctatttatacagttgagcatgattggaatggttaccttgaagacagaagacctgcttctaatgctgatccatacaagattgtggctcacatagtaggtactttaacctcataa

SEQ ID NO: 310626 - DNA, 766 bp, Unknown
  Bacterial polypeptide expressing nucleotide sequence isolated from the Sargasso Sea
acttccaggtagtctaataaataaaaatatttttaaaaataaaaaatattactttaacgaaaacatccgctcatcttttgacatagaatggaaagacataattaaagaaaatcatttatctttaatgcctaataaattttttattatatatgagtcattgccaaaaaatatcttaaatgctctcaaaaaacatactttatatgctttttatacatctttaggtaaaagtgaaattaatattaaagaaatatatgtgagtatttttttgatattaagtgcaataatacttcctaaatggaattttattataagtggatggaataataatccactttatatacctaatgtaacaaaaatatatttaatatgtttaattataatttttttattttatttaatcttaaaaaaaataaaaatttttaaaaaaaattatttttttgaaataatttctaaaactatttttttctttttattttcatatggaatttataaatggaatgcttcaatagcttcatgggttgaaaattcaattttttatattccacatataacaaaaatttacatttcgattttaattattggttcatttgtctatcggggcttagttagaccacttaaaagaaaagaagagataaaattcttattaccatttaattggattatcattggttttatggggttaacaatagatctaataaaatctcctttttatgtatttgtttctgtaattacaaactttttgagaacattaagattaattaaataa

SEQ ID NO: 310627 - DNA, 1360 bp, Unknown
  Bacterial polypeptide expressing nucleotide sequence isolated from the Sargasso Sea
aatgacaattacattcaacaatttaaaaaaagctattcaaaaagatgaaattgatacagttcttgtatgtgtatctgacatgcaaggcagattaaatggtaaaagagtaactggtaaggcttttctagattacgttcataaagaaacacatatgtgtgattatctttacacagtagatatggatatgtttaccgtacctggttacaagtcatcttcttgggagactggttatggtgatatgacagtaattcctgatttgaaaacaattaaaattgcaacttggttagaaaaaacagctatagtaatttgtgattgcttagatcatcatggaaaaaaaccattagtacattcaaccagacaaattctcagagatgttattgctaaggcaaacaaaatgggttttgatcctatgattggatcagaattagaatttttcttatttaaccaaacatatgaagaaattcataataataattacacaaattttaaggaagcttcatggtacattgaagattatatgatttttcaaacaacaaaggaagaagatgtaatgagagaactaagaaattctctccttaaatcaggaatttatgttgaatgttcaaaaggagaagcggctccaggacaagaggaaataaatgtagtttttacagatgcattaaatatggctgataatcatattcttataaaaaatgcagcaaaagaaatagctttcaaacataacaaagctgtaacttttatggctaaatataataaagacgtttgtggaagctcatgtcatattcataactctctatttgataagaaaactaaaaaaaatatatttaacaatccaaaagataaatatggaatgtctgacacctttaaaagctatgttgctggtcagataagatttttatcagacatatctatttttttagcgccaaatataaattcgtataaaagatttcaggatggatcttttgcacctactaaatctgtttggggtattgataacagaactgctggttttagattagctggtcatggttcttcaataagaatagaatgcagagtacctggggcagatgtaaatccatatttagcgtttgctgctcttgttggagctggactatatggaataaaaaacaaattaaagctagaagagccttatagcggaaacatctatgaaaaaaaagtaagagaagttccaaaaacattaaatgaagcaatacaattggcaaaaaaatctaaattacttccagaaatttttagtacagatgttctcgaacattatattcatgcagctgaatgggagcaaaaagattatgactcttcagttaatgattggcaacttagaagatattttgaaagaggttaa

SEQ ID NO: 310628 - DNA, 528 bp, Unknown
  Bacterial polypeptide expressing nucleotide sequence isolated from the Sargasso Sea
tatgaaatataactgcaaaacagcaaaagagcttttaaaaaaaataaaaaatgaagatattaaaatggttgatcttcgttttacagatatgccaggttcaacacaccatatttcaattccaataaaatatttaaaggaagatttatttgttgatggtgtaggatttgacggatcttcagttcgtggttttcaatcaattgaaaatagtgatatgactatggtgcctgatgtaacaactggttatttagatcctttttattcagaaaaaacaattgcattttattgcaatgttgttgaccctataacttataaaagttatccaagagatcctaggtacatagctcaaaaagcagaaaagtatttaaaatcatctggtttaggtgatactgcatattttggaccggaagctgaattttttgtttttaacgatgttaaatatgactctggttcaaactttgcttttcatgaagttgattcaactgaaggtgcttggaatactggtagagatgagagtcctaacttaggaca

SEQ ID NO: 310629 - DNA, 580 bp, Unknown
  Bacterial polypeptide expressing nucleotide sequence isolated from the Sargasso Sea
atgaaatttaactgctcaacaccaggtgaattattaaaagaaattaaagacttggaaattaaaatggtagacatgaggtttactgacgttccaggaaccactcatcatttcactattcctattaaatttttagaggaagatatttttgaagatggtcttggtttcgacggctcttcagtaagaggttttcaagcaatagaaaacagtgatatgattgttgttcctgatgttacaactgcatacattgatccattcttttctgaaaaaacaatagctttctattgtgatatcaaagatccaatcactagagaaaactactcgagagatccaagaaatatcgcaaaaaaagctgaagggtatctaaaatcatcaggcatgggagatactgcttattttggtccagaagctgagttttttatttttaatgatgtgaagtatgactctggctccaactttgcatttcacgaagtcgactcaaatgagggaacatggaatactggaaaagatgaagggccaaacttaggtcataaacctcggcataaagaaggttattttcctcttcctccagtagatagcatgc

SEQ ID NO: 310630 - DNA, 776 bp, Unknown
  Bacterial polypeptide expressing nucleotide sequence isolated from the Sargasso Sea
tatgaatacttttgaatatatatggcttgatgggtatcagccagaaccaatgatgcgaagcaaagtgaaagccactgaggacgacactcctccagattggtcttttgatggatcttcaactcagcaagctgaaggtggaagttcagactgcttacttttaccggtgcaaacctatgcaaatccaaatgggcatgatttagttatgactcaagtacaagctgctgaccactctgttcatccatctaatactagagctgctgcagcagaagtaactacagatgagtggtggtttggctttgagcaagaattcttttttactgatccgcaaactggagaacctcttggttgggaagatggaacaccaagagagcaaggcgaatattattgtggagtcggagcaggaaatgttgttgggagagagatctcagatgcgcatttagaagcttgtttagatcttggtataaccctgacgggaacaaatgcagaggttgctcttggccaatgggaatatcaatgttttggaaaaggcattaaagctgctgatgatctctgggtatcaagatatcttctttataagattgctgaagagtatggtgttggtgtaaatattcatccaaaacctaaaacaggagattggaacggctctggaatgcattgtaatttctcaaatgaggcaatgagaaccgctggttctgaagaacttttctcttcaatgtgtgacaagttaggcgaagtccacgaagaaggtattgcttcttatggctcggataatgata

SEQ ID NO: 310631 - DNA, 806 bp, Unknown
  Bacterial polypeptide expressing nucleotide sequence isolated from the Sargasso Sea
aatgaaaacttacgaatatatttggcttgatggatataagcccgagccatcaatgagaagcaaggtaaaggcaacaaaggatgaaacacctcccgattggtcttttgatggttcttcaacagaacaagcagaaggcggcagttcagattgtcttcttttaccggttcaaacatatgaaaatccaaatgggcatgatctagttatgactcaggttcaagctgcagatcatactacgcatccctctaattttagagctgctgctgctgaagttgtaaccgatgaatggtggtttggatttgaacaagaatacttttttacagatcctgaaacaggtgagccattgggatgggaaaatggtgagccaggacctcaaggcccctactattgtgcagttggtgctggaaatgtttctggaagagagatttctgatgctcatcttttagcatgcttagatttaggtatagagttaactggaactaatgctgaggttgctattggccaatgggaatatcaatgttttggtaaagggataaaagctgccgatgatctatgggtaagtcgatatatgctatataaaattgctgaagaatttggagttggtgtaaatatacatcctaaaccaaaaactggggattggaatggatcaggaatgcatactaacttctcaaatgaagctatgcgttctgcaggtagtgaagagttattttcttcgatgtgtgacaaactaggtgaggtgcatgaagaaggaatagctgcatatggttcagataatgatatgagattaacaggccttcacgaaactcaaa

SEQ ID NO: 310632 - DNA, 1261 bp, Unknown
  Bacterial polypeptide expressing nucleotide sequence isolated from the Sargasso Sea
atgaaaattagaaaattaaagtcagctggagagataaaaaagctcttggaagcttctaaaactaggtacgtgaaagtagcacttacggatatagatggcattcttcgtggaaaatatatgcatgttgataaatttattaaatcatctaaaaacggatttggattttgtgatgttatttttggttgggatagcaatgatgagctatatgaattaaatgttaagcaagaagagctctataccggctggcattcaggatttccagatgcaaaggcctctattgttccaaattccggaagaatcaatccttatgaagaagaagttccctttttcttggctgaattggcggaaggaaatgtttgtcctagggggttgttaaaaaatgttctttctaagatggaaaaggaaggattaatgtcaaagtcggcttttgaatatgaattctttcttttcaatgaaacacctcattcaatcagggagaaaaagtatactggtcttaacaacttcactccggggatgtatggatattcgatcttaagaaattctgttcattcagatttatataacgagttattaaatctttgcagtgcgatggatatgcatttagagggccttcatacggaaacaggacctggtgtaattgaagccgccatcatggtagatgactctatgaatgcggctgataaagctacattatttaaaaccttttctaaggttatgtttcaaaggaacaaccttatagcaaacttcatggctaaatggtctgataaataccctggtcaatcgggacatattcatgtgtctcttcaagatttagatggaaaatctttattcagttcaaaaaaagacgaattgccaaaggaactatattacttcttgggtggtttacagaggtatatgagagagttttcggtgttgattgctccaacagtaaactcctataagagactatgtcctggagcttgggccccaattaatatgacttgggggattgagaacagaacaactgcatttagggcaatcaaaggagattcttctagtcaacgaattgaaaatagactcccaggagcggactcaaatccatatctagctctggcagcaacacttggtgctggatttttggggatcaaagaaaaaattaaaccaactaatgaaactataggtggagcttacgatcttaatgtggaaaaaaattatcaagttccaaagaatctaggtgaagcagcgaatctttttaagaattctgaagcggcaaaagaccttt

SEQ ID NO: 310633 - DNA, 1399 bp, Unknown
  Bacterial polypeptide expressing nucleotide sequence isolated from the Sargasso Sea
atgaagattagaaaattaaagtcagcagaggatgtaaaaaagtttttagattcttctaaaacagagtatgtcaaagttggactaacagatatagatggcattctgcgaggaaaatatatgcatgtagataaattcatcaaatcttcgaaaaaaggttttggattttgcgatgtaatatttggttgggatagcagtgatgaattatatgaacttaagaatgaatcagtagatgatctttatacaggatggcactcaggatttcctgatgccaaagcaaatattattcctgaatccggaaggatcaatccatttgaagagaatattccattctttctagcagaattatccgaagacgaagtgtgccccagaggtttactgaataaacttattaaaaaaatggaaaatgtagggataagatcaaagtctgcttttgaatatgaattttttcttttcaatgaaacacctcattctataaggagtaaaaattattctaaccttgctaatttcactccaggaatgtttggatattcaatactaaggagctctgttgagtctcaactttataatgacttattgaatttatgtttagacatggatatgcatttagagggactccatactgagacaggacctggagtgatagaggcagctattactgtagatgattcactaaatgccgccgataaagcaactttatttaagactttctctaaggttctatttcaaaaaaatgatcttatggcaaattttatggcgaaatggtcagataagtatcctggacaatctggtcatattcatacctcccttcaagatatggaaggaaaatcgctattcgcatctagccaagaggatctacctgagcaactaaagtactttataggaggtttacaaaaatatatgagagagttttctataatgattgctccgactgtaaattcctataaaagactatgtcctggagcatgggctccaatcaatatgacttggggaattgaaaatagaacaacagcatttagagccataaaaggtgattcaactagccaaaggatagaaaatagactgccgggtgcagattccaatccatacctagcgcttgctgcaacattaggagcaggatttcttgggattcaagaaaaaatcgatcctaccgaagagactttaggtggcgcatatgatttaaatctagaacgaaaatatcaagtaccttctaatttaggtgaagcagcaaatctttttaagaattcagaatcagctaaaaatcttttcggagagacgtttgtcaagcattttgcaaacactaggatttgggaatttaaagaattccagaaaaataaaaacttttttgactcggatgaaatttctttatgggagttagatagatactttgaaataatataag

SEQ ID NO: 310634 - DNA, 766 bp, Unknown
  Bacterial polypeptide expressing nucleotide sequence isolated from the Sargasso Sea
atgggcgcagacacattgctcaaactaatcgcagacgaagatgctgaatacgttgatatcagatttactgacccacgtggcaaactacaacacgtgacagttatgtctgatcaagtggatgctgactttattgaagaaggtttcatgtttgatggttcatcaatcgctggttggaaatctatcgaagcatccgacatgaaattaatgatggatacagatagcgcatatattgatcctttctatgcagaaaaaacaatatgcgttcattgctatattgtagagccagacactggagaggcttataatagagatcctagaggaaccgccatgaaagccgaggcctatctaaaatcatcaggaattggcgacacattttttgtaggccctgaagctgaatttttcttatttgacgatgtccgcttttcaaattcaatgaacaaggtgtctttcgaagtcgatgccctggacgcgtcttggaatactgactctgactatgaaataggaaatacaggtcataggcctggtgtgaaaggcggatactttccagtaaatcctattgatgatggacaggatattcggtctgaaatgctatcaacaatgaaaaggctcggaatgtcggttgataaacatcaccatgaggttgcttcatgtcaacatgagcttgggctaatattttctagccttacaaagcagggtgacgaattgcaaaaatataaatatgtgatccacaatgtttgctcagcttatggtaagtccgctacattta

SEQ ID NO: 310635 - DNA, 1096 bp, Unknown
  Bacterial polypeptide expressing nucleotide sequence isolated from the Sargasso Sea
tatgactttcgaagaaataaaattgaaaatctcaaagcaagaaatcgatacagttttagtctgcatggtagacatgcaaggtcgtttgatgggcaagcgctttcatgcagaagcttttctggagatggctgaagacgaaactcattgttgtaattatctattggcaacagatttagaaatggcaactcccgatggatatgcctcaacaagttggtccacgggatatggtgactacgtgatgaaacctgatttagggacgcttcgccaagtgccttggattgagggaacagccatttgcctatgtgatgtattggatcacaacacacataagccagtccctttctctcctagagaagttttaaaaactcagatctcaaaagctgaggcaatgggatttagctcgatcatggctacggagcttgagttttttcttttccaagggacacatgatgaaatagcagcaaatggcttccgtgaattgaagccaatttccaattacaatgaggactaccatatttttcaaacctccaaagaagagcatgtgatgaggccaatccgaaattatcttcgtgagatgggtattccagtagaaggaacaaaaggagaggcagaggccggacaggaagaacttaacataaaatatgctgatgttttgtctacggcagatcaccatactttggcaaaacatggcgttaaagaaattgcacaccaacagggttacgctgcaacctttttgccgaaatggaacaaagatcgtgtcggttccgcgtcacatgttcatcaatctttgtttaaaaagggtacaaatgttttttatgacgccaaagcgccaatgggcaaatctaaaataatggatcattatctagcaggtttactcaagtatgcgtcggagataacgattttcttggcgccatatgtaaatagttataaacgatttgcaaaaggtacatttgctcctacccatacggtttggtctgttgataatcgcacagcggcatttcgggttgttggtgatggcagtaagtctattcgaattgagtgccgtactcctggttctgatatgaacccatatctagcaactgctgcaatgatggct

SEQ ID NO: 310636 - DNA, 1360 bp, Unknown
  Bacterial polypeptide expressing nucleotide sequence isolated from the Sargasso Sea
atgacaattacttttaacgaattaaaaaaagctatcagaaaagataatatagatacagtattagtctgtgtatctgatatgcaaggaagactaaacggaaaaagagttaccggtaaagcttttttggactacgttcataaagaaacacatatgtgcgattatttatacaccgtagatatggatatgtttactgtaccaggatataaatcttcttcttgggaaaccggttatggagatatgactgtaattcctgatttaaaaactataaaaattgcaacctggttagaaaaaacagctatagttatttgtgactgtttagaccatcatggtaaaaaaccattaatacattctactagacaaattttaaaagatactatttcaaaagcaaacaaaatgggttttgaacctatgattggttcagaattagaattttttttatttaatcagccctatgaagaaatacataataataattatacaaattttaaagaagcgtcttggtatattgaagattatatgatttttcaaactaccaaagaagaggacgtaatgagagagcttagaaattcccttctcaaatctggaatttatgttgagtgctcaaaaggcgaggctgcgccaggtcaagaagagataaatgtagttttcaccgatgctttgaatatggctgacaatcatattttaataaaaaatgctgctaaggaaatagctttcaaacataataaagcagtaacttttatggcaaaatataataaagatgtttgtggtagttcatgtcacattcataattctctttttgataagaaaactaaaaaaaatatatttcataatccaaaagataaatttgggatgtcagatgtatttaaaagttacattgctggccagataaaatttttatctgatatatcaatttttttagcaccaaatatcaattcatataaaaggtttcaagatggttcttttgcccctactaagtctgtttggggtattgataatagaaccgcagggtttagattggcagggcatggatcttcaatcagaattgaatgcagagtaccaggagcagatgtaaatccttatttagcttttgctgcacttgtaggagcgggactttatggaataaaaaataaattaaaacttgaggaaccttacagtggaaacatttatgaaaaaaaagtgagagaagttccaaagacattaaatgaagctataaatttagcaaagaagtcaaaattactaacagaaatttttgatccttatgtcttagaacattatatacatgcagcagaatgggaacaaaaagattatgatacctcagttaacgattggcaattaagaagatattttgaaagaggttaaa

SEQ ID NO: 310637 - DNA, 907 bp, Unknown
  Bacterial polypeptide expressing nucleotide sequence isolated from the Sargasso Sea
aatgacagaaataaaaacttatgaatatatatggctagatgggtttcaacctgagccatctataagaagtaaaatcaaggcaacagatgaggatactcctccagactggtcctttgatggatcttcaactcaacaagctgaaggcggaagttctgattgtctattattgccagtacaaacttatgattgccctctttttgcagatcatttagtaatgtgccaagttcatgcaggtgaccattctgttcatccttcaaatacaagagctgctgcagaagcagttcttagtgatgaatggtggtttggttttgaacaagaatacttctttacgaacaaagacggctcaccactaggctgggaggatggaactcctagaccacaaggtgattattactgtggtgttggatcagataatgtagctggaagagaaatatcagaagctcatttagaggcatgcttagatgctggtcttaccttaacgggtactaatgcagaagttgcattgggacaatgggaataccaatgctttggaaaaggaataaaggctgctgatgatttatgggttagcagataccttctctataaaattgctgaggaatttggtgtaggtgtaaatattcaccctaaacctaagacaggtgattggaatggttctggtatgcataccaacttttcaaatgaagaaatgagatcaaatggctctgaagctcttttctcatctatgtgcgataagcttggtgaagttcatgaagaaggaattgcttcctatggttctgacaatgatatgagacttacgggtctccatgaaactcagaacatcgaacaattctcttatggagtaagtgatagaggagcaagcattcgaattcctatctatacagtagagcatgatggaacggatattaga

SEQ ID NO: 310638 - DNA, 560 bp, Unknown
  Bacterial polypeptide expressing nucleotide sequence isolated from the Sargasso Sea
tggattaagtaaaattgcatataatttcttaggtggggtaattaaaaacgcattatcgttatcagcattttttaatccaacaattaatagctatagaagaataaatgcaccaccaacaaaatctggagcatcatggtcaccaagtagtatttcttacacaggtaataaccgaacacatatgattagaattcctgatccaggaaggtttgaattaagattaatggatggatctgctaatccatatttattacaagctagtattttggctgctggcttagatggtatcaaaaataaaatcaatccaggtaatcctttgtattgtaatatgtacgaagactttgcaaaatatcctgacttaccaaaattgccaaatgagttagatcaatcactttctcaattaaaagataataaaagtatgaacgaagcatttggatctgatgttatttcaagctatgtaaaattgagaaatacagaaatcaaagaatttaaatcaaaagaaagttttgacaaagctaaagcagttacgaaatgggaaaaagataatacattggattgttagt

SEQ ID NO: 310639 - DNA, 151 bp, Unknown
  Bacterial polypeptide expressing nucleotide sequence isolated from the Sargasso Sea
tcatatggtataagcgatcgtggggcaagtatccgaattccaatccatactgttgaacataattggaatggatatttagaggaccgtcgccctgcttcaaatgctgatccatatagaataatcaatcatattgttggtactttgagctaaa

SEQ ID NO: 310640 - DNA, 786 bp, Unknown
  Bacterial polypeptide expressing nucleotide sequence isolated from the Sargasso Sea
attgccgtataaagtaataggtggcaaagccactcaaataaaatattcttcagatgaggtattctctagaataaaacacgagggcatcaagttcatagacctacaatttactggtttaacaggtagatttcatcatactacaatttcagcagacacttttaccccacaacaaatggaagatggtttaccaaaattagacgggtcatcaattgtaggatttacagacattgcagactcagatttaatattaaaaccggacccaagtacatttgcaattattccatggcttacagaaaaaaagacagccagattgttgtgcgatgtatactggggtggaggaagaggacgtcttgaaagtgatcctcgaggaatttgtcagaaagcagaagcatttgtcaagactcaaggatttgattttagtaattggggaccagaagtagaatttttcgtatttgataaggtgcattgggatgttttaacaccatacaaaggacaatcatattcgattgaatcttctgaatcaccatggagccaagaaggaactggttaccctatggggttacaagagggatattacccaagtactccatcagacactcttgcaccattcagaaatgaatgtgtggatgttttgaacgataattttggaattttgtgtgataatcatcatcacgaagtagcaactgcaggacaatgtgaaattgatataaaatatgatttaatgactaattctgctgatggtgcacaatcatacaagtatgttgtaagaaatgttgcacaacagtt

SEQ ID NO: 310641 - DNA, 432 bp, Unknown
  Bacterial polypeptide expressing nucleotide sequence isolated from the Sargasso Sea
aatgaaggtaaaagcagaatatatctggattgatggatatgaacctaccgcaaacttaagatcaaaaaccaaagtattagatggagcagtttcttctgtttcagagcttccaacctggggttttgatgggtctagcacattgcaggcagatggaggagatagtgactgtttgttgaaaccagtatggatgtgtcctgatccaattcgtggtggagaaaatattttagtaatgaatgaggtttgtaatcctgatggaacacctcatagatctaattctagggcagctttagtaggaatcgctgaaaaattcaaagagcacaagccttggtttggtattgagcaagagtatacgctcatggatggaaaacagcctgctggatggcctgaagaaggattccctgaaagacctcaaggaccttactattgcaaaaa

SEQ ID NO: 310642 - DNA, 160 bp, Unknown
  Bacterial polypeptide expressing nucleotide sequence isolated from the Sargasso Sea
tacattttcttacggagtaagtgatagaggagcgagtatcaggatccctatctatacagttgagaacaactggaatggttatctagaagacagaaggcctgcttcaaatgcagatccatacagaattatttcacacattgttggcacgctaacaaaataa

SEQ ID NO: 310643 - DNA, 293 bp, Unknown
  Bacterial polypeptide expressing nucleotide sequence isolated from the Sargasso Sea
aatgagcgccagagatgtattaaaattaatgaaatctaaagaaatagaatatttagatttaagatttactgaccctagaggaaagcttcaacacttaacaatggactcaacaatagttgatgaagaaatgttaaatgatggtgttttttttgatggttcatctattgcgggatggaaagcaatcaacgagtcagacatgattttaaaacctgatttaagcagaaaagtaatcgatccctatacttctcataatactctaattttattttgtgacatcttggatgcggttaata

SEQ ID NO: 310644 - DNA, 832 bp, Unknown
  Bacterial polypeptide expressing nucleotide sequence isolated from the Sargasso Sea
gatgagcgcagagaaattgctcaaactaataacagacgaagatgctgagtacgttgatataaggttcactgacccgcgtggaaagttacaacacgtaacggttatgtctgatcaggtagatgctgactttattgaagaaggctttatgtttgacggatcatctatcgccggttggaaatctatcgaagcctccgacatgaaattgatgatggatacagatagtgcttacatcgatcctttttatgcagagaagacaatttgtgtacattgctatgtggtagagccggatactggcgaagcgtataacagagaccctagaggaacggcgatgaaggccgaggcctatctcaaatcatctggaattggagatacgtttttcgttggacctgaagctgagtttttcctattcgacgatgtccgcttttcaaactcaatgaataaagtgtcctttgaagtggatgccctagatgcttcgtggaatacggatactgactatgaaatagggaatacagggcacaggcctggtgtgaaaggtggctacttcccagtaaaccctatcgatgatgggcaagatatacgttctgaaatgctatcaacaatgaaaaggctgggaatgtcggttgataaacatcaccacgaggtcgcttcatgtcaacatgagcttggtttaatattttctagccttacaaagcagggtgacgaattgcagaaatataaatatgtgatccacaatgttgctcaagcttatggtaagtctgctacatttatgccgaaccaattgcaggcgataatggcacaggaatgcattgcaatatgtcgatttggaaagatg

SEQ ID NO: 310645 - DNA, 1363 bp, Unknown
  Bacterial polypeptide expressing nucleotide sequence isolated from the Sargasso Sea
atgagcattacttttaaagaattagaaaaaaaaataaaatcaaaagagattgatactgttttagtatctctatcagatatgcaaggtcgactagtgggaaaaagagtaacaggtaaggcttttttagactacgttcataaagaaactcatttttgtgactatctttatacggttgatatggatatgtatacagttcccggatttaaatcatcctcttgggagactgggtacggagatatgactgttaagcctgaccaaagaaccatcaaagttttaccatggttagataaaacagctttagttctcggtgatgcttttcaacatgatggaaagactcctgtttcgcattccacaagacaagttttaagagaggcgattataaaagcaaataaaatgggatttgaacccatgttaggttcagaattagaattctttcttttcaaacaaacttatgaagatatacattctagttattataaaaatttaaaagaaacatcatggtatatagaagattatatgatatttcaaacttcaaaagaggagccttttaaccaagagttaagaaatagtttattagactccggtatatatgttgagtgcactaaaggggaggcatcacctggccaacaagaaattaatgtagtttttactgatgctcttagtatggcagataaccatatattaattaaaaatgctgcaaaagagattgcttttaaacataatcgtgctgttagttttatggcaaaatacaaacaagatttctgtggaagttcctgccatattcataattctttattcgataaaaaaacaaaaaaaaatattttctctgataccaaagacaaatatggaatgtctaaaattttcaaaagctatgtagctggacaaattttatttttgagggatctatcaatttttttagctccaaacgtaaattcttataaaagatttcaagagtcctcttttgctcctacttctgccgcctggggaattgataatagaacagctggatttagattagcaggacatggaagttcaataagaattgaatgcagagttcctggggcagatgttaatccctaccttgcttttgctggattgattcaagcaggtctgtatggaattgagaataaattagaacttgaagagccattatctggaaatatatatcaaaatagaaaggcaaaaaatgttccaggtacactttatgaagcaattgaactcgctaagaaatcaaaattattaccaaagattttccattcagatgttttagaccactatattcatgctgcaaaatgggagcagagtgaatatgataagtctgtaaatgactgggagcaccgtcgttattttgagagaggataaa

SEQ ID NO: 310646 - DNA, 319 bp, Unknown
  Bacterial polypeptide expressing nucleotide sequence isolated from the Sargasso Sea
cttcaacccctatcttgcgttttcagcaatattaatggccggtctagatggggttaagaacaagattaatcctggaaagccgactgatattaatatttatgaagcgccagcaagtgtacttgcaaaaattccttcaactcctggatcattagccgagtcactaaatgctcttgaaaaagataataaatatttactacaaggaggagtatttacaaaagataacattgaatcatatatatcttacaaaagagaaaatgaagttagtccaatggatctaagacctcatccacatgaatttcatttatattacgacgcataa

SEQ ID NO: 310647 - DNA, 179 bp, Unknown
  Bacterial polypeptide expressing nucleotide sequence isolated from the Sargasso Sea
tgaaactcaaaatattgagcaattttcttatggagttagcgatagaggagcgagtattcggatacctgtttatacagttgaaaataattggaatggttatttagaagatagaagacctgcttcaaacgcagatccatataaaatacttgcacatattgttggaactttaactaagtaag

SEQ ID NO: 310648 - DNA, 169 bp, Unknown
  Bacterial polypeptide expressing nucleotide sequence isolated from the Sargasso Sea
gagcattgataagttctcttacggtgtcagtgatcgtggagcaagtattagaattccggtttacactgttgagcacgactggaatggatatcttgaagatagaagaccagcatcgaatgctgatccttataagatattagctcatatagtaggaactcttactaaataa

SEQ ID NO: 310649 - DNA, 265 bp, Unknown
  Bacterial polypeptide expressing nucleotide sequence isolated from the Sargasso Sea
atgtctaagtctccacaagatgttttaagtcaaattaaagacgaagggattgaactcatcgatttaaaattcacggacattcacggtaaatggcagcatttaactcttacatcagacatgatagaagaggattcatttacagaaggtctagcatttgatggttcatcaataagaggatggaaagcaattaatgcttccgatatgtcaatggttcctgatgcaagtacagcatggatagatcctttttataaacataaaacctaag

SEQ ID NO: 310650 - DNA, 172 bp, Unknown
  Bacterial polypeptide expressing nucleotide sequence isolated from the Sargasso Sea
gcagagcattgaccaattctcatatggggttagtgacaggggcgcaagtataagaattcccgtgtataccgttgagcataattggaatgggtatttagaagacagaagaccggcttctaatgcagatccatacaaaatacttgctcatattgttggaacattaaccaagtag

SEQ ID NO: 310651 - DNA, 1370 bp, Unknown
  Bacterial polypeptide expressing nucleotide sequence isolated from the Sargasso Sea
aatgaagataaggaaactaagttcagctaaagatgtaaaaaagttcattgactcaactaaaaccggctatgtcaaagtagccttaactgatatagatggaattttgcgcgggaaatatatgcatgtagataagtttattaaatctactgaaaagggctttggtttttgcgatgtgattttcggatgggacagcaatgatgagctttatgaatttggccgaacttctgaggaggaactatttacagggtggcatagtggatttccagataccgaggccatgataatcccggattcaggaagaattaatcctctagaagaagatattcctttttttcttgccgaattaaaagattcaagcatctgccctcgaggattgttgaaaaacctcttaaagacaatggaagcggaaggtttaagatcaaaatctgcatttgaatatgagttctttttattctcagagtcaccacattctataagagaaaaaaattaccaaaatttaaaaaacttctccccaggcatgttcggctattctactctcaggaattcagtgcactcagatttatacagtcagctactcaacttatgttcccaaatggatatgccattggaagggttacatactgagacagggccaggtgttttagaggcagcgattatggttgatgaatcactcaatgctgctgataaagcaacactattcaagacattttcgaaggtgttgttccaaaaaaatgatctggtggcaaattttatggctaaatggtctgaaaattatcctggtcaatcaggacatattcatttatctctgcaagacctggatggtcaaagcttgtttggctcaaaagatggcaagctacccaaaacacttcagtactttgtcggaggacttcaaacttacatgagggaattctcagtaatgtatgcacctactgtaaattcttataaaagactctgccctggcgcatgggctccaatcaacatgacatggggcacagaaaatagaacgaccgctttcagagtcataacaggtgattcaaatagtcagagagtagagaatagattatccggagctgataataatccttatcttgctttagcagcgactctaggagctggctatctagggataaaagaaaagataaagccctccgatgaaacaattggaggagcttatgacttaaaactctcaagagataggatggttccgtctaatcttggtgaagcggcacaattatttaaagcgtctgaagcggctaagaacctttttggagagttgtttgtaaatcatttcgcaaacacaagaacttgggaatttaatgaatacaaaaagaatataggatttttcgataacgcacttattcagagtggaa

SEQ ID NO: 310652 - DNA, 1216 bp, Unknown
  Bacterial polypeptide expressing nucleotide sequence isolated from the Sargasso Sea
aatgtctaaaaatctttcaaaaatagcaaagcaaaaaaaaataaaatatttccttattagctttgtagatttatttggagttttaagatctaaacttgttccagccagagcaattagcgaaatgcaaaaaaatggtgctggatttgctggatttgccacttggttagatatgactcccgctgactcggatatgtttgcaattcctgacccggatagtctagttattttaccgtggaatagagaagttggctggctagcatctgatttatggatggatggaaaacctgtagaagcatctccaagaataatgcttaaaaaccaaattgaaaaattgtctaaaagaaatttaaaaatgaaatcaggtgttgagtgtgaatattttttattatctgtagatggtaaatcaatatcagaccctagagatatacagtctaaaccgtgctatgatcagtctgcgcttatgagaagatatgagttaataaaagaaatctgtgattgcatgatcgaacttggatggaatccatatcaaaatgaccatgaggatgctaatgggcaatttgaaatgaactgggattattcagacagtttaatcactgctgacagacatactttttttaaatttatggttaagtctttggcggaaaaacatggattgagagcaacttttatgcctaaaccattcgagaatttaacaggtaatggttgtcacgctcatatttctgtgtgggatggcaaatcaaatagatttttagataaaggagatagattgggtttaagcaagttagcgtataattttttaggtggaataattaaaaatgcaacttctctagctgcattctttaacccaaccatcaatagttacaggaggataaatgcacccccaactaaatcaggtgcaagctggtcgccaagtagcatttcatacactggaaacaatagaactcatatgattagaatcccagatccaggaaggtttgaacttagattgatggatggatcctcaaatccatatttactacaagctggagttatggctgcaggcctagatggtataaataataaaattgatcctggagaaccactattttgtaatatgtataaagatcataaaaattatccgaatttagaaagacttccaaatgaacttgaggagtctttggaaaatttagaaaatagcaaaatattaagagaggcttttggagaaaaagtaatttca

SEQ ID NO: 310653 - DNA, 913 bp, Unknown
  Bacterial polypeptide expressing nucleotide sequence isolated from the Sargasso Sea
tatggaaccacaaaaagaatacgtactgcgaaccgttgaagagcgaggggttcgtctgatccgtctttggttcacggacgttttaggaaaacttaaatctgttgctatatctccggctgaacttgagggtgcttttgaagaaggcctccaattcgacggttctgcaatagatggatatagccgggtacaagaaagcgatgttttagctgttcccgacgcaaacagttttgaactactcccatgggtagatccttcggaaccaacaggccgcattttctgtgatatcaagagtctagatggttcaccatttcaaggagatccccgtcaggtcctccggcgaaacctacaagctgcccacgacaaaggatttacgttctttactgcaccagagatcgaatttttctatttcaataacgcaagtgaccgtaaacctttggataatgcagggtactttgatttaacgacgcttgacttaggaagtgggttgaggcgcagaacccttcatatgttggaagcaatgggaatccctgtggagtactcatttcatgaagataatgctagccagcacgaaattgatcttcgttataccgaaactttggatatggccgacaatattatgacattgcgccttgttgtcagaaagatcgctttagacgcaggtatccatgcgacatttatgcctaaaccgatagatgaggggcagggatcaggcatgcatacccatatgtctttgtttgaaggggatgtcaatgtattccatgacccaggagatgttcttggattatctgatatagcaagaaaatttatggccggtatcctgcatcacgctccagaatttacggcagtaacaaatcaactcattaacagctacaaaagaatggtgtcagggtatgaatctccggtttacgtaagt

SEQ ID NO: 310654 - DNA, 1144 bp, Unknown
  Bacterial polypeptide expressing nucleotide sequence isolated from the Sargasso Sea
tcggatatgtttgctattccagatccagaaagcttaattattttaccgtggaatagagaggttggctggttggcttcggatttatggatggatggaaaacctgttgaagcttctccgagagtaatgcttaaaaaacaaaatgaaaaattatctaataaaaaccttaaaatgaaatctggcgtagaatgtgaattttttttattatcagaagacggtaattcaatttcagatccaagagatattcaaccaaaaccgtgttacgatcagtcgactttaatgcgaagatatgatttaattaaagaaatttgtgacagtatgattgaattaggatggaatccttatcaaaatgaccatgaggatgccaatggacagtttgaaatgaattgggactattcagatagcttggttactgctgatagacatactttttttaaatttatggtcaaatccttatctgaaaaacatgggctaagagcaacctttatgccaaaaccctttgagaatttaacaggtaatggttgccatgctcacatttctttatgggatggtaaatcaaataaattcttagataagagtgatcgtttaggtttaaataaattagcttataattttttagggggaataataaaaaacgcacaagctttatcatctttttttaacccttctattaacagttacagaagaataaatgctccaccaactaaatcaggcgcaagttggtcgccgagtagtatttcttatactggcaataatagaacgcacatgattagagttcctgatccgggaagatttgaacttagactaatggatggatcagtaaatccatatttgttacaagctggagttatggccgcaggtttagatggtataaataataaaattgacccaggcgaaccacttttttgtaatatgtacacagattataaaaactacccaaatttaccaaaacttcctgatgaactggaagactcactaaataatttagaagatagcaaagttttaagagaagcatttggagaaaaagttatttcaagctatgtaaaattaaagaagcaagaattagaatcttttgataaagaggaaagatttgacaaaaggtcttctataactgcatgggaaaaaattaatactttggactgctaat

SEQ ID NO: 310655 - DNA, 199 bp, Unknown
  Bacterial polypeptide expressing nucleotide sequence isolated from the Sargasso Sea
atgagattgacgggtctgcatgaaactcaaaaaattacagagttttcatatggtgtaagtgatagaggagctagtattcgtatacccgtttataccgttgagcatgactggaatggatatcttgaagataggcgtccagcttcaaacgctaatccttacagaatattgtcccacatagttggaacactttcagactaat

SEQ ID NO: 310656 - DNA, 266 bp, Unknown
  Bacterial polypeptide expressing nucleotide sequence isolated from the Sargasso Sea
ttcaatgtgtgaaaaattaggtgaagtgcacaaagaaggtatagcgctttatggatctgataatgatatgcgacttactggtcagcatgaaactcaaagtatagatactttctcatatggagtaagtgacagaggagcaagtatcagaatacctatatatactgttgaacatgattggaatggatatctagaagacagaagacctgcttctaatgctgatccatacaaaattattgctcatatagtaggaaccttaacttcgtagg

SEQ ID NO: 310657 - DNA, 735 bp, Unknown
  Bacterial polypeptide expressing nucleotide sequence isolated from the Sargasso Sea
tatgagtgatataaaaacttatgaatatatttggcttgatggttatcaacctgagccttcaatgaggagtaaaattaaggcgacagatgaggactcaccacctgattggtcctttgatggttcctcaacacaacaagcagaaggaaatagttccgattgtttactgctgcctgttcaaacttatgataatccaaccttttctgatcatctggtaatgtgtcaggtccatgctgccgatcatactgtgcatccatcaaatactagagcagctgcagaagctcttctttcagatgaatggtggtttggttttgagcaagaatattttcttaccggcaaggatggttcgcctttaggttgggaagatggtcagcctcggccacaaggtgattactattgcggagttggtgcagacaatgttcaaggacgagaaatttctgaggcccatctggaggcttgcttagatgcaggcttgacactaaccggaacaaacgctgaagtagcattgggccaatgggaatatcaatgttttggaaaaggcattaaagctgctgatgacttgtgggtaagcagatatttactttataaagttgctgaagattttggagttggtgtgaatattcatcctaaaccaaaatctggagactggaatggttcaggcatgcacacaaatttttctaatgaagaaatgagatcaaacggttctgagcaactcttttcatctttatgcgagaaact

SEQ ID NO: 310658 - DNA, 802 bp, Unknown
  Bacterial polypeptide expressing nucleotide sequence isolated from the Sargasso Sea
aatgagtgatattaaaacgtacgaatacgtctggttagacggctataagcctgaaccttctatcagaagcaaaattaaagctactgatcttagagggactgataagggtgaattaaatgatgatatgccaccaagatggtcttttgatggatcttctacgcagcaagctgaaggaggtagttctgattgtttattaattcctgtgcaaatgtatgacaatccaacagccccagatcatttagtaatgtgtcaggtattagcagctgatggatcaattcatccatcaaatactagagatgctgctgatgctgtagtttcagatgaatggtggtttggttttgaacaggagtatttctttactaatcctgatggctccccattaggttgggaagatggtgaaccaagacctcaaggcgattactactgtggtgttggagcagataatgtatcgggtagagaaatatctgaagttcatttacaagcttgtattgaagcaggaataaatctgactggaactaatgcagaagttgctcttggccaatgggaatatcaatgttttggaaaaggcataaaagctgctgatgatttatggatgagcagataccttttgtataagatcgctgaagaatatggcgtgggagtaaatattcatccaaagccaaagacaggtgattggaatggatcaggaatgcatgcaaatttttctaatgaagagatgcgaactaatggttctgaaaaattatttcattcaatctgcgataagctcggtgaagtccatgatgaaggaatcgcttcttatggt

SEQ ID NO: 310659 - DNA, 366 bp, Unknown
  Bacterial polypeptide expressing nucleotide sequence isolated from the Sargasso Sea
tatgggtactgcaaacgaagtactaaaaaaatttaaaaatggtgaagtcaagtatctcgatatgagatttactgatccaaaaggcaaacttcaacatttaacgatggacggtaaagcagtagacgatgatctcctaaacagcggagtcttctttgatggatcctctatatctggctggaaagctataaatgagtcagacatggttctaaaaccggacttaactacaacggtaatggatccttttacagcccaaccaacattaattgtattttgtgatgttctcgatgcagtgtcaaaggaactatatgagagagatcctagaggaactgcaagaaaagcagaagagtatgtcaaagcaagtggaat

SEQ ID NO: 310660 - DNA, 1351 bp, Unknown
  Bacterial polypeptide expressing nucleotide sequence isolated from the Sargasso Sea
tatgaatgaatgggttcttgcaggcattgcaattcacaaggcaggaggagttttagtacctataaacacaagaatgaaaggcaaagaggcggcgtacatattaaataatgcagaagccaaaattttgtttagtgttaaaacttttcttggaaccaattactttaaattattggaaaacgaagaactgcctcatcttcaacatcaaatttcacttgatgaaaatcatcttagtgaccaaattaaatctatcgggagcataaaagagcatgcgtcagaggctaaatttcctgaaatcaacgaatcagatatggccgatataatctttacctccggtacgactggtaaacccaaaggggtaatgtcgactcatgtacaaaatattaaagtttttgattattggtcatcttatattggcttgaatgaaaaagatcagtatttaattgttaatcctttttttcatacttttggctacaaggctgggtggcttgcgtctattatgagaggtgccactgcatatccatgtcctgtttttgatgcagataagatcattgagataattaataaagaaaaaatctcgatgcttcctggtccaccaactctctatcaatctattcttacaagcaatttaatagaaacaatggatatatcttcattgagattaggagtcactggggcagcatctatccccgttcagctaattaaagatatgaaagaaaagttaggttttgacactgttataacagcctatgggcttacagaaagtactggcgtggtgactatgtgcacgcctgatgatgattataagactattgcaacaacttcaggctgtgccattgcagatgtagaggttaaatgtgtgaatcaagatggtcaagatattccagctggcgaacctggagagattttagtaagaggttacaacatcactaaaggatattttaataatcctgaggccactcaagaagcaatagatgatgacggttggctgcatacaggggatataggaatacttgacgaaaatggctatataaaaattaccgacagaagtaaggatatgtttatcgttggtggtttcaatgcttatccggctgaaattgaaaatattctatgtgatcatccttcaatttcgcaagcggctgttattgggattgaggatgaaagaatgggagaagttgctaaggcatttgttgtcttaaaacctgatcaagatttaaattctgatagccttattgagtggtctaaagaaaatatggcaaattataaggtcccaaggatcgtagagttcgtgcaggagttaccaacaaatgctgcaggaaaaattatgaaataccttttaaaggatagttcatga

SEQ ID NO: 310661 - DNA, 481 bp, Unknown
  Bacterial polypeptide expressing nucleotide sequence isolated from the Sargasso Sea
atgaaaatattagagtatatatggcttgatggttatcagcctgagccatctttaagaagtaaaattaaagttactaaggatgagactccaccagattggtcatttgacggatcctccactcaacaagctgagggtggaagctcagactgtttaattcttccagtgcaaacttatgatggacctctttttgcggaccaacttgtcatgtgtgaggttgaaactggtgagcataaaacgcatccatcaaatatgagagcgggggctgctcaagttgtaacagatgagtggtggtttggatttgagcaggaatatttttttacagatatgaatggcgagccattaggatgggaagatggcacacctagacctcagggagattattattgtggtgttggcgcgtccaatgtgcagggcagagaaatatcagaagtccatcttgaggcatgcttggctgctggaatagaaatcactggaaccaatg

SEQ ID NO: 310662 - DNA, 1366 bp, Unknown
  Bacterial polypeptide expressing nucleotide sequence isolated from the Sargasso Sea
atgtcaatattttatactttttcaatgttaacaaatatcagcaattatctccaaaataaatttctcgctagaacaagaaataaattaatgatgaattggtcaagcgaatctttaatgattcaggaaaggagaaaaagagaagaaataagaatttctgaaaatagacctcataaggtattttattatcatcaggttgatgacccttattctattttggttttaccaatattggagaagattaaaaaatcttatcgaatagatttggagtgtatcttagtaggtaatcctccaggaaaaactatacctgagccaactatgtttcaaattcattgtttaaatgatgtaagaaatattgctaaatggtatggacaagaacgaaaaatttcaaattatccctcaaaaactgatatagattcagctaataaaatattgtcaaattgtacacaagctaattttattcaactagcctctgatataatggaatgcttatggttcgaggatggaaagaatatcaatgatgttactattgagccttctcaattaaacaaggaaacaaatttagtaatagaaaaaggaaataaatttcgaaaagaaaatggctattatagtagttcatctttttattatgaaggtgaaagttactggggtttagacagattaaatcatcttgaggataggttgatagacttgggccttaagagtttggatacttatggatatcttgctgatagaaaaagcaatatacaaaattattcaaccaaggataacagtttaaatttgactatttacccatcattaaacagcccatatacatatatatgttttccaagaataaggcacataatagataagtatcaaattaatgtaataactaaaccagttcttcctatgctcatgagaggaatgcacatacctcgatataaagggaaatacatattaggtgatgcagctagagagggcagaattaatgatatttatttcgataaaatatattctcctttaggtaaaccagcagaattggcttattcattatttcctataataaatgagtacaataaaggtttcgcctatattgagaaactaactatagcttcttttcatgatggcattaatattggcaatacaacatttcttaaaaatttagtgaatgatttgaatctttcttgggacgaaattaagaaagatcttggtaaaaaagaatggaagaaaattttagatgaaaatttgaaagaaatgtacgatggaaattgctggggagttccctcatttaaagttacagatgaaaatgacgaaaatcctttttatcaatggggccaagataggatttggttaattgaagaagaaattataaaacgattgaattagc

SEQ ID NO: 310663 - DNA, 550 bp, Unknown
  Bacterial polypeptide expressing nucleotide sequence isolated from the Sargasso Sea
ctcagatgctcatttagaagcttgtttagatcttggcataaccctgacgggaacaaatgcagaggttgctcttggccaatgggaatatcaatgttttgggaaaggcatcaaagcagctgatgatctctgggtatcaagatatcttctttataaaattgctgaagagtatggtgttggtgtaaatattcatccaaaacctaaaacaggagattggaacggctcaggaatgcattgcaatttctcaaatgaggcaatgagaactgctggttctgaagaacttttctcttcaatgtgtgacaagttaggcgaagtccacgaagaaggcattgcttcttacggctcggataatgatatgagacttacgggtctgcatgaaacacaaagcatcgataagttctcttatggtgtcagtgatcgtggagcaagtattagaattccggtttacactgttgagcacgactggaacggataccttgaagatagaagaccagcatcaaacgctgatccttataagatattagctcatatagtaggaactcttagtaaataa

SEQ ID NO: 310664 - DNA, 325 bp, Unknown
  Bacterial polypeptide expressing nucleotide sequence isolated from the Sargasso Sea
aatgagtgcagcaaacgttttaaaatttattaaagaaaaagaagcagaattcgtggatcttaggttcactgatccaagaggaaaattacaacatttaacaatggattcgtcagtagttgatgaaggtatgttgaatgaaggtgtattttttgacggttcatctatagctggctggaaagcaattaacgagtctgacatgattttaaaacctgatactgcaagaatgttcatggatccttttacgtctcataatactgtagttttgttttgtgatattctagatgcaattaaaaaagatccttatgaaagagatccaagaggcgtg

SEQ ID NO: 310665 - DNA, 235 bp, Unknown
  Bacterial polypeptide expressing nucleotide sequence isolated from the Sargasso Sea
atgagtgcgaaagatgttttaaagtttattaaagataaagaagctgaattcgttgatctaagatttaccgatccaagaggaaagttacaacacttaaccatggattcaactgctgttgatgatggtatgttgaatgatggtgttttttttgatggttcctcaatagctggttggaaagctattaatgagtctgatatgatacttaaaccaagatttatcaagatttttttttaga

SEQ ID NO: 310666 - DNA, 442 bp, Unknown
  Bacterial polypeptide expressing nucleotide sequence isolated from the Sargasso Sea
ggcgatcatctatggatggctcgctaccttctctaccgagctggcgagatgcatggcctcactatcagtattgatgcaaagccgatgaagggcgattggaacggtgccggaatgcacaccaacttttctacaaatgccatgcgagatagctatgaagctgttgagaaggctgctcaatcaatgggtgcgcctggaaagcctgaagagcacttagctgggtacggagttggcattgaagaccgcctcactggtgagcatgaaacgcaacgctttgaccagttcagctacggggtttcagaccgcggcgcatctatccgtattccgtggcaagttgcccgcgatggtaagggatacctcgaggatcgcagaccaaacgcgaatgctgacccttatgtcgtagcggctcttcttactaacacgtgttgcgaagtgctggcgtagt

SEQ ID NO: 310667 - DNA, 676 bp, Unknown
  Bacterial polypeptide expressing nucleotide sequence isolated from the Sargasso Sea
atggctaatgaatcaaaagaagcactaaaattaatgcaggacaatggttgtgatgtattagatataaaatttattgatttaccaggagtgtggcaacatgtttctgttccgatcaccgaagtaaatgatggtctgtttgctaatggtactggatttgatggatcaagtattagaggatttcaatcaattgacgaatcagacatgcttctagtgcccgataaatcaacagtaaaaatagatccatttgtagatggacaagttactgtaattgcagatatcaaagatccagtaactggagaattttacacaaaagatccaagaaatgttgcaaaaaaagctcaagaatatttgaaaagtactggtgttggagactcatcattttggggacctgaggttgaatttttcatatttgattcagctagctttgactatggaccaaatcatggattccatcatgttgattcagatgaaggtatttggaactccggagaaagccacatgttagatggtattactcttaataaatcacacagaccaaaacacaaaggtggatacttccctgtttctcctgttgatactcaacaagatataagaaatgaaatgataagaataatgcaagattcttttgatataaaagttgaaaagcaacatcacgaagtagctacagctggtcaag

SEQ ID NO: 310668 - DNA, 279 bp, Unknown
  Bacterial polypeptide expressing nucleotide sequence isolated from the Sargasso Sea
tatgagctctacacaagtcctaaaatttataaaagataaagaaatcgaatacgtcgatcttaggtttactgacccaagagggaaactgcagcatttaactatggacgcaacaatagttgaagaaaaaatgttaaatgaaggtgttttttttgacggttcttctattgccggctggaaagcaataaatgaatcagatatgattttaaaaccggacttaagtagaaaagttgttgatcctttcacttcacataatacgcttattcttttttgtgatatttt

SEQ ID NO: 310669 - DNA, 536 bp, Unknown
  Bacterial polypeptide expressing nucleotide sequence isolated from the Sargasso Sea
tcaggcttgtcttgacttaagaatcacactaacgggtacaaatgcagaagttgcccttggtcagtgggaatatcaatgttttggtactggaattaaagcagctgacgatctttggattagcagatatctcctatataaaattgcagaagaatacggagtgggtgtaaacattcatcctaaaccaaaaactggtgattggaatggttctggaatgcacactaacttttctaatgaagaaatgagatctaaaggctcagaagaattattttcttcgttgtgtgacaagctcggcgcagttcatgaagaaggaattgctgcctacggctctgacaatgatatgaggttgaccggcctccatgagactcaaagtattgatcaattctcatatggagtaagtgatcgaggcgctagcataagaatcccagtatacacagtggagcataattggaatggttacctagaagacaggagaccagcttcaaatgcagacccatataaaattttagctcatattgttggaacccttacaaaataga

SEQ ID NO: 310670 - DNA, 409 bp, Unknown
  Bacterial polypeptide expressing nucleotide sequence isolated from the Sargasso Sea
atattaaagcctgatttaagtagaaaagtaattgatccttatacatctcataatactttaattttattttgtgatattttagatgcagttaagaaagatccctatgaaagagatccaagaggaattgcaaaaaaagctgaagcatatttaaagaaaacaggaattggtgatacagcttactttggtccagagcctgaattttttgtttttgatgacgtcagaattaaaaacgatatgaatgaaacaagtttttcaattgatagttcagaaggtccttataattctggaaaatcttatgataatggcaacatgggtcatagacctggtgtaaaaggaggttattttccagtaccgccagtagatagtgctcaagatatgagaggtgaatatctaaagggactaagagatg

SEQ ID NO: 310671 - DNA, 373 bp, Unknown
  Bacterial polypeptide expressing nucleotide sequence isolated from the Sargasso Sea
atgagttcaaaagatgtattaaaagtaatgaaagacaagagtattgaatttgttgatttaagatttacagacccaagaggaaaactacaacatcttactatggactcatccgtcgttgatgatggtatgcttaatgacggagtattttttgatggttcatcaattgcaggatggaaagcaataaatgagtctgacatgattttaaaaccagatttatcaagaaaaatagtagatccttatacttcgcataacactttaattttgttttgtgatattttagatgctgtaaaaaaagatccttatgaaagagatccaagaggaatagctaaaaaagctgaaaagtatttaataaaaagtggggatcggagataaa

SEQ ID NO: 310672 - DNA, 525 bp, Unknown
  Bacterial polypeptide expressing nucleotide sequence isolated from the Sargasso Sea
ggtacatcggaggcatacttaaacatgccccttctttcctagcatttactaacccaacaacaaacagttataaacgattggttcctggcttcgaagcaccagtaaatctggtttattcagagggtaatagatcagctgcagtaagaatacctttaacaggtccaagtcctaaagctaaaagattagaattcagatcaggtgatgcactcgccaacccttatttagcattctctgtaatgatgcttgctggtattgatggaattaaaaatcaaatcgatcctggtgatggagtagatgtagacttatttgaacttccagctgatgaacttgctaaaattgataccgtaccttcatctcttaatgattcacttaatgcgctaaaagcagataaggattatctattagctggtggagtatttactgaagattttattgataactttattgatataaaatacgaagaggtacaacaactaagacaaaggcctcatccacatgaatttttcatgtattacgatgcataat

SEQ ID NO: 310673 - DNA, 580 bp, Unknown
  Bacterial polypeptide expressing nucleotide sequence isolated from the Sargasso Sea
ggcaaaactcctgttttttctggaaataaatatgctggtttatctcaaactgcattatattatattggcggaatattaaaacatgccaaagcaattaatgcttttgctaatgcaacaacaaatagctataagagattgatacctggatttgaagctcctgtattgctagcttactcagctagaaacagatccgcctcatgtaggatacctattacgttaagcaaaaaaggagcaagatgtgaaattagatttccagatgcttcaggtaatccttatttaacttttgcatcaatgttaatggcaggaatagatggaattaaaaataaaattgatccaggaaaatcttttgacaaagatttatacgctttatctgaaagggaagtcaaaaaagttccaacagtttgcggctcattaagagaagcaatggaaaatttagataaagatagaaagtttttaactcagggaaatgtttttacagatgatcaaattgatgcttatatagctttaaaatttgaagaaatacacaatttcgaacatactccacatccaattgagtttgacatgtattacagttgttaaa

SEQ ID NO: 310674 - DNA, 202 bp, Unknown
  Bacterial polypeptide expressing nucleotide sequence isolated from the Sargasso Sea
atgagcgctagggacgtattaaaacaaattaaatctaagaatgttgagtatgtagatcttagattcaccgatccaagaggaaagcttcagcaccttacaatggacaaaacgatagttgatgaggatatgttaaatgaaggagttttctttgatggctcttcaattgctggatggaaagcaattaatgagtctgacatgatat

SEQ ID NO: 310675 - DNA, 742 bp, Unknown
  Bacterial polypeptide expressing nucleotide sequence isolated from the Sargasso Sea
tatggcaaatgaatctaaagaagcattaaagctgatgaaagataatggctgtgatgttttagatataaaatttattgatcttcctggagtttggcaacacgtttctgttcctatcagtgaagtagacgatggtttattcgcaaatggtacggggtttgacgggtcaagcatcagaggattccaatctatcgatgaatcagacatgttattggttccagaccaatctaccgtaaaaatagacccatttgttgacggtcaggtaacagtaattgcagatattaaggatcctgtaactggagaaaaatataacaaagacccaagaaatattgccaaaaaagctgaagaatatcttaagagtactggtgtaggagatacttcattttggggtcccgaagttgaattttttatttttgattccgctcaatttgattatggcccaaattatagtattcataatgttgattcagatgaaggtatttggaactcaggaaatccattcatgttagatggagaaacaattaataaagcgcataggcctaaacataaaggtggttacttccctgtgtctcctgttgatacgcaacaggacattagaaacgaaatgataagaattatgcaagattcttttggaattaaagtagaaaagcaacaccatgaagttgcaactgcaggtcagggtgaaattgacattgtttataacactcttcttgatactgctgataatgtaatggcttataaatat

SEQ ID NO: 310676 - DNA, 571 bp, Unknown
  Bacterial polypeptide expressing nucleotide sequence isolated from the Sargasso Sea
taatgttgtaggcagagaggtgtctgatgctcatcttctagcatgcctagatcttggtattgaattaacaggaacaaatgcagaagttgctcttggtcaatgggaatatcaatgctttggcaaaggaataaaagctgcagatgatttatgggtaagtagatacctactatataaaattgcagaagagttcggagttggtgtaaatatacatccaaagccaaaaacaggagactggaatggttctggaatgcattgtaatttctctaatgaggctatgagatctcaaggttctgaggagctttttacttcgatgtgtgacaagcttggagaagttcatgaagaaggcatagcatcttatggttctgataatgatatgagattgactgggcttcatgaaactcaaagtattgataagttctcatatggagttagtgataggggtgcaagtattagaattcctgtttacacagttgagcatgattggaatggttatttagaagacagaaggcctgcttctaatgctgatccttataaaattttagcccatatagtaggaactttaactaagtaa

SEQ ID NO: 310677 - DNA, 226 bp, Unknown
  Bacterial polypeptide expressing nucleotide sequence isolated from the Sargasso Sea
tatgagtgccagtaatgtattaaagtttattaaagataaagaagctgagtttgtagatctaagatttactgatccaagaggaaaattacaacatttaactatggatgcaactgctgtcgacgaaggaatgttaaacgatggtgttttttttgatggatcatcaattgctggttggaaagctataaatgaatctgacatgattttaaaaccagatttatcaagattt

SEQ ID NO: 310678 - DNA, 322 bp, Unknown
  Bacterial polypeptide expressing nucleotide sequence isolated from the Sargasso Sea
tatgagttctagtgaagttctaaaattaatgaaagataaagaagttgaatacgtagacttaagatttactgatccaagaggaaagttgcaacatttaacaatggactcaacagttgttgatgagtcaatgttaaatgagggagtatttttcgatggatcatcaattgcaggatggaaagcaattaatgaatcggacatgattttaaaacctgatttaagtagaaaagtaatagatccttatacttcacataacacactaatattattttgcgatattttagacgctgttaaaaaaaatccatatgaaagggatcccagagga

SEQ ID NO: 310679 - DNA, 382 bp, Unknown
  Bacterial polypeptide expressing nucleotide sequence isolated from the Sargasso Sea
atgaccgcaagtaatgttttaaaattgataaaagataaagaagttgaatacgtagacttaagatttactgatcctaggggaaaactacagcatttaacaatggatgcaacagtggttgatgaaggaatgttaaacgatggtgtattctttgatggttcatctattgctggatggaaggcaataaatgaatcagatatgatcttaaaacctgatcttggaagaaaagttgtagatccttttacttctcataatactcttattttattctgtgatattttagatgctgtaaaaaaagatccttatgaaagagatcctagagggattgcaaaaaaagctgaagcatacttaaaaaaaacaggcataggtgataaagcttattttg

SEQ ID NO: 310680 - DNA, 283 bp, Unknown
  Bacterial polypeptide expressing nucleotide sequence isolated from the Sargasso Sea
gatggcaggccttgacggtatacagaataaaatccaccccggtgatgccatggataaagatctctatgacctaccaccagaagaactaagccagattccaactgtttgtggatcactgcgcgaggcactcgatgcattgaacgaagaccgcagtttcctcgctcagggcaatgtgttcactgatgaacaaatagacgcgtatattgatttgaagatggaagatgtgattcgtttggaacacactccgcatccggttgagtttgatatctattattcatactga

SEQ ID NO: 310681 - DNA, 709 bp, Unknown
  Bacterial polypeptide expressing nucleotide sequence isolated from the Sargasso Sea
tcagttgttactgatgaatgtgggtttggattcgaacaagaatatttcttaaccaaccccgatggaacaatcctcggttgggaagacggtacgcctactaggccacaaggagaatactattgtgcagttggagcggccaatgtcaaaggaagggaaataagcgatgcacatttggatgcttgcctagatgcaggtattgagcttaccggtacgaatgccgaggttgctttaggtcaatgggaatatcaatgcttcggtaagggtataaaagcagctgatgacttgtggatgagcagatatatactttataaagtagctgaagaattcggtgtatcagtaaacattcaccctaagccaaaaactggagactggaatggatcaggaatgcactctaacttctctaatgaagaaatgagaacttcaggaagtgaagagctattcagttctatgtgcgacaaattgggcgaagtgcataaagagggcataacattatacggttctgataatgatatgcgcttaacaggattgcatgaaactcaaagcatagaccagttctcttacggagttagtgacagaggagctagtatcagaattcctatctatactgttgaacatgattggaatggatacttagaagatagaaggcctgcttctaatgcagatccttacaaaattgtagcgcatatagtcggaacattaacttcttagt

SEQ ID NO: 310682 - DNA, 304 bp, Unknown
  Bacterial polypeptide expressing nucleotide sequence isolated from the Sargasso Sea
agcattctcagcaatgttaatggcaggattagacgggattaaaaataaaattgatcctggcgatccaacagatataaatctttatgctgctagtgatgaggttttatctaaaattcaatctactcctggatctttagctgaatctcttgaagctctagaaaaagatcatgcatttttattggagggcgatgtttttactaaagatgtaattgaaacatatattagctataaaaaagagagtgaggttgatccaattaatattagacctcatccacacgagttcaagctatactacgacgtgtag

SEQ ID NO: 310683 - DNA, 750 bp, Unknown
  Bacterial polypeptide expressing nucleotide sequence isolated from the Sargasso Sea
ataggtctgcacacccatcaaacacaagaagcgcttgtgttgatattcttacagatgattggtggtttggttttgaacaagaatatttcttcacaaaccctgaagacggaacaatacttggctgggaagacggaacacctagaccacaaggggattactattgtggcgtagggtctggcaatgtccaggcacgcgaagtttctgaggcacacatggatgcttgccttgaggcaggcattactatcactggcaccaacgcagaagtagctctcggtcagtgggaatatcagtgtttcggtaagggccttaaggcagcagatgatttatgggtcagcagatacctcctccatttaattgcagaagagtacggcgtgtctgtaaacattcatcccaagcctcaagagggcgactggaacggttcgggaatgcacactaatttttcgaatgaacaaatgagaagcgcgggctcggaagaactatttaattcaatgtgtgaaaaactgggcgaggttcatgcagaaggcatagccaattatggctcagacaatgataagaggttgaccgggaatcatgaaacccaaagcattgatactttttcgtatggtgtgagcgacagaggagcaagcatcagaatacccatctatacagttgaaaatgactggaatggctatttagaggatagaagacccgcttccaatgcagacccatataaaattatttcgcacattgttggtacgctgacacaataaa

SEQ ID NO: 310684 - DNA, 522 bp, Unknown
  Bacterial polypeptide expressing nucleotide sequence isolated from the Sargasso Sea
atcttggtataaccctgacgggaacaaatgcagaggttgctcttggccaatgggaatatcaatgttttgggaaaggcatcaaagcagctgatgatctctgggtatcaagatatcttctttataaaattgctgaagagtatggtgttggtgtaaatattcatccaaaacctaaaacaggagattggaacggctcaggaatgcattgcaatttctcaaatgaggcaatgagaactgctggttctgaagaacttttctcttcaatgtgtgacaagttaggcgaagtccacgaagaaggcattgcttcttacggctcggataatgatatgagacttacgggtctgcatgaaacacaaagcatcgataagttctcttatggtgtcagtgatcgtggagcaagtattagaattccggtttacactgttgagcacgactggaacggataccttgaagatagaagaccagcatcaaacgctgatccttataagatattagctcatatagtaggaactcttagtaaataaa

SEQ ID NO: 310685 - DNA, 661 bp, Unknown
  Bacterial polypeptide expressing nucleotide sequence isolated from the Sargasso Sea
atacttttttactagtgataatggagagccgttaggctgggaagatgggactcctcgacctcaaggtgattactactgcggtgttggagcgggaaacgtagaaggaagagatatttctgaggcacaccttgaagcttgtttagaagctggtattgaactgacaggcactaacgctgaggttgctctagggcagtgggaataccaatgctttggtaagggaataaaagcggcagacgatctttgggtgtcaagatatttactttacaaaattgccgaagattttggcgtaggcgtaaatattcatccaaagccaaaaacgggtgattggaatggctcaggtatgcacactaatttttccaatgaagaaatgagaacagctggttcagaaagtctatataattccctttgtgacaagcttggtcaagtacataaagagggaatagctttatatggttcagataataatatgagactgaccggtcttcatgaaacacaaagcattgaaaagttttcttatggtgttagtgataggggggcaagcattagaattcctatttacactgttgaaaacaactggaatggttacttagaagatagaagaccggcctctaacgctgatccttataaaataattaatcatattgtttctaccttaaaataa

SEQ ID NO: 310686 - DNA, 327 bp, Unknown
  Bacterial polypeptide expressing nucleotide sequence isolated from the Sargasso Sea
aatgtctaattcaattattgcagaatatatatggcttgacaaaaataaaaatcttcgttcaaaagcaagaacgcttaatttctctacggactcaactattagtattccaactaatgcgtggccaaaatggacatatgatgggtcttcaactggtcaagcatctggtcatgattcagaaattactattattccacgagcagttttcgattgtccatttagaggtaataggcataaacttattatttgtgatacatatgattcagagggtaaaccaactgaatcaaatacacgatattcagctgaccatatatttagatcatttagaga

SEQ ID NO: 310687 - DNA, 370 bp, Unknown
  Bacterial polypeptide expressing nucleotide sequence isolated from the Sargasso Sea
atgagttcaaacaaagtattaaaattgatgaaagataaagagatcgagtttgtcgacttaagattcactgaccctagaggtaaattgcagcatctaacaatggattcaacaattgttgatgatgacatgcttaacgatggagtattttttgatggatcttcgatagctggttggaaagctattaacgagtcagacatgattttaaaacctgatttaagcagacaagtaattgatccttacacttcacataacactctaattatattttgcgatatcttggatgcagtcaaaaaaactccttatgaaagagatccaagaggaattgctaaaaaagctgaagcatatttaaaaaaatctggcgttggtgata

SEQ ID NO: 310688 - DNA, 397 bp, Unknown
  Bacterial polypeptide expressing nucleotide sequence isolated from the Sargasso Sea
atgaaaattaaagcagaatacatatggatagacggtaaaacaccgactgcaaagttaagaagtaaaaccaaaattatggaccaagggaccgaacctccaatttggggatttgatggttcaagtaccgaacaagcaactggagatcagtctgactgcgttttgaaacctgtagcacaatttccagaccccataagaggtggagacaacatactagtaatgtgtgaggtattaaatgtcgacatgacaccacatgcttcaaacacaagagcagcgtgtgttgcttcatccgaaaacttttctgagtttgaacctatgtttggcttagaacaagaatacacattttatgaacaatcatatgattccttaaaatatggacaacctctaggatccctccttc

SEQ ID NO: 310689 - DNA, 253 bp, Unknown
  Bacterial polypeptide expressing nucleotide sequence isolated from the Sargasso Sea
atggccgagtacatctggatcggcggcgacaagacaacgggcggcttcgacctgcgctcgaagacgaagacgctgtcgtcgaagcccggctccgtggccgacctgcccgtgtggaactacgacggcagctcgacaggccaggccccgggcaccgactccgaggtgctcctgaagcccgtccgcatctacgcggaccccttccgcggcggcgacaacatcatggtgctgtgcgagaccctcagcccgaagatga

SEQ ID NO: 310690 - DNA, 681 bp, Unknown
  Bacterial polypeptide expressing nucleotide sequence isolated from the Sargasso Sea
aatgagttcaagtgcagatattttaaagaaaattaaagatgaagaaattgagtatttagatctaagatttacagatccaagaggtaagttgcagcatgtttctattcttggagatggagtagatgaagatctattagacgatggttggatgtttgatggatcatcaattgcaggttggaaatctattgatcaatctgatatgaaattggtcgctgactgttcttcttcttatgttgatccattttatgcagaaaaaacattgtgtattcattgtaacgtcgctgaacctgatactggagaactttataatagagatccaaggtcaactgcagttaaagctgagagttatttaaaatcatctggattaggtgatgtttcttattttggtccagaagctgaattctttttatttgatgatgtaaaattttcaaatacaatgaataaagtttcatatgaagtagatgccatagatgcttcttggaatacagatgctgatctagaaatgggaaatatgggacatagaccaggggttaaaggtggttatttcccagtaaatccagtcgatgctggccaagatatacgctcagaaatgttatctactatgaaaagaatgggaatgtctgttgataaacatcatcatgaggttgcatcaaatcaacatgagcttggcctcatttttaa

SEQ ID NO: 310691 - DNA, 670 bp, Unknown
  Bacterial polypeptide expressing nucleotide sequence isolated from the Sargasso Sea
gtcgatacgcaattgcctcctggattcccggtgaacggataccctggcccacaagggccttactactgttccgtgggagcgggaaatgcctttggtagggagtgcgtcgaagagcattttgatatgtgtctagctgcgggtattaacgtggaagggatcaacgccgaggtcgccgcgggccagtgggagtttcaggtgttcgccaagggcgccaaaagggctggagatgaaacctgggtagccaggtatcttctggagagagtcggtgaaaagtacgggttctctattaactggcaccccaaaccgttcggaaagttagattggaacgggtcaggcatgcacgccaacttctccaacgaagtcatgaggacagcgggcgaggaagctgtgttcacaaagatctgtgaggagttcggtaaaaatatcgaacggcacatcagcgtgtacggggcggacaacgatcaacggcttaccggtgatcacgaaacacaatccatcgacacgtttagttacggcatctccgatcgaggggcctccatcaggattcctgtgtccacgcacacggacggctggattggcagactcgaggatcgacggactgcgtccaacgcagacccttataaggttgcggcggccatcgtcaaaacgactaaagaggcgcttgcataag

SEQ ID NO: 310692 - DNA, 376 bp, Unknown
  Bacterial polypeptide expressing nucleotide sequence isolated from the Sargasso Sea
aatgaataaaattcgagcagaatatatttggatggatggtcatgagccaacccaaaaactcagatctaaaacaaaagttcttgatgggccgatagactctttagaaaaattaccattttggggatttgatggttccagcactaatcaagcagaggggaataatagtgattgcatgttaaaaccagtttttaagacactagacccaatcagaggaggaaacgatatacttgttatgtgtgaagtaatgaacgctgatggcagtcctcatcctactaatagccgtaataatttaaaaacaatatcagaaaaatattctaatgaagaaccatggtttggcattgagcaagaatacactctttttgaaggacgcaatcca

SEQ ID NO: 310693 - DNA, 436 bp, Unknown
  Bacterial polypeptide expressing nucleotide sequence isolated from the Sargasso Sea
ggttttgaagcccctgtattgctagcttattcagctaggaatagatcagcctcttgtagaataccttttgttggaagccctaatggtaaaagagtagaggtcagatttcctgatgctacggccaacccttatttggcattttctgcaatgttaatggcaggtctagatggtattcaaaataaaatacaccctggtgacccaatggataaagacctatatgaattgcctgaaagtgaattacaaaatattccaacagtctgtggatcactaagggaggctgtggatgccctgaaagatgatatgtcctttttaacaaaaggtggagtatttactgaagaccaaatcgaagcttacattgatttaaaaatggaagaagttattgagtttgaacatgctccacatcctgtagaatttaagatgtactattcaagctgat

SEQ ID NO: 310694 - DNA, 357 bp, Unknown
  Bacterial polypeptide expressing nucleotide sequence isolated from the Sargasso Sea
aaaaagctgctagatgtgaaataagatttcccgatgcagctggaaatccatatttaacattttcagcaatgttaatggctggtttggatggtattaaaaataaaattaatccagggaaaccagtggatgaagatttatacacaatgccagaggaaaaagtaaaaaatattcctacagtttgtggttctcttagagaagctatggagagccttgatagagatagaaaatttttaatacagggtggtgtatttactgatgatcaaattgatgcttatattgcattaaaatttgaagaaatttataaactcgaacacacacctcatcctatggagttcgagatgtattatagttgttaat

SEQ ID NO: 310695 - DNA, 690 bp, Unknown
  Bacterial polypeptide expressing nucleotide sequence isolated from the Sargasso Sea
aatgaaaaaactagaatacgtatggctggatggatatcagccagaaccaatgatgaggagcaaagtcaaggttattgatggagaaattccaggaaatagcggctctgatttaccagattggtcttttgatggttcgtcaacacaacaagcagaaggcggtgactctgattgtatactcaagccagtaacaacttatccagggccactgcattcagatagtttagtgatgtgtgaagtaatgtcaccagacaagtctccacacccttccaatacaagaaatgcatgcattgatcttctctcagatgagtggtggtttggctttgagcaagagtattttttcaccaaccctgaggatggaacaattcttggttgggaagatggaacgccaagaccgcaaggagattattattgtggtgttggtgctggcgatgtttatggcagagagatttctcaagcacatatggatgcctgcatagatgccggcattaaaattaccggaaccaatgcagaagttgcgctaggccaatgggaatatcaatgttttggaaagggcctgaaagcggcagacgatctttggatgagcagatatcttcttcatcttgtagcagaagagtttggtgttgcagttaacacccatccaaaacctcaagaaggtgattggaacgggtctggaatgcataccaatttctc

SEQ ID NO: 310696 - DNA, 487 bp, Unknown
  Bacterial polypeptide expressing nucleotide sequence isolated from the Sargasso Sea
agtagctttaggacaatgggaataccaatgcttcggtaaaggcataaaagctgctgatgatttatgggttagcagatatttgctttacaaagttgctgaagaatatggtgttggcgtaaatattcatccaaaacctaagtcaggagattggaacggatctggtatgcataccaacttctccaatgaagcaatgagaacagctggctctgaagaacttttctcttcgatgtgtgacaagcttggcgaagttcatgcagaaggaattgccgcctatggatccgacaatgatcagagattaactggattacatgagacacaaaaaattactgaattctcatatggagtcagtgatcgtggtgcaagtataagaatacctgtatatacagttgagcatgattggaatggatacctagaagatagacgacctgcttctaatgctgatccatacaaaattattgcccatattgttggcactttaacgaagtaa

SEQ ID NO: 310697 - DNA, 939 bp, Unknown
  Bacterial polypeptide expressing nucleotide sequence isolated from the Sargasso Sea
aatattttctctttgaggccgaccgcaacggcgagccagtgccactcgatcgcagtagctactttgacctcaccacgtcggacgtcgttagcaatattcgccggaagacattgaccactttggaggcaatggggattcctgttgaatattcgtttcatgaagatgcgccgagccaatacgagatagacctgagatacacagacgccttaacaatggctgacaacgtgatgacgtttcggctgattgtccgggagatagccctcgaacatggggttcacgccacctttatgccaaagcccttatccggagttcaaggttcgggcatgcacacacacttatctcttttcaaagacggctcgaacgcgtttcatgatcccgaaagtcctgatggtctttccgacgtcgcaaagggcttcatcgccggcctgctgcaccatgctagggaaatcacggcggtcactaatcagctcgtcaacagttataaacgtttagtgacggggtatgaagcgccggtcaatgtgtcttgggcgcgcgccaaccgcgccgcgttaataagagtccctgcggcacgcgaggccggtgtagatgacaccaccagaatcgaatacagagctcccgatcccgcgtgtaatccttacctaaccttcgctgtgattttggcagctggaatgaaaggcatcgaacaaggctacgaattacctcttgaggcgccgccatcaatgacaggcttcacagagcacggcggccttattgaccaagcccaacttccgcagtctttagatgaagctttagacgaaatggaaaagagcgacttggttgctgacactttgggcgaccatttattcagttggtttctaagaaataaacgcagagaatggaatgagtacaaggctcaagtaactccattcgaacttgaccgctattacacaagcctgtgat

SEQ ID NO: 310698 - DNA, 514 bp, Unknown
  Bacterial polypeptide expressing nucleotide sequence isolated from the Sargasso Sea
atgacccccaaagaggcagtagagtttgcaaaatcaaataacgcgcgaatcttggatctaaaatttatggattttataggttcgtggcagcacttttcagttcccatcggagaattagaagaaagtctttttgaagatggtttaggatttgatggctccagcattcgaggttggcaggcaattaataatagcgatatgattgttatcccagatcccggcaccactgtaatggatccgtttatgaaagatgccacagtcagcatgatctgtaatatatttgatcctattacgaaagaaaaatatagtcgtgatccaagaaacatagcgcaaaaggcagaagcatatctcaaatctacaggaattggagatacagcttattttggccctgaagccgagtttttcatattcgataatgttcagtacgattcaacagctaacgaatcgttttattctattgattcagaagaaggaacctggaatacaggtagtgatgaagctccaaacttgggccaca

SEQ ID NO: 310699 - DNA, 510 bp, Unknown
  Bacterial polypeptide expressing nucleotide sequence isolated from the Sargasso Sea
ctctaactggaaccaatgctgaagtagctcttggccaatgggaataccagtgttttggtaaaggcattaaggcagcagatgatctatgggtaagtcgatacttgctttataaaattgctgaagaatttggcgttggtgtaaatatccacccaaaaccaaaaacaggtgactggaacggctctggtatgcactgtaacttttcaaatgaagcaatgagaactgcaggctctgaagagttatttacttctatgtgtgacaagcttggtgaagttcacgaagaaggtattgcttcatatggttcagataatgatatgcgtcttacaggacttcatgaaactcaaagcattgataagttctcttatggtgtcagtgacagaggtgctagcataaggatacctgtctacactgtagaacatgattggaatggataccttgaagacagaagacctgcttcaaatgcagatccttataaaattttggctcatatagtaggaactctttctaagtaat

SEQ ID NO: 310700 - DNA, 450 bp, Unknown
  Bacterial polypeptide expressing nucleotide sequence isolated from the Sargasso Sea
ttcctggattcgaagctccaacgatattaggtttatctgctaggaacagaactgcagctttcagagtccctatgtatgatccagacaataaagcagctaaaagagttgagtttagatcagcagatggaacttgtaatccatacttagcattccctgcaatgcttatggcgggattagatggaattgaaaatgagatcgacccaggagatgtattagatcaagatttatttagtatgtctgatgaagagcaagctaaattaaaacaggttcctagtagtattgatggtgcattaaatgcacttgaagatgatcatgaattcttactcaaaggtgatgtcttcactagtgatttacttgaagcctggatttcttacaaaagagaaactgaagttgatcaagttagaacaaggcctcacccatgggaatactatctaacctttaacgcgtaaa

SEQ ID NO: 310701 - DNA, 604 bp, Unknown
  Bacterial polypeptide expressing nucleotide sequence isolated from the Sargasso Sea
cacttggatggaagtggaatgcatactcatatctccttatttaaaggaaatcagaatgttttctataaccctaaagatcctttttatctatctaaagaagcaaggcaattcatggcaggattatatagacattcatcagaaataactgctataacaaatcaatgggttaattcatacaaaagactagttccaggctttgaagctccagcattcaattctttagcattttctggaggatggggaaatttgattagagtacctaaatctaggcctgagaaaggaaattctgtaagagtagaatacagatctcctgatcctgcctgtaacccttatctagcattcagtgttatcttagctgctggattagaaggaataaaaaattcttacgaaattcctaataaagaagataaaagtaatatcattggtgaaaggctacctactaaccttaaggatgctttagataaattatccaaaagttcacttgtaaaaaaatgtttaggtaaagaaactcttgagatatttttaaataataaatatagagaatgggaagaataccaaaaaacagttagcgaagttgaaataaaaaaatatataaatctatgac

SEQ ID NO: 310702 - DNA, 275 bp, Unknown
  Bacterial polypeptide expressing nucleotide sequence isolated from the Sargasso Sea
tatgagtgcaagtaaaattaaaaagttaatgaaagacaaagaggttgaatacgtagatctaagatttactgatccaagaggaaaacttcaacatcttacaatggacagcacagtagtagatgaagaaatgctagagaaaggtgttttctttgacgggtcttccatcgctggttggaaagctataaatgagtcagacatgattttaaaaccagacctaaatagacctataatcgatcctttcaattctcacacaaccttaaatattttttgtgata

SEQ ID NO: 310703 - DNA, 706 bp, Unknown
  Bacterial polypeptide expressing nucleotide sequence isolated from the Sargasso Sea
tatggacattaaaatggttgatatgaggtttactgatattccaggaacaactcagcactttacgataccaataaaatttttagatgaagatatattttctgatggactcggatttgatggttcctccgtaagaggttttcaggaaatacaggatagtgatatgatagttttgccagatccgtcaacggcttatatagatccattcttttcagaaaagacacttgctttacattgtaatattaaagatccagtaacactcgtggattacagcagagatccaagaaatattgcaaaaaaagctgaagcatatttaaagtcatcaggaattggtgatactgcattctttggcccagaagctgaattttttgttttcaataacgtgcagtttgactcaggttccaattttgcatttcatgaagtggattcaatagaaggaacatggaatagtggatcagatgagggtcccaatttaggacacaagccaaggcacaaagaaggttatttccctttacctccagttgatacactacaagatgttagaacagaaatggtaatgacaatgcaagatattgggttaaccgttgaggcgcaccaccatgaagttgccactgggggacaatgtgaaattgatttagaattttcaccattgttaaaaatggctgatgatatgatgaagtataagtatgtagttaaaaatggttgccaa

SEQ ID NO: 310704 - DNA, 436 bp, Unknown
  Bacterial polypeptide expressing nucleotide sequence isolated from the Sargasso Sea
gcagatgatctttgggttagtagatacctactttataagattgctgaagagtttggggttggagtaaatgttcatcctaaaccaaaaactggtgactggaatggctcaggaatgcattgtaacttttctaatgaagccatgagaacagcaggatctgaagaactatttacatcgatgtgcgataagctcggtgaagttcatgaagaaggtattgcttcatatggctctgataatgacatgcgcctaactggtcttcatgaaacacaaagcattgataaattctcttatggagtaagtgatagaggtgcaagtataagaattcctgtatacacagttgagcataattggaatggttatcttgaagatagaagacctgcttcaaatgccgatccatacaaaatcgtatctcatattgttggtactctaacaaaataat

SEQ ID NO: 310705 - DNA, 712 bp, Unknown
  Bacterial polypeptide expressing nucleotide sequence isolated from the Sargasso Sea
tatgaaattaaaaagctcgactccaaaagatttaatgtctgaaattaaagatatggacattaagatggttgatatgcgctttactgatataccaggaacaactcaacattttacaataccaattaaatttttagacgaagatatattttctgacggacttggttttgatggatcttcagtaagaggtttccaagaaattcaagacagtgatatgattgttttgccagatgcaacaacagcctatattgatccatttttttcagaaaaaactttggcattacattgtaatattaaagatcctgtaactttggttgactatagtcgtgacccaagaaacattgctaaaaaagctgaagcctatttgaaatcatctggtatcggtgacacagcattttttggtccagaagcagaattttttgtgtttaataacgttcagtttgactcaggatcaaattttgcatttcatgaagttgattctgttgaaggtacttggaatagtggtgcagatgaaaacccaaacttaggtcataaacctagacataaagaaggttattttcctttaccgccagttgatacacttcaagatgtaagaactgaaatggtaatgacaatgcaagacattggtcttacagttgaagcacatcaccatgaagttgcaacaggtggacaatgtgaaattgatttagaattttcgcctttactaaaaatggct

SEQ ID NO: 310706 - DNA, 280 bp, Unknown
  Bacterial polypeptide expressing nucleotide sequence isolated from the Sargasso Sea
aatgagttcaaaaaacatacttaaacttatgaaggataaacaagttgaatatgtggatctaagatttacagatcctaaaggtaagcttcagcacttaactatggactcgacagtagttgacgaagatatgctggataaaggagtattttttgatggctcttcgattgctggatggaaagcaataaatgagtctgatatgattttgaaaccagacttaggtagacaattaattgatcctttaattctcatacaactcttaatatattttgtgatatcttag

SEQ ID NO: 310707 - DNA, 535 bp, Unknown
  Bacterial polypeptide expressing nucleotide sequence isolated from the Sargasso Sea
ggatgcttgtcttgaggcaggtattatgattactggcaccaatgcagaggtagcgcttggtcaatgggagtatcaatgttttggtaagggtcttaaagcagctgatgatttgtgggtaagcagatacttgctccatctaatcgcagaagagtatggcgtttctgtaaacattcatccaaagccgcaacaaggtgattggaatggttctggaatgcacactaatttttccaacgagcaaatgagaagcgcaggctcagaagaactgatgacttctatgtgtgacaagctgggagaggttcatgcagaagggatatcaaattatggttcggataatgatatgcgattgactggaaatcatgaaactcaaagcattgatacattttcttacggagtaagtgatagaggagcgagtatcaggatccctatctatacagttgagaatgactggaatggttatctagaagacagaaggcctgcttcaaatgcagatccatataaaatcatttcgcacattgttggtacgctgacaaaataa

SEQ ID NO: 310708 - DNA, 601 bp, Unknown
  Bacterial polypeptide expressing nucleotide sequence isolated from the Sargasso Sea
atggcaaaaacttcacaggatgtcctccgtcagatcaaagacgagggcattgaactgattgacctcaagttcactgacctccacggcaagtggcagcacctcacggtctgcactgatctgctggaggaggagtccttcaccgagggccttgcctttgacggttcatcgatccgcggctggaaaggcatccaggcctccgacatggccatggtgcccgaccccaacaccgcctgggtggacccgttctaccggcacaaaaccctgagcatgatctgctcgattcaggagccacgcaccggtctgccctacgagcgctgccctcgcgccctggcccagcgggctctcgattacctgagctcgaccggccttgctgacatggccttcttcggtcctgagcctgagttcttcctctttgacgacgtccgctacaactcgtcgtccggtggcgccttctatagcgttgacacgatcgaggcgggctggaacaccggtcgcctcgaggaaggcggcaacctcgcctacaaaattcaggagaaggaggggtacttccccgtcgctccgaacgacacagcccaggacatccgttcggagatgcttctgc

SEQ ID NO: 310709 - DNA, 885 bp, Unknown
  Bacterial polypeptide expressing nucleotide sequence isolated from the Sargasso Sea
tatgaaaaaattagaatatatatggctggatggatttcagccagaaccaagcctaagaagcaaggttaaagttacagacggaagcccccccgattggtctttcgatggatcatcaacccaacaagccgatggctcaagctctgactgtatcattaggcctgtaaacgaatatgttggaccgagaaattctgacagcttggtcatgtgcgaagtcttgtcgtcagataggtctgcacacccatcaaacacaagaagcgcttgtgttgatattcttacagatgattggtggtttggttttgaacaagaatatttcttcacaaaccctgaagacggaacaatacttggttgggaagacggaacgccaagaccacaaggggactattattgtggcgtagggtctggcaatgtccaggcacgcgaagtttcggaagcacatatggacgcttgtcttgaggcaggcattatgatcaccgggactaacgcagaagtagcgcttggccagtgggaatatcaatgtttcggtaagggccttaaggcagcagatgatttatgggtgagtagataccttcttcatttgattgcagaggagtacggagtgtctgtaaacattcaccccaaacctcaagagggcgactggaacggctcgggaatgcacactaatttttcgaatgaacaaatgagaagcgcaggttcagaagaactatttaattccatgtgtgaaaaactcggcgaggttcatgcagaagggatcgccaattacggctcagacaatgaaaagaggctgaccgggaatcatgaaactcaaagcattgacactttttcgtatggcgtcagcgacagaggggcaagcatcagaatacccatctatacagttgaaaacgactg

SEQ ID NO: 310710 - DNA, 211 bp, Unknown
  Bacterial polypeptide expressing nucleotide sequence isolated from the Sargasso Sea
tatgagttcaagtgatgttttaaagactattaaagataaagatattgaatacgtagatctaagatttactgatcctagaggtaaacttcaacatgtaaccatggatgccaaaatggtggatgaagatatgttgaacgaaggaatcttttttgacggttcttccatagctggctggaaagctattaatgagtctgacatgatcctcaagcca

SEQ ID NO: 310711 - DNA, 711 bp, Unknown
  Bacterial polypeptide expressing nucleotide sequence isolated from the Sargasso Sea
tatgaaattaaaaagctcgactccaaaagatttaatgtctgaaattaaagatatggacattaagatggttgatatgcgctttactgatataccaggaacaactcaacattttacaataccaattaaatttttagacgaagatatattttctgacggacttggttttgatggatcttcagtaagaggtttccaagaaattcaagacagtgatatgattgttttgccagatgcaacaacagcctatattgatccatttttttcagaaaaaactttggcattacattgtaatattaaagatcctgtaactttggttgactatagtcgtgacccaagaaatattgctaaaaaagctgaagcctatttgaaatcatctggtatcggtgacacagcattttttggtccagaagcagaattttttgtgtttaataacgttaagtttgactcaggatcaaattttgcatttcatgaagttgattctgttgaaggtacttggaatagtggtgctgatgaaaacccaaacttaggtcataagcctagacataaagaaggttattttcctttacccccagttgatacacttcaagatgtaagaactgaaatggtaatgacaatgcaagacattggtcttacagttgaagcacatcaccatgaagttgcaacaggtggacaatgtgaaattgatttagaattttcgcctttactaaaaatggc

SEQ ID NO: 310712 - DNA, 214 bp, Unknown
  Bacterial polypeptide expressing nucleotide sequence isolated from the Sargasso Sea
atgagttcaaataaagtattaaaattgatgaaagataaagagatcgaatttgtcgacttaagattcactgatccgagaggtaaattacaacatctaacaatggattcaacaattgtggatgatgacatgcttaacgacggagtgttttttgatgggtcttcgatagcgggttggaaagctattaacgagtcagatatgattttaaaaccctgat

SEQ ID NO: 310713 - DNA, 775 bp, Unknown
  Bacterial polypeptide expressing nucleotide sequence isolated from the Sargasso Sea
ttctagtctgacacaagtacattcagcagatcataaaacgcatccctcaaataccagagctgcagcagaagctgttgtttctgacgagtggtggtttggttttgagcaagaatatttctttactaataaagatggttcaccattgggctgggaagaaggcgaaccaagaccacagggagactactattgtggagttggagctgataatgtttcaggaagagaagtatctgaagctcacttagacgcttgcttagctgcgggcataagcctaactggtaccaatgcggaagtggcattagggcaatgggaatatcaatgctttggcaaaggtataaaagctgctgatgatctatgggtaagcagatacttgctatataaggtcgccgaagagtatggtgtcggcgtaaacattcatcctaagccgaaaaaaggcgattggaatgggtcaggaatgcatactaatttctccaatgaagcaatgagaacagctggttctgaagaacttttctcatctatgtgtgacaagcttggagaagttcatgcagaaggaattgcagcatatggatcagataacgatcaaagactaacaggactgcatgaaacacaaaaaattactgagttctcatatggggttagtgatcgtggtgcaagcataagaatacctgtttatacagttgaacatgattggaatggatacctagaagacagacgaccagcttctaatgcagatccttacaaaattattgcgcacattgttggcactttaacaaagtaa

SEQ ID NO: 310714 - DNA, 340 bp, Unknown
  Bacterial polypeptide expressing nucleotide sequence isolated from the Sargasso Sea
gaaataagattccccgatgctgcaggaaacccatatttaactttttctgctatgttaatggctggactggatggtattaaaaataaaattaatccaggtaaaccccttgatgaagacttgtatgctctgccagaagataaagtaaaaaatattcctactgtttgtgggtctttaagagaggctatggaaagtttagacagagatagaggttttttaaaacaaggtggtgtattttctgatgaccaaattgatgcatttattgcattaaaatttgaagaaatttacaatcttgaacatactccgcacccaatggagtttgaaatgtattacagctcttaaa

SEQ ID NO: 310715 - DNA, 499 bp, Unknown
  Bacterial polypeptide expressing nucleotide sequence isolated from the Sargasso Sea
atgaaattaaaaagctcgactccaaaagatttaatgtctgaaattaaagatatggacattaagatggttgatatgcgctttactgatataccaggaacaactcaacattttacaataccaattaaatttttagacgaagatatattttctgacggacttggttttgatggatcttctgtaagaggtttccaagaaattcaagacagtgatatgattgttttgccagatgcaacaacagcttatattgatccatttttttcagaaaaaactctggcattacattgcaatattaaagatcctgtaactttggttgattatagtcgtgacccaagaaatattgctaaaaaagctgaagcttatttgaaatcatctggcatcggtgacacagcattttttggtccagaggcagaattttttgtctttaacaatgttcaatttgattctggatcaaactttgcatttcatgaagttgattctgttgaaggtactggaatagggc

SEQ ID NO: 310716 - DNA, 512 bp, Unknown
  Bacterial polypeptide expressing nucleotide sequence isolated from the Sargasso Sea
acatgcaaaaggattaaccgcaattacaaatcctacaacaaactcatatcacagactagttccaggttatgaagcaccagtttacattgcatggagttcaagtaatcgttctgcaactattagaattccaggtcactttaaaggagaaaaatatgcatacatgaaaagaatggaatatcgcgttccagatccagcatcaaacccatatcttgtattttcagcagtattagctgcagggttggacggaattaaaaagaaaatagaacctggcgatccagttaaagaagatatttacaaaatgacaaaatcagagagaaagaaacatggaattgacactttgcctgcaaaccttggaagagcattagatgaattagagagtgacagaaaatatcttaccccaattttctcaagtgaagttttggataaaattattgacttagagagaagagatcacagagaaattgcaattagaccacacccacatgagttttatctttactttgacgtttagg

SEQ ID NO: 310717 - DNA, 783 bp, Unknown
  Bacterial polypeptide expressing nucleotide sequence isolated from the Sargasso Sea
caacagcaggacagtgtgaaattgacataaaatatgatttaatgactaattctgctgacggtgcacaatcatacaagtatgtgttaagaaatgttgcacaacaatttggaaaagtagcaacgatgatgccaaaaccaatttcaatggatgcaggttctggaatgcacacaaatgttagtttatggaaaaaagatgagaatacattttatgataaagatgaggtgttagaactaagtcagaccggtcgttatttctgtggaggagtgatggaacatgcaaaaggattaactgcaattacaaatcctacaacaaactcatatcacagactagttccaggttatgaagcaccagtttacattgcatggagttcaagtaatcgttctgcaacaattagaattcctggtcattttaaaggggaaaaatatgcatacatgaaaagaatggaataccgtgttccagatccagcatcaaatccttatctggtattttcagcagtattagctgcaggactagatggaattaaaaagaaaatagaaccaggtgacccagtcaaagaagatatttacaaaatgactaaatcagaaagaaagaagcatggaattgatactttgcctgcaaaccttggaagagcattagatgaattggaaagtgatagaaaatatctaaacccaattttctcaaatgaagttttggataaaattattgaattagagagaagagaccacagggaaattgcaattagaccacacccacatgaattttatctttactttgatgtttagt

SEQ ID NO: 310718 - DNA, 760 bp, Unknown
  Bacterial polypeptide expressing nucleotide sequence isolated from the Sargasso Sea
gatatcaaatatgattacatgacaaatgctgcagatggtgcacaatcatacaaatacgttgtaagaaatgttgctgctgaatttggtaaagtagcaacaatgatgcctaaaccaatttctatggattcaggttcggggatgcacacaaatgttagcttatggaaaaaagatgtcaatacattttatgataaagatgaagagttagaattaagccaaactggtcgttatttctgtggtggagtaatggaacatgcaaaaggattaacagctattacaaatcctacaacaaactcatatcaccgattagttccaggttatgaagcaccagtttacattgcatggagttcaagtaatcgttctgcaacaattagaattcctgggcatttcaagggagaaaaatatgcatttatgaaaagaatggagtatcgtgttcctgatccagcatcaaatccatatctagtattttcagctgtattagctgcagggctagatggaattaaaaagaagatagaacctggtgacccagtaaaagaagatatttacaaaatgacaaaatcagagagaatcaaacgaggtattgatacattacctgcaaatcttggaagagcattagatgagttagagagtgacagaaaatatctttcaccaatatttgataatgaagttttggataaaatcattgagttagaaagaagagatcatagagagattgcaattagaccacacccacatgaattttatctatactttgatgtttgat

SEQ ID NO: 310719 - DNA, 880 bp, Unknown
  Bacterial polypeptide expressing nucleotide sequence isolated from the Sargasso Sea
tatgggcaaatcaaaactagaatatttatggttggatggatacaaaccaacccaaagcttacgcggaaaaacaaaagttgtatcagattttagtggtaaacttgaagactgtccaatatgggcttttgatggaagttctacccagcaggcaccaggcggctcatctgactgtttgttaaaacctgttgctatttatccagatccagtcagaaaagatggatggattgttatgaatgaagtattaaactcagacggatctcctcacgaatcaaatggtagagctactattgatgatgatgatgatgatttctggtttggatttgaacaagagtatttcttgtgggatccagaaacaaaccttccattgggctttccaaaagaccagacaccacaaggccaattttattgttcagtcggtggtaaaaatgcatttggaagagaaataatggatagacacttagatatttgcattgatgctggaataaatatagaaggtaccaatgctgaggttgctgcaggtcaatgggaattccaaatttttgctaaaggcgctgctaaagctggagacgaaatttgggttgctagatatttcctagaacgattagctgaagaatatggtttagctattgaatatcatccaaaaccacttggagcaacagactggaatggatcaggaatgcatgcaaacttttcaaatacaacgctaagaacatgtggatctaaagaaacatatgaggcaatttgtgaagctttcagacccgttgtaaatgagcatatcgctgtctatggagcttataatgatcaaagacttactggtgatcatgaaacgcaatcaataacagagtttagttatggtgtttcagatagaggagcttctatt

SEQ ID NO: 310720 - DNA, 403 bp, Unknown
  Bacterial polypeptide expressing nucleotide sequence isolated from the Sargasso Sea
tctgagggaccctacaatacaggaaaagattatgaaaatggaaacatgggtcatagaccaggaatcaagggtggttattttccagttccgccagtagatagtgctcaagatatgaggggagagtttttaaaagctctaagagatatgggaattaaagcagaaaaacatcatcatgaagttgctccaagtcagcatgagttgggaatttattttgatactttaactactcaggcagataatatgcagttatataaatatggagttcaaatggttgctcactcttttggtaaaactgcaacatttatgccaaaaccagttaaaggtgataatggatctggtatgcacacgcatcaatctctttggaagggaagtacagctttgttttctgggaataaatatgcag

SEQ ID NO: 310721 - DNA, 106 bp, Unknown
  Bacterial polypeptide expressing nucleotide sequence isolated from the Sargasso Sea
accgcacttcattatattggtggaattttaaaacacgctaaagcaattaatgctttttcaaatgcaacaacaaatagttataaaagattaattccaggtttttgaa

SEQ ID NO: 310722 - DNA, 217 bp, Unknown
  Bacterial polypeptide expressing nucleotide sequence isolated from the Sargasso Sea
tatgagcgctaaggacgtactaaaattaatgaagtctaagaatattgagtttgtagatcttagatttacggacccaaggggaaaacttcaacatttaacaatggatacaacaattgtagatgaaggaatgttaaatgacggtgtattttttgatggatcgtcaattgcaggatggaaggcaattaatgaatctgacatgatattaaagcctgattta

SEQ ID NO: 310723 - DNA, 358 bp, Unknown
  Bacterial polypeptide expressing nucleotide sequence isolated from the Sargasso Sea
taaaaaaggtgcaagatgtgaaattagatttccagatgctgcaggtaacccttatttgactttttctgctatgttaatggcaggcttagatggaattaaaaataaaatccatccaggagagtcatttgataaggatttatataccttacctgaagaagaaattaagaatattccaactgtatgtggatcacttagagaagcaatggaaagtttagatactgatagagaatttctaaaacaaggaaatgtttttactgacgatcaaattgatgcttatatcgctttgaaatttgaggagatttataatttagaacatactcctcatccgatagagtttcagatgtattatagcagctaa

SEQ ID NO: 310724 - DNA, 715 bp, Unknown
  Bacterial polypeptide expressing nucleotide sequence isolated from the Sargasso Sea
tgcagcagaagctgttgtttctgacgagtggtggtttggttttgagcaagaatatttctttactaataaagatggctcaccattaggctgggaagaaggcgaaccaagaccacaaggagactactattgtggagttggagctgataatgtgtcaggaagagaagtgtctgaagctcacttagacgcttgcttagcagctggcataagcctaactggtaccaatgcagaagtggcgttagggcaatgggaatatcaatgctttggtaaaggtataaaagctgctgatgatttatgggtaagtagatatttactatataaggttgccgaagagtatggtgttggcgtaaatattcatcctaagccaaaaaaaggcgattggaatggatcaggaatgcataccaatttctccaatgaagcaatgagaaccgctggttctgaagaacttttctcatctatgtgtgacaaacttggagaagttcatgcagaaggaattgaagcatatggatcagataacgatcaaagattaacaggactgcatgaaacacaaaaaattactgagttctcatatggggttagtgatcgtggtgcaagtataagaatacctgtttatacagttgagcatgattggaatggatacttagaagacagacgaccagcttctaatgcagatccttacaaaattattgcacacattgttggcactttaacaaagtaa

SEQ ID NO: 310725 - DNA, 286 bp, Unknown
  Bacterial polypeptide expressing nucleotide sequence isolated from the Sargasso Sea
aatgagtgctagtaacgttttaaaatttataaaagataaagaagctgaatttgtagatttaagatttacagatccaagaggaaaacttcaacatttaacgatggatacaaccgctgtagatgagggtatgttaaatgagggtgttttttttgatggatcttctatagctggatggaaagcaataaatgaatctgatatgattttaaaaccagatttatcaagattttttttagatccttttacttcacataacacagtagtaattttttgtgatatattagatgca

SEQ ID NO: 310726 - DNA, 123 bp, Unknown
  Bacterial polypeptide expressing nucleotide sequence isolated from the Sargasso Sea
aacagcaacatttatgcctaaacctgacgcaggtgataatggttctggaatgcatacccatcaatcaatttggaaaggtgatacaccagtattttctggagatgcttattctggtttgtcgga

SEQ ID NO: 310727 - DNA, 705 bp, Unknown
  Bacterial polypeptide expressing nucleotide sequence isolated from the Sargasso Sea
tatgaaatataactgcaaaacagcaaaagaacttttaaaaaaaattaaaaatgaagatattaaaatggttgatcttcgttttacagatttacctggttcaactcatcatatctcaataccaattaaatatttaaaagaagatttgtttaaagatggtgttggttttgatggatcttcagtaagaggatttcaatcaattgaaaatagtgatatgactatggtaccagatgtcactactggatatatagatcctttttattctgagaaaaccattgcattctattgcaatattgttaacccaataacttatgagagctatcctaaagatcctagatatatagctcaaaaagctgaacaatttttaaaatcttcaggactaggtgacaccgcatactttgggccagaagctgaattttttgtatttaatgatgtaaagtatgactccggttcaaattttgcttttcatgaagtagattcaattgagggtgcatggaatactggtagagatgaaaatccaaatttaggtcataaacctagacataaaggaggatattttccattgcctccagcagatagtttacaagatgtgagaactgaaatggttttaaccatggaagaaataggggttaatgtagaagcatctcaccatgaagtagcaactggaggacaatgtgaaattgatttagagttttctccactcctatc

SEQ ID NO: 310728 - DNA, 805 bp, Unknown
  Bacterial polypeptide expressing nucleotide sequence isolated from the Sargasso Sea
tatgaaaaaattagaatatatatggctggatggatttcagccagaaccaagcctaagaagtaaggttaaagttacagacgaaagcccccccgattggtctttcgatggatcatcaacccaacaagctgatggctcaagctctgactgtattattaggcccgtaaacgaatatgttggaccgagaaattctgacagcttggtcatgtgcgaagtcttgtcgccagataggtctgcacacccatcaaacacaagaagcgcttgtgttgatattcttacagatgattggtggtttggttttgaacaagaatatttcttcacaaaccctgaagacggaacaatacttggttgggaagacggaacgccaagaccacagggggactattattgtggcgtagggtctggcaatgtccaagcacgcgaagtttcggaagcacatatggacgcttgtcttgaggcaggcattatgatcaccgggactaacgcagaagtagcgcttggccagtgggaatatcaatgtttcggtaagggccttaaggcagcagatgatttatgggtgagcagataccttcttcatttgattgcagaggagtacggagtgtctgtaaacattcatcccaagcctcaagagggcgactggaatggttcgggaatgcacactaatttttcgaatgaacaaatgagaagcgcgggctcggaagagctatttaattccatgtgtgaaaaactgggcgaggttcatgcagaagggattgccaattacggctcagacaatgaaaagaggctgactgggaatcatgaaactcaa

SEQ ID NO: 310729 - DNA, 293 bp, Unknown
  Bacterial polypeptide expressing nucleotide sequence isolated from the Sargasso Sea
aatgagtgctaaagatgttttaaaatttatcaaagataaggaagctgaattcgttgatttaagattcactgacccaagaggtaaacttcaacatttgactatggatgcaactgctgtagatgatggtatgttgactgatggtgtattttttgatggatcatcaatagctggatggaaagctattaatgagtctgatatgattttaaaaccagacttaacaagattttttttagatccatttacatctcataacactgtagttctattttgtgatattttagatgcaataaaga

SEQ ID NO: 310730 - DNA, 445 bp, Unknown
  Bacterial polypeptide expressing nucleotide sequence isolated from the Sargasso Sea
tctggttccgggcttcgaagcaccggtgatgctggcctactcggctcgcaaccgctccgcctcgatccgtatcccgtacgttgccagcccgaaagcccgccgcatcgaagcgcgcttcccggacccggctgccaacccgtacctggccttcgctgctctgctgatggccggtatcgacggcatccagaacaagatccacccgggcgatgcggccgacaagaacctgtacgacctgccaccagaagaaggcaagctgatcccgcaagtctgcggcagcctgaaagaagccctggaagagctggacaagggccgcgcgttcctgaccaagggcggcgtgttctccgacgacttcatcgatgcctacatcgagctgaaatccgaagaagaaatcaaggtacgtaccttcgtacacccgctggaatacgacctgtactacagcgtctaa

SEQ ID NO: 310731 - DNA, 744 bp, Unknown
  Bacterial polypeptide expressing nucleotide sequence isolated from the Sargasso Sea
aaatacgggccttgaacctgagttctcattgtttaaacgggatgagaagggcggcttacaaacagttgacgacactgacgtgcttgataagccttgttatgactataaaggcctgtcacgttcacgtgagttccttgaaacgttggttgagtcgctacaaaaggttgattttgatgtttatcagatcgatcacgaagatgcgaatggccagtttgagattaactatacctacggtgatgcactggaatctgctgaccgcttcacatttgtgcgtatggcggcgggagagattgctaacgatcttggaatgatctgctcatttatgcctaaacctgcatccgatcgtacgggtaacggtatgcatttccatctgtcgattaccgacgatgccggtaaaaacctgttcaacgatgatagcgatgtaaacggtatgggcttatctaagatggcttaccattttactgccggtctgcttcatcatgctaaagcattgtgcgcaatttcagcgccgacagtgaactcctataaacgtttagttgttggcggttccgcgtccggtgctacttgggcgcctgcctatattgcatacggtgataataaccgttcagccatggtgcgtatcccttatggccgtcttgagttccgtcttcctgactccggttgtaacccttacttagtgcatgctgcattgattgcggcgggtttagatggcattgaacgggaacttgatccaggtgaaccgaa

SEQ ID NO: 310732 - DNA, 376 bp, Unknown
  Bacterial polypeptide expressing nucleotide sequence isolated from the Sargasso Sea
tatgagctcaagtgaagttttaaaactgattaaagataaagaaatagaatatgtagatctaagatttacagacccaagaggaaagcttcaacacctgaccatggacacaacagtcgttgataacactatgttgaatgaaggtgttttctttgatggatcatcaattgcaggttggaaagcaataaatgaatccgatatgattttaaaacctgatttaagtagaaaagttattgatccttttacttcacataatactctagttttattttgtgacattttagatgctgttaaaaaagatccatacgaaagagatccaagaggaatagcaaaaaaagctgaagcttatttaaaaaaaacaggcataggagataaagct

SEQ ID NO: 310733 - DNA, 219 bp, Unknown
  Bacterial polypeptide expressing nucleotide sequence isolated from the Sargasso Sea
aatgagcgctgcaaacgttttaaaatttataaaagaaaaagatgctgaatttgtagatctaagatttactgatccaagaggaaaacttcaacatttgacaatggatgcttcaatagttgatgaagacatgttgaatcaaggtgtcttttttgatggttcatcaattgcagggtggaaagcgattaatgaatcagacatgatttttaaacctgatacagc

SEQ ID NO: 310734 - DNA, 831 bp, Unknown
  Bacterial polypeptide expressing nucleotide sequence isolated from the Sargasso Sea
catgaaggtgctagaatatatatggctagatggctatcaaccagagccgtcacttcgcagtaaaataaaagtaacaaaagatgagagacccccagattggtcgttcgatggctcttcaactcaacaggcggaaggtgggagctccgattgtttattattgccagtccaaacatatgatggaccattatttgcagatagtctagttatgtgtgaagttcaaaccggtgaacataagacacatgtgtcaaatatgagggcagcagcagcaaaaatagtaactgatgagtggtggtttggatttgaacaagaatatttttttactgatgaaaaaggagaacccctaggatgggaaaatggtacccctagaccacaaggagattattattgtggtgtaggtgcttcaaatgttgaaggtagagaaatctccgaattacatttagaggcttgtcttgaagctgggattgagttaactggaacaaatgctgaagttgctcttggtcagtgggaatatcaatgttttgggaaaggcattaaagcgggtgatgatttatgggttagtagatacttattatataaaattgcagaagattttggggtaggcgtaaatatccatcccaaacctaaaacaggtgattggaatggatcaggaatgcacacaaatttttctaatgatgaaatgcgaactaatggtagtgaaagcctatatacgtcattgtgtgaaaaattaggtgaagtgcatgatgatgcgattatatcttatggctcagataatgacatgcgtcttactgggcttcatgaaactcaaagcattgataaattttcatatggtat

SEQ ID NO: 310735 - DNA, 397 bp, Unknown
  Bacterial polypeptide expressing nucleotide sequence isolated from the Sargasso Sea
atgtcagacgttagctcagttctagaaatgattaaagagaacgatatacggttcgttgaccttcggttcaccgacccgcgaggaaaatggcaacacttaacccaggcagtatcaacaattgacgaggactcattaatagaaggatttatgtttgatggttcatccatagccggatggaaagcgataaacgagtcagatatgtgtcttaaacccgatctttctacagcaacaatagatccgtttttcgcgcaagctactttggtgcttgtctgcgatatttcggaacccaccaccggcgccgcttacaacagagatcctagatcgacagctaaagccgccatcgaatatatggctagtcaaggcattggagatacggcatttttggcccggaagcaga

SEQ ID NO: 310736 - DNA, 470 bp, Unknown
  Bacterial polypeptide expressing nucleotide sequence isolated from the Sargasso Sea
ggagtatcaatgttttggtaagggccttaaagcagctgatgatttgtgggtaagtagatatttacttcatctaatcgcagaagagtatggcgtttctgtaaatattcatccaaaaccgcaacaaggggattggaatggttctggaatgcacaccaacttttctaatgagcaaatgagaagcgcaggctcagaagagttgatgacttctatgtgtgacaaactgggagaggttcatgcagaagggatatcaaattatggttcggataatgatatgcgattgactggaaatcatgagactcaaagtatcgataccttctcttacggagtaagcgatagaggagcgagcatcagaatccctatctatacagttgagaatgactggaatggttatctagaggacagaagacctgcttcaaatgcagatccatacaaaatcatttcgcacattgttggtacgctgacaaaataaa

SEQ ID NO: 310737 - DNA, 526 bp, Unknown
  Bacterial polypeptide expressing nucleotide sequence isolated from the Sargasso Sea
atgacggctgcaaaggatatattaaaacaatttcaaaatggtgaggtcaaatatctggacttaaggtttactgacccaaaaggtaaacttcagcacctcaccttagatggctccgttgttaacgatgaactttttgcagacggtgcttttttcgacggctcatcaatatcgggctggaaagccattaatgagtccgacatggttttaatgcctgatccctcgacaacgataatagatccatttacggcccaacctacaatgattgtattttgtgacatccttgatgcacttacaaaagaaacttatgagagagaccctagaggaattgcaagaagagctgaggaataccttaagacgagcggtattggcgacacgatttacatgggtcctgaagctgaattttttgtgtttgatgatgttaaattccaagtagatatgaataaatcgatgtttgaagttgacagtgtggaagggccgtataactcaggtcgttcatatgaaagcaataatttagggcaccgcccag

SEQ ID NO: 310738 - DNA, 445 bp, Unknown
  Bacterial polypeptide expressing nucleotide sequence isolated from the Sargasso Sea
tatgggtactgcgaacgaagtactaaagaaatttaaaaatggtgaagtcaagtatctcgatatgagatttaccgatccaaaaggtaagcttcaacatttgacaatggatggtacagcagtagacgatgatctcctaaacagcggagtgttctttgatggatcctctatttcgggctggaaggctattaatgagtccgacatggtacttaagcctgatctgtccacaacagtgatggatccttttactgctcaaccaactttaattgttttttgcgatgttctcgatgcagtttcaaaagaaccatatgaaagagatccaagaggaactgcaaggaaagcagaagagtatgtcagagcaagtggaattggcgatactatatatatgggcccggaggcagagttttttatatttgatgatgtaaaatttcaagttgatatgaataaa

SEQ ID NO: 310739 - DNA, 411 bp, Unknown
  Bacterial polypeptide expressing nucleotide sequence isolated from the Sargasso Sea
aatgagagcagaaaacgttttaaaatttattaaagaaaaagatgcagagttcgtagatctaagatttactgatccaagaggaaaacttcaacatttaactatggatgcatcaatagtggatgctgacatgcttaatgaaggagtgttttttgatggctcatctattgctggatggaaagcaattaacgaatctgacatgattttaaaacctgatactgcaagaatgttcatggatcctttcacatctcataatactgtagttttgttctgtgatattttagatgcaatcaaaaaagatccttacgaaagagatccaagaggagttgcgaaaaaagcagaggaatatttaaaagcttcaggtattggtgataaagcgttttttggacctgagccagaattttttgttttcga

SEQ ID NO: 310740 - DNA, 920 bp, Unknown
  Bacterial polypeptide expressing nucleotide sequence isolated from the Sargasso Sea
caggatttgcccatttcttgatatgacaccttcttatcctgatatgttttgtctacctgatcctgaagctgttattcaattaccttggaaaccagaagtggcatgggtgccaggaaatttaagtatgaatgacaagttggttgatcaagcaccaagggtaatacttagtaagttaattgataaagctaaaacttctggatatgtaatgatgggtggggttgaacctgaatttatgttgatctcaaaagatggtcaaagcatatctgatagtaaagatatagcaggcaagccttgctatgatcaacaagctttaatgagaagatatgacgttatatctgaaatttgtgatagcatgattaatttgggttggggaacctatcaaaatgatcatgaggatgcaaatggccaatttgaaatgaattgggattattcagacctaatgactacagcagataggcaagctttttttaagtttatggtaaaatctattgctgaaaagcatgaattaagagctacttttatgcctaaaccatttagccatttaactgggaatggatgtcatatgcatatttcattatggaatactaataaatccaaaaatttatttcatgatgataaaggagaattaggactgtcctctttagggtataattttttaggaggtttaatacagaatgctattggaatgtgtgcaattactaatccaactgtaaatagttataaaagattaaatgctccagttactaactcaggcgcaacttggtctcctaataccgttacttatggtggaaataataggacccatatgattagaattcctggtccaggtagaattgaatttcgattagctgatggtgctgcaaatccatatttaatggctgccgctattcttgcttcagggttagatggtattgaaaata

SEQ ID NO: 310741 - DNA, 424 bp, Unknown
  Bacterial polypeptide expressing nucleotide sequence isolated from the Sargasso Sea
catccgcggctggaaggcgatcaacgagtccgacatggcgatggtgcctgacgccagcactgcctgggtagatccgttctatggcgaaaaaacactcagcctgatctgctcaatccaggagcctcgtagcggccagccctatgagcgctgcccccgagccctggctcaaaaggccattgaccatttggccagcaccgggcttgccgacaccgccttctttggaccggagccagagttcttcatctttgatgacgttcgcttcaattccggcaacggcagcagcttctacagctgtgattccgtcgaggccccctggaacagcgcgcgccaagaagaaggcgggaaccttgcctacaagatccagttaaaggagggctatttccccgtcgcccccaacgacaccatgcaggacatgcgcagcgaa

SEQ ID NO: 310742 - DNA, 544 bp, Unknown
  Bacterial polypeptide expressing nucleotide sequence isolated from the Sargasso Sea
aatcggtcgttatttttgtggaggagtgatggaacatgcaaaaggattaactgcaattacaaatcctacaacaaactcatatcatagactagttccaggttatgaagcaccagtttacatcgcatggagttcaagtaatcgttctgcaacaattagaattccaggtcattttaaaggagaaaaatatgcatacatgaaaagaatggaatatcgtgttccagacccagcatcaaacccatatcttgtattttcagcagtattagctgcaggattagatggagtaaaaaagaaaatagaacctggcgacccagttaaagaagacatctacaaaatgactaaatcagaaagaaagaaacacggaattgatactttgcctgcaaaccttggaagagcattggatgaattagaaagtgacagaaaatatctaaccccaattttctcaaatgaagttttggataaaattattgacttagagagaagagaccacagagaaattgcgattagaccacacccacatgagttttatctttactttgacgtttga

SEQ ID NO: 310743 - DNA, 377 bp, Unknown
  Bacterial polypeptide expressing nucleotide sequence isolated from the Sargasso Sea
attagatccgaaacctgtaaaaggcgactggaatggtgctggaatgcatacaaacttttctacaaagcagatgagagatgatggcggatatgaagccattattgctggatgtgaagccttaggaaaaaatgctgaacttcatgttaaaaattatggttcgggaatagaagaccgcttaacaggtgatcatgaaactcagaagtttgacaccttttcttatggtgttagtgatagaggagcttcaatcagaataccttggcaggtagaggttgaaaaaaaaggttatttagaagacagaagaccaaacgcaaatgctgacccttatgttatagctatgttgatgatcgatactgtttgttctgcagcttctagctaga

SEQ ID NO: 310744 - DNA, 382 bp, Unknown
  Bacterial polypeptide expressing nucleotide sequence isolated from the Sargasso Sea
aatgagttctagcaacgttttaaaatttataaaagataacaaaattgaatatgtagatcttagatttactgatcccagaggcaagcttcaacatttaacaatggactgtacagtggttgacaaagatatgctagaagatggagtttttttcgatggatcatcaatagccggatggaaagcaattaatgagtctgatatgatactaaaaccagacttaagtagaacagtagtagatccatttacttcacataatacgttaattcttttttgtgacatattagatgcaattaaaaaaactccctatgaaagagatccaagaggtatcgcaaaaaaagcagaggcatatttaaaatcaacaggaattggtgataaagcttttttt

SEQ ID NO: 310745 - DNA, 724 bp, Unknown
  Bacterial polypeptide expressing nucleotide sequence isolated from the Sargasso Sea
aggagcaaggtcaaggttattgacgatgaaattccaggaaatagcggatctgatctgccagactggtcttttgatggctcatcaacgcagcaagctgaaggtggtgactctgattgtatacttagacctgtaacaacttaccctggcccattacattcagatagtttagtgatgtgtgaagtaatgtcaccagataagtctccacatccttctaatacaagaaatgcttgtattgatctcctctcagatgagtggtggtttggtttcgagcaagagtacttcttcaccaacccagaggacggaacaattctaggttgggaagacggaacaccaagacctcaaggagattattattgtggtgttggtgctggcgatgtttatggcagagagatttctcaggcacatatggatgcctgtatagatgccggcataaaaataactggaaccaatgcagaagtcgcactaggacaatgggaataccaatgttttggaaagggactaaaagcagcagatgatctttggatgagtagatatcttcttcatcttgtagcagaagagtttggcgttgcagttaatacccatccaaaaccccaagaaggtgattggaatgggtctggaatgcataccaatttctcaaatgatgaaatgagaaactctggctcggaagagcttatgaactcattgtgtgaaaagcttggagcggttcatgaggaaggtatcagca

SEQ ID NO: 310746 - DNA, 304 bp, Unknown
  Bacterial polypeptide expressing nucleotide sequence isolated from the Sargasso Sea
tatgagcgcaagcaaagttctaaaaatgatgaaagacaagcaaattgagtttgtcgatttaagatttacagacccaagaggtaaattacagcacttaactatggatgcatcggtagttgatggggacatgttaacagatggtgtattttttgatggatcgtctattgctggatggaaggcaataaatgagtctgacatgatattaaaaccagatttaaacagacaaatagttgatccatttacatctcataatactcttgttttattttgcgatattttagatgcaattaaaagaaatccttat

SEQ ID NO: 310747 - DNA, 766 bp, Unknown
  Bacterial polypeptide expressing nucleotide sequence isolated from the Sargasso Sea
gtgaggtccaaactaggagagcacgaagtacatccatccaatacacgatctgcagcagcgagcgtggtcacagatgagtggtggtttggatttgagcaggagtattttttcaccgataaaaatggcgaacctttgggctgggaagacggaaccccaaggccgcaaggcgattattattgcggtgtgggtgcatctaatgtacagggtagagaaatttcagaagtacaccttgaagcgtgtttagcagcaggcattgaaataactggaaccaacgcagaggttgcacttggacagtgggaataccaatgttttggtaaagggattaaagctggagacgacctatgggttagccgatatctgctgtataaaattgctgaagattttggcgttggcgttaatatccatcccaagccgaaaaccggcgattggaacggttcaggtatgcatgcaaatttttcaaatgaggaaatgcgaaccaatggatcagaagagttgtacacttcactttgtgataaactaggtgaagttcacagcgacgcaattgcttcatatggttcagataacgatatgagactcaccggactccatgaaactcaaagcattgataaattttcttacggtgttagtgatcgaggcgctagcataagaataccaattgctacagttgaaaatagttggaacggatatctggaagatagaaggccagcttctaacgcagatccgtacagtattatgagtcatcttgtaggtacgcttactaagtaat

SEQ ID NO: 310748 - DNA, 376 bp, Unknown
  Bacterial polypeptide expressing nucleotide sequence isolated from the Sargasso Sea
gttgtgtgtaaatatacatccaaaacctaagacaggcgactggaatggttcaggaatgcatactaacttttcaaatgaagcaatgcgaactggtggtagcgaagaattgtattcatcaatttgtgataaattaggtgcggtgcatgaagagggaattgcctcatatggttcagataatgatatgagacttacgggcttgcatgaaacacaaagcatagagaaattctcatacggtgtaagtgatagaggtgcaagtataaggataccggttgctacagttgaaaatgattggaatggatatctcgaagacagaagacctgcttcaaatgcagatccatacaaaatactatctcacatagtaggaactcttacataa

SEQ ID NO: 310749 - DNA, 253 bp, Unknown
  Bacterial polypeptide expressing nucleotide sequence isolated from the Sargasso Sea
atgagtgccagttcagttaagaagattataaaagataaagagatcgaatacgtagacctaaggttcacagatccaagaggaaaacttcaacatgttactatggatgcaacaatagttgatgaagacatgttgaacgagggagttttttttgatggttcatctattgctggatggaaggcgattaatgagtcagacatgattttaaaaccaagatttatcaagaacggtagtagatccatttacatcgcataac

SEQ ID NO: 310750 - DNA, 356 bp, Unknown
  Bacterial polypeptide expressing nucleotide sequence isolated from the Sargasso Sea
tatgagctctaagaacgtattgaaaataatgaaggataaagaaatcgagtatgttgatttaagatttactgatccaaaaggaaaattacaacatctgacaatggatgcgactgcggtcgatgaaggagtactaaatgatggtgtattttttgatggctcttctattgctggatggaaagcaattaatgagtcagatatgatattaaaacctgatcttaacagaaaagttatagatccttttacttcgcataatactttagttctcttttgtgatattttagatgcagtaaacaaaaatccttatgaaagagatcctagaggaatagcaaaaaaagcagaagtatatttaaaaaaaa

SEQ ID NO: 310751 - DNA, 653 bp, Unknown
  Bacterial polypeptide expressing nucleotide sequence isolated from the Sargasso Sea
tccgcaaactggagaacctcttggctgggaagatggaacaccaagagagcaaggcgaatattattgtggagtcggagcaggaaatgttgttgggagagagatctcagatgcgcatttagaagcttgtttagatcttggtataaccttgacgggaacaaatgcagaggttgctcttggccaatgggaatatcaatgttttggaaaaggcattaaagctgctgatgatctctgggtatcaagatatcttctttataagattgctgaagagtatggtgttggtgtaaatattcatccaaaacctaaaacaggagattggaacggctctggaatgcattgtaatttctcaaatgaggcaatgagaaccgctggttctgaagaacttttctcttcaatgtgtgataagttaggcgaagtccacgaagaaggtattgcttcttatggctctgataatgacatgagacttactggtctgcatgaaacacaaagcattgataagttctcttatggtgtaagtgatcgtggtgcaagtataagaatcccagtctatacagttgagcacgactggaatggatatcttgaagatagaagaccagcatcgaatgctgatccttataagatattagctcatatagtaggaactcttactaaataaa

SEQ ID NO: 310752 - DNA, 458 bp, Unknown
  Bacterial polypeptide expressing nucleotide sequence isolated from the Sargasso Sea
aacgattggttcctggattgaagctccagtgaatattgcttattcagctgctaatagaacagcttctgttagaatacttaataactatacagctagtcctaaagctaaaagaattgagtttagatgtccggatccttcttcaaatccttatctagcattttctgcaatcttaatggcagggttagatggtgttaaaaacaagattaatccaggtaaacctacggacataaatatttatgaagctccagctagtgtcttagcaaaaattccttcaacacctggttctcttgcggaatctcttaatgctttagagaaagatcataaatatttgcttaacggtgatgtatttactaaagataacattgaaacttatatttcatacaaaagagataatgaagttagcccaatggatttaagacctcatccacatgaatttaatctttattatgatgtctaaa

SEQ ID NO: 310753 - DNA, 334 bp, Unknown
  Bacterial polypeptide expressing nucleotide sequence isolated from the Sargasso Sea
tcgtttccctgatgcagctggaaatccttacttattattttctgcattattaatggctggtcttgatggaattaagaataaaatcgatccaggtaaatctttagataaagatttgtatgctttaagtgagtctgaagttaaaaaaattccaacagtttgcggttctttaagagaggctatggagagcttagacaaagatagaaaatttttaactcaaggtaatgttttcactgacgatcaaatagatgcttacatcgctcttaagtatgaggaaatttacaattttgagcacactccacatccgatggagtttcaaatgtactacagctgttaa

SEQ ID NO: 310754 - DNA, 391 bp, Unknown
  Bacterial polypeptide expressing nucleotide sequence isolated from the Sargasso Sea
atctgcttcatgtaggataccaattacactaagtaaaaaaggtgcaagatgtgaaataagatttcctgatgctgcaggaaacccctatttaactttttcggcaatgttaatggctggactggatggtattaaaaataaaattaatccaggtaaacctctcgatgaagatttgtatgctttgccagaagataaagtaaaaaacattccaacagtttgtgggtctttaagagaagctatggaaagtttagatagagatagaggttttttaaaacaaggtggtgtattttctgatgaccaaatcgatgcgtttattgcattaaaatttgaggaaatttacaaccttgaacacactccgcaccctatggagtttgaaatgtattacagctcttaa

SEQ ID NO: 310755 - DNA, 348 bp, Unknown
  Bacterial polypeptide expressing nucleotide sequence isolated from the Sargasso Sea
aatgagttcaaaaaatatcttaaagcttatgaaggataagcaagtagaatacgttgatttaaggtttactgacccaaaaggtaaactccagcatctaacaatggatgcaactgttgttgacgaagatatgttaactaatggagtattttttgatgggtcttctatcgcaggttggaaggcaattaatgagtctgatatgattttgaaacctgatttaaatagacccataatagatccatttaattctcaccctactttaaatattttttgcgatatattagatgcagtcaaaaaagatccttatgaaagagatcctagaggaactgcaaaaaaagctgaggaatattt

SEQ ID NO: 310756 - DNA, 448 bp, Unknown
  Bacterial polypeptide expressing nucleotide sequence isolated from the Sargasso Sea
aggcattaaagcagctgatgatttatgggtaagtcgatacttacttatgaaaactgctgaggaacacggcgttggagtgaactttcacccaaaacccaaaactggcgattggaacggttctggcatgcacactaatttttctaatgagcaaatgagatcttctggatcagaagaattatttacatcaatgtgtgacaaacttggaaaagttcatgaagaaggtattgcagcttatggatctgataataatatgcggcttactggacttcacgagacacaaagtatcgataaattttcttatggtgtaagtgatagaggtgctagtatacgtattccagtttatactgttgaacataattggaatgggtatcttgaagatagaaggccagcatcgaatgctgatccatacaaaattgtatcacatatagttgggactttgactaaataa

SEQ ID NO: 310757 - DNA, 395 bp, Unknown
  Bacterial polypeptide expressing nucleotide sequence isolated from the Sargasso Sea
agctgaagagtatggtgttggtgtaaatattcatccaaaacctaaaactggggattggaacggatctggaatgcacacaaacttttccaatgaggctatgcgaactggtggttcagaggatttatttaaatcaatgtgtgaaaaactaggcgaagtccatgaggacggaattgctgcgtatggatcagataatgatatgagactaactggtcttcacgaaactcaaagtattgagaaattctcatacggggtcagtgacagaggagcaagtatacgtatacctgtttacacagttgaacataattggaatggataccttgaggacagaagacctgcctcgaatgccgatccatacaaaatactttctcatatcgttggcacgttaacgaaataag

SEQ ID NO: 310758 - DNA, 294 bp, Unknown
  Bacterial polypeptide expressing nucleotide sequence isolated from the Sargasso Sea
tatgaatgcaaaagatgtattaaaactgatgaaggaaaaacaggttgaatttgtagacctaaggtttacagatccgagaggaaaacttcagcatctaacaatggactctacagtagttgacgacgaaatgttaaacaatggtgtattttttgatggttcgtcaatagctggttggaaggcgattaatgaatctgacatgattttgaaacctgatttggatcgaccaataattgatccttttaactctcatacaacattaaacatattttgtgacattcttgatgcagtaaaaaa

SEQ ID NO: 310759 - DNA, 727 bp, Unknown
  Bacterial polypeptide expressing nucleotide sequence isolated from the Sargasso Sea
atgaaatataactgcaaaactccaaaagagttattaaaaaaaattaaaaatgaagaaattaaaatggttgatcttcgttttacagacatgcctggatcgacacatcatatttcaataccagttaagtacttaactgaagatttatttaaagatggtgttggttttgacggctcatctgtaaggggttttcaatcaatagagaatagcgatatggcaatggtgcctgatgtaactactggatatattgatcctttttactcagaaaaaacaattgcatttacttgtgatgttgttgatccaattacttatgaaagttatgttagagatcctagatatattgcaaaaaaagcagaaaaatatcttagatcttctggtatgggtgatactgcatattttggtcctgaagctgaattttttgtatttaatgatgttaagtatgattcaggttctaactttgcttttcatgaagtagactctgttgaaggagcatggaacacaggcaaagatgaaaacccaaatctaggtcataagccaagacataaaggtggttacttcccattacctccatctgatagtttacaagatgtaagaactgaaatggttttaactatggaagatattggtattaatgttgaagcttctcaccatgaagttgcaactggtggacaatgtgaaattgatttggaattctcaccacttttgtcaatggctgatgatctactcagat

SEQ ID NO: 310760 - DNA, 506 bp, Unknown
  Bacterial polypeptide expressing nucleotide sequence isolated from the Sargasso Sea
cttaaaacatgctaaggctatcaatgctttttctaatgctactacaaacagctataaaagactaatacctggttttgaagcacctgtaattctagcgtactcggcaaggaatagatctgcatcatgtagaattccaatcataaacaatcctaaagccgcacgaatggaaattagattccctgatgctgctggtaatccttacttaacattcgcctcaatgttaatggcaggaattgatgggattaagaataaaattgacccaggaaaatctttcgataaagatttgtatacactatctgaaagtgaagtgaaaaaattacctacagtatgtggttcattaagagaggcaatgcaaaatctcgataaagatagaaagtttttaactcaaggtggtgtttttacagatgatcaaattgatgcttatattgatttaaaatttcaagaaatttataagtttgagcatactccacatcctattgagtttgaaatgtactatagtgggtaat

SEQ ID NO: 310761 - DNA, 426 bp, Unknown
  Bacterial polypeptide expressing nucleotide sequence isolated from the Sargasso Sea
aatgagtgcacaaaacgttttaaaatttattaaagaaaaagaagctgaattcgtagatttaagatttactgatccaagaggaaagcttcaacatttaacaatggactcaactgttgttgacgcagatatgcttaatgaaggtgtattttttgacggatcatctatcgctggttggaaagcaattaatgagtcagacatgattttaaaaccagatacttctcgaatgtttatggatccttttacttcccacaatactgtagttttgttttgtgatattttagatgcaattaaaaaagacccttatgaaagagacccaaggggtgtggctaaaaaagccgaagaatatttaaaagcttcaggtattggtgataaggcattctttggtccagaaccaaaattttttgtttttgatgatgtaagaattaa

SEQ ID NO: 310762 - DNA, 785 bp, Unknown
  Bacterial polypeptide expressing nucleotide sequence isolated from the Sargasso Sea
tatgtcttcaataatcagaaatgatgatgctatcgaatatgctttacgtgaagcgcacgataatgacgtgaaatttatacgattatggtttactgatattctaggaacaataaaagggtttgcaataacgattgacgaattggaaaactcactaaatcgtggaatgggcttcgacggatctgctatagaaggatatgcccgcagtgatgaaagagatttatatgctctccctgaccccacaacatttagcatacttccttggaggccaagaaccaacgcagtagctagaatgttttgcgatatagtaactccagaagacaaatattttgatggtgacccaagagaagttctaaggcaaaacttaaagagagctagtgataaaggttttacttattatgtttctcctgaacttgaatatttttattttaaagattctgataatacaaaattactagactcaagtggatattttgaccaagaaaattcagatttaggaacggacctaagaagagaaacggttctcacattagaagaattaggtatccctgttgcctcaagtcatcatgaagcagcaccaagccaacatgaaatagatcttaggcatacagatgcgctaacgatggccgacactgttatgacttataaaacagtagtaaaagaaattgcaatgaaacatggatattttgcttcttttatgccaaaaccattatccaatattaacggtagtggtatgcatacaaatgtatcgctttttaaaggtgatgaaaatatattttacagttctt

SEQ ID NO: 310763 - DNA, 561 bp, Unknown
  Bacterial polypeptide expressing nucleotide sequence isolated from the Sargasso Sea
aagatccagatcttctgtcgaggactgcgaaatattacatcgccgggcttctgaagcatgcaagtgagatgaccctgatcacgaaccagtgggttaactcgtataagcggcttgtccccggctacgaggcgccgatctacaagacttgggcgacggtcagccggtcggatctagtcagggttccggcttacaagccggggaaagagagtgcgatgcgtgtggagtatcgatcgcctgaccctgcctgtaacccttatctggcctttgccgtgatgctggcgagcggtctcgaagggatcgaaaaccgctataagctgcagaaggcgaacgaggcggatgtaagcagaatggctgaggctgaaagcaaaaaggccaaggtcggtgtgctgccgaaagatctgtcgcaggcgatcgaagaagcgcaagggagtaaagtccttcggagtgcgctgggcgatcacgttttcgagaagttcatcgaaaacaagaagatcgagtgggacaactaccgcgctcaagtcacgacctatgagcttgaccagtatctgaaggtgctttagt

SEQ ID NO: 310764 - DNA, 691 bp, Unknown
  Bacterial polypeptide expressing nucleotide sequence isolated from the Sargasso Sea
ttggtggtttgttttgaacaagaatatttcttcacaaaccctgaagacggaacaatacttggttgggaagacggaacgccaagaccacaaggggactattattgtggcgtagggtctggcaatgtccaggcacgcgaagtttcggaagcacatatggacgcttgtcttgaggcaggcattatgatcaccgggactaacgcagaagtagcgcttggccagtgggaatatcaatgtttcggtaagggccttaaggcagcagatgatttatgggtgagtagataccttcttcatttgattgcagaggagtacggagtgtctgtaaacattcaccccaaacctcaagagggcgactggaacggctcgggaatgcacactaatttttcgaatgaacaaatgagaagcgcaggttcagaagaactatttaattccatgtgtgaaaaactcggcgaggttcatgcagaagggatcgccaattacggctcagacaatgaaaagaggctgaccgggaatcatgaaactcaaagcattgacactttttcgtatggcgtcagcgacagaggggcaagcatcagaatacccatctatacagttgaaaacgactggaatggctatttagaggatagaagacccgcttcgaatgcagacccatataaaattatttcgcacattgttggtacgctgacacaataaa

SEQ ID NO: 310765 - DNA, 659 bp, Unknown
  Bacterial polypeptide expressing nucleotide sequence isolated from the Sargasso Sea
tatgaaattaaaaagctcgactccaaaagatttaatgtctgaaattaaagatatggacattaagatggttgatatgcgctttactgatataccaggaacaactcaacattttacaataccaattaaatttttagacgaagatatattttctgacggacttggttttgatggatcttcagtaagaggtttccaagaaattcaagacagtgatatgattgttttgccagatgcaacaacagcctatattgatccatttttttcagaaaaaactttggcattacattgtaatattaaagaccctgtaactttggttgactatagtcgtgacccaagaaatattgctaaaaaagctgaagcctatttgaaatcatctggtatcggtgacacagcattttttggtccagaagcagaattttttgtgtttaataacgttcagtttgactcaggatcaaattttgcatttcatgaagttgattctgttgaaggtacttggaatagtggtgctgatgaaaacccaaacttaggtcataagcctagacataaagaaagttattttcctttaccaccagttgatacacttcaagatgtaagaactgaaatggtaatgacaatgcaagatattggtcttacagttgaagcacatcatcatgaagttgcaa

SEQ ID NO: 310766 - DNA, 298 bp, Unknown
  Bacterial polypeptide expressing nucleotide sequence isolated from the Sargasso Sea
catgtctgcatctaaagtactgagttttatcaaagagaacgacgtaagatttgttgatttacgctttacagataccaaaggtaaagagcaacacgttactattcctgccagccagatcaacgaagattttttcgaagacggcaaaatgtttgacggctcttccattgcaggctggaaaggcattaatgactcagacatgatcctgatgcctcaggcagacaccatgttactggacccgttctctgaagaaaccacaataaacattacctgtgacgtgatcgaaccaagcactatgcaa

SEQ ID NO: 310767 - DNA, 487 bp, Unknown
  Bacterial polypeptide expressing nucleotide sequence isolated from the Sargasso Sea
tactaatcctacaacaaactcataccatagattagttccaggttatgaagcacctttttacattgcgtggagttcaagtaatcgttctgcaactattagaattccaggtcactttaaaggagaaaaatatgcatacatgaaaagaatggaatatcgtgttccagatccagcatcaaacccatatcttgtattttcagcagtattagctgcaggtttggacggaattaaaaagaaaatagaacctggcgatccagttaaagaagatatttacaaaatgacaaaatcagaaagaaagaaacatggaattgacactttgcctgcaaatcttggaagagcattagatgaattggaaagtgatagaaaatatcttaccccaattttctcaaatgaagttttggataagattatagatctagagagaagagaccatagagaaattgcgattagacctcacccacatgagttttatctttactttgatgtttaa

SEQ ID NO: 310768 - DNA, 166 bp, Unknown
  Bacterial polypeptide expressing nucleotide sequence isolated from the Sargasso Sea
atgagtgtcgaggatgtactaaaaatagtaaaagaaaaagaagttaaatttattgactatcgatttactaatacaaatgggaaagaacagcacgtaactgtaacagcaaacgaagatggtattaaaacagattttgctgagggtaaaatgtttgatggatcatcaa

SEQ ID NO: 310769 - DNA, 724 bp, Unknown
  Bacterial polypeptide expressing nucleotide sequence isolated from the Sargasso Sea
tatgaaatcaaaactagaatatatatggcttgacggatactcgcccactcaaagccttagaagtaaaacccaaattagagataacttcggcggaactctagaagagtgcccaatgtggtcgtttgatgggagttctacgcagcaggcggatggaagctcgtcagactgcctactcaagcctgtcgctatcatccctgatccagatcgacaaaatgcttacctggttatgactgaggttctcaacgccgatggaactcctcaccccacaaatggaagagctacgattgacgacgacgatgctgacttctggttcggcttcgagcaggaatatttcttatgggacatcgatacacaattaccaccaggattcccgcaaaacggatttcccggaccccaaggaccttattattgctcagtcggtgcgtcgaatgcttttggcagagattgtgttgacgaacatctagatctctgtctggaagctggtattaatgtcgaaggcataaacggagaagtggcagctggccaatgggaatttcaggtgtttgctaaaggcgcggccgatgcaggagaccaaacatggttagcccgctatctgctagagagaaccggggagaaatatggttatgcaattaactggcaccctaaaccgtttggagccctggactggaatgggtctgggatgcatgcgaacttctctaatggactaatgagagattccgggtga

SEQ ID NO: 310770 - DNA, 376 bp, Unknown
  Bacterial polypeptide expressing nucleotide sequence isolated from the Sargasso Sea
aatgagttcaaaaaatgttttaaaacttattaaagataagcaagtagaattcgttgatttaagatttactgacccaaaaggcaaacttcaacacctcactatggactctactgtagtagacgaggatatgttgaataatggagttttttttgatggatcctctatagccggttggaaagcaataaatgagtctgatatgattttaaaaccagaccttgaaagacctataattgacccatttaactctcacacaaccttaaatattttttgtgatattttagacgctgtcaaaaaagatccttatgaaagagatccaagaggtactgcaaaaaaagctgaggcttatctcaaaaaaactgggatcggtgataaatcg

SEQ ID NO: 310771 - DNA, 287 bp, Unknown
  Bacterial polypeptide expressing nucleotide sequence isolated from the Sargasso Sea
tatgagtgcaagtaaaattaaaaaattaatgagtgacaaagaggttgaatacgtagacctaaggttcactgatccaagaggaaaacttcaacaccttacaatggatagcactgtagtagatgaagacatgctggaaaaaggtgttttctttgatggctcttcaatagctggttggaaagctataaatgagtctgatatgattttaaaacctgatctaaatagacctataatagatcctttcaattctcacacaactttaaatattttttgtgacattatggatgctg

SEQ ID NO: 310772 - DNA, 457 bp, Unknown
  Bacterial polypeptide expressing nucleotide sequence isolated from the Sargasso Sea
tttggaaaggggataaaagctgcagatgacttatgggtaagcagatatttattatacaagatagctgaggattatggagttggggttaatattcaccctaagcctaaaacaggcgattggaatggttctggtatgcatacaaatttttctaatgatgaaatgagaaataatggatcagaaaaattataccattctttatgcgataagcttggtgaggttcataaagatggcatcaatgcctatggttcagataatgagatgagacttaccgggcttcatgaaacgcaaagcattgaccagttttcttatggtgttagtgatcgtggagcaagcattagaatacctatctatactgtagaaaataattggaatggatatttagaagatagacgacctgcatcgaacgcagatccctatcgaatagtaaagcatattgtaggtacattaacaaaatagt

SEQ ID NO: 310773 - DNA, 265 bp, Unknown
  Bacterial polypeptide expressing nucleotide sequence isolated from the Sargasso Sea
atgagtgcagcaaacgttttaaaatttattaaagataaagatgcagaatttgtggatttaaggttcactgatccaagaggaaaattgcaacacttaacaatggatgtttcagtagttgatgaaggtatgttaaacgaaggtgtattttttgacggttcatctattgctggttggaaagcaattaatgagtctgacatgattttaaagcctgatacagcaagaatgttcatggatccttttacgtctcataatactgtagttttgt

SEQ ID NO: 310774 - DNA, 679 bp, Unknown
  Bacterial polypeptide expressing nucleotide sequence isolated from the Sargasso Sea
tggttttgaacaagaatacttctttacgaacaaagatggttcaccactaggttgggaggatggaactcctagaccacaaggtgattattactgtggtgttggatctgataatgtagctggaagagaaatatcagaagctcatttagaggcatgcctagatgctggtcttaccttaacaggtactaatgcagaggttgcattgggacaatgggaataccaatgctttggaaaaggaataaaagctgctgatgatttatgggttagcagataccttctctataaaattgctgaggaatttggtgtaggtgtaaatattcaccctaaacctaagacaggtgattggaatggttctggtatgcataccaacttttcaaatgaagaaatgagatcaaatggctctgaagctcttttctcatctatgtgcgataagcttggcgaagttcatgaagaaggaattgcttcctatggttctgataatgatatgagactaacaggtcttcatgaaacccagaacatcaaacaattctcttatggagtaagtgatagaggagcaagcattcgaattcctatctatacagtcgagcatgattggaacggatatttagaagacagaagacctgcttcaaatgctgatccatacaaaatcttagctcacatagtaggaactttaactaagtaa

SEQ ID NO: 310775 - DNA, 667 bp, Unknown
  Bacterial polypeptide expressing nucleotide sequence isolated from the Sargasso Sea
cgtggtgtgtatgcaacttttatgcctaaaccacttaatggagtccaaggttctgggatgcacacacacctttcgctgtttagccaaggtaaaaatgttttccacgacccatcagggagtctctccgcaacaggtcaatcatttgtagcaggtcttctttatcatgctcgagagataacagccgtaacaaaccaactagttaactcatataaaagaattaatgagggatacgaggctcctcgttatgtttcttgggcacgcaataatagatcatcactagttcgaatccctgttcacaaacaagataagccggattctgcaagaatcgaatacagagcggtggaccctgcttgcaacccctatctagcattttctgtgatgctttcagctggtttaaaaggaattgaaaagaattacgaactgccacccgaagcaacaacaaatctctatgaaatgagtcgggcagaacaaaaagacttaggagttgctagcttgccatcaaatctttctgaagctttagatgaaatggaagcatcagaactagtgcgggaagcactcggagaccatatctttgagtggtttcttcgaaataaaagaacagagtggaatgagtatcaacgtcaagttacaccttttgaaatcgaccagtatcttcctaactggtagt

SEQ ID NO: 310776 - DNA, 561 bp, Unknown
  Bacterial polypeptide expressing nucleotide sequence isolated from the Sargasso Sea
gcagagaaatttcagatgcgcatttagctgcatgccttgatcttggaataacacttacaggaactaatgctgaagttgcattaggccaatgggaatatcagtgttttggaaaaggaataaaagctgcagatgatctctgggtaagtagatatcttctctttaaaatagctgaagaatacggtgttggtgtgaatttacatccaaaaccaaaaactggagattggaatggttcaggcatgcatactaatttctcaaataaagaaatgagatcaagtggatcaaaggagctattttcctcattgtgcgacaagctaggagctgttcatgaagagggaattgcttcatatgggtctgacaatgatatgagacttactggtttgcatgaaacacaaaaaattactgagttttcatatggtgttagtgatagaggtgccagcattagaatacctgtctacacagtagagcatgactggaatggttatctagaggatagaaggccagcatcaaatgctgatccatataaaattattgcacatattgtaggtacgcttacaaagtagc

SEQ ID NO: 310777 - DNA, 562 bp, Unknown
  Bacterial polypeptide expressing nucleotide sequence isolated from the Sargasso Sea
tgggagagagatctcagatgcgcatttagaagcttgtttagatcttggtataaccctaacgggaacaaatgcagaggttgctcttggccaatgggaatatcaatgttttggaaaaggcattaaagctgctgatgatctctgggtatcaagatatcttctttataagattgctgaagagtatggtgttggtgtaaatattcatccaaaacctaaaacaggagattggaatggttcaggaatgcattgtaatttctctaatgaggcaatgagaaccgctggttctgaagaacttttctcttcaatgtgtgacaagttaggcgaagtccacgaagaaggtattgcttcttatggctcggataatgatatgagacttacaggtctgcatgaaacacaaagcatcgataagttctcttatggtgtcagtgatcgtggtgcaagtataagaatcccagtctacacagttgagcatgactggaacggatatcttgaagatagaagaccagcatctaatgctgatccttataagatattagctcatatagtaggaactcttactaaataa

SEQ ID NO: 310778 - DNA, 736 bp, Unknown
  Bacterial polypeptide expressing nucleotide sequence isolated from the Sargasso Sea
ccctctaactttagagcagcggctgctgaagttgttagtgatgaatggtggttcggatttgagcaagaattctttttcactgatcctgaaactggagaaccgcttggatgggaaaacggtgagccaagagctcaaggtgagttttattgtggtgtaggtgctggaaatgttgtaggaagagaaatctcagatcatcatctccaagcatgtcttgatcttggaatcacattaacaggaacaaatgcagaagtagctttaggtcaatgggagtaccaatgctttggaacaggcattaaggctgctgatgatttatggatttctagatatctactttataaaattgctgaggaatatggtgtcggtgtaaacattcatcccaaaccaaaaacaggtgattggaatggttctggtatgcatacaaatttttcaaacgaagagatgcgaagtaaaggttcagaggaacttttctcatcaatgtgtgacaagcttggaaaagttcatgaggagggaattgcagcctatggttcagataatgacatgagattaactggtcttcatgaaactcaaaacattgatcaattctcatatggagtaagtgatagaggcgcgagtataagaattccagtctatacagtagaacatgattggaatggatatttagaagacagacgtcctgcctcaaatgcagatccatataaaattttggctcatatagttggcacattaacaaaatagt

SEQ ID NO: 310779 - DNA, 358 bp, Unknown
  Bacterial polypeptide expressing nucleotide sequence isolated from the Sargasso Sea
aaaaaaggcgctagatgtgaaattagatttccagatgcttctggaaacctttatttaacttttgcctctatgttaatggcaggtttagatggtataaaaaacaaaattgatcctggtgaatcttttgataaagatctctatgctttatccgaagatgaagtaaaaaaagttccaacagtttgtggatcattaagagaggctatggaaaaccttgataaggatcgtgactttttaaaacaaggtgatgtttttactgacgatcaaatagacgcttatatagctttaaaatttgaagaaatacataacttcgaacatactccacatccaatcgaatttgatatgtattatagttgttaaa

SEQ ID NO: 310780 - DNA, 613 bp, Unknown
  Bacterial polypeptide expressing nucleotide sequence isolated from the Sargasso Sea
ccaagaccacaaggggactattattgtggtgtagggtctggcaatgtccaagcacgagaagtttctgaggcacatatggatgcttgtcttgaggcaggcattatgatcaccgggactaacgcagaagtagcgcttggccagtgggaatatcagtgtttcggcaagggtcttaaggcagcagatgatttatgggtcagcagatacctgcttcatttaattgcagaagagtatggcgtgtctgtaaacattcatcccaaacctcaagagggtgactggaacggctcgggaatgcatactaatttttcgaatgaacaaatgagaagcgcaggctcggaggaactatttaattccatgtgtgaaaaactcggtgaggttcatgcagaagggattgccaattacggctcagacaatgaaaagagactgactgggaatcatgaaactcaaagcattgacactttttcgtatggcgtcagcgacagaggggcaagcatcaggatacccatctatacagttgaaaacgactggaatggctatttagaggatagaagacccgcttccaatgcagacccatataaaattatttcgcacattgttggtacgctgacacaataaa

SEQ ID NO: 310781 - DNA, 373 bp, Unknown
  Bacterial polypeptide expressing nucleotide sequence isolated from the Sargasso Sea
atgagttcaagcaatgtattaaaaacaattaaagataaagaaatcgaatacgttgatttaagatttacagaccctagaggtaaacttcaacacgtaactatggatgcgaaaatagttgatggagatatgttaaatgagggtattttttttgatggttcatcaattgctggttggaaagcgataaatgagtcagatatgatattgaaaccagacttaagcagaactgttgttgatccttttacttctcataacactctaaatattttttgtgatattttagatgcgataaaaaaagatccatacgaaagagatccgagaggtacagctaaaaaagctgaagcttatttaaaacaatcaggtatggagataaagc

SEQ ID NO: 310782 - DNA, 289 bp, Unknown
  Bacterial polypeptide expressing nucleotide sequence isolated from the Sargasso Sea
atgctaatggctggtttagacggtataaaaaataaaattgatccaggtaaatctttagataaagatttgtatgctttatcagaaagtgaagttaaaaaagttccgaccgtttgtggatctctaagagaagcaatggaatgtcttgatagagacagggcatttttaaaacaaggaaatgtttttacagacgaccaaattgatgcatatattgcattaaaatttgaagaaatacataattttgaacatactcctcatccaatagaatttgagatgtattacagttgttaat

SEQ ID NO: 310783 - DNA, 200 bp, Unknown
  Bacterial polypeptide expressing nucleotide sequence isolated from the Sargasso Sea
aatgagctcaaaacaagtattgaaactgatgaaagataaacaggtcgaatatgtggacctaagatttactgatccaagaggaaagttacaacacctaacaatggatgcgactatagttgatgaaggaatgttaaatgatggtgttttttttgatggctcatcaatagcaggatggaaagcaatcaacgagtctgacatga

SEQ ID NO: 310784 - DNA, 409 bp, Unknown
  Bacterial polypeptide expressing nucleotide sequence isolated from the Sargasso Sea
tactcagctagaaatagatcagcttcatgccgtatcccaattactttaagtaaaaaaggtgcaagatgtgaaataagatttccagatgcatctgggaatccatatctaacttttgcagctatgttaatggcaggtttagatggaattaaaaataaaattcatccaggtgagtcttttgacaaagatttgtatgaattacctccagaggaagttaaatctattcctactgtttgtggatcattaagagaagcaatggaaaatttagataaagatagagaattcttaactcagggcgatgtatttacagatgatcaaatagatgcttatattgctctcaagtttgaagaaattcataagttcgagcatgcacctcatcctgtagagtttgagatgtattacagtagctaat

SEQ ID NO: 310785 - DNA, 397 bp, Unknown
  Bacterial polypeptide expressing nucleotide sequence isolated from the Sargasso Sea
atgagtgcagcaaacgttttaaaatttattaaagaaaaagatgcagaatttgtggatttaagattcactgatccaagaggaaaacttcaacatttaacaatggatgcttcaatagttgatgaaggtatgttgaatgaaggtgtattttttgacggttcgtctattgctggttggaaagcaattaacgagtctgacatgattttaaaacctgatactgcaagaatgtttatggatccttttacgtctcataatactgtagttttgttttgtgacattctagatgcaattaaaaaagatccctatgaaagagacccaagaggtgttgctaaaaaagctgaagaatatttaaaagcctcaggtattggtgacaaagccttttttggaccaagaacctgaa

SEQ ID NO: 310786 - DNA, 223 bp, Unknown
  Bacterial polypeptide expressing nucleotide sequence isolated from the Sargasso Sea
atgagcgcaaacgatgtattaaaaacaattaaagataaagatatagaatacgtagacttaagatttacagaccctagaggaaaacttcaacatgttacaatggatggtaaaatggttgatgagggaatgctcaatgaaggaattttttttgatggttcgtcaattgctggatggaaagcaatcaacgagtcagatatgattttaaaacccagatttatctaga

SEQ ID NO: 310787 - DNA, 436 bp, Unknown
  Bacterial polypeptide expressing nucleotide sequence isolated from the Sargasso Sea
attgtgggttgcaaggtggttgttatatagaattgctgaagattacaatatttcagcaactcttactcctaaacctgtaaaaggtgattggaatggagcgggcatgcacacaaacttttcaactaaacaaatgagagaagatggtggttatgatgcaattgttgcaggttgtgaagcactaggtaaaaacgctgaatttcatgttcaaaactatggtgctggaatagaggatcgtctaaccggtgaccatgaaacacaaagatttgacactttttcttacggtgtcagtgatagaggtgcatcaatacgtataccatggcaagtagaagttgataaaaaaggctatctagaagatagaagaccaaatgctaacgcagatccatacgttattgcaacagtgatgattgatacggtttgttcagctgcttcagcttaa

SEQ ID NO: 310788 - DNA, 1018 bp, Unknown
  Bacterial polypeptide expressing nucleotide sequence isolated from the Sargasso Sea
agtgcctgatccgtcatcagtcatccagttaccatggaagcctgatgtggcgtgggttgcagccgactgttatatggatggagaaccagttggccaagcacctagaaatgttttaactcgacagatcagggctgcaaaggaaaataaattattaatcaaaactggaatagaggcagagtttttcttaatttcaaaagatggtgataatatttctgacagcttcgatattgctgaaaagccctgctacgaccagcaggcattaatgagacgttatgaagtcatcgctcaaatttgcgattatatgctagatttaggttggaaaccttatcagaatgatcatgaagatgctaatggccagtttgaaatgaactgggaatatgatggtgcaatgcaaactgctgataagcactcgttttttaaattcatggtaaagtcagttgctgaaatgcacgatttgcgagcaacatttatgcctaaaccctttaaaggcttaacaggtaatggttgtcattgtcatatttctgtttgggatttgcatgaaacggaaaacgcatttgcagatgacaaaatggaatttggtttgtcaaaacatggcagggcatttttgggtggcttgatgagacatgctactgctttggcagccataaccaatcccactgttaactcttataaacgcttaaacgcacctagaactacatctggtgccacatgggctccaaacacagttacctggactggaaacaataggacgcatatggttagggttcctgctcccggtcgttttgaattaagattgcccgatggagcaactaatccttatttattgcaagctgtaataattgcagctggtcttaatggtctacaatcaaatgctgacccaggacggcattacgatgttgacatgtatgaagagggtcatttgataaaggatgcaccgatgctgccactcaacctattagatgctctgagagcatacgataatgataaagatttgaaaaactctatgggtaatgatttt

SEQ ID NO: 310789 - DNA, 380 bp, Unknown
  Bacterial polypeptide expressing nucleotide sequence isolated from the Sargasso Sea
cagaatacctgtatctgatagtccgaaaggaaaaagagttgaagtaaggtttcctgacccaactgcaaatccatacttagcatttgctgctatgcttatggcaggaatggatggaataaaaaataaaattcatcctggagatgcaagtgatcaagatctttatgagctttcagataatgaagttgcaaagttgccaacagtttgtggctctttaagagaagctttagaggcagttgatcaagatagagcatttttaactgaagctggcgtttttactgatgatcaaattgacggttacatagatcttaaaatgcaggaggtatatgatttggagcactcacctcatcctgtagaattcaagaactacttcagtgcataga

SEQ ID NO: 310790 - DNA, 565 bp, Unknown
  Bacterial polypeptide expressing nucleotide sequence isolated from the Sargasso Sea
caagcaagagaagtttctgaggcacatatggatgcttgtcttgaggcatgcattatgatcactgggactaatgcagaagtagcgcttggccagtgggaatatcaatgtttcggcaagggccttaaggcagcagatgatttatgggtcagtagatacctacttcatttaattgccgaagagtatggtgtgtctgtaaatattcatcccaaacctcaagagggcgactggaatggctcgggaatgcacactaatttttcgaatgaacaaatgagaagcgcaggctcggaagaactatttaattccatgtgtgaaaaactgggtgaggttcatgcagaagggattgccaattacggttcagacaatgaaaagagactgactgggaatcatgaaactcaaagcattgacactttttcgtatggcgtgagcgacagaggggcaagcatcagaatacccatctatacagttgaaaacgactggaatggctatttagaggatagaagacccgcttccaatgccgacccatataaaattatttcgcacattgttggtacgctgacacaataaa

SEQ ID NO: 310791 - DNA, 629 bp, Unknown
  Bacterial polypeptide expressing nucleotide sequence isolated from the Sargasso Sea
aatggcaacagttaacgacatcttaaaagacattagagataatggggttaagtacttagaccttagatttacagaccccagaggtaaacttcaacatttgaccatggattgctctgttgtagatgaaggtctcttaaatgagggggttttttttgatggatcttcaatagctggctggaaagctattaatgaatctgacatggttcttaaacctgacttatcaaccacagtcatggatccatttacagctcaaccaacaatgatggtgttctgtgacattcttgatgccgtaactaaaaagtcttacgaaagagatccaagatgcactgctagaaaagctgaagagtttgttaatagcagcggaattggtgatactgtttatatgggaccagaggctgaattttttgtctttgatgatgttaaatttcaagttgatatgaataaatcaatgtttgaaattgatagtaatgagggtccttataactctggaaggaattatgagagtgggaatttggctcataggccgggagtaaagggtggttactttccagtaccacctgttgatagtgctcaagacatacgaactgaatttctagaagagttaaaaaacttaggtttgaaaatggaaa

SEQ ID NO: 310792 - DNA, 688 bp, Unknown
  Bacterial polypeptide expressing nucleotide sequence isolated from the Sargasso Sea
tatgaaatcaaaactagaatatatatggcttgacggatactcgcccactcaaagccttaggagcaaaacccaaatcagagataactttggcggaactatagaagagtgtccaatgtggtcgtttgatgggagttctacgcagcaagcggatggaagctcgtcagactgtttgctaaagcctgttgctatcattcctgacccagatcgacaaaatgcctacctagtgatgactgaggttctcaatgcggatggcacacctcaccccacaaatggaagggctacgattgatgacgacgatgcagacttctggtttggcttcgaacaggaatatttcttatgggacatcgatacacaattaccaccaggattcccccagaacggatttcctggacctcagggaccttattattgctcagtcggagcatcgaatgcctttggcagagattgtgtcgacgaacatctagatctctgtctcgaagctggtattaatgtcgaaggcataaatggagaggtggcagcaggccaatgggaatttcaggtgtttgcgaaaggcgcagccgatgcaggagaccaaacatggttagcccgctatctgctcgagaggacgggagagaaatatggttatgcaattaactggcaccccaaaccgttcggagccctagactggaatggatctggaatgcacgcg

SEQ ID NO: 310793 - DNA, 475 bp, Unknown
  Bacterial polypeptide expressing nucleotide sequence isolated from the Sargasso Sea
caatgggagtatcaatgctttggtaaaggcattaaagcaggtgatgatttatgggtaagtcggtatcttttattcaagatcgctgaagaacatggcgttggtgtaaatattcatccaaaaccaaaaacaggtgactggaatggttcaggtatgcacaccaatttctcaaatgaacaaatgcgtactggcggttcagaagagctattttcttctatgtgtgataaattaggtaaggttcatgaagaaggtattgctgcctatggaccagataatgatatgagacttaccggtcttcatgaaactcagagcattgaccaattttcatatggcgtaagtgacagaggggcaagtataagaattcctgtttacaccgttgagcttaattggaatggatatttagaagacagaagaccagcttctaatgcggatccatacaaaatacttgctcatattgttgggacattaaccaagtagt

SEQ ID NO: 310794 - DNA, 720 bp, Unknown
  Bacterial polypeptide expressing nucleotide sequence isolated from the Sargasso Sea
acatcgctgaaaaatttaaagatcacaagccttggtttggaattgagcaagagtatacactgatggatggaaagcaaccggctggatggcctgaagaaggttttcctgaaagacctcagggaccttactattgtagtgtaggtgcagaagatgttgctgctcgttcaatggttgaagatcaccttgatttatgtttagaagcaggattagaggtgtctggaataaatgcagaagtaatgttaggacaatgggagtatcaagtaggaccattacctgctttagaagttggtgatcaattgtgggtagcaagatggctgcttgaaagagttggtgaagaatatggcctaagagtagaactacatcctaaacctataaaaggtgattggaatggttctggagcacatattaactatagtacagaatctatgcgtgctgatggtgggttgaaagtcattgaagaagcttgcgaaaaacttggacaaaatatcgataaacatatagaagtttatggtgatgctaatgaggagcgtttaacaggagaccatgaaacctgtagcatcaaagagtttaagtacggcgtaagtgatagaggagcatcgattagaattcctatgggagtggcaaatgatggtaagggatatttggaagacagaagaccagcttcaaatgttgatccttataaagcctgcgctgctttaatagatacaacttgtagttaaa

SEQ ID NO: 310795 - DNA, 406 bp, Unknown
  Bacterial polypeptide expressing nucleotide sequence isolated from the Sargasso Sea
acttcatcttgtggcagaagaatttggtgtagccgttaacacccatcccaaacctcaagagggtgattggaatggttctggaatgcacactaatttttcaaatgatgagatgagaaactctggctcggaagagcttatgaactcattatgtaaaaagcttggagccgtgcatgaggaaggtattagcaattatggttcagataacgaaaaaagactgaccggaaatcatgaaactcaaagcattgacacattctcttatggagtaagcgatagaggcgcaagcattaggattcctatctatacggttgagaacaactggaatggttatctagaagatagaaggcctgcttcaaatgcagatccatacaaaatcatttcgcacattgttggtacgctgacaaaataa

SEQ ID NO: 310796 - DNA, 871 bp, Unknown
  Bacterial polypeptide expressing nucleotide sequence isolated from the Sargasso Sea
tgggcatttgatggaagttcaacacaacaggctccaggaggttcttctgactgcttattaaagcctgtagctatctatcccgatccagttagaaaaaatggatggattgtaatgaatgaagtattgaattcagatggatctcctcatgaatcaaatggtagagcaactattgatgatgatgatgatgatttttggtttggatttgaacaagaatattttttgtgggatcctgaaacaaatctaccattaggatttccaaaagaccaaaccccacaaggtcaattctattgttctgttggaggtaaaaatacttttggaagagaagtaatggatagacatcttgatatttgtattgatgcaggaattaatattgagggtacaaatgctgaagttgcagctgggcaatgggaatttcaaatttttgcaaagggagctgctaaggcaggtgatgaaatttgggtagctcgatattttttagaaagattagctgaagaatatggtttagctattgaataccatccaaaaccacttggtgctactgattggaatggatcaggtatgcatgctaacttttcgaacacaaccttaaggacttgtggatcaaaagaaacttatgaagcaatttgtgaagcatttagaccagttgttaatgatcatattgctgtgtatggtgcatataatgatcaaaggttgactggtgaccatgaaacacaatctattactgaatttagctatggagtttcagatcgtggtgcctcaataagaattccaattattactgtagaaaatggatataaaggttggctcgaagatcgtagaccagcatcaaatggtgatccatacaaaattgcagctataatcattaaaactg

SEQ ID NO: 310797 - DNA, 868 bp, Unknown
  Bacterial polypeptide expressing nucleotide sequence isolated from the Sargasso Sea
tggtcttttgatggatcttcaaccaaacaagctgatactattggatcagactgtttgctcataccagtgcaaaaatataaaaatccaacccgtctagattttttagttatgtgtcaggtgcttgattcaaatagaaaagctcttgtgtcaaacacacgtgtactggctgatgcagtagtcagtaatgaatggtggtttggatttgaacaagagtattacctaactcatccagatggcgttatccttggatgggaaaatggaacacccagagcacagggtgaatactattgtggtgttggctcaaaaaatattgttggaagagacatctctgaaaagcacatgttagcatgtatcgatgcaggaattgctctcacaggcactaacgcagaagttgctcttgggcaatgggagtaccagtgttttggaaaaggaatcaaggctgccgatgatctatgggtaagtcggtaccttctaaataagattgctgaagagcatgggttatgtgttaactatcatccaaagccaaagaaaggcgactggaatggatctggtatgcacacaaacttttctaactacgctatgagaacaaaaggatcagaagatatttttattgatatttgtaaaaaactaggcaaaggtcatgaagaaggtattgctgcatatggatctgacaacgatatgaggttgacaggcaaacacgaaactcaggatatttctaagttttcatacggaattagcgatagaggggcaagcattagaattccaatatatactgtccaaaataaatggaagggatatttggaggatagaagaccctcttctaacgcagatccatatagaataatagaacatattgtgaaaacactat

SEQ ID NO: 310798 - DNA, 694 bp, Unknown
  Bacterial polypeptide expressing nucleotide sequence isolated from the Sargasso Sea
tatgaaatataactgcaaaacagctaaagagcttttaaaaaaaattaaaaatgaagatattaaaatggttgatcttcgttttacagatatgccaggttcaacacaccatatttcaattccaataaaatatttaaaggaagatttatttgttgatggcgtaggatttgatggatcttcagttagaggtttccagtcaattgaaaatagtgatatgactatggttcctgatgtaacaactggttatttagaccctttttattcagaaaaaacaattgcattttattgcaatgtagttgatcctataacttatgaaagttatccaagagatccgaggtatatagctcaaaaagcagaaaaatatctaaaaaaatctggtttaggtgatactgcatactttggaccagaagcagaattttttgtttttaatgatgttaaatacgattctggttcaaacttcgcttttcatgaagttgactcaactgaaggtgcttggaacactggtagagatgagggtccgaatttaggacataaaccaaagcataaaggaggatactttccattacctccatccgatagtttgcaagatttgagaactgaaatggttttaacaatggaggacattggtattaatgtagaagcttctcatcatgaggttgctactggtggggcatgcgaaattgatttagaattctca

SEQ ID NO: 310799 - DNA, 334 bp, Unknown
  Bacterial polypeptide expressing nucleotide sequence isolated from the Sargasso Sea
atgagctctaaaaacgtattaaaactaataaaggataaagaaatcgaatatgttgatttaagatttactgacccaaaaggaaaattacaacatcttacaatggattcaacagcagttgacgaaggcatgttaaacgatggtgtattttttgacggctcatctattgcaggctggaaagctattaatgagtctgacatgatattaaaacctgatcttaatagaaaaattgttgatccgtttacttctcataatacgttagttcttttttgcgatattttagatgctgtaaataaaaatccttatgaaagagatcctagaggaatagcaaaaaaag

SEQ ID NO: 310800 - DNA, 665 bp, Unknown
  Bacterial polypeptide expressing nucleotide sequence isolated from the Sargasso Sea
tatgaaatataactgcaaaacgccaaaagaacttttaaaaaaaataaaaaatgaagacatcaaaatggttgatcttcgtttcactgatatgcctggttcaactcatcatatatcaataccatttaaatttcttaaggaagatttatttaaagacggagtaggttttgatggttcatcggtaagaggttttcagtctatagaaaatagtgacatggcaatggtgccagatgttactacagcttatatagatcctttttactcagaaaaaacaattgcattttactgtgatgttgtcgaccctataagttatgaaagctatgaaaaggatccaagatatatagctaaaaaagcagagaaatatttaaaatcctcaggtctaggtgatactgcatattttggacctgaagcagaattttttgtttttaatgatgtgaagtatgactcaggttctaatttttcatttcatgaagttgactctactgaaggagcttggaatacaggaaaggaagaaaatcctaatctaggacataaaccaagacacaaaggaggttactttcctctccctccatctgatagtttgcaagatgttagaactgaaatggtgctaactatggaagagataggaataaatgttgaagcttcacaccatgaagttgcaacaggtg

SEQ ID NO: 310801 - DNA, 220 bp, Unknown
  Bacterial polypeptide expressing nucleotide sequence isolated from the Sargasso Sea
atgagtgccagtaatgttttaaaatttattaaagataaagaagctgaatttgttgacttaagatttactgacccaagaggtaaacttcaacatttaacaatggactgtacagtagttgatgagggaatgttaaatgatggagtattttttgatggatcttcaatagctggttggaaagctataaatgagtcagacatgattttaaaaccagatttatcaa

SEQ ID NO: 310802 - DNA, 1012 bp, Unknown
  Bacterial polypeptide expressing nucleotide sequence isolated from the Sargasso Sea
gatgaaatcaaaacttgaatatatatggcttgatggatacaagcctactcagagcttacgaagcaaaactcgagtggaatcggattttggtggaacgctcgaagagtgccctatgtgggtcttcgatggtagctcaacccaacaagcagagggcggtagttccgattgcctgctaaagcctgtctacattatacctgatcctgaaaggacaaacgcgtatctggttatgacggaagttctaaatgcagatggatcccctcatgagtcgaacgggagagcaaccatcgatgatgatgatgatgatttctggttcgggtttgaacaagagtatttcctttgggacgtcgacacaaatctgcctccaggcttcccggagaatggtttcccagcaccccaaggtccttactactgctctgttggagccaagaatgcctttggtcgagattgtgtagacgaccacttagacctttgtctggatgctggattgaacgtagaaggtataaatgctgaagttgcggctggccaatgggagtttcaggtttttgcgaaaagtgcaaagacagcaggagatgaaacctggctcgccaggtacctccttgaaagaaccggagagaaatatggctactccatcaattggcaccccaaaccgtttggaccactagactggaatggttctggcatgcacgctaacttttcaaatggggagatgagagaatctggtaaagaggagacctttaccaaaatttgtgagaattttggtaagaatattgaacgccatatcagtatctatggtgccgataatgatcagagacttactggggatcacgaaacgcaatccatagataccttcagctacggagtatctgataggggcgcatcaatcaggattcctgtcacaacaaaagaagatggttggataggccgattagaagatcgtcgaaccgcttcaaacgctgatccctataaggtggcagcggcaattattaaaacaacaaaagaagcgctagcctaa

SEQ ID NO: 310803 - DNA, 955 bp, Unknown
  Bacterial polypeptide expressing nucleotide sequence isolated from the Sargasso Sea
atgaataaatttgaatacatttggcttgatggatttcaacctgagcctactttaagaagcaaaattaaagttactgatggagaaccgcctgaatggtctttcgatggctcttctacgcaacaagcagaaggaggaagctcagattgccttctattgccagtagaacagtatgaaaatccaactaatgatggctctctagttatgtgccaagttcataccggcgaacatgaagtccacccctctaatacaagagcagctgctgaggcagtagttagtgatgaatggtggtttggttttgagcaagagtatttctttactgacaacaaaggcaatcctttgggttgggaagatggcactccaagacctcaaggagattactattgtggtgtgggtagtagtaatgtagtcggaagggagatatctgaagctcatcttgacgcatgtttggatgccggtatcgaattaacaggtacaaatgctgaagttgctctagggcaatgggaatatcaatgcttagggaaaggaataaaagcaggtgatgacctttgggttagtcgatacttattacacaaagtagctgaagaattcggtgtaagcgtaaatattcatccaaagcctaaaacaggagattggaatgggtctggaatgcatacaaacttttctaatgaagaaatgagaacatctggatctgaagaactctttaattctatgtgtgagaaacttggtgcagttcatgaagaaggtatagcttcatatggatccgacaatgatatgaggctgaccggaacgcatgaaactcaaagcataaacgaattttcctatggcgttagtgacagaggagcaagtataaggattccaatttatactgtagagcatgactggaatgggtatctagaagacagaaggcctgcatcaaacgcagatccttatagaattattgcccatctagtggaac

SEQ ID NO: 310804 - DNA, 995 bp, Unknown
  Bacterial polypeptide expressing nucleotide sequence isolated from the Sargasso Sea
gtacatctggcttgacggctataagccgactcagagcctgcgaagtaagacccgggtcgaatctgatttcagcggcaaggtggaagactgcccgatgtggtctttcgatggcagttcaacagaacaggctgatggcagcgactctgactgcttgctgaaaccggtcgcttgcattcccgatcctgatcgcaagaacagttacctggtgatgaccgaggtattgaatgctgacggtacaccccacgagtctaacggtcgtgcgaccattgaagatgacgatgacgacttctggtttggatttgagcaggaatatttcctttgggatcccgagtccaacttgccgccaggattcccgaagtccggttatcctcgaccccaaggtccatactactgctctgtaggtgcgaacaacgcctatggtcgtgacatcattgaagagcacctcgatctctgtcttgatgccggactcaacgttgaaggtatcaatggtgaagtagcggctggccaatgggaattccaggtctttgccaagagcgcaaagacagcgggcgatgaaacatggcttgcgcgatacatccttgagcgaaccgcagagaaatacgggtatgcgattgaatggcatccgaaacctcttggggataccgactggaatggttcagggatgcacgcaaacttctctaactcggttatgcgtgagtccggtaaggaagagacgtttacgaagatttgtgaagagtttggcaagaacattcctcgtcatatttctgtgtatggtgctgacaacgatcagcgcctgaccggtgcgcacgaaacccagtcgattgatcagttcagctttggcgtttctgaccgtggtgcgtccattcgcattccggtaggcaccgtagaagacggctggaaaggcagattggaagatcgacgaccagcctccaatgcggatccctacaaggtggcggcggcgatcgtaaagacgaccaaagaatctggcgtctgaa

SEQ ID NO: 310805 - DNA, 562 bp, Unknown
  Bacterial polypeptide expressing nucleotide sequence isolated from the Sargasso Sea
tctggagacaatacgcaggtttatcagatactggctttacactatatgtggtggaatattaaaacatgcaaaagctataaacgctttttctaattctacgacgaatagttacaaaagattaattccaggctttgaagctccagtattattagcctactcagcaagaaatagatccgcttcatgtagaattccaatcactttaagtaaaaaagctgcaagatgtgaagttcgttttccagatgctgcaggaaatccatatttgacattttcagctctattaatggctgggcttgatggagttaaaaataaaattgatccaggtaaatctttagacaaagatctttatgcattaagcgagtcagaagttaaaaaaattccaactgtttgtggttccttaagagaggcaatggaaagtctagataaagatagaaaattcttaactcaaggcaatgtatttacagatgatcagatagatgcatatatagctttgaagtacgaggaaatacataattttgagcacactccacatccaatcgagtttcaaatgtattatagctgctag

SEQ ID NO: 310806 - DNA, 973 bp, Unknown
  Bacterial polypeptide expressing nucleotide sequence isolated from the Sargasso Sea
atgaatacttttgaatatatatggcttgatgggtatcagccagaaccaatgatgcgaagcaaagttaaagccactgaggacgatactcctcctgattggtcttttgatgggtcttcaactcagcaagctgaaggtggaagttcagactgcttactattaccggtgcaaacctatgcaaatccaaatgggcatgatttagttatgactcaagttcaagcagctgatcatacgactcatccatcaaactttagagctgcagctgccgaagtagtaacagatgagtggtggtttggctttgaacaagaatacttctttactgatccacaaacaggtgaacctctgggatgggaagatggaacaccaagacctcaaggagaatattattgtggtgttggtgcaggtaatgtggttggaagagaaatctcagatgcccacttagaagcttgtttagatcttggcattactcttactggaacaaatgctgaggttgctcttggtcaatgggaataccaatgttttgggaaaggcattaaagccgctgatgatctttgggtatcaagatatcttctttataagattgctgaagaatatggtgttggtgtaaatattcatccaaaacccaaaacaggagattggaatggctcaggaatgcattgtaatttctcaaatgaagaaatgagaactgcgggatctgaagagctattttcttcaatctgcgataagttgggtgaagtccatgcagagggaatcgcttcatatggttctgataatgacatgaggcttactggtctacatgaaacacaaagcattgataaattctcttacggtgtcagtgatcgtggagcaagtattagaattccggtttacactgttgagcacgactggaatggatatcttgaagatagaagaccggcatcgaatgctgatccttataagatattagctcatttagtaggaactcttaccaaataaa

SEQ ID NO: 310807 - DNA, 584 bp, Unknown
  Bacterial polypeptide expressing nucleotide sequence isolated from the Sargasso Sea
tgctgatggtgctcaatcatacaagtatgttgtaagaaatgttgcacaacagtttggaaaagtagcaacaatgatgccaaaaccaatttcaatggatgcaggttctggaatgcatacaaatgttagtttatggaaaaaagatgagaatacgttttatgacaaagatgaagtattagaactaagccaaaccggtcgttatttctgtggaggagtaatggaacatgccaaaggattaactgcaattacaaatcctacaacaaactcatatcatagactagttccaggttatgaagcaccagtttacattgcatggagttcaagtaaccgttatgcaaccattagaattccaggccactttaaaggagaaaaatatgcttacatgaaaagaatggaatatggtgttccagacccagcatcaaatccatatcttgtattttcagcagtattagctgcaggtttagatggaataaaaaagaaaatagaaccaggagacccagttaaagaagatatttacaaaatgacaaaatcagaaagaaagaaacatggaattgatacttaccagcaaatcttggaagagcattaga

SEQ ID NO: 310808 - DNA, 823 bp, Unknown
  Bacterial polypeptide expressing nucleotide sequence isolated from the Sargasso Sea
cttctattacccgtagagcagtatgaaaatccaactaatgatggatctctagttatgtgccaagttcataccggagaacatgaaatccatccttctaatacaagagcagctgctgaggcagtagttagtgatgaatggtggtttggttttgaacaggagtatttctttactgataacaaaggtaatcctttaggttgggaagacggaactccaagacctcaaggagattactattgtggagttggtagtagcaatgtagttggaagagagatatctgaagctcatcttgacgcatgtttagatgctggtatcgagttaactggtacaaatgctgaagttgctctcggacaatgggaatatcaatgcttaggaaaaggaataaaagcaggtgatgacctttgggttagtcgatacttattacataaagtagctgaagagtttggtgtaagtgtaaatattcatccaaagcctaaaacaggggactggaatggatctggaatgcatacaaacttttctaatgaagaaatgagaacatctggatcagaagaactctttaattctatgtgtgagaaacttggtgccgttcatgaagaaggtatagcttcatatggatccgacaatgatatgagactgactggaacgcatgaaactcaaagcataaacgaattctcttatggcgttagtgacagaggagcaagtataaggattccaatttatactgtagagcatgactggaatgggtatcttgaagacagaaggcctgcatcaaatgcagatccttataggattattgcccatatagttggcacgctaacttcttagt

SEQ ID NO: 310809 - DNA, 412 bp, Unknown
  Bacterial polypeptide expressing nucleotide sequence isolated from the Sargasso Sea
atatcttctttataagattgctgaagaatatggtgttggtgtaaatattcatccaaaacctaaaacaggggattggaacggctcaggaatgcattgtaatttctcaaatgaggcaatgagaactgctggttctaaagagcttttctcttcaatgtgtgacaagttaggcgaagtccacgaagaaggtattgcttcttatggctcggataatgatatgagacttacaggtctgcatgaaacacaaagcatcgataagttctcttatggtgtcagtgatcgtggagcaagtataagaatcccagtctacacagttgagcatgactggaacggataccttgaagacagaagaccagcatctaatgctgatccttataagatactagctcatatagtaggaactcttactaaataa

SEQ ID NO: 310810 - DNA, 352 bp, Unknown
  Bacterial polypeptide expressing nucleotide sequence isolated from the Sargasso Sea
agctgctagatgtgaaattcgttttccagacgcttcgggaaatccttatttgacttttgcttctatgttaatggcaggtcttgatggaattaagaataaaattgatccaggtaaatcgttcgataaagatctatatgcattaagtgagtctgaaattaaaaagattccaacagtttgtggatctttaagagaagctatggaaagtttagataaagatagaaaatttttaactcaaggtagtgtgtttactgatgatcaaattgatgcatatattgatttaaaaatggaggaaattcataactttgaacatacgcctcaccctatagagttcgatatgtattatagttgttaa

SEQ ID NO: 310811 - DNA, 391 bp, Unknown
  Bacterial polypeptide expressing nucleotide sequence isolated from the Sargasso Sea
tctgcttcttgtagaattccaataactttaagtaaaaaaggtgcaagatgcgaaattagattccctgatgcatcaggtaatccatatttaacttttgcatcaatgttaatggctggtttagatggtattaaaaataaaatagatcctggtaaatcttttgaccaagatctttatgcattaacagaaaaacaagttaaaaaagttcctacagtctgtggatcattgagagaggctatggaagctcttgataaagatagaaactttttaaagcaaggtaatgtatttactgacgatcagatagatgcgtacattgaattaaagtatgaggaaattcataactttgaacatacgccgcaccctatcgaattcgatatgtattatagctgttaat

SEQ ID NO: 310812 - DNA, 435 bp, Unknown
  Bacterial polypeptide expressing nucleotide sequence isolated from the Sargasso Sea
gctttgaagctccagtgttattagcttattctgcaagaaatcgttctgcatcatgtagaattcctataactttaagcaaaaaaggagcaaggtgtgagattagattcccagatgcttctggtaatccatatttaacttttgcatctatgttaatggctggattagatggaataaaaaataaaattgatcctggaaaatcttttgataaagatttgtatgcattgtctgaaaaagaactaaaaaaagttccaacagtatgtggctctttaagagaggcaatggaaagtttagataaagatagaaaattcttaactcaaggaaatgtattcactgatgaccaaatagatgcttacatagctttgaaatttgaagaaatacataattttgagcacacgcctcatccaattgagtttgatatgtattatagttgttaat

SEQ ID NO: 310813 - DNA, 982 bp, Unknown
  Bacterial polypeptide expressing nucleotide sequence isolated from the Sargasso Sea
aatgagtgaatttaaaacttatgaatatatatggttggatggttttcaaccagagccctcaatgaggagcaagattaaagctactgatgatgatgagccaccagaatggtcttttgatggatcatcaacgcagcaagcagaaggtggaagttcagactgtctgttacttccagtacaaacttatgataatccaactgcaccagatcatctggttatgtgtcaagtaaacgcagcggatcattctgtacatccctcaaatactagagctgctgctgaagcattggttagtgatgagtggtggtttggttttgagcaggaatactttttcactaataaggatggttcacctttaggttgggaagaaggagaacctagaccacaaggtgattattattgtggtgttggagcagacaatgtctctggaagagaaatctccgaggttcatttgcaagcttgccttgatgctgggataactttaacaggaacaaatgcagaagttgcgcttggccagtgggagtatcagtgttttggcaaaggtataaaagcggcggatgacctttgggtaagtaggtatctactatataagattgctgaagaatatggtgtaggggtaaacattcacccaaaaccaaaaactggtgattggaatggatcaggaatgcatacaaatttttcaaatgaagagatgaggactaatggctctgaagaactattcaattcaatttgtgacaagcttgggaaagttcatgatgaaggaatcgctgcttatggttccgataatgatatgagattgactggtcttcatgagacacaaaagattacggaattttcatatggaataagtgacagaggtgcgagtattcgtattcctgtttacacagtagaacatgattggaatggatatttggaagatagaagacctgcttctaatgccgatccatacaaaatattagcgcatattgtaggaacgctaactaaataa

SEQ ID NO: 310814 - DNA, 982 bp, Unknown
  Bacterial polypeptide expressing nucleotide sequence isolated from the Sargasso Sea
atgagtgatattaaaacttatgaatacatttggcttgatggttttaaacctgagccttctatgaggagtaaaattaaggcaacaaccgaagattctgctcctgaatggtcctttgatggatcttcaacagaacaagcagagggaagcagttcagactgtttacttctcccagttcaaacgtacgataatccaactttttctgacttcctagttatgtgtcaggtacatgctgcagatcataccgttcatccctcaaacacaagggcagcggctgaagtagttgtaactgatgattggtggtttggttttgagcaagaatacttttttaccaataaagatggatcacctctaggttgggaagaaggtgagcctagaccgcaaggtgattactattgtggagtaggtgcagataatgtctcaggtagagaagtatctgaagcacatcttgaagcatgtctagatgctggtatcaccttgaccggaacaaatgcggaagttgctcttggtcaatgggagtaccaatgcttcggaaaaggtatcaaagcggcagatgatctttgggtatcgagataccttctatataaaatcgctgaagaatatggcgtaggagtgaatattcatcctaaaccaaaaaaaggtgattggaatggttcaggcatgcatacaaacttttctaatgaagaaatgagatcaaagggttcggaagaacttttttcttctatatgtgaaaagctaggaaaagtgcatcaggatggtattgcagcttatggttctgataatgatcaaagactaacaggactgcatgaaactcaaaagattacagagttttcatatggtgttagtgacagaggggctagtatacgtatacctgtttacacagttgaacatgattggaatggttacttggaagacagaagacccgcttcaaatgccgatccatataaaattcttgctcatatagtaggaactttaactaagtaaa

SEQ ID NO: 310815 - DNA, 976 bp, Unknown
  Bacterial polypeptide expressing nucleotide sequence isolated from the Sargasso Sea
tatgaaaaaatatgaatatgtatggctggatggatatcagcctgaaccttatctgagaagtaaagttaaggttactagtgatagaaaccctccagagtggtcttttgatggatcatcaactcaacaggctgacactgaaggttcggattgtattcttatacctgtgcaagaatataaaaatcccctatttggtgactcattggttatgtgtggagtgcaaacaagtgcccgtgaagctcattcaactaacatgagacatgcagcatcagaaattgtcactgatgagtggtggtttgggtttgaacaagaatatttcctaacaaatcctgatggttcaattctgggttgggaagaaggaatacctgaaaaaccacaaggtgaatactattgtggtgttggtgcagcaaatgttaaaggaagagaagtttccgaggctcatttagaagcatgtttggaagctggtattgagctgactggtacaaatgccgaagttgcacttgggcaatgggaatatcagtgccttggtaaaggtattaaagctggtgacgatttatggatgagtagatatcttcttcaaaaagtaggtgaagaatttgatgtatgtgtaaatttccaccctaaacctcaagaaggtgattggaacggttccggtatgcacactaatttctctaatgagcaaatgaggtcaaatggctctgaagaattatttacatctttttgtgaaaaattaggtgaagttcatgaccaaggaatagcatcttatggttcagataatgacaaaagattaacaggccttcatgaaactcaaaagattaccgaattttcttacggagttagtgatagaggtgcaagtattcgtattccaatatacacagtagaacataattggaatggctatcttgaagatagaagacctgcttcaaatgcagatccttacaaaatcatttctcatattgttggaactttaactagttaa

SEQ ID NO: 310816 - DNA, 953 bp, Unknown
  Bacterial polypeptide expressing nucleotide sequence isolated from the Sargasso Sea
aatgagtgatattaaaacgtacgaatacgtctggttagacggctataagcctgaaccttctatcagaagcaaaattaaagctactgatcttagaggaactgataaaggcgaattaaatgatgctatgccaccaagatggtcttttgatggatcttctacacaacaagctgaaggaggcagttctgactgtttattaattcctgtgcaaatgtatgacaatccaacagctccagaccatttagtgatgtgtcaggtattagcagctgatggatcaattcatccatcaaatactagagatgctgctgatgctgtagtctcagatgagtggtggtttggttttgagcaggagtatttctttactaatcccgatggctctccattaggttgggaagatggcgaaccaaggcctcaaggtgattactattgtggtgttggagcagataacgtatcgggtagagaaatttctgaagttcatctacaagcttgtattgaagcaggaataaatctgactggaactaatgcagaagttgctcttggccaatgggaatatcaatgttttggaaaaggcataaaagctgctgatgatttatggatgagcagataccttttgtataagatcgctgaagaatatggcgtgggagtaaatattcatccaaagccaaagacaggtgattggaatggatcaggaatgcatgcaaatttttctaatgaagagatgcgaactaatggttctgaaaaattatttcattcaatctgcgataagctcggtgaagttcatgatgaaggaatcgcttcttatggttccgacaatgatatgagattaactggtcttcatgaaacacagaagatcacagaattctcatatggtataagtgatagaggtgcgagtattcgtattcctgtttatacagtagaacatgattggaatggttatttagaggacagaaggcctg

SEQ ID NO: 310817 - DNA, 1006 bp, Unknown
  Bacterial polypeptide expressing nucleotide sequence isolated from the Sargasso Sea
tatgagcaaatctaaattagaatatatatggcttgatgggtacaaaccaactcaaagccttagaagtaaaactaaagtcgtttcagactttgacggtaaactttccagttgtcctatgtggtcttttgatggttcttcaactctacaagctccaggtggttcctcagattgtttattaaaaccagttgcaatatatccagaccctgaaagaaaaaatggttttctagtaatgactgaggtattgaatgcagatagcactccccacgagtcaaatggtagagcaactattgatgatagtgataatgacttttggtttggtttcgaacaagaatatttcctttgggatactgagactaacctacctcttggatttccaaaagatcaaactcctcaaggtcaattctattgttcagtcgggggtgcaaatacttttggacgtgaaataatggatcgtcatcttgacgtatgtcttgaggcaggaatcaacgttgaggggacaaatgctgaagttgctgcaggtcaatgggaatttcaaacttttgcaaaaggagctcaagaagctggagacgaaatgtgggtagctagatatttattagaaagaatagcagaagattatgctattaaaattgaatatcatcctaaacctttaggagctactgattggaatggatccggtatgcatgcaaatttctcaaatacaactttaagaacttgtggatcaaaagagacctatgaaaaaatatgtgagtcatttagatctgttgttaatgagtgtattgcagtttacggtgcatataatgaccagagattaactggtgatcatgaaacacaatcaatcactgaatttagttatggagtttcagatagaggtgcatctattagaatacctataatgactgttgagagcggatggaaaggatggttagaagatagaagacctgcatcaaatgctgacccctacaaagtagcagcaataattgtaaaaacagtaaagagcgtatcctag

SEQ ID NO: 310818 - DNA, 1015 bp, Unknown
  Bacterial polypeptide expressing nucleotide sequence isolated from the Sargasso Sea
atgagcgaattttcaaaattagaatatatttggcttgatggctatgaacctacacaaaatatgcgtagtaaaacaatgattcagaagaattttggaggtaatcttgatgaatgtccgatgtggagttttgatggatcatctactaagcaagcagacggtggtgattcagattgtttgctaaaaccagtatcaatttatccagatccacaacgcgatcatggattcctagttatgtgcgaggtcatgaacgcagacgggacacctcactctagtaatggacgttctacaatagatgatgatgatgatgatttttggtttggttttgaacaagaatatttcattatggatgtagatacacagttgccattgggtttccccgttggagggtatccaggcccacagggtctgtattattgttctgttggtggtaaaaatacacatggtagagatctcgtagaacagcatgcaaatctttgcattgaagcaggtctagggtttgaaggaattaaccaagaagtagcctgtggccaatgggaatttcagatatttgctaaaggagctaaaaaagcaggagatgaactgtggattggtagatatatgcttgatagattaacagaaagttatggatactacattgaatatcatcctaaaccaatcaaaggagattggaatggttcaggtatgcatgctaatttttcggattcaaccatgagagatacaggtggggaaaaaatatttacaaaaatatgtgaatcatttggaaagaatattaagaaacacatggaagtctatggtgctcacaatgaagagaggttaacaggacttcatgaaacgcaatcaattgatcaattttcgtacggtgtttcagatagaggagcttccataagaattccaataggaactattgaggagggatggaaaggaagattagaagatcgaagacctgcctctaatggtgatccgtataaaattggttcagtaataatctcaacaacaaaatcagcttacaattaag

SEQ ID NO: 310819 - DNA, 397 bp, Unknown
  Bacterial polypeptide expressing nucleotide sequence isolated from the Sargasso Sea
gattgcagaggagtacggagtgtctgtaaacattcatcccaagcctcaagagggcgactggaatggctcgggaatgcacactaatttttcgaatgaacaaatgagaagcgcaggctcggaagaactatttaattccatgtgtgaaaaactgggcgaggttcatgcagaagggattgccaattacggctcagacaatgaaaagaggctgactgggaatcatgaaactcaaagcattgacactttttcgtatggcgtgagcgacagaggggcaagcatcagaatacccatctatacagttgaaaacgactggaatggctatttagaggatagaagacccgcttccaatgcagacccatataaaattatttcgcacattgtcggcacgctgacacaataa

SEQ ID NO: 310820 - DNA, 973 bp, Unknown
  Bacterial polypeptide expressing nucleotide sequence isolated from the Sargasso Sea
atgaaaacatacgaatacatttggttagatggttataagcctgagccaatgatgagaagtaaggtaaaagcaactgaagacgaaactccacctgaatggtcttttgatggttcatctactcaacaagcagaaggaggtagctctgattgtttactaatacctgttcaaacttattcaaacccagatggtcatgatttagtaatgactgaggttcaatcagccgatcataccactcacccatcaaactttagagcagcagctgcagaagttgtaactgatgaatggtggtttggttttgagcaagaatactttttaacagaccctgctacaggggaaccactagggtgggaagatggagaaccaagagagcaaggtgaatattactgcggagttggtgcaggtaatgtagttggaagagaagtttctgatgtgcacttacaagcatgccttgatatgggtataacactcacaggaactaatgcagaagtagcactaggtcaatgggaatatcagtgctttggtaaaggaattaaagctgcagatgatctttgggttagtagatatttactttataaaattgcagaagaatttggagtcggagtaaatattcatcctaaaccaaaaactggagattggaatggttccggaatgcattgcaacttttcaaatgaagccatgagaacagcaggatctgaagaactatttacttcgatgtgcgataaacttggtgaagttcatgaagaaggtattgcttcttatggatctgataatgacatgcgtctaaccggtcttcatgaaacacaaagtattgataaattctcttatggagtaagtgatagaggtgcaagtataagaattcctgtttacacagttgagcataattggaatggttatcttgaagacagaagaccggcttcaaatgctgatccatataaaatcgtatctcatattgttggaactctaacaaaataat

SEQ ID NO: 310821 - DNA, 1006 bp, Unknown
  Bacterial polypeptide expressing nucleotide sequence isolated from the Sargasso Sea
tatgagtaagtctaaattagaatacatttggttagatggttataaacctacagctagccttagaagcaaaacaaaaattattgagaattttgatggaaagctagagagttgcccaatgtgggcatttgatggctcatcgaccagacaggcagaaggaggatcctcagattgccttttaaaacctgtttctatttataaagatccggaaagaaaaaatggttttcttataatgaatgaagttctaaatgctgatggtagccctcatgaatcaaatgggagggcaacaattgatgacgatgatgatgatttttggtttgggtttgaacaggaatatttcttatgggatcctgagacagatcttccgctaggatttcctaaggatcaaacacctcaaggacaattttattgttctgttggtggggcaaatacttttggcagagaaataatggatagacatcttgatgtttgcttagatgcaggtattaatgtggaaggtactaatgctgaagtagctgctggtcagtgggaatttcaaacatttgcaaaaggagcacaacaagcaggggatgaaatgtgggtagccagatatcttcttgaaagaattgcagaagattatggacttgcaattgaatatcacccaaaaccattaggcgcaacagattggaatggttctggtatgcatgcaaatttttcaaatacaactttaagaacttgtggttcaaaagagacctatgagaaaatttgtgaatcatttagacctgtagtgaatgaatgtattgaagtttatggagcatacaatgatcaaagattaacaggtgatcatgaaactcaatcaattacagagttcagttatggtgtctcagatagaggtgcttcaatccgaattccaattatgacagttgaaagtggatggaaaggttggttagaagatagacgtccagcatctaatgctgatccatataaagttgctgctataattgtaaagactgttaagggggctaagtaa

SEQ ID NO: 310822 - DNA, 730 bp, Unknown
  Bacterial polypeptide expressing nucleotide sequence isolated from the Sargasso Sea
aatacacggagcgcctgcgttgatcttgtaacagatgattggtggtttggctttgaacaagaatattttttcacgaaccccgaggatggaacaattctaggctgggaagatggaacaccaagaccacagggcgattactattgtggtgttggttctggcaatgtccaagctagagaagtttctgaggcacacatggatgcttgtcttgaggcaggtatcatgatcactggcaccaatgcagaggtagcgcttggtcaatgggagtatcaatgttttggtaagggccttaaagcagctgatgatttgtgggtaagtagatacttgctccatctaatcgcagaagagtatggcgtttctgtaaacattcacccaaagccgcaacaaggtgattggaatggttctggaatgcacactaatttttccaacgagcaaatgagaagcgcaggctcagaagaactgatgacttctatgtgtgacaagctgggagaggttcatgcagaagggatatcaaattatggttcggataatgatatgcgattgactggaaatcatgaaactcaaagcattgatacattctcttacggagtaagtgatagaggagcgagtatcaggatccctatctatacagttgagaacaactggaatggttatctagaagacagaaggcctgcttcaaatgcagatccatacagaattatttcacacattgttggcacgctaacaaaataaa

SEQ ID NO: 310823 - DNA, 382 bp, Unknown
  Bacterial polypeptide expressing nucleotide sequence isolated from the Sargasso Sea
aatgagttcaaaaaatattttaaagcttatgaaagataagcaagttgaattcgtagacctaaggtttactgatccaaaaggtaaacttcaacatttaacgatggactcaaccgtagttgacgaagatatgcttaataaaggagtgtttttcgacggttcttctatagctggctggaaagcgattaatgagtcagacatgatattaaaacctgatttagatagacctataattgatccttttaattctcacactactttaaatattttttgtgatattttagatgctgtaaaaaaagatccttacgacagagatccaagaggcaaagcaaaaaaagcagaggcttatcttaaaaaaactgggtataggcgaataaatcttatt

SEQ ID NO: 310824 - DNA, 289 bp, Unknown
  Bacterial polypeptide expressing nucleotide sequence isolated from the Sargasso Sea
tatgttaatggctggcttagatggaataaaaaataaaatagatccaggtaaatcatttgataaagatctttatgcactgtcagaagatgaagttaaaaaaattcctactgtttgtggatctttaagagaagcaatggaaagtttagataaagatagggattttttaaaacaaggtaatgtatttaccgatgatcagatagatgcctatattgcattaaagtttgaggaaatacataattttgaacatactcctcatccaattgagtttgagatgtattacagctgttaa

SEQ ID NO: 310825 - DNA, 699 bp, Unknown
  Bacterial polypeptide expressing nucleotide sequence isolated from the Sargasso Sea
catgaaaaagttagaatatatatggctggatggatttaagccagagccaagcctaagaagtaaggtcaaagtgacagatgaaaacccacctgattggtcttttgatggctcatcaactcaacaagcagatggatcaagctctgattgtattctgaggcctgtaaatgaatacacgggacctagaaactccgacagtctggttatgtgtgaagttttatcaccagataggtctgcacatccatcaaatacacggagcgcctgcgttgatcttgtaacagatgattggtggtttggctttgaacaagaatattttttcacgaacccagaggatggaacaattctaggctgggaagatggaaccccaagaccacagggcgattactattgtggtgttggttctggcaatgtccaagctagagaagtttctgaggcacacatggatgcttgtcttgaggcaggtattatgatcactggcaccaatgcagaggtagcgcttggccaatgggagtatcaatgttttggtaagggccttaaagcagctgatgatttgtgggtaagtagatacttgctccatctaatcgcagaagagtacggcgtttctgtaaacattcatccaaagccgcaacaaggcgattggaatggttctggaatgcacaccaatttttccaacgagcaaatgagaagcgcaggctcagaaga

SEQ ID NO: 310826 - DNA, 614 bp, Unknown
  Bacterial polypeptide expressing nucleotide sequence isolated from the Sargasso Sea
accaaggcctcaaggtgattactattgtggtgttggagcagataacgtatcgggtagagaaatttctgaagttcatctacaagcttgtattgaagcaggaataaatctgactggaactaatgcagaagttgctcttggccaatgggaatatcaatgttttggaaaaggcataaaagctgctgatgatttatggatgagcagataccttttgtataagatcgctgaagaatatggcgtgggagtaaatattcatccaaagccaaagacaggtgattggaatggatcaggaatgcatgcaaatttttctaatgaagagatgcgaactaatggttctgaaaaattatttcattcaatctgcgataagctcggtgaagttcatgatgaaggaatcgcttcttatggttccgacaatgatatgagattaactggtcttcatgaaacacagaagatcacagaattctcatatggtataagtgatagaggtgcgagtattcgtattcctgtttatacagtagaacatgactggaatggttatttagaggacagaagacctgcttctaatgccgatccatacaaaatattagcgcatatagttggaactctaactaaataga

SEQ ID NO: 310827 - DNA, 522 bp, Unknown
  Bacterial polypeptide expressing nucleotide sequence isolated from the Sargasso Sea
atgctggtattgagctaaccggaacaaatgccgaggttgctttaggccaatgggaatatcaatgctttggaaaaggaattaaagctgctgatgatctctggatgagcagatatatactctttaaagttgctgaggagttcggtgtatcagtaaacatccatcctaaaccaaaaacaggtgattggaatggatcaggaatgcatactaacttttctaatgaagagatgaggacttcgggtagcgaagatctatttagctctatgtgtgataagttaggcgaagttcacaaagaaggcatagcgctatatggatctgacaatgatatgcgtctaacaggactacacgaaactcaaagcatagatcagttctcttacggagttagtgatagaggagctagtatcaggattcctatttacactgtagaacacgattggaatggatacttagaagacagaaggcctgcctctaatgcagatccttacaaaattgtagctcatatagttggcacattaacttcataag

SEQ ID NO: 310828 - DNA, 431 bp, Unknown
  Bacterial polypeptide expressing nucleotide sequence isolated from the Sargasso Sea
tgatctatgggtaagtagatacttactttataaaattgctgaagaatttggcgttggtgtaaatatccacccaaaaccaaaaacaggtgactggaacggctctggtatgcactgtaacttttcaaacgaagcaatgagaactgcaggctctgaagaattatttacttctatgtgtgacaagcttggtgaagttcatgaagaaggtattgcttcatatggttcagataatgatatgcgtcttacagggcttcatgaaactcaaagcattgataagttctcttatggtgttagtgacagaggtgctagcataagaatacctgtctacactgtagaacatgattggaatggataccttgaagacagaagacctgcttcaaatgcagatccttataaaattttggctcatatagtaggaactctttctaaataat

SEQ ID NO: 310829 - DNA, 973 bp, Unknown
  Bacterial polypeptide expressing nucleotide sequence isolated from the Sargasso Sea
atgaaaacatatgaatacatttggctagatggttataaacctgaaccaatgatgagaagtaaagtaaaagcaaccgaagacgaaactccacctgaatggtcttttgatggttcatctactcaacaagcagaaggaggcagctctgattgtttactaatacctgttcaaacttattcaaacccagatggacatgatttagtaatgactgaggttcaatcagctgatcataccactcacccatcaaactttagagcggcagctgcagaagtagtaactgatgaatggtggtttggttttgagcaagaatactttttaacagaccctgcaacaggagagccactagggtgggaagatggagagccaagagaacaaggtgaatattactgtggagttggtgcaggtaatgtagtcggaagagaagtttctgatgtgcacttacaagcatgtcttgatatgggaataacactcacaggaactaatgcagaagtagcactaggccaatgggaatatcagtgctttggtaaaggaattaaagcagcagatgatctttgggttagtagatatttgctttataaaattgctgaagaatttggagtaggagtaaatgttcatcctaaaccaaaaactggagattggaatggatctggaatgcactgtaacttttcgaatgaagccatgagaacagcaggatctgaggaactatttacttcaatgtgcgataagcttggtgaagttcatgaagagggtattgcttcttatgggtctgataatgacatgcgtcttactggtcttcatgaaacacaaagtattgataaattttcttatggagtaagtgatagaggtgcaagtataagaattcctgtatacacggttgagcataattggaatggttatcttgaagatagaagaccagcttcaaatgctgatccatacaaaatcgtatctcatattgttggaactctaacaaaataat

SEQ ID NO: 310830 - DNA, 970 bp, Unknown
  Bacterial polypeptide expressing nucleotide sequence isolated from the Sargasso Sea
atgaaaacttatgaatatatttggcttgatggatatcagcccgaaccatcaatgagaagcaaagttaaggcaacaaaggatgaaacaccgcctgattggtcttttgatggatcttcaacggaacaagcagaaggaggcagttcagactgtttgcttttaccagttcaaacttatgaaaatccaaatggacatgacctagttatgacacaggttcaagctgcagatcataccactcatccatctaattttagagctgctgctgcagaagtcgtttctgatgaatggtggtttggatttgagcaagaatacttttttacagatccagaaacgggcgaaccattgggatgggaaaatggtgaaccaggacctcaaggcccatactattgtgcagttggtgctggaaatgtttctggacgagaaatttctgatgcgcaccttttagcttgcttagatttgggaatagagttaactggaactaatgctgaggttgctattggccaatgggagtatcaatgttttggcaaaggaattaaagcagcagacgatctttgggtaagtcgatatttactatataaaattgctgaagaatttggagttggtgtaaacatacatccgaaaccaaaaactggagattggaatggctcaggaatgcatactaatttctctaatgaggctatgcgaacagctggaagtgaagagctgtttacatcaatgtgtgacaagctaggtgaagttcatgaagaaggtatagctgcatatggttctgacaatgatatgagattaacaggccttcatgaaacgcaaagcattgacacattctcatatggagttagtgatagaggtgccagtatacgtataccagtatatacagttgaacatgattggaatggttatctagaagatagaagacctgcatcaaatgcagatccatataaaatcctatctcacatagtaggtactttaaagtagt

SEQ ID NO: 310831 - DNA, 973 bp, Unknown
  Bacterial polypeptide expressing nucleotide sequence isolated from the Sargasso Sea
atgaatacttttgaatatatatggcttgatgggtatcagccagaaccaatgatgcgaagcaaagtgaaagctactgaggacgactctcctccagattggtcttttgatggatcttcaactcaacaagctgaaggtgggagttcagactgcttacttttgccggtgcaaacctatgtaaatccaaatgggcatgatttagttatgacacaagtacaagctgctgaccattctgttcatccatctaatactagagctgcagcagcagaagtaactacagatgaatggtggtttggatttgaacaagaattcttttttactgacccacaaactggagaacctctcggttgggaagatggaactccaagagagcaaggcgaatattattgcggagtcggtgcaggaaatgtggttgggagagagatctcagatgctcatttagaagcttgtttagatcttggcataaccttgacgggaacaaatgcagaggttgctcttggccaatgggaatatcaatgttttggaaaaggaatcaaagctgctgatgatctttgggtatcaagatatcttctttataaaattgctgaagagtatggtgttggtgtaaatattcatccaaaacctaaaacaggagattggaacggctcaggaatgcattgtaatttctcaaatgaggcaatgagaactgctggttctgaagaacttttctcttcaatgtgtgacaagttaggcgaagtccacgaagaaggtattgcctcttatggctctgataatgacatgagacttacaggtctgcatgaaacacaaagcatcgataagttctcttatggtgtcagtgatcgtggtgcaagtataagaatcccagtctacacagttgagcatgactggaacggataccttgaggacagaagaccggcatctaatgctgatccttacaagatattagctcatatagtaggaactctttctaaataaa

SEQ ID NO: 310832 - DNA, 286 bp, Unknown
  Bacterial polypeptide expressing nucleotide sequence isolated from the Sargasso Sea
ttaatggctggcttagacggtataaaaaataaaattaatccaggaaaatcactcgataaagatttatatgcgttgtcagaaaatgaagttaaaaaggttccaacagtatgtggatcattaagagaagcattagagagtttagatcgagacagagcttttttaaaacaaggaaacgtattcaccgacgatcagattgatgcttatatagctttaaaatttgaagaaattcataacttcgaacacactcctcatcctatagagttcgaaatgtattacagttgttaat

SEQ ID NO: 310833 - DNA, 973 bp, Unknown
  Bacterial polypeptide expressing nucleotide sequence isolated from the Sargasso Sea
aatgaaaacatacgaatatatttggcttgatggttatcagccagaaccaatgatgagaagtaaagttaaggctactgaagatgaaacaccgcctgactggtcttttgatggttcatctactcaacaagcagaaggtggaagctcagattgtttactattacccgttcagacatattctaatcctgatggacatgacattgtcatgacgcaagttcaagccgctgatcatacaactcatccatctaactttagagcagctgctgcagaagtggttacagatgagtggtggtttggttttgaacaagagtacttttttactgatcctcaaacaggtgaacctcttggatgggaagatggtgagccaagagagcaaggggagtattattgtggagtaggtgcaggaaatgttgttggaagagaaatttctgatacacatcttcaagcatgtcttgatatgggaataactttaaccggaaccaatgctgaagtagctcttggacaatgggaataccagtgttttggtaaaggtattaaggcagcagatgacctttgggtaagtcgatacttgctttataaaattgctgaagaatttggtgttggtgtaaatatccacccaaaaccaaaaacaggtgactggaacggatctggtatgcactgtaacttttcaaacgaagcaatgagaactgcaggttctgaagagttatttacttctatgtgtgacaagcttggtgaagttcatgaagaaggtattgcttcatatggttcagataatgatatgcgtcttacaggacttcatgaaactcaaagcattgataagttctcttatggtgtcagtgacagaggtgctagcataaggatacctgtctacactgtagaacatgattggaatggataccttgaagacagaagacctgcttcaaatgcagatccttataaaattttggctcatatagtaggaactctttctaaataa

SEQ ID NO: 310834 - DNA, 409 bp, Unknown
  Bacterial polypeptide expressing nucleotide sequence isolated from the Sargasso Sea
tacatgctttataagatagctgaagaatttggtgttggtgtaaatatacatccaaaacctaagacaggtgactggaatggttcaggaatgcatactaacttttcaaatgaagcaatgcgaactggtggtagcgaagaattatattcatcaatttgtgacaaattaggtgcggtgcatgaagaggggattgcctcatatggttctgataatgatatgagacttacaggcttgcatgaaactcaaagtattgagaaattctcatatggtgtaagtgatagaggtgcaagtataaggatcccggttgctacagttgaaaatgattggaatggatatcttgaagacagaagacctgcttcaaatgcagatccatacaaaatactgtctcacatagtaggaactcttacataat

SEQ ID NO: 310835 - DNA, 321 bp, Unknown
  Bacterial polypeptide expressing nucleotide sequence isolated from the Sargasso Sea
aatgagtgcgagcagtgttttaaaattcattaaagataaagatgctgagtttgttgatttaagatttacagatccaagaggcaaactacaacatttaactatggatgccactgcagttgatgaaaatatgctagatgaaggcgttttttttgacggttcatcaatagcaggatggaaagccatcaatgagtcggacatgattttaaaaccagattcatcgagattttttttagatccttttacatcacataatactgtagttttattttgtgacatattagatgcaattaaaaaaaccccttatgaaagagacccaagagg

SEQ ID NO: 310836 - DNA, 1009 bp, Unknown
  Bacterial polypeptide expressing nucleotide sequence isolated from the Sargasso Sea
tatgggcaaatcaaaactagaatatttatggttggatggatacaaaccaacccaaagcttacgcggaaaaactaaagttgtatctgattttagtggaaagcttgaagactgtcctatatgggcatttgatggaagttcaacacaacaggctccaggtggatcttctgactgcttacttaaacctgtggctatttatcctgatccagttagaaaaaacggatggattgtaatgaatgaagtattgaattcagatggatctcctcacgaatcaaatggtagagctactattgacgatgatgacgatgatttttggtttggatttgaacaagaatacttcttgtgggatcctgaaacaaatcttcctctaggatttccaaaagatcaaactcctcaaggtcaattttattgttctgttggagggaaaaacacttttggaagagaggttatggacagacatcttgatatttgtattgatgcaggaattaatattgagggtacaaatgctgaagttgcagctggtcaatgggagtttcaaatctttgcaaaaggtgctgccaaagcaggtgatgaagtttgggtagcacgatattttttggaaagattagctgaagaatatggtttagctattgaataccatccaaaacctcttggtgctactgattggaatggttctggaatgcatgctaatttttcaaactcaaccttgagaacttgtggatctaaagaaacatacgaaacaatatgtgaagcatttagaccagtcgttaatgatcatattgctgtgtatggtgcatataatgatcaaaggttgactggtgaccatgaaacacaatctattactgaatttagctacggagtttctgatagaggagcttccataagaattccaattattactgtagaaaatggatataaaggatggctcgaagatcgtagacctgcatctaatggtgatccatataaaattgcagcaatcattataaaaactgttaaatctgctaagatttaa

SEQ ID NO: 310837 - DNA, 481 bp, Unknown
  Bacterial polypeptide expressing nucleotide sequence isolated from the Sargasso Sea
ccttggtcagtgggaatatcaatgttttggtactggaataaaagcagctgatgatctttggattagcagatatcttctatataaaattgcagaagaatacggagttggtgtaaacattcatcctaaaccaaaaactggtgattggaatggttcaggaatgcatactaacttttcaaatgaagaaatgagatccaaaggctcagaagaattattttcttcattgtgtgacaagcttggcgctgttcatgaagaaggaattgctgcctatggctctgacaatgatatgaggttgacaggcctccatgaaactcaaagcattgatcaattctcatatggagtaagtgatcgaggagctagtataaggattccagtatatacagttgagcataactggaacggttacttagaagacagaaggcctgcttcaaatgctgacccgtataaaattttagctcatattgttggaactctcacaaaatag

SEQ ID NO: 310838 - DNA, 394 bp, Unknown
  Bacterial polypeptide expressing nucleotide sequence isolated from the Sargasso Sea
gcctcttaagggtgattggaatggtagtggatgccatactaattttagtactgctataatgcgttgtgatattaaaacagttagcgatgatagggaaagtggaggtgataaaactgggttagattacattcaggaagccattaataagttgagtaaaaaacatcaagaacatatgaaggtttatggcgatgacaacgatcaacgtatgacaggagaacatgaaacggctagttttgataatttttcatgtggtattggtaatcgtggttgttcggtgcgtattggtaacgatactttgcgcgataaatgtggttattttgaggatcgtcgtcctgcaagcaatatgaacccatatttggttactggtaaattgcttgaaactgtgatggaataa

SEQ ID NO: 310839 - DNA, 358 bp, Unknown
  Bacterial polypeptide expressing nucleotide sequence isolated from the Sargasso Sea
taaaaagggtgcaagatgtgaaatcagatttccagatgcagcaggaaacccttacttaacattctctgcaatgttaatggctggtttagatggaattaaaaataaaattcatcctggagagtcatttgacaaagatctttatacattaccagaggaagaaattaaaaatattccaactgtatgtggatctctaagagaagctatggaaagcttagatactgatagggattttttaaaacaaggaaatgtatttactgacgatcaaattgatgcatacatcgcattaaaatttgaagaaatatataatttggaacacaccccacatccaattgagtttctgatgtattacagtagctaa

SEQ ID NO: 310840 - DNA, 922 bp, Unknown
  Bacterial polypeptide expressing nucleotide sequence isolated from the Sargasso Sea
aatgagaagtaaagtaaaagcaaccgaagaaaaatcagcaccagactggtcatttgatggttcatctactcaacaagcagagggaggaagctcagactgtcttcttcttcctgttcaaacttattctaatccaaatggacacgatatagtaatgacacaggtacaggctgcagaccatacaactcatccatcaaactttagagctgcggcagcggaagttgtttccgacgaatggtggtttggttttgaacaagaattctttttaactgatgctaaaactggtgaaccacttggctgggaagatggtacaccaagagagcaaggtgaattttattgtggtgttggagcgggcaatgttgttggtagagcgatatcagatgcacatctaaaagcttgtatagatcttgggattacgcttactggaactaatgcagaagttgcacttggccaatgggaatatcaatgctttggaaaaggtattaaagcagctgatgatttatgggtaagccgatatttgctcatgaaaactgctgaggaacacggcgttggagtgaactttcacccaaaaccaaaaactggtgattggaacggttctggtatgcacactaatttttctaatgaacaaatgagatcttctggatcagaagaattatttacatcaatgtgcgacaaacttggaaaggttcatgaagaaggtattgcagcttatggatctgacaataatatgaggcttactggacttcacgagacacaaagtatcgataaattttcatatggtgtaagtgatagaggtgctagtatacgtattccagtttatactgttgaacataattggaatgggtatcttgaagatagaaggccagcatcgaatgctgatccatacaaaattgtatcacatatagttgggactttgactaaataa

SEQ ID NO: 310841 - DNA, 973 bp, Unknown
  Bacterial polypeptide expressing nucleotide sequence isolated from the Sargasso Sea
atgaaaaaactagaatatatttggttagatggttataagcctgaacctaatctaagaagtaaagtaaaagtaactgacagttcccccccagattggtcttttgacgggtcatcaaccctccaagcagagggcggaagttcagactgcattctaaggccagtaaatgagtacattggcccaaggagctcggataatcttgtcatgtgtgaggttttatccccggataaaacacctcatccttcaaatacaagaaatgcatgtgttgatttggtgtcagatgactggtggtttggttttgagcaagaatttttcttcacgaacccagaagacggaacaattctaggttgggaggatggaattccaagaccacaaggggaatattattgcagtgttggaagcagaaatgtgagagccagagaagtttccgaagctcatatggatgcttgtcttgaggcaggaattcagattacaggaactaatgctgaagttgctctcggtcaatgggagtattgtgttctaggcgaaggtttaaaagctgcagatgatttatgggtgagtcgttatctgcttcatttgatttgtgaagaatatggagtttctgcaaatttccatcctaaaccacaaaaaggtgattggaatggttcgggcatgcatacgaatttttcaaacagcgaaatgagagattccggtacggaagacctaatgaaagccatgtgtgataaattgggcgaagtccatgaagaaggaatttcaaactatggatctgataatgatatgcgattaacaggtgaccatgaaacgcaggacatcaatacattttcatatggagttagtgatcgaggcgccagcataagaattccgatctatacggttgaaaataattggcatggatacttagaagacagaagaccagcatcaaacgctgatccatataagataatttcacatatcgttggaactctaacaaagtaaa

SEQ ID NO: 310842 - DNA, 362 bp, Unknown
  Bacterial polypeptide expressing nucleotide sequence isolated from the Sargasso Sea
aggaactgcaaaaaaagcagaagcttatttaaagaaatctggtattggtgataaagcttattttggtccagagccagaattttttgtatttgatgatgttagatacaagaatgatatgaatgagactagtttctcaattgatagttcagaaggtccttacaatactggaaaaaaatacgaaaacggaaacatgggacatcgtcctggaattaaaggtggttacttcccagtacctccggttgatagtgctcaagatatgagaagcgaatatcttaaagcaatgaaggatatgggaattaaagtagagaaacatcaccacgaagttgccccaagtcaacacgaacttaggaatgtattttagt

SEQ ID NO: 310843 - DNA, 338 bp, Unknown
  Bacterial polypeptide expressing nucleotide sequence isolated from the Sargasso Sea
tatgagcgctagtaaaattataaaacttataaaagacaaggaagttgaatacgtagatttaaggtttactgatccaagaggaaaacttcaacatctaacaatggattgttctgttgtagatgaagacatgcttgataaaggcgttttttttgatggctcctcaattgctggatggaaggcaataaatgagtcagatatgattttaaaacctgatttatctagaccaataattgatccttttaattctcacacaactttaaatattttttgcgacattatggacgcagtaaagaaagactcttacggtagagacccaagaggaactgcaaaaaaagctg

SEQ ID NO: 310844 - DNA, 772 bp, Unknown
  Bacterial polypeptide expressing nucleotide sequence isolated from the Sargasso Sea
atgtgccaagtacaaactggagaacatgaaacgcatccttcaaactcaagggcagcagctgatgcagttgtcagtgatgaatggtggtttggtttcgagcaagaatatttcttaactaaccctgatggaacaatcctcggttgggaagatgggacacctagcagacctcagggcgaatactactgtgctgttggtgcagccaatgttaaaggaagagaaataagtgaagctcacttagatgcatgtttagatgctggaatagaattgaccggaacaaatgctgaagtcgctcttggtcaatgggagtatcaatgtctgggtaaaggtatcaaagctggtgatgatttatgggtaagcaggtatctgctacataaagtggctgaagaattcggcgtttctgtaaacatacaccctaaaccaaaaacaggtgattggaatggttctggtatgcatactaacttttccaatgaagctatgagaacttctggttcagaggaaatgtttacatctatgtgtgaaaaactaggtgctgttcacgaagaaggaatatctctgtatggctctgataatgacatgaggctaactggtcttcatgaaactcaaagcatcgatcaattctcttacggtgttagtgatagaggagcaagtattagaatccctatctatactgttgagcatgactggaatgggtatttagaggacagaagacctgcttctaatgccgatccatacaagatcattgcccacatagttggtactttaacttcataat

SEQ ID NO: 310845 - DNA, 937 bp, Unknown
  Bacterial polypeptide expressing nucleotide sequence isolated from the Sargasso Sea
atgaaaaagttagaatatatatggctagatggatttaagccagagccaagcctaagaagcaaggtcaaagtgacagatgaaagcccacccgattggtcttttgatggctcatcaacccaacaagcagatggatcaagctctgattgtattctcaggcctgtaaatgaatacacgggacctagaaactcggacagtctggttatgtgtgaagttttatcaccagataggtctgcacatccatcaaatacgaggagcgcctgtgttgatcttgtaacagatgattggtggtttggctttgaacaagaatattttttcacgaaccccgaggacggaacaattctaggctgggaagatggaaccccaagaccacaaggcgattactattgcggtgttggttctggcaatgtccaagctagagaagtttctgaggcacacatggatgcttgtctcgaggcaggcattatgattaccggcaccaatgcagaggtagcgcttggtcaatgggagtatcaatgttttggcaagggccttaaagcagctgatgatttgtgggtaagcagatatttactccatctaatcgcagaagagtacggcgtttctgtaaacattcacccaaagccgcaacaaggcgattggaatggttctggaatgcacaccaatttttccaacgaacaaatgagaagcgcaggctcagaagagctgatgacttctatgtgtgacaagctgggagaggttcatgcagaagggatatcaaattatggttcggataatgatatgcgattgactggaaatcacgaaactcaaagcattgatacattctcatacggagtaagcgatagaggagcgagtatcaggatccctatctatacagttgagaacaactggaaatggttatctagaagacagaaggccggcttcaaatgcagatccatataga

SEQ ID NO: 310846 - DNA, 1366 bp, Unknown
  Bacterial polypeptide expressing nucleotide sequence isolated from the Sargasso Sea
ttgccagccaacgcgctcggaagcgtaccccgcttcgactcggtggacgaagcgcagacatatcttgcgcaacacggtgtgaagtacgtgctcgcgcaattcgtcgacattcacggcgtggccaaggcgaagtcggtgccggtcgcgcatctgggcagcgtgctgaccgcgggcgcgggcttcgcgggcttcgcgatctggggcgtcggcatcgagccgaacgggccggactacatggcggtcggcgacctcgcgacgctgacgccggtgccgtggcaatccgggctggcgcgcatcgcgtgcgacggtcacgtcgacggggcaccgtgggcgttcgattcgcgcgtgacgctgaagaagcaggttgcccgcctgaccgagcgcggctggacgctttttaccggcctcgagcccgagttctcgctgctgaagcgctcggcgtcgggcacgctcgagccgtgcgatccgagcgatacgctggcgaagccctgttacgactacaaggggttgtcccgcacgcgtgtgttcctggaaaagctcaccgaatcgctgcgtgcggtcggcatcgacgtctaccagatcgaccacgaggatgcgaacggccagttcgaaatcaactacacgtacaccgattgcctgacgtcgtgcgatcactacgtgttcttcaagatggctgcgtcggaaattgcgaacgagctcggcatgatctgttcgttcatgccgaagccgttcgcgaaccgtccgggcaacggcatgcacatgcacatgtcgatcggcgacggcaagcgcaacctgttcgccgacgacggcgacgccctgggcatgggtctgtcgacgctcggctatcggttcacggcgggcctgctcgcgcacgcgcccgcgctgacggcgctctgcaacccgacggtgaactcgtacaagcgcctcgttgtcgggcgctcgctgaccggcgcgacctgggcgcctgcgtacatcagctacggcgacaacaatcgttcgacgatggtgcggatgccgggcggccggatcgaactgcgcttgcctgacggtgcatgcaacccgtatctcgcaacggccgccgtgatcgtcgccgggctcgacggcatcgaccgcgacctgtcgccgggcgcgcccgcgaacgagaacctgtacgagtggtccgcgcagaaactccgcgaccacggcatcggcgtgctgccgcaaaccctcggcgaggcgctcgacgcgctcgaagccgaccggacgatctgcgatgcgctcggaccggtggtcaacgagttcatcaagctcaagcgaatggagtggctggaatacatgcgccacgtatcggactgggaaatcaagcagtacgtcgaatttttctgag

SEQ ID NO: 310847 - DNA, 400 bp, Unknown
  Bacterial polypeptide expressing nucleotide sequence isolated from the Sargasso Sea
actgcttcagtcaggattccaaaataactacactgcgagtcctaaagcaaaaagagttgaatttagatgtccagacccttcgtccaacccatatcttgcattttcagctatattgatggctggcttagatggagtaaaaaataaaataaatccaggaaagccaactgatatcaatatttatgaagctcctgcaaacgtacttgctaaaataccttcaacaccaggatcgctttcagaatctttaaatgctctagaaaaggatcataagtatttattagaaggtaacgtattcactaaagataatattgaaacttatatttcttacaagagagaaaatgaggtaagcccaatggatttaagacctcaccctcatgaatttaatctttattacgacgtataa

SEQ ID NO: 310848 - DNA, 976 bp, Unknown
  Bacterial polypeptide expressing nucleotide sequence isolated from the Sargasso Sea
atgaaaaaatatgaatatgtatggttggatggataccaacctgagccttacttaagaagtaaagtaaaagtaactactgatagaacaccacctgaatggtcgtttgatggctcatcaacccaacaagccgatactgaaggttcagattgtattcttataccagttcaagaatataaaaatccattgtttggagattctctagtaatgtgtggagttcaaacaagcgccagagaagcacattcaacaaatatgagacattccgcctctgaaatcgttactgatgaatggtggtttggttttgaacaggaatattttcttacaaatccagatggttcaattttaggttgggaagaaggaatccctgaaagagctcaaggtgaatattattgcggtgttggagcagcaaatgttaagggcagagatgtatctgaagctcatttagaagcatgcctagaagctggaattgaacttactggaacgaatgctgaagttgccttaggtcaatgggaatatcaatgcttaggcaaaggaattaaagctggtgatgacctatggatgagtagatatcttcttcagaaagtcggtgaagaattcgatgtgtgtgtaaacttccatcctaaacctcaagaaggagactggaacggatcaggtatgcatactaatttttcaaatgaagtaatgagatcaaatggttctgaagaacttttcacaggtttttgtgaaaagctaggtgaagttcatgatcaaggtatagcttcttacggatcagataatgataaaagactaactggccttcatgaaacacagaaaattactgaattttcttacggtgttagtgatagaggcgcaagtattcgtattcctatttatactgtagaacataattggaatggatatcttgaggatagaagacctgcatcaaatgctgatccttataaaatcatttcacatattgttggtactttaacaagctaaa

SEQ ID NO: 310849 - DNA, 289 bp, Unknown
  Bacterial polypeptide expressing nucleotide sequence isolated from the Sargasso Sea
tatgttaatggcaggtttagatggaataaaaaataaaattgatccaggaaaatcttttgataaagatttatatgcattatcagaaaaagaattaaaaaaagttccgacagtttgtggttccttgagagaagcgatggaaagtttagataaagacagaaaattcttaactcaaggaaatgtatttacagatgatcaaatagacgcttatatagctttgaaatttgaagaaatacataattttgaacatacgcctcaccctattgagtttgatatgtattatagttgttag

SEQ ID NO: 310850 - DNA, 535 bp, Unknown
  Bacterial polypeptide expressing nucleotide sequence isolated from the Sargasso Sea
aacgttgaaggaatcaacgctgaagtagctgccggccagtgggaattccaggtttttgccaagggtgcaaaacgtgccggtgatgaaatatgggttgctcggtacctgcttgaacgcattggcgaaaaatatggctatgcaattgattggcatccgaaaccacttggcaaaactgactggaacgggtctggtatgcatgcaaacttctcaaatgaattgatgcgtacatgtggtgataaagaagtcttcaccactatttgcgaaggttttggtggtgttgttgaacggcatatttccgtttatggtgccgacaacgaccaacgcttgaccggtcagcacgagacgcaaagcattgaccagtttagttacggtgtttctgaccgtggtgcatccattcgtattcccgttggcacgattgatgatggctggaaaggccgtcttgaagatcgccgacctgcatcgaatgctgacccatacaaggtcgctgctgcaattatcaagactgtcaaaggtgctgccggagctgcagtctgat

SEQ ID NO: 310851 - DNA, 385 bp, Unknown
  Bacterial polypeptide expressing nucleotide sequence isolated from the Sargasso Sea
atcatgtagaattccaattactcaaagcaaaaaagctgcaagatgtgaagttcgtttccctgatgcagctggaaacccttacttaacattttctgcattattaatggctggacttgatggaattaaaaataaaatcgatccaggtaaatctttagataaagatttatatgctttaagtgagtctgaagttaaaaaaattccaacagtttgtggttctttaagagaagctatggagagtttagataaagatagaaaatttttaactcaaggtaatgttttcactgacgatcaaatagatgcttacatcgctcttaaatatgaagagatttataattttgagcacactccacatccaatggagtttcagatgtattatagctgttag

SEQ ID NO: 310852 - DNA, 715 bp, Unknown
  Bacterial polypeptide expressing nucleotide sequence isolated from the Sargasso Sea
gcatgtgtcgatattctttcagatgattggtggtttggttttgaacaagaatactttttcacaaatcctgaagacggaacaatacttggttgggaagatggaaccccgagaccacaaggggactattattgcggcgtaggatctggcaatgttcaagcacgcgaagtttctgaggcacatatggatgcttgtctagaggcaggcattatgatcacaggcactaacgcagaagtagcgcttggtcagtgggaatatcagtgcttcggcaagggccttaaggcagcagatgatttatgggtcagcagatacctcctccatttgattgcagaagagtatggcgtgtctgtaaacattcatcctaaacctcaagagggagactggaacggctcgggaatgcatactaatttttcaaatgaacaaatgagaagttcgggctcggaagaactgtttaattccatgtgtgagaaattgggcgaggttcatgcagaaggcatagctaattatggctcagataatgataagaggttgacggggaatcatgaaacccaaagcattgatactttttcatatggtgtgagcgacagaggagcaagcatcagaatacccatctatacagttgaaaacgactggaacggttatctggaggacagaaggcccgcttccaatgcagacccgtataaaattatttcgcacattgtcggtacattgacgtaac

SEQ ID NO: 310853 - DNA, 572 bp, Unknown
  Bacterial polypeptide expressing nucleotide sequence isolated from the Sargasso Sea
cgatgtttatggcagagagatttctcaagcacatatggatgcctgtatagatgcgggtattaaaattaccggaaccaatgcagaagttgcgctaggccaatgggaataccaatgttttggaaagggcctcaaagcagcagacgatctctggatgagtagatatcttcttcatcttgtagcagaagagtttggtgttgcagttaatacccatccaaaacctcaagaaggtgattggaacgggtctggaatgcataccaatttctcaaatgatgaaatgagaaactctggctcggaagagcttatgaacgaattgtgtgaaaaacttggagcagtgcataaggaaggtatcagcaattatggttcggataatgaaaaaagactgaccggaaatcatgaaactcaaagtattgatacattctcatatggagtgagcgacagaggcgcgagtattcggattcctatctatacagttgagaacaactggaatggttatctagaagacagaaggcctgcttcaaatgcagatccatacaaaatcatttcgcatattgttggcacactaacaaaataaa

SEQ ID NO: 310854 - DNA, 601 bp, Unknown
  Bacterial polypeptide expressing nucleotide sequence isolated from the Sargasso Sea
aggcgaatattattgtggagtcggagcaggaaatgtagttgggagagagatctcagatgcacatttagaagcttgtttagatcttggcataaccctgacgggaacaaatgcagaggttgctcttggccaatgggaatatcaatgttttgggaaaggcattaaggcagctgatgatctctgggtatcaagatatcttctttataagattgctgaagagtatggtgttggtgtaaatattcatccaaaacctaaaacaggagattggaacggctcaggaatgcattgtaatttctcaaatgaggcaatgagaactgctggttctgaagaacttttctcttcaatgtgtgacaagttaggcgaagtccacgaagaaggtattgcttcttatggctcggataatgatatgaggcttacaggtctgcatgaaacacaaagcatcgataagttctcttatggtgtcagtgatcgtggtgcaagtataagaatcccagtctacacagttgagcatgactggaacggataccttgaggacagaagaccagcatctaatgctgatccttacaagatattagctcatatagtaggaactcttactaaataa

SEQ ID NO: 310855 - DNA, 685 bp, Unknown
  Bacterial polypeptide expressing nucleotide sequence isolated from the Sargasso Sea
atccacaacgtggccaacgcctacggcaagaccgccacgttcatgcccaagccctaccacggcgacaatggctccggcatgcacgtgcaccagtccgtgtggaaggacggcaagaacctgttcgctggcgacggctatgccggtctgtcggacttcgcgctgtactacatcggcggcatcatcaagcacgcccgtgccctgaacgccatcaccaaccccggcaccaacagctacaagcgcctggtgcctcacttcgaagccccggtgaagctggcctactcggccaagaaccgttctgcctcgatccgcattccttatgtggccaaccccaagggccgtcgcgtggaagcccgcttccccgatccactgatgaacccttacctgggcttcgctgccctgctgatggccggtctggacggcgtggaaaacaagatccatccgggcgaagccgccacgaaggacctgtaccacctgcctccagaagaagacaagctggtgcccaccgtgtgccacagcctggaccaggccctggagcacctcgacaaggaccgcgcgttcctgaccaagggtggcgtgttcaccgacagcatgatcgacgcctacatcgatctgaagatgaacgaagtgacccgcttccgcatggccgtgcaccctgtcgagtacgacatgtactactcgctgtaat

SEQ ID NO: 310856 - DNA, 658 bp, Unknown
  Bacterial polypeptide expressing nucleotide sequence isolated from the Sargasso Sea
caaacagctacctttatgccaaagcctgttgcaggtgacaacggaactggcatgcatacgcaccaatctatctggaaagacgggaaacctgtatttgctggcggtgaatactctggtttatcggaaacatgtttacactacattggtggaattataaaacatgcaaaagctattaattgtttcactaatccttcaaccaattcttataaaagattgattcctggttttgaagcgccggtacttttagcctattcagcgaggaatagatcagcttcttgcagaataccttttgttgggagtccgaatggtaaaagggttgaggtaagatttccagacgctactgccaacccttatctagcattttctgcaatgttaatggccggtttagatggtatacaaaataaaatacatcctggcgaaccaatggataaagacctttatgaactacctgaaaatgaattacaaaatattcctacagtatgtggatcacttagagaagctgtggatgctttaaagaaagatatgtctttcttgaccaaaggtggggtatttacagaagatcagattgaagcgtatattgatctaaaaatggaggaagttattgagtttgaacacgctccacatccagttgaatttaaaatgtattactctagctaaa

SEQ ID NO: 310857 - DNA, 301 bp, Unknown
  Bacterial polypeptide expressing nucleotide sequence isolated from the Sargasso Sea
actttcgctgctatgttaatggctggcttagatggtatcaaaaataaaattcatccaggtgagtcttttgataaagacttgtatgatcttccacctgaagaagtaaaagcaataccaacagtttgtggttctttaagagaagcaatggaaagtttagataaagatagagaatttttaactcaaggtgatgtatttaccgatgatcaaatagatgcttatattgctttgaaatttgaagaaattcataaatttgaacatgcacctcatcctgtggaatttgagatgtattacagtagttaat

SEQ ID NO: 310858 - DNA, 838 bp, Unknown
  Bacterial polypeptide expressing nucleotide sequence isolated from the Sargasso Sea
ggtggtagttcagattgtattttgattccagtccaaacatataagggccctttgttttctgattcactagtaatgtgtgaagtacaaaatggtgatcatgaagttcatccgtctaatactagagcagctgcagctagcattgtatctgatgagtggtggtttggctttgaacaagaatatttttttactggtgataatggagagccgttaggttgggaagatgggactcctcggcctcaaggtgattactactgcggtgttggagcgggaaatgtagaagggagagatatttctgaggcacaccttgaagcttgcttagaagctggtatcgaattgacaggaactaatgctgaggttgctctaggacagtgggagtaccaatgctttggcaagggaataaaagcggcagacgatctttgggtgtctagatatttactttataaaattgccgaagattttggcgtgggtgtaaatattcatcctaagccaaaaacaggtgattggaatggttcaggaatgcacaccaatttttctaatgaagaaatgagaacggctggttcagaagatctatataattccctttgtgataagctaggtcaagtacacaaagagggaatagcgctatacggttcagataacaatatgagattgaccggccttcatgaaacacaaagtattgaaaaattttcttatggtgttagtgataggggagcaagtattaggattcctatttatactgttgaaaacaactggaatggttacttagaagatagaagaccggcctctaatgctgatccttataaaataattaatcatattgtttctactttgaaataat

SEQ ID NO: 310859 - DNA, 682 bp, Unknown
  Bacterial polypeptide expressing nucleotide sequence isolated from the Sargasso Sea
atgagttctaaaaacattcttaaacttatgaaagacaaacaagtcgagtttgttgatttaagatttacagatcccaaaggtaaacttcaacatttaacaatggatgcgactgttgtggacgaggatatgctcgacaaaggagttttctttgatggttcttcaatcgcaggttggaaagctataaacgagtcagatatgatattgaaaccagatttggataaaccaattattgatccatttaattctcacacaactcttaatatcttttgtgatattttagatgcagtaaaaaaagatccctacgaaagagatccaagaggaacagcaaaaaaagctgaagcatacttaaaaaaaacaggtattggtgacaaatcttattttggacctgaaccagaattctttgtttttgatgatgttaggtttaaaaatgatatgaacgaaactagctttacaatagacagttcagagggaccatacaatactggcaaaaaatatgaaaacggtaatatgggacacagacctggaattaaaggaggctattttccagttcctccagtagatagcgctcaagacatgagaggtgaatatttaaaagctttaaaagatatgggtgtgaaagtagagaagcatcaccacgaggtggctccaagtcagcatgagttgggtatgtattttggaacat

SEQ ID NO: 310860 - DNA, 613 bp, Unknown
  Bacterial polypeptide expressing nucleotide sequence isolated from the Sargasso Sea
cagggaatgcacactcaccaatctattttggaaaggtagcaccccagttttctcaggaaataaatatgctggattatctcaaacagcactttattacatcggtggaattttaaaacatgcaaaagcaataaatgctttttcaaacgcaacaacaaacagttataaaagattaataccaggattcgaagctccagttcttttagcttactctgcaagaaatagatccgcttcttgtagaattccaattacattaagtaaaaaaggagcaagatgtgaaatcagatttcctgatgcttcaggtaatccatatttaactttcgcagctatgctaatggctggattagatggaattaaaaataaaatagatccaggaaaatcttttgataaagacttatatgctttatcggagaatgaagttaagaaagttccaactgtttgtggatcattaagagaagcacttgaaagtttagatagagacagagcttttttaaaaaaaggaaatgtttttactgatgatcaaatcgatgcttatatagctttaaaatttgaggagatacataatttcgaacatactcctcatccaatagagtttgaaatgtattacagctgttaa

SEQ ID NO: 310861 - DNA, 538 bp, Unknown
  Bacterial polypeptide expressing nucleotide sequence isolated from the Sargasso Sea
atgagtgcagcaaacgttttaaaatttattaaagaaaaggaagccgaatttgtggatcttaggttcactgatccaagaggaaaactgcaacatttaacaatggatacttcagtagttgacgaaggcatgttgaacgatggtgtattttttgacggttcatcaattgccggttggaaagcaattaacgaatctgacatgattttaaaacctgatactgcaagaatgttcatggatccttttacgtctcataataccgtagttttgttttgtgatattctagatgcaattaaaaaagatccttatgaaagagatccaaggggtgttgctaaaaaagctgaagaatatttaaaagcttcaggtattggtgataaagccttttttggacctgagccagaattttttgtgtttgacgatgtaagaatcaaaaatgatatgaatgagtgtggatttaaattagatagtaaagaaggtccttacaactcaggtaaagaatatgaaaatggaaatatgggtcatagacctcaaattaaaggaggat

SEQ ID NO: 310862 - DNA, 550 bp, Unknown
  Bacterial polypeptide expressing nucleotide sequence isolated from the Sargasso Sea
tatgcgggtttatcagaaactgccctgtactacatcggcggtatcatcaagcacgcgaaagcaattaatgccttcactaacccttctacgaacttcgtacaagcgtttagtgccacatttcgaagctccagtaatgctggcttactcagcccgtaaccgttcagcttctatccgtatcccactggtaccaagtgcgaaagcgcgtcgtattgaagtgcgtttcccggatccggcggctaacccgtacctggcatttgttgctcagttaatggctggtttagatggtattcagaacaagatccacccaggcgatgccatggataaagacttgtatgacctgccaccagaagaagaagcactgatccctcaggtctgtggttctttagacgaagctctggatgcactggatgcaaaccgcgctatcttcactaaaggcggcgtcatgtctgacgcgatgatcgatgcgtacatcgaactgaaacgcgctgaagctaaacgtgtatctgtcgcagttcacccactggaatacgaactgtactacagcgtttaa

SEQ ID NO: 310863 - DNA, 595 bp, Unknown
  Bacterial polypeptide expressing nucleotide sequence isolated from the Sargasso Sea
tgttggagcagacgaagtatatggtcgttcaatttcagaagatcatgcaactgcttgtatagaagctggtttaaatatatctggaacaaatgcagaagttatgccaggacaatgggaattccaaatcggtccggtaggtgcccctgatattggagatcaaatatggattgcaagatggcttttgtataggattgctgaagactataacatttctgcaactctaactccgaagccagtaaaaggagactggaatggtgcaggtatgcatacaaacttttctacaaaacaaatgcgtgaagacggtggatacgatgcaatagtggcaggatgtgaggctttaggtaaaaatgctgaatttcatgttcaaaactatggtgctgggatagaagatcgtctcactggagaccacgaaactcaaagatttgacactttttcttatggtgtaagtgacagaggagcttcaattaggattccatggcaagttgaagtagataaaaagggctatttagaggacagaagaccaaacgctaacgcagatccttatgtgattgcaacagtaatgattgatactgtctgttctgcagcatcgagttaa

SEQ ID NO: 310864 - DNA, 487 bp, Unknown
  Bacterial polypeptide expressing nucleotide sequence isolated from the Sargasso Sea
atgagtgctaaagatgttttaaaatttattaaagataaagaagcagaatttgttgatttaagatttacagatccaagaggtaaattgcaacatttaacaatggattgcactgcagttgatgaaggtatgttaaacgacggtgtattctttgatggatcttcaattgctggctggaaagctataaatgaatctgacatgattttaaaaccagatttatcaagattttttttagacccttttacttctcataatactgttgttttattttgtgacattttagatgcaattaaaaagacaccttatgaaagagatccaagaggagttgcgaaaaaagctgaggaatatttaaaaaagtctggaattggtgataaagcattctttggtccagaacctgaattttttgtttttgacgatgtaagaattaaaaatgatatgaatgaatgtggttttaaacttgatagtaaagaaggtccttataactcaggaa

SEQ ID NO: 310865 - DNA, 415 bp, Unknown
  Bacterial polypeptide expressing nucleotide sequence isolated from the Sargasso Sea
tttagcttactcatctcgtaaccgatcagcttcctgccgaattcccttcgtaagcaatccaaaaggaaagcgcgttgaagtccggtttcctgacgccgctagcaatccctatttggctttttcggcgatgcttatggcaggactagacgggataaagaataagatacaccccggtgaaccgatggataaagatctatatgaactccctccggaggaattaaaagatattccgacagtatgcggctcactgagggaagctcttgctgcacttgacgcggatagatcctttttaacgcaaggcggtgtttttgatgacgatcaaatcgacgcttacattgagttaaaaatggaggaagttctggcttttgaacaaactccgcatccaatagaatttcaaatgtactattcagtttaa

SEQ ID NO: 310866 - DNA, 943 bp, Unknown
  Bacterial polypeptide expressing nucleotide sequence isolated from the Sargasso Sea
aatgccggaccttgattccggttatcttgacccgttttattctgaaaagacgtactgcttgcactgtaacgtcgtggaaccagagagtggaaagctctatggcagggaccctagaagtacagcggtcaaagcagaagaatacctcaaaaagactaaaattggaactaaagcattttttgggcctgaagcagagttttttctattcgatgatgttaagttttcaaactcaatgaataaggttagtttcgaagtagatgctatggatgcatcatggaatacagatacaagttatgaaatgggaaatatgggccacaggccaggagttaagggtggatattttccagtaaatcccaccgatgctggtcaggatattagatccgagatgttgtctacgatgaagagaatgggaatgaaagttgataaacatcatcacgaagtagcttcatgccagcatgagcttggtcttgttttcgactcgctaaaagctcagggagataatcttcaaaaatataagtacgtaatccaaaatgtggctcattcctacggcaaatccgctacttttatgccaaaaccagttgccaatgataatgggacagggatgcatacgaacatgtcaatctgggatggaaacaaatctgtttttgctggtaaagaatatgcaggattatcaaaacatgcactacactatataggcggaatattgaagcatgccaaggcattgaatgctttcactaacccatctacgaactcgtacaagagattaatacctggatttgaggctcctgttttactagcctattcagcaaaaaataggtctgcaagcatcagaattccttacgttgagtcatctaaagcaactagagtagaggctagatttccagatcccacagccaatccatatctttcttttgcagcattgttatggctggatttggacggataa

SEQ ID NO: 310867 - DNA, 499 bp, Unknown
  Bacterial polypeptide expressing nucleotide sequence isolated from the Sargasso Sea
atgagttcaagtaaagtactaaaattaatgaaggataaagacatagaatatgtcgatctaaggttcactgaccctagaggaaagcttcaacatttaacaatggatgcaacaatagttgatgaaggtatgttaaatgatggagttttttttgatggttcttctattgcaggatggaaagcaataaacgagtcagatatgattttaaaaccagatttaaataggcaaattgtagatccatatacttcacataatactttaatattattctgtgatatttttgatgctgtaaaaaaagactcttatgaaagagatccaagaggaatagcaaaaaaagcagaggcatatttaaaaaaaaccggagttggagataaagcttattttggacctgaaccagagttttttgtgtttgatgatgtaagaattaaaaatgatatgaatgaaacaagttttgcaattgatagtgctgaagggtccctacaattctggaaaaaaatatgag

SEQ ID NO: 310868 - DNA, 538 bp, Unknown
  Bacterial polypeptide expressing nucleotide sequence isolated from the Sargasso Sea
aatgagctcaaaaaacattattaagttaatgaaagacaaacaagtagagtttgttgatttaagatttacagatcctagaggaaagcttcaacatgtaacaatggacgctaccgttgttgatgatgaattgctaaatgaaggtgttttttttgatggttcatcaattgctggctggaaagctattaatcagtcagacatgcttttaaaacctgacttaactagaccaattatcgatccgtttaattctcatacaacgctaaatattttttgtgacattcttgatgcagtaaataaagatccctatgaaagagatccaagaggaactgctaaaaaagctgaggcttatttaaaaaaatctggaattggagataaatcttattttggtcctgaaccagaattttttgtattcgacgacgttagatttaaaaatgatatgaacgaaacaagttttagcattgatagttctgaaggtccgtacaatactggaaaaaaatatgaaaatggcaacatgggtcacagacctggaattaaaggagga

SEQ ID NO: 310869 - DNA, 631 bp, Unknown
  Bacterial polypeptide expressing nucleotide sequence isolated from the Sargasso Sea
tatgagtgccagtgctgttaaaaaagtaataaaagataaagaaattgaatatgtagatctaaggtttactgacccaagaggtaaacttcagcacgtcactatggatgcaagtatagttgacgaagacatgctcaatgagggagttttcttcgacggctcatcaatagcaggatggaaagctattaatgagtctgatatgatacttaagccagatttatcaagaacagttattgatccctttacatcacataacacattaaatattttttgcgatgttttagatgctattaaaaaagatccctatgaaagagatccgagagggactgcaaaaaaagctgaagagtacttaaagaaaactggtattggtgataaagcttattttggtcctgaaccagaattttttgttttcgacgatgtgagatattcaaatgatatgaacaaaactggttttgaaatcgatagttctgaaggaccatacaatacaggaaaaaaatatgaaaatggaaacatgggacaccgtccaggtataaagggtggttactttccagttcctcctgtagatagtgctcaagatatgagaagtgaatatttaaaagcaatgaaagatatgggtataaaagttgaaaaacat

SEQ ID NO: 310870 - DNA, 916 bp, Unknown
  Bacterial polypeptide expressing nucleotide sequence isolated from the Sargasso Sea
gctgaattttttgtttttgatgacgtaagattcaaaaatgacatgaatgaaaccggatttaaaatagatagtaaggaaggtccttacaattcaggaagagaatacgaaaacggtaacatgggtcacagaccaggaattaaaggtggttatttccctgttccgcctgttgatagtgaacaagatatgaggagtgaatatctaaaagctatgaaggaaatgggaattaaagttgaaaaacaccaccacgaagttgcacctagtcaacacgaacttggaatgtattttggaactcttgtagatcaagcggataacttacagctatataaatacgctgttcacatggtttctaactcgtttggtaagactgctacttttatgccaaaaccagttaaaggtgacaatggttcaggtatgcacgttcaccaatcgatttggaaaggtgatactgcattattttctggtgacaaatatgcgggcttatctgatacagcattacactatataggtggaattttaaaacatgcaaaagcaataaatgctttttctaatgctacgacgaatagttacaaaagactaattccaggatttgaagctccagttttattagcttattcagctagaaacagatcagcatcttgcagaattccaattactttaagtaaaaaagcagctagatgtgaaattagatttggtgatgctgctggtaatccatatttaactttctctgcaatgttaatggctggtttagatggaattaagaataaaattgatccaggtaaatcatttgataaagatctttatgctttatcagaagatgaagtaaagaaaattccaactgtttgtggatctttaagagaagcaatggaaagtcttgataaagatagagatttcttaaaacaagggaatgtatttactg

SEQ ID NO: 310871 - DNA, 945 bp, Unknown
  Bacterial polypeptide expressing nucleotide sequence isolated from the Sargasso Sea
ctggatcaaactttgcatttcatgaagttgattctgtcgaaggtacttggaatagtggcgctgatgaaaacccaaacttaggacataaacctagacataaagaaggttattttcctttaccaccagtagatacacttcaagatgtaagaactgaaatggtaatgacaatgcaagacattggtcttactgttgaagcacatcaccatgaagttgcaacaggtggacagtgtgaaattgatttagaattttcaccactgttaaagatggccgatgatatgatgaaatataagtacgttgtaaaaaatgttgccagacaacatggaatgactgctacatttatgcctaaacctttatttgaagataatggttcaggaatgcacgtgcatcaaagtgtttggaaagacggtgacacattaatgtataaagaaggtaactatgctaacctaagtgatttagctctaaactatattggaggtattcttaaacatgcacctgctctattagctttttgtgctccaactactaactcttataaaagattggttccaggctttgaggctccggtaaacattgtttactctcaaagaaatagaactgcatctgtaaggattcctgcttattctcaaagtcctaaggcaaaaagaatggaatttagatgtcctgatccaagtgcaaatccatacctagcattctcagcaatgttaatggcagggttagacgggattaaaaataaaattgatcctggcgatccaacagatataaatctttatgctgctagtgatgaggttttatctaaaattcaatctacgcctggatctttagctgaatctcttgaagctcttgaaaaagatcatgcatttttattagaaggtgatgtatttactaaagatgtaattgaaacatatattagctataaaaaagagagtgaggttgatcccaattaat

SEQ ID NO: 310872 - DNA, 903 bp, Unknown
  Bacterial polypeptide expressing nucleotide sequence isolated from the Sargasso Sea
tttaataatggagtattctttgatggatcatctattgcgggatggaaagcgatttatgaatccgatatggttctcaagcctgatctctcaacagcagtcatggatccatttacagctcagccaacaatgatgcttttttgtgatatactggatgcagttacaaaagaaccctatgaaagggatcctcgcggaactgcaaaaaaagccgaagaatatgttaaatcaagtggtataggtgacactgtttacattggaccagaagctgagttttttgtttttgatgacgttaaatttcaagtagaaatgaataaatctagctttgaaatcgacagttccgaagggccttacaatagtgcaaaaaattatgagagcggcaaccttgggcacagaccgggtatcaagggaggatattttcctgttcccccagttgacagcgctcaagatataagaactgaatttcttgaagaactaaaaaacttaggtcttaagatggaaaagcatcaccatgaagttgctccaagtcaacacgagcttggtttactgtttgacaccctcttaaaacaaggagatgggattcaattatataaatatggtgtacacatggttgctaattcttttggtaaaacagctacatttatgccaaagccagtaaaaggtgataatgggtctggtatgcatgtacatcaatcaatttggaaagatggaaaacctctttttgcgggagatgggtatgcgggattatccgaaactgctattcattatattggaggtataattaaacatggtaaggcacttaatgcttttacaaacccaagtactaatagttataagcgtcttattcctggatttgaagcccctgtgatactagtttactcagcaagaaacagatcagcttcttgcaga

SEQ ID NO: 310873 - DNA, 1038 bp, Unknown
  Bacterial polypeptide expressing nucleotide sequence isolated from the Sargasso Sea
gatgaggtattctctagaataaaacatgagaatatcaagttcatagaccttcaatttactggtttaacaggtagatttcatcatactacaatttcagcagatacttttaccccacaacaaatggaagatggtttaccaaaattagacggatcatcaattgtaggatttacagatattgcggactctgatttaatattaaaaccagacccaagtacatttgcaattattccatggcttacagaaaaaaagactgccagattgttgtgcgatgtatactggggcggaggaagaggtcgtcttgagagtgatcctcgaggaatttgtcaaaaagcagaagcatttgtcaagacacaaggatttgattttagtaattggggaccagaagtagaattttttgtatttgataaggtgcattgggatgttttaacaccatacaaagggcaatcgtattcaattgaatcttcggaatcaccatggagtcaagaaggaactggttatcctatgggattacaagaaggatattacccaagtacaccatcagacactcttgctccattcagaaatgaatgtgtggatgttttgaacgataattttggaattttatgtgataatcatcatcacgaagtagcaacagcaggacaatgtgaaattgacataaaatacgatttaatgactaattctgctgatggtgcacaatcatacaaatatgttgtaagaaatgttgcacaacagtttggaaaagtagcaacaatgatgccaaaaccaatttcaatggatgcaggttctggaatgcacacgaatgttagtttgtggaaaaaagatgagaatacgttttatgataaagatgaagtattagaactaagtcaaatcggtcgttatttctgtggaggagtgatggaacatgcaaaaggattaaccgcaattactaatcctacaacaaactcataccatagattagttccaggttatgaagcaccagtttacattgcgtggagttcaagtaatcgttctgcaactattagaattccaggtcacttt

SEQ ID NO: 310874 - DNA, 642 bp, Unknown
  Bacterial polypeptide expressing nucleotide sequence isolated from the Sargasso Sea
tgcctaagcccgtaaaaggcgataatggatcagggatgcatgttcaccaatcaatatggaaaggcgataaagcattattttctggtgataaatatgctggattatcagatatagcattaaattacattggtggtattttaaaacacgcaaaagcaatcaatgcattttctaatgcaacaacaaacagttacaaaaggttaatacctggttttgaagcacctgtccttttagcgtattcagctagaaacagatctgcatcttgcagaatacctattactttgagcaaaaaagcagcaagatgtgaagtaagatttggtgacgctgctggaaacccttatttaacttttgcagctatgttaatggctggactagatggaattaaaaacaaaatagatccaggaaaatcttttgataaagatttatacgcgttgtcagagtctgaggttaaaaaaattccaactgtctgtgggtctctgagagaagcaatggaaagcctggataaagatagagatttcttaaaacaaggaaatgtatttactgatgaccagatagatgcatatattgctttgaagtttgaggaaattcacaactttgaacacactcctcacccaatagaatttgatatgtactatagttgttaaa

SEQ ID NO: 310875 - DNA, 634 bp, Unknown
  Bacterial polypeptide expressing nucleotide sequence isolated from the Sargasso Sea
acctataaaaggagacaatggatcaggtatgcatacgcaccagtcgatttggaaaggtaaaaacgctattttttcaggaaatgaatatgcaggtttgtctaaaacagcattatattatattggtggcatactaaaacatgcaaaagcaattaatgctttttctaatgctacaacaaatagttacaaaagattaattccaggatttgaagctccggttttattagcctattcagcgagaaacagatcagcttcttgtagaataccaattactttaaataaaaaatctgcaagatgcgaaataagatttcctgatgctgccggaaatccatatttaacatttgcttcgatgttaatggctggaatagatggaattaaaaataaaattcacccaggaaaatcttttgataaagatctgtattctttgtcagaaaaagaagtaaaaaatataccaacagtgtgtggatctttaagagaagcgatggaaaatttagatcaagatagaaagtttttaactcaaggaaatgtttttactgatgatcaaattgacgcttatattgctttaaaatttgaagaaatttataatttcgaacatacccctcacccaatggaattcgaaatgtattatagctgttaa

SEQ ID NO: 310876 - DNA, 811 bp, Unknown
  Bacterial polypeptide expressing nucleotide sequence isolated from the Sargasso Sea
gtgtgaagtattaaatgtagacatgactccacatactacaaacacaagagcagcgtgtgaggcagcagctgaaaattttgctgaatttgaaccgatgtttggtttagagcaagagtacacattttatgagcagtcttatgattcactcaaatatggccaaccattagggtttcctccttctggttatccagcaccccaaggaggttattattgcggagttggagcagatgaagtttatggaagagacatctctgaggaacatgcgtcagcatgcatggcagctggtctagaaatttctggaactaacgcagaagtgatgcctggacaatgggaatttcagataggccctgttggagcacctgcaattggagatcatatttgggtagcaagatggttgctttatagaattgccgaagattataatatatcagctacattagatccaaaacctgtaaaaggtgattggaatggtgcaggaatgcatacaaacttttctacaaagcagatgagagaagatggaggatatgaagccattattgctggatgtgaagccttaggaaaaaatgccgaacttcatgttaaaaattatggttcagggatagaagaccgtctaaccggtgatcatgaaactcagaagtttgacactttttcttacggtgttagtgatagaggagcttcaatcagaataccttggcaggtagaggtagacaaaaaaggatatttggaagacagaagaccaaacgcgaatgcagatccttatgtaattgctatgttaatgattgatactgtctgttcagcagcttctagctag

SEQ ID NO: 310877 - DNA, 754 bp, Unknown
  Bacterial polypeptide expressing nucleotide sequence isolated from the Sargasso Sea
atgaccgcagcaaatgttttaaaatttataaaaactaaagaagcagaatttgtagatttaagatttacagacccaagaggtaagttacaacatttaacaatggactctggtgtcgtagataaagatatgctggataacggagtattttttgacggatcttctattgctggctggaaagctattaatgaatctgacatgatattaaaacctgatactgctagaatgttcatggatccttttacatctcataatacagttgttttgttttgtgatattcttgatgcagttaagaaaagtccttacgaaagagatccaagaggtattgcaaaaaaagctgaaaaatatttaaaaacatcgggcattggtgacaaggcattttttggtcctgagccagaattttttgtgttcgatgatgttagaattaaaaatgatatgaacgaatgcggatttgtaattgatagtaaagaaggtccatacaattcgggtaaagaatatgataatggaaatatgggtcatagacctccggtaaaaggtggatatttccctgtacctccagttgacagcgaacaagatatgagaagcgagtatctaaaaaatttaaaagaagttggaattaaggttgaaaaacatcatcatgaagtagctccaagccaacatgaattaggtatgtatttcggaactcttgttgatcaagctgataacgttcaattatataagtacgttgttcagatggttacacactcgtttggaaaaa

SEQ ID NO: 310878 - DNA, 484 bp, Unknown
  Bacterial polypeptide expressing nucleotide sequence isolated from the Sargasso Sea
ttgtgcacctacaacaaattcatataaacgattggtacctggatttgaagcacctgtaaatattgcttattctgctgctaatagaacagcatctgttagaatacctaacaattatacagctagccctaaagcaaaaagaattgagtttaggtgtccggatccttcttcaaatccttatctagcattttcagctatattaatggcaggtttagatggagtgaaaaacaaaattaatccaggcaaacctactgatataaatatttatgaagccccagctagtgtcttagcaaaaattccttcaacacccggttctcttgctgagtctcttgatgctttagagaaagatcataaatatttgctgaatggtgatgtatttactaaagataacatagaaacttatatttcttataaaagagaaaatgaggtaagcccaatggatataagaccacatcctcatgagtttaatctttattatgatgtttaa

SEQ ID NO: 310879 - DNA, 584 bp, Unknown
  Bacterial polypeptide expressing nucleotide sequence isolated from the Sargasso Sea
ttattattgtggtagaaatataggtgaaaagatttcaagagaacatttaaatgcttgtatcgaagctggtatcagtatttgtggtacaaacgcagaagtgatgttaggtcaatgggaatatcagattggtgcaggtggttcaatacatatgagtgatgatttatgggttgctcgttggttattggaaagaatttgtgagaaagaaggagtagaagtttcattacatccaaaaccgatggaaggtgattggaatggagcaggatgtcacactaacttttctacaaaagaaatgagagaagaagatggtgatgttaagattggtgaagctatagaaaaattagaaccaaaacaccaagaacatattgaagcttatggtccagataacgaccaaagacttacaggacttcacgaaacttgtgatataaatactttcagatggggagtttcagatagaggagcatcaatcagagttccttggcaagttcatagagatgggaaaggttatttagaagatagacgaccatcatctaattgtgatccttatttagttgcacaaaaattagtagaaacgatttgtagttaga

SEQ ID NO: 310880 - DNA, 406 bp, Unknown
  Bacterial polypeptide expressing nucleotide sequence isolated from the Sargasso Sea
gcttttatatagaatatcagaagactatggtgtaagtgcgactctacatcccaaaccagtgaaaggtgattggaatggagcaggtgctcataccaatttcagtactaagtcaatgcgttctgttggaggaatcgatgttatcaatgaggcatgtgaaaaattgagtcaaaagcatgatgaacatataaatgtttacggtgctcataatgaggaaaggcttactggactgcacgaaacatgtagcatcaaggaatttagatatggagttagtgatcgtggtgcttcgattaggattccaatgcaaacagctaatgatggctatggttatctagaggataggcgtccatctgctaatatggatccttacaaagtatgtgcgattttaattgagacgacttgcggctaa

SEQ ID NO: 310881 - DNA, 679 bp, Unknown
  Bacterial polypeptide expressing nucleotide sequence isolated from the Sargasso Sea
catggtttctcattcatttggtaaaactgcaacctttatgccaaaacccgttaaaggagataatggttctgggatgcacacacaccaatctatatggaaaggtaaaactgcagttttttctggaaataaatatgcaggattatcaactacagctctgcattacattggtggaatattaaaacacgctaaagctataaatgctttttcaaatgcaacaacaaatagttataaaagattaattcctggttttgaagctcctgttcttttggcttactcagcaagaaacagatctgcttcatgtagaattccaataacattaaacaaaaatggtgcaagatgtgaaattagatttcctgatgccgcaggaaacccctatctaactttctctgcgatgttaatggcggggttagatggaattaaaaataaaattgatccaggtaaacctcttgatgaagatttatatgcattgcctgaaagtaaagtaaaaaatattcctacagtttgtggttctttgagagaagctatggaaagtttggatagagatagagattttttaaaacaaggtggtgtattttctgatgatcaaattgacgcttttatagcgttaaaatttgaagaaatttataatctcgaacacactccacatccaatggagtttgaaatgtattatagttcttag

SEQ ID NO: 310882 - DNA, 589 bp, Unknown
  Bacterial polypeptide expressing nucleotide sequence isolated from the Sargasso Sea
tatttggaaaggtgatacaccagtattttcaggcgatgcttacgccggattatctgaaacagcattacattatattggtggtattttaaaacatgcaaaagcaattaatgcatttgctaactcaacaactaatagttacaaaagattagtacctggttttgaagctcctgtattattagcttactctgctagaaatagatctgcttcatgtcgtattccaattactttaagtaaaaaaggtgcaagatgtgaaattagatttccagatgcttcaggaaacccatacctaaccttcgcagcgatgttaatggctggattagatggaatcaaaaataagatacatccaggagagtcttttgataaagatttatatgatttaccacctgaagaagttaaagctattccgactgtttgtggatcgctgagggaagcaatggaaaatttagataaggatagagaatttttaactcaaggtaatgtatttactgatgatcaaatagatgcttacattgcacttaagtttgaagaaattcacaagtttgagcatgcacctcatccagtagaatttgagatgtattacagtagttaa

SEQ ID NO: 310883 - DNA, 823 bp, Unknown
  Bacterial polypeptide expressing nucleotide sequence isolated from the Sargasso Sea
atgtcagacgcaaaaacaatcatgaatatgatcaaagaaaaagaaatccaatttttagatttaagatttactgacccaagaggtaaaatgcaacatttatctcaacatatcagtacaattgacgaaaaaagtcttgccgaaggttttatgtttgatgggtcatctatagctggttggaaagcgattaatgaatctgacatgaaattaatgcctgactgctctagaggtattgttgatccttttttctcacaaccaactttgtcaatattttgtgatgttttagaccctatatctggtgaaccttacgaaagggatccaaggtcaacagccaaacaagctctagcttacatgggttcaattggagttggtgatactgcttactttggtcctgaacctgagttttttgtttttgatgatgtaaaatatgaagctgaaatgaattcttcattttataaaattgactcatcagaaggtccttacaattctggcaaagaatttgaagaaggtaacttgggtcacagaccaggtattaaaggggggtactttccagttccaccagtggactctgctcaagacttgagaagcgaaatggttttatcattagttgatatgggagttccaatggaaaaacatcatcatgaggtagctccatctcagcatgaattaggtatgaagtttggaactttgatagatactgcagacaatgttcaactttacaaatacgctgttcagaatgtagctcattcttttggtcaaacagccacttttatgccaaagcctgtagcaggtgataatggaacgggaatgcacacacaccaatcta

SEQ ID NO: 310884 - DNA, 442 bp, Unknown
  Bacterial polypeptide expressing nucleotide sequence isolated from the Sargasso Sea
tatgagctcaaaaaacgtcttaaagttaataaaagataaagaaattgaattcgttgatctaagatttactgatcctaaaggtaaacttcaacatttaactatggactcaacaatagtagatgaggaaatgttaaataaaggagttttttttgatggctcatcaatagctggttggaaggcgataaatgaatctgacatgattttaaaaccagatttagatagacccataattgatccttttaactctcacactactttaaatattttttgtgatattttagatgcagtcaaaaaagatccttatgaaagagatcctagaggaacagctaaaaaggcagaagcctacttaaaaaaaacaggcattggtgataaagcatactttggtcctgagccggaattttttgtttttgacgatgttagatttaaaaatgacatgaacgaa

SEQ ID NO: 310885 - DNA, 928 bp, Unknown
  Bacterial polypeptide expressing nucleotide sequence isolated from the Sargasso Sea
aaaaagactccttatgaaagagatccaagaggaatagctaaaaaagctgaagcatatttaaaatctacaggtattggagataaagcctatttcggaccagaaccagaatttttcgtatttgatgatgttagatataaaaatgatatgaatgaaacaagttttgcaatcgatagtatagaaggcccttacaacactggaagaaaatatgaaaatggaaatatgggacatcgtccaggaattaaaggaggatattttccaattccgccagttgatagtgcgcaagatatgcgtggagaatatttaaaaggactaagagatgttggaattaaagttgaaaaacatcaccacgaagtagctccaagtcaacacgaactaggaatgtattttggaacattagttgatcaagctgacaacgttcaactatacaaatatgttgttcaaatggtttctcactcatttggtaagactgcaacatttatgcctaaacctgtaaaaggagataatggttcaggaatgcatacccatcaatctatctggaaaggtaaaatgcctgttttttctggaaacaaatatgctggactatctgatactgcgcttcattatattggtggtattttaaaacatgcaaaagcaatcaatgctttttcaaacgctgcaacaaatagttataaaagattaattcctggatttgaagctcccgttctattagcttactcagcaagaaatagatctgcttcatgtagaattccaataacgttaagtaaaaaaggtgcaagatgtgaaataagatttcctgatgctgtaggaaacccttatctaacttttgctgcaatgttaatggcaggaatagacggaattaaaaataaaattaatcctggtaaaccgcttgatgaagatttgtatgctctaccagaagataaagtaaaaa

SEQ ID NO: 310886 - DNA, 613 bp, Unknown
  Bacterial polypeptide expressing nucleotide sequence isolated from the Sargasso Sea
aataggaattaacgtagaagcatctcatcatgaagtggcaagtggtgggcaatgtgaaattgatctagaattttcacccctgctatctatggctgatgacctattgagatacaaatatgttgtaaaaaacgttgctaaacaacatggaatgaccgctacctttatgcctaaaccactatttgaagataatggttcaggtatgcatgttcattcaagtatttggaaaaaaaataaaactctaatgtataaaaaaggtaattatgcagatctaagtgattttgcactatactatattggaggaatattaaaacatgctccttcattattagctttttgtgctccaacaactaattcttataaacgtttggtgcctggttttgaagctcccgtaaatattgcttattcgcaagctaatagaactgcttcagtaagaatacctaacaactatacttcaagtccaaaagccaaaagaattgagtttagatgtcctgatccttcttctaatccttatcttgctttttcatctattttaatggctggattagatggagtaaaaaataaaattgatccaggaaaacctaccgatataaatatttatgaggcatcttctaaa

SEQ ID NO: 310887 - DNA, 742 bp, Unknown
  Bacterial polypeptide expressing nucleotide sequence isolated from the Sargasso Sea
tatgtatttcggaactttaactaatcaagcagataaccttcaactttataagtacgctgtacagatggtaactcattcttttggaaaaactgcaactttcatgcctaaaccggttaaaggagataatggttcaggaatgcactgtcatcaatcaatttggaaaggaaataccccggtatttatgggtaatgaatacgcaggtttatcaaagacagcactttactatataggtggaattttaaagcatgctagggccattaacgctttttcaaatgctacaacaaatagttataaacgattaatacctggttttgaagctccagtgattttagcttactcagcaaggaatagatctgcctcatgtagaattccaataataatgaatccaaaagctgctagaatggaaattagatttcctgacgctgctggaaatccttatttaactttcgcatcaatgcttatggctggtatagatggaattaaaaataaaattgacccaggtaaatcttttgataaggatttatacacattgtctgaagatgaagtcaaaaaactacctactgtttgtggttctctaagagaggctatgcaaaatctagataaagacagaaagtttttaactcaaggaggtgtgtttacagatgatcaaattgatgcttacattgatttaaaatttcaagaaatttataaatttgaacatacacctcatcctattgagttcgaaatgtattacagtggttaa

SEQ ID NO: 310888 - DNA, 643 bp, Unknown
  Bacterial polypeptide expressing nucleotide sequence isolated from the Sargasso Sea
tatgcctaaaccagttgcgggtgataatggttctggaatgcatactcatcaatcaatatggaaaggtgatacaccagtattttctggtgatgcttattcaggtttgtcggaaacagctttgcattatattggtggaattttaaaacatgcaaaagcaatcaatgcattttcaaatgcaactacaaatagctataaaagattaattcctggttttgaggctccagtactactagcttactcagctagaaatagatctgcatcatgtagaattcctattaccttaagtaagaaaggcgcaagatgtgaaattagatttcctgatgcatcaggtaatccttatttaacttttgcagcaatgttaatggctggaatagatggaattaaaaataaaatccatccaggtgagtcatttgataaagatttatatgaattaccaccagaggaagttaaatctattccaactgtatgcggatcattaagggaagcaatggaaagtttagataaagacagagagtttttaactcaaggtggtgtctttactgatgatcaaattgatgcttatattgctttaaagttcgaggaaattcataaatttgaacatgcacctcatcctgttgagtttgagatgtattacagctgctaa

SEQ ID NO: 310889 - DNA, 783 bp, Unknown
  Bacterial polypeptide expressing nucleotide sequence isolated from the Sargasso Sea
tatgaacgccaataaaattttaaaacttattaaagataaagaagttgagtacgtagacctgagatttacagatcctagaggtaagttacaacatgttactcaagatttacagacggttgatgaggacatgctcaacgatggaattttttttgatggctcctcaatagctggttggaaagcaattaatgagtcagatatgattctaaagcctgatctatctagtaatttcatagatccatttttttcacatacaacgttagttcttttttgtgatgtaatggatccaattacaaaaacttattatgagagagatcctcgatcgactgcaaaaaaagctgaagcatacttaaaaaaaactaatataggtgataaagcttattttggtccaaaaccagaattttttgtatttgatgatgtaaggttcacaaaccttatgaataaagtaagttatgaagtcgatagctcggaaggcccgtataacaccggaaaagaatatgagaatggaaatttaggacacagaccaaaagtcaaaggaggatacttcccagttcctccggttgatagcgcccaagatttaagatctgaatgtttaaaagcaatgaaagatatgggtgtaaaagttgaaaaacatcaccacgaagttgcgcctagccaacatgagcttgggacattatttaatactttagtcaatcaaggtgatgctatgcaaatttataaatatgcagttcataacgtagccaactcttttggtaaaaacagctacatttatgccaaaacctgtaa

SEQ ID NO: 310890 - DNA, 917 bp, Unknown
  Bacterial polypeptide expressing nucleotide sequence isolated from the Sargasso Sea
tatagcaaaaaaggcagagcaatatttaaaagcttctggaattggtgataaagcattctttggtccagagcctgaattttttgtgtttgatgatgtaagaattaaaaatgatatgaatgaatgtgggtttgtattagatagtaaagaaggtccgtataactcagggaaagaatatgaaagtggaaacatgggtcatagacctggagtaaaaggcggatacttccctgttccacctgtagatagtgaacaagatatgagaagtgaatatttaaaaaacttaaaagatgttggtataaaagttgagaaacatcaccatgaggtagctccaagtcagcatgaattaggaatgtattttgggacgttagttgatcaagctgataatgttcaattatacaaatatgtagttcaaatggtaacacactcattcggtaaaacagctacatttatgcctaaaccagttgcaggtgataatggttctggaatgcacactcaccaatcaatatggaaaggtgatacgcctgtattttcaggtgaagcttatgcagggttgtctgaaacagcattacattatattggtggaattttaaaacatgcaaaagcaattaacgcattttcgaatgcaactacaaatagctacaaaagattaattcctggttttgaagctccagtattattagcgtactcagcaagaaatagatcagcatcatgtagaattcctattaccttaagtaaaaaaggtgcaagatgtgaaattagatttccagatgcttcaggaaatccttatttaacttttgcagcaatgctaatggctggaatagatggaattaaaaataaaatccatccaggagattcatttgataaagatttatatgagctaccaccagaggaggtaaaatctattccaactgtttgcggat

SEQ ID NO: 310891 - DNA, 745 bp, Unknown
  Bacterial polypeptide expressing nucleotide sequence isolated from the Sargasso Sea
atgtcgtacaagtcgcaacaactgatcaaagatcatgacgtgaagtgggttgacctgcgcttcaccgataccaaaggcaagcagcagcacgtcaccatgcccgcccgcgacgccctggacgatgaattcttcgaagccggcaagatgttcgacggttcctccatcgctggttggaaaggcatcgaagcctccgacatgatcctgctcccggacgacagcaccgccgtgctcgacccgttcaccgaagagccgacgctgatcctggtctgcgacatcatcgagccgagcaccatgcagggctatgagcgcgacccgcgcaacatcgccaagcgcgccgaggaatacctgaagtccaccggtatcggcgacaccgtcttcgtcggcccggagccggagttcttcatcttcgacgaagtgaagttcaagtccgacatctccggctcgatgttcaagatcttctccgagcaggcttcctggaacaccgacgccgacatcgagaccggcaacaaaggtcaccgtccgggcgttaaaggcggctacttcccggtaccgccggtcgaccacgaccacgaaatccgtaccgccatgtgcaacgctctggaagaaatgggcctgaccgtggaagttcaccaccacgaagtggccaccgccggccagaacgagatcggtgtgaagttcaacaccctcgttgccaaggctgacgaagtccagaccctgaagtactgcatccacaacgtggccgacg

SEQ ID NO: 310892 - DNA, 851 bp, Unknown
  Bacterial polypeptide expressing nucleotide sequence isolated from the Sargasso Sea
ggaaaactacaacatttaacaatggataaaacagttgtagatggcgatatgttaaatgaaggagttttctttgatggatcatcaatagctggttggaaagcgattaatgagtctgacatgattttaaaacctgacctaagtagaaaaattattgatccttatacttcgcacaatactcttgtactgttttgcgatattttagatgctgttaaaaaagatccatacgaaagagatccacgaggtattgcaaaaaaagctgaagcatatttaaaaaaaactggcataggagacaaggcttattttggtccagagcccgaattctttgtgtttgacgatgtaagaattaaaaatgatatgaacgaaacaggcttctcaattgacagcaccgaaggtccttataattctggaagaaaatatgaaaacggaaatatgggccatagacctggtatcaaaggtggttatttccccgtaccaccagttgatagcgcgcaagatatgagaagtgaatatttaaaaggtttaagagacgttggtataaaagttgaaaaacatcatcatgaagtagcgccaagtcagcatgagcttggaatgtactttggaactttagtaaatcaggcagataacgtacaattatataaatacgtagttcaaatggtatctcattcatttggtaaaacagctacttttatgccaaagccagtgaaaggtgataacggttcaggtatgcatactcaccaatcaatatggaaaggaaagactccagttttttctggagataagtacgctggattatctcagactgctttatattacataggtggtatattaaaacatgctaaagcaatcaatgc

SEQ ID NO: 310893 - DNA, 897 bp, Unknown
  Bacterial polypeptide expressing nucleotide sequence isolated from the Sargasso Sea
actggggatagcagatactgcgttttttggaccagaaccagaattctttttatttgatgatgttagatatgactctaaagaaggaggttgtttttatagtgtagatactattgaagcaccatggaatacagggagaattgaagaaggtggaaacttaggatacaaaatacaatataaagaaggatattttccagtagcacctaatgatactgcccaagatatcagatctgagatgcttcttcttatgggtgaattaggtattcccacagagaaacatcaccatgaagttgctggtgccggccaacacgagctaggaatgaaatttgattcgctaataaatgctgctgataatgttatgacttataaatacgttgtaagaaatgttgcaaaaaaatatggaaaaactgcaacatttatgcccaagcctgtttttaatgataatggaaccggaatgcatgttcaccaaagtttatggaagagtggacagccactattttttggtgaaggagcatatgcaaatttatctcaaacagcaagatggtacatcggaggtatactaaagcatgccccttcattcctagcatttactaacccaactacaaatagttataaacgattggttccaggattcgaagcacctgtaaatctagtttattctgagggtaacagatcagctgctgtaagaatacctttaacaggtccaagccctaaagctaaaagattagaatttagatccggtgacgctcttgcaaatccttacttagcattctctgtaatgatgcttgctggtattgatggaattaaaaatcaaattgatcctggtgatggagtagatgtagatttatttgaacttccagctgatgaacttgcgaaaattgatacggtgccttcatctct

SEQ ID NO: 310894 - DNA, 672 bp, Unknown
  Bacterial polypeptide expressing nucleotide sequence isolated from the Sargasso Sea
ctatgcttgatccaaacactaagcaacctattggatttccagaagaaggatttcctgaacctcaaggcccttattattgtagtgttggtgcttcttggatttttggaagagaaatggcggaagagcatatggcattgtgcttagatgcaggattggcaatatcaggtataaatgcagaagtgatgcctggtcaatgggaatttcaaattggcccagtttcagcattagatgttagtgatcatctttgggtagcaagatggttgttacttagagtaggcgaaatgcatggaatattcccttctcttgatccgaaacctatttcgggagattggaacggagcaggagctcacacaaatttttctacaaaagctatgagagaaagttatcaacccattattgatggttgtgaagctttagctaaaaaacatgatttgcatatacaaaattatggtgatggaaatgaacgtagactcaccggattacatgaaacacagtctatagatcaattttcttacggagcttcagatcgaggagcttctattcgaattccatggcaggttgaaaaagatcagaaaggatacctggaagatagaagaccatctgcaaacatggatccttatactgttaccaaattattgctagatactatatgttcaaacgaacctcaataat

SEQ ID NO: 310895 - DNA, 647 bp, Unknown
  Bacterial polypeptide expressing nucleotide sequence isolated from the Sargasso Sea
aaaaccactgtttggtgataacggttcaggaatgcatgtacaccaaagtatatggaaagatggtgatacacttatgtacaagaagggtaattatgctgatttgagtgacacagcacttaactatattggcggtattttaaaacatgccccagctcttctagctttttgtgctccaacaacgaattcctataaaagacttgttccaggatttgaagctccagtaaatattgcttattcacaaagaaatagaacagcgtcagtgagaataccaacttactcatcaagtcctaaatcaaaaagaatggaattcagatgtcctgatccaacagcaaatccatatcttgcttttgccgcaatgttaatggcaggattagatggtgtaaaaaacaaaattgatccaggtgagccaactgatataaatatctatgaagcgccttcagaaattttagcaaaaataccatctactcctggttcattagctgaagctttaaatgctctagaaaaagataactctttcttgcttgagggggatgttttcactaaagatttaattgaaacttacattgattataaaagagaaaatgaagttaatccagttaatattcagccccatccacatgagtttaaattatattacgacgcttaat

SEQ ID NO: 310896 - DNA, 968 bp, Unknown
  Bacterial polypeptide expressing nucleotide sequence isolated from the Sargasso Sea
ttacgagagagatccagaggtattgcaaaaaaagctgaagcttatttaaaaacgtcgggcattggtgataaagcatattttggaccagagccagagttttttgtatttgatgatgttaagtataaaaatgacatgaacgaaactagttttaaaatagatagctcagagggtccttataataccggaaaagattatccaaacggaaacatgggtcatagaccaggaattaaaggaggttatttccctgttcctcctgtagatagcgctcaagatattagaggtgaatatcttaaaggtctaagagatgttgggatcactgttgaaaaacatcaccacgaagtagcgccaagtcaacatgagcttggaatgttatttaacactttagtaaatcaagctgataacgtgcagttatataagtatgttgtgcatatggtttctcattcatttggaaaatctgcaacttttatgcctaaaccagtaaaaggtgataatggatcaggtatgcatgtccaccaatcaatttggaaaggagatacgccaaccttttcaggagataaatattcaggtttatctgaaacagctttgaattatataggcggaatattaaaacatgcaaaagctataaatgctttttcaaatgcaacaacgaatagctacaaaagattaattccaggttttgaagctccagtattgttagcttactcagcaagaaatagatctgcttcttgcagaattccaattacattaagtaaaaaaggtgcgagatgtgaaattagatttcctgacgcttcaggaaatccttatttgactttttcagctatgttgatggctgggttagatggtattaaaaataaaattgatccaggcgagtcgttcgataaagatctttattctttatcagaagatgaaattaaaaacattccaactgttttgtggtctttaagagaggccatggagagtttggatac

SEQ ID NO: 310897 - DNA, 628 bp, Unknown
  Bacterial polypeptide expressing nucleotide sequence isolated from the Sargasso Sea
gatgtctgacgcgaatgatattttaaaaaaaattaaagatgaaaaaataaattttgttgatttaagatttactgaccccagaggtaaaatgcaacatgttactcagcatgttgatacaattgacagcgatacattgagtgatggatttatgtttgatggatcttcaattgctggttggaaagctattaatgaatctgatatgacattaatgcctgatttaaatagatcttacattgatccatttttttctcaacctactttagctgttttttgtgatattttagatccattatcaggtgaaccttatgaaagagacccaagaagtactgctaagtcagctattaactatatggaaagtactggtattgcagataaagctttttttggtccagaagctgaattttttatattcgaagatgtaaaaatagatgtttcaatgaatagagcaatgtactctattgactcagttgaaggcccttataacagtgcaaaaagttatgatgaaggaaatttaggacatagacctggggtaaaaggaggatattttcctgttcctccaatagacacaggtcaagatattagatctgatatgctatctacaatgagcgaaatgggagttcccgttgaa

SEQ ID NO: 310898 - DNA, 817 bp, Unknown
  Bacterial polypeptide expressing nucleotide sequence isolated from the Sargasso Sea
ccagaaccagaattctttttatttgatgatgttagatatgactctaaagaaggaagttgtttttatagtgtagatactattgaagcgccatggaacacagggagaattgaagaaggaggaaacttaggatacaaaatacaatataaagaaggatattttcctgtagctccaaatgatactgcgcaagatatcagatctgagatgcttcttcttatgggtgaattaggtatccccacagagaaacatcaccatgaagttgctggagctggtcaacacgagcttggaatgaaatttgattcgttaataaatgcagctgataacgttatgacttataaatatgttgtcagaaatgttgcaaaaaaatatggaaaaactgcaacatttatgcccaagcctgtttttaacgataacggaaccggaatgcatgttcaccaaagtttatggaagagtggacagccactattttttggtgaaggagcatatgcaaatttatctcaaactgctagatggtacataggaggaatacttaaacatgcgccttcattcttagcatttactaacccaactacaaatagttataagcgattggttccaggattcgaagcacctgtaaatctagtttattctgagggtaatagatcagctgcagtaagaatacctttaacgggtccaagtcctaaagctaaaagattagaattcagatcaggtgacgctcttgcaaatccttacttagcattttctgtaatgatgcttgctggtattgatggaatcaaaaatcaaattgatcctggtgatggagtagatgttgatttattga

SEQ ID NO: 310899 - DNA, 411 bp, Unknown
  Bacterial polypeptide expressing nucleotide sequence isolated from the Sargasso Sea
tatgagttctagcacagtactaaaattaatgaaagataaagacatagaatatgttgatctaaggttcactgatcctagaggaaaacttcaacatttaacaatggattcaacaatagttgatgaggatatgttaaaagatggagttttttttgatggttcttctattgcaggatggaaagcaataaacgagtcagatatgattttaaaacctgatttaaatagacaaattgtagatccatatacttcacataatactttaatattattttgcgatatttttgatgctgtaaaaaaagactcttatgaaagagacccaagaggaatagcaaaaaaagcagaggcatatttaaaaaaaactggagttggagataaagcttattttggacctgagccagagttttttgtttttga

SEQ ID NO: 310900 - DNA, 393 bp, Unknown
  Bacterial polypeptide expressing nucleotide sequence isolated from the Sargasso Sea
cctcagtaagaataccagcttactctcagagtccaaaatcgaagagaatggagtttagatgtccagatccgacagcaaacccatacttagcattttcagcaatgttaatggcagggttagatggaataaaaaataaaattgatcctggaaaaccaacagatataaatctctatgctgctagtgatgacgtattatcaaagatacagtcaacacctggatctttagctgaatctcttgaagctctagaaaaagatcatgcttttttattagaaggtgatgtatttactaaagatgtaattgatacctatattagctataaaaaagaaaatgaggttgatccaattaacattagacctcatccacatgagtttaaattatactatgatgcgtagt

SEQ ID NO: 310901 - DNA, 503 bp, Unknown
  Bacterial polypeptide expressing nucleotide sequence isolated from the Sargasso Sea
catgtccaaaacacctcaggacgtccttcgtcagatcaaggacgatggcatagagttcgttgacctgaaatttgccgatctccacggcaaatggcagcacctgacagtgtgcacggacatgatcgaggaggagtccttcactgaaggactggcttttgacggctcttcgatcaggggctggaaggccatcaacgcctcggacatggcgatgatccccgaccctgcctcagcctgggtcgaccccttctaccgccacaaaaccctgagcatgatctgctcgatcggggaaccacgcagcggcgagccctatgaccgctgcccccgctccctggcgcagcgcgctctcgactatctgaactccaccggactggccgacaccgccttcttcggaccggagcctgaattcttcctgttcgacgacgttcgttacaactccagtgagggaggctctttctacagcgtcgacacgatcgaagccccctggaacacgggccgcatcgaag

SEQ ID NO: 310902 - DNA, 475 bp, Unknown
  Bacterial polypeptide expressing nucleotide sequence isolated from the Sargasso Sea
catgagtgtaaatgatgtattaaaaaccatcaaagataaagaaatcgaatacgtagatctcagatttactgacccgcgtggtaaacttcaacacgtaactatggatgctaagatggttgatgatgaaatgttaaacgagggaattttttttgatggttcttctatagctggttggaaggctattaatgagtctgacatgatacttaagcctgatactgctaaagcaattgttgatccttttacttcacataatacattaaatcttttttgtgatgtgttagatgctataaaaaaagatccttatgagagagatccgagaggtactgcaaaaaaagctgaggcatatctaaaaagttcaggaattggtgataaagcattttttggacctgaagcagaattttttgtatttgatgatgtaagatttaaaaatgacatgaatgaaacaggatttaaaattgatagtaaagagggtcca

SEQ ID NO: 310903 - DNA, 910 bp, Unknown
  Bacterial polypeptide expressing nucleotide sequence isolated from the Sargasso Sea
aatggaaacatggttcatcgtcctggaattaaaggaggttacttccctgtgccaccggttgatagcgcacaagatatgagaagcgaatatttaaaagcaatgaaagatatggggattaaagtagaaaaacatcaccacgaagttgctccgagccaacacgaacttggaatgtattttggaaccttggttgaccaagcagacaatctgcaactttataaatatgcggtacatatggttacacactcgtttggtaagaccgcaacttttatgcctaaaccggttaaaggtgataatggttctggtatgcactgtcaccaatcaatatggaaaggaagcaccgcagtattttctggagataaatatgcagggctttctgatacagcattacattatattggtggaatattaaaacacgcaagagctataaatgctttttcaaacgcaacaacaaatagttataaaagattaataccaggttttgaagctcctgtgttattagcttactctgcaagaaatagatctgcttcttgtagaattccaattacacaaagcaagaaagcagcaagatgtgaagttcgtttccctgatgcagcaggaaatccatatttaacattttcagcactattaatggcaggtttagatggaataaaaaataaaataaatccaggtaaatctttggacaaagacctttatgcattgggtgaggaagaggttaaaaaaattccaactgtatgtggttcattaagagaagccatggaaagcttggataaagatagaaaatttttaacacagggtaacgtttttactgacgatcaaatagatgcttacattgctcttaaatatgaagaaatttataattttgagcacactccacatccaatggagtttcaaatgtattatagctgctaaa

SEQ ID NO: 310904 - DNA, 802 bp, Unknown
  Bacterial polypeptide expressing nucleotide sequence isolated from the Sargasso Sea
cgttcattgctatgttgtagagccagatactggcgaggcttataacagggatcctaggggaaccgctatgaaggccgaggcttatctaaaatcatcgggtattggcgacacattttttgtaggccctgaagctgaatttttcttgtttgacgatgttcgcttctcgaattcaatgaacaaagtatcgttcgaggtggatgccctggacgccgcttggaacacagatactgactacgaaattggaaatacaggccataggcctggcgtaaaaggcgggtacttcccagtaaaccctattgatgatggtcaggatatacgttctgaaatgctatcaacaatgaaaaggctgggaatgtcggttgataaacatcaccacgaggttgcgtcttgtcagcatgagcttgggctaatattttctagcctcacaaagcaaggtgatgagttgcaaaaatacaaatatgtgatccacaatgttgctcaggcgtacggtaaatcagctacgtttatgccaaaaccgattgcaggcgataatggaaccgggatgcactgcaacatgtcaatttggaaagatggaaagcctcttttcgcaggtgataagtatgcagacctatctgacgaagctttatggtttattggtggtattctgaagcacgctaagtcccttaatgcatttacaaatccatcaacaaattcatataagaggctcatacctggcttcgaagcacctgttttaagagcttattcagcgagaaacagatcaggttgtgttcgtatcccatggactgagtcaccaaaggcaaaa

SEQ ID NO: 310905 - DNA, 820 bp, Unknown
  Bacterial polypeptide expressing nucleotide sequence isolated from the Sargasso Sea
ttaaagggattaagagatgtaggtgtaaaagttgaaaaacatcaccatgaagtagctccaagccaacacgaacttggaatgtattttggtacattggttgatcaagcagacaacgttcaactttataaatatgtagtacatatggttactcattcttttggcaaaactgcaacatttatgccaaaaccagttaaaggagataacggatctggaatgcatacacatcaatctatttggaaaggtgacattccagtattttctggagacaaatattctggtttatctgatgttgcgctacattatattggtggaattttaaaacatgcaaaagcaattaatgctttttctaatgctacaacaaatagttataaaagattgatacctggtttcgaagctccagtattattagcttactctgcaagaaatagatctgcttcatgtagaattccaatcactttaagtaaaaaaggcgctagatgtgaaattcgttttccagatgcatcgggaaatccttatttaacatttgcagctatgttgatggctggtcttgatggagttaagaataaaattgatccaggtaaatcttttgataaagatttatattcattatcagaagctgaagtaaaaaatattcctacagtttgtggatctttaagagaagctatggaagctctcgataaagatagagatttcttaaaacaaggcaacgtatttactgatgatcaaatagatgcatacattgcattaaaatttgaagagatacataatttcgaacatacacctcaccctatcgagttcgatatgtattatagttgttaaa

SEQ ID NO: 310906 - DNA, 853 bp, Unknown
  Bacterial polypeptide expressing nucleotide sequence isolated from the Sargasso Sea
tataattttttgtaatgtagtagaaccatccacaggagaaatgtattctagatgtccgcgctcaacagcagtaagagcaactgaatatttaaaaaaaactggcattgctgatacagcatattttggtccagaagcagaattttttgtttttgatgatgtaaaatggaatgtttctatgaatgatacattctatcaaatagactctgacgaaggtccctataactctggaaactcttttgatggtggaaatataggccatagaccttcaataaaaggaggctacttccctgtgccacctgtagactctatgactgatatgagagctgaaatggttggaacaatgatggaaatgggtcttgaaatggaaaaacatcatcatgaagttgcgccctcacaaaatgaacttggtggaaaatttgatgaattgttatcatgtgcagatggtatgcaaaaatataagtatgtagttcatatggttgcacactcgtatggaaaaactgctacatttatgcctaagcctgttattgatgacaatggttctggtatgcattgccatcagtctttatggaaaggaaactctcctttatttgccggaaatgaatacagtggattatctgagaattgcctattttatataggaggaattataaaacatgctaaggctattaatgcattcactaattctactaccaacagctacaaaagattagttcccggttttgaagctccaactatcttggcctactcagctagaaacagatctgcttctattagaataccatacgcagaaagtgataaaagcaagaggctcgaggtcaggtttcctgatgctgcttccaatccgtatttggcc

SEQ ID NO: 310907 - DNA, 880 bp, Unknown
  Bacterial polypeptide expressing nucleotide sequence isolated from the Sargasso Sea
cttgatgccgttaccaaagaatcttacgagagagacccaagaagcactgcaagaaaagccgaggaatttgtaaaaagcagtggtattggtgatactgtttatattgggccagaggctgaattttttgtgtttgatgatgttaaatttcaggttgatatgaataaatcaatgtttgaaattgatagcactgaaggaccttataactctggaaagaattatgaaagtggaaatttggctcatagaccaggtgtaaaagggggttactttcctgttcctcctgtagatagtgctcaagacataagaactgagtttctagaagagttaaaaaatttaggtttaaaaatggagaaacatcaccacgaggttgctccaagtcaacatgaattaggtcttttgtttgataccttattgaaacaaggtgatgcaatgcaactttataagtacggtgtccatatggttgcaaatgcttttggtaaaactgcaacctttatgccgaaacctgttaaaggtgataatggtacaggcatgcatacacaccaatctatttggaaaaatggagagcctctgtttgcaggcgataaatatgcgggtctatcagatatggctttaaactatattggtggaataataaagcatggtaaagcccttaatgcttttacaaatgcaagtacaaacagttacaaaagattgataccaggttttgaagctcctgtgatactagtttactctgcaagaaatagatctgcatcatgcagaatacctgtatctgataatcctaagggcaaaagagtagaagtaaggtttcctgatccttcagcaaatccatatttagcattctctgcaatgctgatggctggactggatggcataaaaaataaaa

SEQ ID NO: 310908 - DNA, 859 bp, Unknown
  Bacterial polypeptide expressing nucleotide sequence isolated from the Sargasso Sea
tatgaaatataactgcaaaactccaaaggagcttttaaaaaaaataaaaaacaataacgttaagatgattgatcttaggttcactgatttgccaggatcgactcatcatatctcaataccgattaaatatttaacagaagatttatttatagatggtgttggttttgatggatcttccgtaagaggttttcaatcaattgaaaatagcgatatgacaatggttccagatgtatcaactggatatattgatcctttttattctgaaaaaacaattgcattttattgtaatgtagttgacccaataacatataaaagttactcgagagatccgagatatattgctcaaaaggcagaaaaatatcttaaatcatctggactgggtgacacagcatattttggacctgaggcagaattttttgtgtttaatgatgttaaatatgactcgggatcaaattttgcttttcacgaagtagactcaagtgaaggagcttggaattctggcaaagatgaaaatccaaatttaggacataaacctagacataaaggagggtactttccactcccacctgctgatagtttgcaggatgtaagaaccgaaatggttttaacaatggaggaaattggtattaacgttgaagcttctcatcatgaagtggctactggtggtcaatgtgaaattgatttagaattctctcccctcttatcaatggcagatgatctgctcagatataaatatgttgtaaaaaacgttgcaaaacaacatgggttaaccgcgacattcatgcctaaacctctatttgaggataatgggtctggaatgcatgtgcattccagtgtttggaaaaaaataaaacattga

SEQ ID NO: 310909 - DNA, 774 bp, Unknown
  Bacterial polypeptide expressing nucleotide sequence isolated from the Sargasso Sea
aatgttgtcgaccatgaaaagaatgggaatgaaagttgataaacatcaccacgaggtagcttcatgtcagcacgagcttggtctcgttttcgattccttaaaagctcagggtgataatctacagaaatataagtatgttattcagaatgtggcccactcttacggaaaatctgctacttttatgccaaaacctgtagctaatgataatggaaccggaatgcatacaaacatgtctatctgggatgggaatagtccagtttttgctggtaaggagtatgcagggttatcaaaaaatgccctttattatataggaggtattctaaagcatgcgaaggctctcaatgcttttaccaatccttctactaactcctacaagagattgataccagggtttgaagctcctgttttactggcatattcagcaaaaaataggtctgcaagcattagaataccatatgtagagtcgtcaaaagcaactcgtgtagaagctagattcccagaccctactgctaacccatatctttcttttgctgctttgttaatggctgggttggacggaattaagaataagattgatccgggagaggccgcaactaaagatttatatgatcttcctcctgaagaacttgcgtcaatacccactgtttgcggaagtcttagggaggctttaaacagcttagaaaacgaccatgcatttctacttgaaggagatgtatttaatgttgaccaacttgaaggatacatggaccttaaatgggaagaagtatatgctgt

SEQ ID NO: 310910 - DNA, 919 bp, Unknown
  Bacterial polypeptide expressing nucleotide sequence isolated from the Sargasso Sea
tccagaagtacaggaaaaaaagctgaagattatttaaagtcttctggcattggagaaaaatgtttttttggtcctgaagcagagttctttgtatttgatgatgtcaaatgggcaacaaaccaggaatacacattctttagcattgactctgaagaaggggcttataatactggtacagagatggaaggtggaaatatgggacataggccaaaagataaaggtggatactttcctgttcccccagttgattctgctacagacataagagctgaaatggtttctacaatgatagaaatgggtttagacatggaaaaacatcaccatgaagttgccccttcacagcatgagttgggttttaaatttggaagtttgattgaaagtgcagacaatcttcagaaatataaatattgtgtacacatggtcgcacaagcctatggcaaaacagccacatttatgcctaaacctgtttacaacgataatggatctggaatgcatgttcaccaatcgatttggtcaaaaagtggttctttattcgctggcaaagaatatgctggtttatcagatacctgccttcactacattggtggaataattaaacatgcaaaagcaataaatgctttttccaatgcaacaacaaatagttataaaagattagttccaggatttgaagctcctgttttattagcttattccgctagaaatagatcggcttcttgcagaattccttacgctccatctgcaaacggtaaaagagttgaagtgagatttggagatgcatctggaaacccctactttacttttgcagcaatgttaatggctggaattgatggaattaaaaataaaattcaccctggtgacgccactgataaagacctttatgatctacctgaagaagatttaaaagtatcccaactgtgag

SEQ ID NO: 310911 - DNA, 802 bp, Unknown
  Bacterial polypeptide expressing nucleotide sequence isolated from the Sargasso Sea
tatgggtgttaaagtagagaaacatcaccatgaagttgcgcctagccaacatgaattggggatgtactttggtactttaacaaatcaagctgataacgttcagctttataagtatgcagttcaaatggttacacattcatttggcaagactgcaacttttatgcctaaaccagtaaagggtgataacggctcaggtatgcattgccatcaatcaatttggaaaggtaacacacctttgtttatgggaaaagaatacgctggtctgtctaaagaggctttgtattacataggtggtatactaaaacacgctagagctataaatgctttttctaacgcaacaacgaatagttataagagattaatacctggatttgaagctccagtaattttagcttactctgctagaaacagatcagcttcttgcagaatcccagtaataatgaatccaaaggcagcaagaatggaaattaggtttcccgatgcagcaggaaatccttatttaacttttgcctcaatgctaatggcagggatagatgggattaaaaataagatagatcccggtgaagcttttgaccaagatctgtattctctatcagaagatgaagttaaaaaacttccgacagtttgtggctctttgagagaagctatgcaaaatctagataaggatagaaagttcttaactgagggtggagtttttactgacgaccagattgatgcttacattgaattaaaatttcaagaaatatataattttgaacacactcctcatcctattgaatttgaaatgtattatagtggttaa

SEQ ID NO: 310912 - DNA, 742 bp, Unknown
  Bacterial polypeptide expressing nucleotide sequence isolated from the Sargasso Sea
atgtattttggaacattagtgatcaaagcagataatcttcaactatataagtatgctgtgcacatggttacacactcttttggtaagactgcaacctttatgcctaaaccagttaaaggtgataatggttctggaatgcactgtcaccagtcaatatggaagggaagtaccgcagtattttccggaaataaatatgctggtttgtctgatacagcattacactatatcggaggaatattaaaacacgctagagcaataaacgctttcgctaatgcaacaacaaatagttataaaagattaataccaggttttgaagcgcctgtattattggcatactcagcaagaaacagatctgcgtcgtgtagaattccaattacacaaagtaaaaaagctgctagatgtgaagttcgtttccctgatgcagctggaaatccttacttaacattttctgcattattgatggctggtcttgacggaattaaaaataaaatcgatccaggtaaatctttagataaagatttgtacgctttaagtgagtctgaagttaaaaaaattccaacagtttgcggttctttaagagaagctatggaaagtttagacaaagatagaaaatttctaactcaaggtaatgttttcactgatgatcaaatagatgcttatatagctcttaagtatgaagagatttataattttgagcacactccacatccaatggagtttcaaatgtattatagttgttaga

SEQ ID NO: 310913 - DNA, 787 bp, Unknown
  Bacterial polypeptide expressing nucleotide sequence isolated from the Sargasso Sea
atgagcgcaaataacgttttaaaaacaataaaagataaacaaattgagtatgtagatctcagatttacagatccaagaggtaaacttcaacatctaacaatggatgcaactatagttgaccaaggaatgttgaacgatggtgttttttttgacggctcatcaattgctggatggaaagccataaacgagtccgacatgatcttaaaacctgatttagctagaaaaattgttgatccatatacatcacataatactttgattttattttgcgatattttagatgctataaaaaaagatccttatgaaagagatcctagaggaatagcgaaaaaagctgagaagtatttaaaatctacaggcattggtgataaagcatattttggtccagagccagaattttttgtttttgatgatgtaagaattaaaaatgatatgaatgaaacaggttttgttattgatagtaccgaaggaccttataactctggaagaaaatatgaaaatggaaatatgggacacagaccaggtattaagggtggatactttccagtaccacctgtagatagtgcacaagatatgaggagtgaatatttaaaaggattaagagatgttggaattactgttgaaaagcatcaccatgaagtcgcaccaagtcaacatgaattaggaatgttgtttggtactttagtagaccaggccgataatgtgcaactttataaatatattgttcatatggtttctcattcttttggtaaaacagctacatttatgccaaaacctttaaaggaga

SEQ ID NO: 310914 - DNA, 688 bp, Unknown
  Bacterial polypeptide expressing nucleotide sequence isolated from the Sargasso Sea
atgtctaagtctccacaagatgttttaagtcaaattaaagatgaaggaattgaactcatcgatttaaaattcacagacatccatggtaaatggcaacatttaactcttacatcagacatgatagaagaggattcatttacagaaggtctagcatttgatggttcatcaataagaggttggaaagcaattaacgcctccgacatgtcaatggttccagatgcaagtacagcatggatagatcctttttataagcataaaactcttagtatgatttgctctattcaagagccaagaagcggggaaccttatgataggtgtccaagagctttagctcaaaaagcattaaaatatttagattccactggtatagcagatactgcattttttggaccagaaccagaattctttttatttgatgatgttagatatgactctaaagaaggaggttgtttttatagtgtagatactattgaagctccatggaatacagggagaattgaagaagggggaaacctgggatacaaaatacaatacaaagaaggatattttccagtagctccaaatgatactgcccaagacatccgatctgagatgcttcttcttatgggtgaattaggtattcccactgaaaaacatcaccatgaagttgctagtgcaggccaacacgagcttggaatgaaatttgatt

SEQ ID NO: 310915 - DNA, 469 bp, Unknown
  Bacterial polypeptide expressing nucleotide sequence isolated from the Sargasso Sea
tatgagtgctaacgatgttttaaaatttattaaagataaagaagctgaatttgtagacttaaggtttactgatcctagaggaaaattacaacatttaactatggactcaacagcagtcgatgatggaatgttaaatgaaggagtattttttgatggatcttccatagctggttggaaagctattaacgagtctgatatgattttaaaacctgatctatcgagatattttttagatccatttacttctcacaacaccgtagtcctgttttgcgatattttggatgcaattaagaaaactccttatgaacgagatccaagaggtgttgctaaaaaagctgaagaatatttaaaggcctcaggtattggagataaagcattttttggtccagaacccgaattttttgtttttgatgatgtaagaataaaaaatgatatggacgaatgtggttttaaaattgatagtaaagaa

SEQ ID NO: 310916 - DNA, 847 bp, Unknown
  Bacterial polypeptide expressing nucleotide sequence isolated from the Sargasso Sea
tcgttgtgatattctcgagccatcaacaatgaaaggatacgaacgcgacccacgatcaatctctaagcgtgcagaagactatttaaaatctaccggtatcgcggacgaggcatatttcggtcctgaaccagaattttttatctttgatgaggtacgttggggagatgcattacactcaggattttatgaagttgattctgaagaaggatgttggaacagcgatcgtctcgatgaagataaaaatattggtcacagacctggtgttaaaggcggatattttccagttccgcctgtagattcatgtcaagatattcgttcagcgatgtgtacagtactcgaagaaatgggattaacggtggaagtacaccatcacgaggttgcaacagccggacaagctgaaatcggaacatcatgcaagaccctaacaagaaaagctgatgagttactgattctcaaatatgttgttcaaaatgtcgcacatagttttggtaagacagcgacatttatgccaaaaccattagtaggcgataatggtagtggtatgcatgttcatcaatcgttagtcaaagccggtaaaaatctttttgcaggagataaatacggcaatctatccgacacagcattacattacatagctggtgtttttaaacatgcacgcgcaataaatgcattttcaaattccagcactaacagttataaacgtttggtaccaggttttgaggcaccgacattattagcatattcagcacgtaatcgttctgcctcatgccgtattccttgggtttctagcgataaggccagacgtattgaggttcgtttccctgattcttgtggcaatccatatttt

SEQ ID NO: 310917 - DNA, 744 bp, Unknown
  Bacterial polypeptide expressing nucleotide sequence isolated from the Sargasso Sea
gtatgtattttggaactttaactaatcaagcagataacgttcaactttacaaatacgccgtacaaatggttacccactcatttggtaaaacagccacttttatgccgaaaccagtaaaaggagacaatggttcgggtatgcattgccaccaatctatttggaaaggaaacacgccattgtttatgggtaaggaatatgctggtttatcaaaacaagcactttactatattggtggaatactaaaacatgcaagagctataaacgcattttctaacgctacaacaaatagttataaaagattaatcccaggtttcgaagctcccgttattttagcttactcagcaagaaacagatcagcatcatgcagaatacctgttataatgaatccgaaagccgcaagaatggaaattcgatttccagacgcagcaggaaacccttacttaacatttgcttcaatgttaatggcaggtattgatggaattaaaaacaaaatcgatccaggtaaggcttttgaccaggatttatattcattatctgaggatgatgttaaaaaactcccaacagtatgtggatctcttagagaagcaatgcaaaaccttgataaagatagaaaatttttgactcaaggcggagtatttaccgatgatcaaattgatgcttacattgaattgaagtttcaagaaatttacaatttcgaacacactccccatccaatagaatttgagatgtactatagtggttaaa

SEQ ID NO: 310918 - DNA, 796 bp, Unknown
  Bacterial polypeptide expressing nucleotide sequence isolated from the Sargasso Sea
tgatcctaaaggaaaacttcaacacttaacaatggattctacggttgttgatgaagacttgcttgataagggagtattttttgacgggtcttcaattgctggctggaaagttataaatgaatcagacatggtattaaaaccagatctagcaagaccgattatcgatccatttaattcacatactactttaaacattttttgtgatgttttagacgcagttaaaaaagatccatacgaaagagatcctagaggtacggcgaaaaaagcagaggattatttaaaaaaatctggcattggtgataaagcattttttggtcctgagcctgaattttttgtatttgatgatgttagatttaaaaatgatatgaacgagactagtttttctattgatagttctgaggggccttacaacactggtaaaaaatacgaaaatggtaacatgggacatagaccaggtgtaaaaggtggatattttccagtaccaccagttgatagcgctcaggatatgcgaggggagtacctcaaagcgcttaaagatatgggtgtaaaagttgaaaaacatcatcacgaagtagctcctagtcagcacgaacttggaatgtattttggaactttaactgacatggctgacaatgttcaattatataaatatgcagttcaaatggttacacactcttttggtaaaactgctacgttcatgcctaaacctgttaaaggcgataacggctcaggaatgcactgtcaccagtctattggaaagggaacacaccagtttttatgggtaaagaatacgcag

SEQ ID NO: 310919 - DNA, 891 bp, Unknown
  Bacterial polypeptide expressing nucleotide sequence isolated from the Sargasso Sea
gaaatattgccaaaaaagctgaagcatatttgaaatcatctggtattggcgatacagcatttttcggaccagaagcagaattttttgtattcaacaatgttcagtttgattctggatcaaactttgcatttcatgaagttgattctgttgaaggtacctggaatagtggtgctgatgaaaacccaaacctaggacataagccgagacataaggaaggttattttcctttaccgccagttgatacacttcaagatgtaagaactgaaatggtaatgactatgcaagacataggtcttactgttgaagcacaccaccatgaagttgcaacaggtggacagtgtgaaattgatttagaattttcaccacttttaaagatggctgatgatatgatgaaatacaagtatgtcgttaaaaatgttgctagacaacatggaatgactgctacatttatgcctaaacctttatttgaagataatggatcaggtatgcacgttcatcaaagtgtttggaaagatggtgatacactgatgtacaaggaagggaactatgccaacttaagtgacttagctctaaattatattggcggtatacttaaacatgcacctgctctactagctttttgtgctcctactactaattcatataaaagattagtaccaggctttgaggctccagtaaacattgtttactctcaaagaaatagaactgcgtcagttagaattcctgcttattctcaaagtcctaaatcaaaaagaatggaatttagatgtcctgatccaagtgcaaatccatacctagcattttcagcaatgttaatggcgggattagatggaattaaaaataaaattaatcctggtgatccaaccagatataaatctctacgctgctagt

SEQ ID NO: 310920 - DNA, 335 bp, Unknown
  Bacterial polypeptide expressing nucleotide sequence isolated from the Sargasso Sea
aatgtcagttgaatcagttttaaagcaacttgaagaattagaagttaagtttgttgatttacgttttaccgacaccaaaggtaaagagcagcacgtatctattcctgctcatcaggtagacgctgatttcttcgaagacggcaaaatgtttgacggttcgtcaatcgctggctggaaaggcattaacgaatcagacatggtactgatgccagacccaaccacgtttgtattagacccattcaccgaagaaaccactgcactgatccgctgtgacattctcgagccaggcactatgactggttatgaccgcgacccacgttctatcgcgaaaaaag

SEQ ID NO: 310921 - DNA, 496 bp, Unknown
  Bacterial polypeptide expressing nucleotide sequence isolated from the Sargasso Sea
tatgagttcaagcaaagtattaaaactgatgaaagataaagacatagaatatgtcgatctaagatttactgatcctagaggaaaacttcaacatttaacaatggacgcaacaatagttgatgaaggtatgttaaatgatggagttttttttgatggttcttctattgcagggtggaaagcaataaacgagtcagatatgattttaaaaccagatttaaatagacaaattgtagatccatatacttcacataatactttaatattattctgcgatatcttagatgctgtcaaaaaagactcttatgaaagagatccaaggggaattgcaaaaaaagcagagacgtatctaaaaaaaacaggagttggagataaagcttattttggacctgaaccagagttttttgtttttgacgatgtaagaattaaaaacgacatgaatgaaacaagttttgcaattgatagcgctgaaggtccttataattctggaaaaaaatat

SEQ ID NO: 310922 - DNA, 838 bp, Unknown
  Bacterial polypeptide expressing nucleotide sequence isolated from the Sargasso Sea
gaatggtaatgacaatgcaagacatttggtcttacttgttgaagcacatcaccatgaagttgcaacaggtggacaatgtgaaattgatttagaattttcaccacttttaaagatggctgatgatatgatgaaatataagtacgtagttaaaaatgttgctagacaacatggaatgactgcaacatttatgcctaaacccttatttgaagataatggttcaggtatgcacgtgcatcaaagtgtttggaaagatggtgatacacttatgtataaagagggtaactatgctaacctaagtgatttagctctaaattatattggaggtatccttaagcatgcgcccgctctattagctttttgtgcccctactactaattcttataaaagattggtaccaggctttgaggctccagtgaatattgtttactctcaaagaaatagaactgcatctgtgagaattcctgcttattctcaaagccctaaggcaaaaagaatggaatttagatgcccagatccaagtgcaaatccatacttagcattctcagcaatgttaatggcaggattagatggaattaaaaataaaattaatcctggtgatccaacagatataaatctctacgctgctagcgatgaagttttgtctaaaattcaatctacacctggatctttagctgaatctcttgaagctcttgagaaagatcatgcatttttattagagggtgatgtattcaccaaagatgtaattgaaacttatattagctataaaaaagagagtgaggttgaccctattaatattagacctcatccacacgagtttaaattatactacgacgtgtag

SEQ ID NO: 310923 - DNA, 800 bp, Unknown
  Bacterial polypeptide expressing nucleotide sequence isolated from the Sargasso Sea
gggtgttaaagtcgaaaaacatcaccacgaagttgctccctctcaacacgagcttggaatgtattttggtactttaaccgatatggcagataacgttcaattatataaatacgcggtacaaatggttacaaattcatttggaaaatctgctacgtttatgccaaaacctgtaaagggtgataatggttcaggaatgcattgccaccaatcaatatggaaaggtaactcacctttatttatgggtaaagagtatgcaggattgtcacaaaccgcattgtattatatcgggggaattttaaagcacgcaaaagcaattaacgcattctcaaacgcaactacaaatagctacaaaagattaattcctggttttgaggctccggtcattttagcttactcagctagaaatagatctgcatcttgtagaataccaattacaatgaacccaaaggctgcaagaatggaaataagatttccagatgctgccggaaatccttatttgacatttgcctcaatgttaatggctggaattgatggtatcaaaaataaaattaacccaggtaaagcatttgataaagacctttatactttaggcgaagatgaagtaaaaaaacttccaacagtgtgcggttctttaagagaagcaatggaaagtttagataaagatagaaagtttttaactgaaggtggagtttttactgatgatcaaatagatgcttatatagacttaaaatttcaagaaatttacaaattcgaacatactccacacccgattgaatttgaaatgtattacagtcaataat

SEQ ID NO: 310924 - DNA, 454 bp, Unknown
  Bacterial polypeptide expressing nucleotide sequence isolated from the Sargasso Sea
tatgagtgcatcaaaagttttaaaacaaataaaagataaagaagttgaatacatagatttaagatttactgatcctagaggaaaattacaacacttaacaatggactcgactatagttgatgatgatatgttgaatgatggagttttttttgacggctcgtcaattgctggatggaaagcaattaatgaatctgacatgatattaaaacccgatctatcaagaacagtaatggatccttttacttctcataatactcttatagtattttgtgatattttagatgctattaaaaaaactccttatgaaagagatccaagaggaattgccaaaaaagcagaggcatatttgaaaaagtctggtgttggagacagagcttattttggacctgaacctgaattttttgtttttgatgatgtaagaattaaaaacgatatgaacgagactagctttagt

SEQ ID NO: 310925 - DNA, 643 bp, Unknown
  Bacterial polypeptide expressing nucleotide sequence isolated from the Sargasso Sea
catgccgaagccgatcgcgggcgacaacggctcaggcatgcatgtgcatcagtctatctggaaggacggcaagtcggccttcgccggatcgggctatgccgacctttcggacacctgcctttactatatcggcggcatcatcaagcatgcccgcgcgctgaacgctttcaccaacgccagcactaacagttacaagcgcttagtgcccggtttcgaggcgccggttctactcgcctattcggcgcgcaaccgctcggcatcgtgccgcataccctatgcgacgagcccgaatgccaagcgcgtcgaggtgcgcttccccgacccgacggccaacccatacttggccttctcggccatgctgatggccggcctggacggcattgaaaacaaaatccatccgggcgacccgatggacaaagatctctacgacctgccagccgaggaacttgagggtgtaccgacggtttgtagttcgctgggacaggcgctagaggcgctcgacgccgaccgcgacttcctgaaaaaaggcgacgtgttcacagacgaccagatcgacggctacatcgagctcaagcaggaagaactcaccgccttcctccaagcaccgcacccgatcgagttcgagatgtactactcggtatag

SEQ ID NO: 310926 - DNA, 916 bp, Unknown
  Bacterial polypeptide expressing nucleotide sequence isolated from the Sargasso Sea
tgatccatttacaaccgtgccaacacttgctgtcatttgcatggtgcaagatccaatcactcgtgaagactattctcgcgatccccgatttattgctcgcaaagcagcaatttatttagagggaaccggtattgctgatacatgttttattgggccggaagcggagttctttgttttcgatacagcccaatttgatcagactgcacatgaaggcttttattcgattgactcagctgaggcagaatggaatcgcggtagcggcagtcatgggcatcaggtgcgacaccgtcaaggttacagcccagttccaccatctgatcagatgatggatatccgtacagaaatgatgctcaccatgattcagtgtggtatcgatgtggaagcacaacatcatgaagttgcctcagccggtcaatgtgaaattgatatgcgataccagagtcttgtacggatggctgatcacctctgtctctataaatatattgttcggaacgtcgcgcggaggcatggacggacagcgacattcatgccaaagccaatctatggggatagcggatcaggaatgcatgtgaatctttccttatggaaagaagggaagcctctgtttggtggttccgggtatgcagggctttctgacatggcactgcatgcactcggcggaattctgaaacacgcacgagcacttcttgcactgacaaatccaacaacaaatagctacaaacgacttgttccaggttatgaggcacccatcaatctggcgtactcccaacgaaatcgatctgcagcgtgtcgaatcccgatgtattcaacgaatccaaagaccaaacggattgaatttcgttgtccagatccgacgtgtaacccataccttgcattttccggcggttcttatggcagccaattgatggaattcaaa

SEQ ID NO: 310927 - DNA, 886 bp, Unknown
  Bacterial polypeptide expressing nucleotide sequence isolated from the Sargasso Sea
tgtgtttaataacgttcagtttgactcaggatcaaactttgcatttcatgaagttgattctgttgaaggtacttggaatagtggcgccgaagaaaatcctaacctaggtcataaacctagacataaagaaggttattttcctttaccgccagttgatacacttcaagatgttagaactgaaatggtaatgacaatgcaagacattggcctaacagttgaggctcatcaccacgaagttgcaacaggtggacaatgtgaaattgatttagaattttcaccactcttgaagatggctgatgatatgatgaaatataagtatgttgttaaaaatgttgccagacaacatggaatgactgctacatttatgcctaaacctttatttgaagataacggttcgggtatgcacgttcatcaaagtgtttggaaagacggtgacacattaatgtataaagagggtaactatgcgaacctaagtgatttagctttaaattatattggaggtatacttaaacatgcacctgctcttttagctttttgtgctcctactactaattcttataaaagattggtcccaggctttgaggctccggtgaacattgtttactctcaaagaaatagaactgcatctgtgagaattcctgcttattctcaaagccctaaagcaaaaagaatggaatttagatgtccagatccaagtgcaaatccatacttagcattctcagcaatgttaatggcaggattggatggaattaaaaataaaattaatcctggcgatccaacagatataaatctctacgctgctagcgatgaagttttgtctaaaattcaatctacacctggatctttagctgaatctcttgaagctcttgagaaagatcatgcattt

SEQ ID NO: 310928 - DNA, 599 bp, Unknown
  Bacterial polypeptide expressing nucleotide sequence isolated from the Sargasso Sea
tatgagttcaaatgatgttttaaaattaatgaaagataaagaaattgagtatgtagatttaagatttacagatccaagaggtaaactacaacacttaacaatggatgctactgttgttaacaatgacatgttaaacgatggagtcttttttgatggatcatcaatcgctggatggaaagcaattaatgagtccgatatgattttaaagcctgatttaagtagaaaggtaatagatccttacactacacacaatactcttattttattttgtgacatactggatgcagttaaaaaagatacatatgaaagagatccaagaggaatagcaaaaaaggctgaggcatatttaaaaaaaacaggtataggagacaaagcatattttggacctgagcctgagttttttgtatttgatgatgtaagaattaaaaatgacatgaatgaaactggtttttctattgatagtacagagggtccatacaattcaggaagaaaatatgaaaatggaaatatgggacatagaccaggtattaaaggtgggtatttccctgttccaccagttgatagtgctcaagatatgagaagtgaatatttaaaagggt

SEQ ID NO: 310929 - DNA, 629 bp, Unknown
  Bacterial polypeptide expressing nucleotide sequence isolated from the Sargasso Sea
catgagtattaaagacgtcaacaaattaatgaaagataaagaggtagaatttgttgatctaagatttacagatcctaaaggtaagcttcaacacttaacaatggacgctactgttgtagatgaggatatgttaaatgaaggtgtattttttgatgggtcttctatagctggttggaaagcgattaatgagtctgatatgatattaaaaccagatttatctagacctataatcgatccatttaattctcacgtaacactaaatatattttgcgatgttttagacgctattaaaaaaaatccatacgaaagagacccaagaggaacagcaaagaaagctgaggaatatttaaaaaaatcaggaatcggtgataaagcttattttggtcctgaaccagaattttttgtgtttgacgacgtaagatttaaaaatgacatgaatgaaactagttttaacatagatagttcggaaggtccttacaacacaggtaaaaaatatgaaaatggtaatttaggacatcgcccaggagtcaaaggtggttattttcctgtccctcctgtggatagttcgcaagatatgcgaagtgaatatttgaaagctttaaaagatatgggtgtaaaagttgagaaac

SEQ ID NO: 310930 - DNA, 952 bp, Unknown
  Bacterial polypeptide expressing nucleotide sequence isolated from the Sargasso Sea
aggcattaacgagtctgacatgattttaaaacctgatactgcaagaatgttcatggatccttttacgtctcataatactgtagttttgttttgtgacattctagatgcaattaaaaaagatccttatgaaagagatccaagaggtgtcgctaaaaaagcagaggaatatttaaaagcttcaggtataggtgataaagctttttttggacctgagccagaattttttgtgtttgatgatgtaagaattaaaaatgatatgaatgagtgtggatttaaattagatagtaaagaaggtccttacaactcaggaaaagaatatgaaagtggaaacatgggacacagacctcaaattaaaggaggatatttcccagtgccaccagttgatagtgaacaagacatgcgtggtgaatatcttaaaaatttaaaagaagttggtattaaagttgagaaacatcaccatgaagtagctcctagtcaacacgaacttggaatgtattttggaactttagttaatcaagcagataacgttcagttatataagtatgttgtgcaaatggttacacattcatttggaaaaactgcaacatttatgccaaaaccggttgctggtgacaatggttcaggtatgcacattcaccaatctatttggaaaggtgatacaccggtattttcaggtgatgcttatgctggtttaagtgaaactgctttacattatattggtggaattttaaaacatgctaaagcaattaatgcctttgctaactctacaacaaatagttacaaaagattaattccaggttttgaagctccagttcttcttgcatattcagcaagaaatagatctgcttcttgtagaatacctatcacattaagtaaaaaaggtgcaagatgtgagatcagattcccagatgctgctggaatccttatttacatttgcagctatgttgatggc

SEQ ID NO: 310931 - DNA, 768 bp, Unknown
  Bacterial polypeptide expressing nucleotide sequence isolated from the Sargasso Sea
ctccacacccgactaatacaagagcgctagcgagagcagctgaagagaaatacggagaccaagatccttggtttgggcttgagcaggaatacacgatgatcgatacagaaagtggatggcctgcaggctttcccgctaatggttttcctgctccccaaggaccgtactattgcggtgttggcgcagaaaaaatctatggccgtccagcggttgaagaacataccaccctatgtatagaggctggcctcaaaatttccggaactaatgctgaggtcatgcctggacaatgggaattccagattggccccgcaggaacagttgaagtaggcgaccatctatgggtagctcgatatttgctctatcgcgtgggcgaagctcataatgtgaaaatcagcatagaagctaaacctatgaaaggggattggaatggcgccggcatgcataccaacttctcaactaaggccatgagagaaggctatgaagcgatcacagcggcatgtgagtcacttggagccccaggcgtccctgaaaagcatcttgaaggttatggagtaggaatcgaagatcgtctaaccggagatcatgaaacacaacggtatgaccagttcagctacggggtttcagatcgtggagcttctgtccgtgtaccttggcaagttgcacaagaccagaaagggtacattgaggatcgtcggcctaatgccaatgcagatccctatgttgttgctgcacttatgactgaaacagtaggtgctgcgttagcctaag

SEQ ID NO: 310932 - DNA, 857 bp, Unknown
  Bacterial polypeptide expressing nucleotide sequence isolated from the Sargasso Sea
catgaccctgatgccggacctgtatcgagcttacgtcgacccattctttgcgcagccgactctcgccctgttttgcgatgtgttggagccaaatactggtgaggcctactcgcgcgacccacgcgggacagccaaagccgcacttgcccacatggaagcagcaggtatcggcgataccgcgtttttcggtccagaggctgaattcttcctgtttgaagatgttaagatcgacgtttcgatgaaccgcgccatgtatgaagtggactcagtcgagggtccgtataacggcgcccgcgactacgaagagggcaatatgggccaccgtccgggtgttaagggcggctacttccccgtaccaccgcttgattccggacaggacattcgctccgagatggtatcggtgatggccgccatgggtatcaacgtcgaaaagcaccaccatgaggtcgctccatcgcagcatgagcttggcatcaagttcggtacattaattgagaccgccgacaacctgcagctttataaatacaccgtgcatcaggtggcgcatgcctatggtctctcagcaaccttcctgccaaagccgatctctggcgacaatgggtcgggcatgcatgtccaccagtcgatctggaatgatggcaagccactgtttgcgggtaatggctatgctgacttgtcggaaagcgcgctgttctacatcggcggcatcatcaagcatgccaagtcactcaacgcattcaccaacgcctcaacgaacagctacaagcgtctgatccccggttatgaggcgccagtgcttctcgcctattcatctcgcaaccgctccgcctcatgccggattccgcatgtgaattcgc

SEQ ID NO: 310933 - DNA, 751 bp, Unknown
  Bacterial polypeptide expressing nucleotide sequence isolated from the Sargasso Sea
atttactgatccaagaggaaaattgcaacatttaaccatggatgcaacaacagtagatgaagaaattttaaatgaaggagttttctttgatggatcttcaattgctggttggaaagcaatcaatgagtcagacatgattttaaaaccagatctaaaacgaaaaattattgatccatatacatcacacaatacactgatattgttttgcgatattttagatgctgtaaataaaaattcatatgaaagagatcctagaggaatagctaaaaaagctgaagcatatcttaaatccacaagtattggggacaaagcatattttggaccggaaccagaattttttgtatttgatgatgttcgatataaaaatgaaatgaatgaaactagttttgcaattgatagttcggaaggtccttacaatactggaagaaaatatgaaaatggaaatatggggcaccgtcctggagttaaaggcggatactttccagttccgcctgttgatagtgcacaagacataagaggagagtttttaaaaggattaagagatgtaggtataacagttgaaaaacaccatcatgaagtcgctccaagtcaacacgaacttgggatattatacagtacgctggtaaatcaagccgacaatattcaactatacaagtatatagttcatatggtttctaattcatttggtaaaactgcaaccttcatgccaaaaccagtaaaaggagataatggatctggtatgcatactcac

SEQ ID NO: 310934 - DNA, 592 bp, Unknown
  Bacterial polypeptide expressing nucleotide sequence isolated from the Sargasso Sea
atgagctcaagcgaagttttaaaattaataaaggataaggaaatagagtcagttgacctaagatttactgatccaagaggaaagttgcagcatttaacaatggacgcaaccgcagttgatgaaggaatgttaactgacggtgttttttttgatggatcttcaattgctggatggaaagccattaatgagtctgacatgattctaaaacctgatttaagtagaaaaattattgatccttttacttctcataatactcttattcttttttgtgatattttagatgctgtaaaaaaagactcttatgaaagagatcctcgaggtatagcaaaaaaagctgaggcttatttaaaatcaacaggaattggagataaagcttattttggaccggagccagaattttttgtatttgacgatgttcgttataaaaatgatatgaatgaaacaagctttgttattgatagtgcagaaggcccttacaatactggaaaaaaatttgaaaatggaaatatgggacacagacctggagttaaaggtggctattttcctgttcctcctgttgatagtgctcaagatttacgtggagaattttaaa

SEQ ID NO: 310935 - DNA, 899 bp, Unknown
  Bacterial polypeptide expressing nucleotide sequence isolated from the Sargasso Sea
aatgagcgcagctaacgttttaaaatatattaaagaaaaagatgcagaatttgtagatctaagatttacagatccaagaggaaaacttcaacatttaactatggattcaacagtggttgatgaggatatgttaaatgaaggtgtgttttttgatggatcgtctattgcaggatggaaagcaattaatgaatctgacatgattttaaaaccagatacttcaagaatgtttatggatccttttacgtctcataatactgtagttttgttttgtgatattcttgatgctattaaaaaaacaccatatgaaagagatcctaggggtatagcaaaaaaggcagaagaatatttaaaagcttctggaattggtgataaagcattctttggtccagaacctgaattttttgtatttgacgatgtaagaattaaaaatgatatgaatgaatgtgggtttgtattagatagtaaagaaggtccgtataactcagggaaagaatatgaaagtggaaacatgggtcatagacctggagtaaaaggaggatacttccctgttccacctgtagatagtgaacaggatatgagaagtgaatatttaaaaaacttaaaagatgttggtataaaagttgaaaaacatcaccatgaggtagctccaagtcagcatgaattaggaatgtattttggaacattagttgatcaagctgataatgttcaattatacaaatatgtagttcaaatggtaactcactcattcggtaaaacagctacatttatgcctaaaccagttgcaggtgataatggttctggtatgcatacacaccaatctatatggaaaggggatacaccagtgttttctggagatgcttatgctggattatcagaaacagctttacattatattggtg

SEQ ID NO: 310936 - DNA, 904 bp, Unknown
  Bacterial polypeptide expressing nucleotide sequence isolated from the Sargasso Sea
tgtggttttgttttgtgacattctagatgcaattaaaaaagatccttatgaaagagatccaagaggtgttgctaaaaaagctgaagaatatttaaaagcttcaggtataggtgataaagctttttttggacctgagccggaattttttgtttttgacgatgtaagaatcaaaaatgatatgaatgagtgtggatttaaattagatagtaaagaaggtccttacaattcaggtaaagaatatgaaaatggaaatatgggtcatagacctcaaattaaaggaggatatttcccagtaccaccagttgatagtgaacaagacatgcgtggtgagtatcttaaaaatttgaaagaagttggtattaaggttgaaaaacatcaccatgaagttgctcctagtcagcacgaacttggaatgtattttggaactttagtaaaccaagctgacaacgtgcaattatataaatatgttgttcagatggttacacattcatttggaaaaactgcaacttttatgccaaagccagttgctggtgacaatggttcaggtatgcacatccatcaatccatttggaaaggtgatactccagtgttttcaggtgatgcgtattctggattaagtgaaaccgcattacattatattggtggaattctaaaacacgctaaagcaattaatgcttttgctaactctacaacaaacagttacaaaagattaattccaggatttgaagctccagttcttcttgcatattcagcaagaaatagatctgcttcttgtagaataccgatcacattaagcaaaaaaggtgcaagatgtgagattagattcccagatgctgccggaaacccatatttaactttcgcagctatgttgatggctgggattgatggaataaaaaataaaatt

SEQ ID NO: 310937 - DNA, 790 bp, Unknown
  Bacterial polypeptide expressing nucleotide sequence isolated from the Sargasso Sea
ttgaaaaacatcaccaatgaagttgctcctagtcagcatgaacttggaatgtattttggaactttagtaaaccaagctgacaacgtacaattatataaatatgttgtacaaatggttacccattcatttggtaaaactgcaacatttatgccaaaaccagttgctggtgataatggttcgggaatgcacatccatcaatctatttggaaaggtgatactccagtattttcaggagacgcatattctggattaagtgaaactgcattacattatattggtggaattctaaaacatgctaaagcaattaatgcttttgctaactctacaacaaacagttacaaaaggttaatacctggttttgaagctccagttcttcttgcatattcagcaagaaatagatctgcttcttgtagaataccaattacattgagtaaaaaaggtgcaagatgtgagattagatttccagatgctgcaggaaacccatatttaacttttgcagctatgttgatggctggtattgatggaattaaaaacaaaatccatccaggtgagtcttttgataaagatttatatgaattaccacccgaagaagttaaagctattccaacagtttgtggttctttaagagaagcaatggaaagtttagataaagatagagagtttttaactcaaggcggtgtctttactgatgatcagattgatgcttatattgctctgaagtttgaagagatacacaaatttgaacatgcacctcatcctatagagtttgagatgtattacagtagctaat

SEQ ID NO: 310938 - DNA, 706 bp, Unknown
  Bacterial polypeptide expressing nucleotide sequence isolated from the Sargasso Sea
atgagtgctggtaaagttataaaattaataaaagataaagaaatagaatacgtagatctacgttttactgatccaaggggaaaacttcagcatttaactatggatggaaagatggttgatgaagaaatgttaaatgatggtgtgttttttgacggatcctcaatagctgggtggaaagctattaatgaatctgacatgatacttaagccagaccttcaaagacaagttatagatcctttcacttcccacaatacattgattttgttttgtgatgttttagatgctgtaaaaaaagacccttatgaaagagatccaagaagcatagctaaaaaagctgaagcttatttaaaaaaaacaggtattggagataaagcttattttggaccggaagcagaattttttgtatttgatgatgtaagatactcaaacgacatgcaccatactggatttcaaattgatagttctgaaggtccatacaacactggaaaaaaatatgaaaatggtaatatgggacatagacctggtataaaaggtggttactttcccgttcctccggttgacagtgctcaagatatgaggggagagtttttaaaagctttaaaagatatgggaattaaagttgaaaaacatcatcacgaagtagcaccaagtcaacatgagcttggtatgtattttggaactttaactgatcaagctgataatatgc

SEQ ID NO: 310939 - DNA, 843 bp, Unknown
  Bacterial polypeptide expressing nucleotide sequence isolated from the Sargasso Sea
aaaggaggttatttccctgtaccaccagttgatagtgaacaagatatgcgaagtgaatatttaaaaaatttgaaagaagttggtatcaaagttgaaaaacatcatcatgaagttgcaccaagtcaacacgagcttggtatgtattttggaactttggttaaccaagcggacaacgttcaactctataaatatgtagttcaaatggttacacattcatttggaaaaactgcaaccttcatgccaaaaccagttgcaggtgataatggttcaggtatgcatattcaccaatctatttggaaaggtgatactccagtattttcaggtgaagcatatgcaggactttcagaaactgcattacactatattggtggaattttaaaacatgctaaagcaattaatgctttcgctaactccacaacaaacagttacaaaagattaattcctgggtttgaagcaccagtgctattagcttactctgcaagaaatagatctgcatcatgtagaattccaattactttaagtaaaaaaggtgcaagatgtgaaattagattcccagatgcagcaggtaacccttacctaacatttgcagcaatgctaatggcaggtattgatggaattaaaaacaaaatacatccgggagaatcttttgataaagatttgtatgaattaccaccagaagaagtaaaagcaattccaacggtttgtggatctttaagagaagcaatggaaagtttagataaagatagagagtttttaactcaaggtggtgtgtttactgacgaccaaatcgatgcttatatagctcttaaatttgaggaaattcataagttcgaacacgcacct

SEQ ID NO: 310940 - DNA, 613 bp, Unknown
  Bacterial polypeptide expressing nucleotide sequence isolated from the Sargasso Sea
aatgagcgcaaatgatataaaaaagatggttgatgaaaaggaagcaaagttcattgactatagatttaccaatacgttaggtaaagagcaacacgtaacagttacagcctcagatgatggtattgctacagactgtgaagagggtaagatgtttgacggatcatcaatagcaggatggaaggatattaatgaatctgacatgattttaatgcctgatacatctacagcttttgctgatccattttttgatgaacctactattaacgttacatgtgatgtaatagaacctgcagatggatctagttatgaaaaagatccgagaggtattgccaagagagccgaaaagtttttaacagattctggtattgctgatactgcttattttggaccagaaaatgaattttttgtttttgatgatgttagatttgaagacaaattaggtagttgttttttcaaagttgattcaactgaagcatgttggaatagcggtaaagactatgaagacggcaatatgggccatagacctctagtcaagggtggttattttccagtaccgcctgttgatgcgcttcaagattgtaggtctgcaatgattactacccttcatgaagta

SEQ ID NO: 310941 - DNA, 744 bp, Unknown
  Bacterial polypeptide expressing nucleotide sequence isolated from the Sargasso Sea
accagtagactctgcacacgacattcgtgctgctatgtgtatggtaatggaagaaatgggccttgtgattgaagctcaccaccacgaagtagccacagcgggtcaaaacgaaattgcttgcgaattcaacacgctagttaaaaaagcggatgaaattcaagtttataagtatgttgtgcacaacgtagcacacgcatatggccaaactgcgaccttcatgcctaagccacttgttggtgataacggttctggtatgcactgccaccagtctatctctaaagatggcgtaaacatcttcgcgggtgacaagtacgctggtctttctgaagaagcactttactacattggcggtattattaagcacgcacgtgcaatcaacgcctttgctaacgcttcaactaactcatacaagcgtctagttcctgggttcgaagcgccggtaatgcttgcatactctgcacgtaaccgttctgcatcaattcgtattcctcacgtaactagcgataaagcgcgtcgtattgaagtacgtttccctgacccaacagctaacccttacctagcgttctctgctatgctaatggctggccttgacggtatcaaaaacaagatccaccctggcgactcgatggataaagacttatacgaccttccaccagaagaagcggctgaaatcccaactgttgcaagctcgctagaaatggcacttgaagcacttgataacgaccgtgacttccttaaagcggg

SEQ ID NO: 310942 - DNA, 631 bp, Unknown
  Bacterial polypeptide expressing nucleotide sequence isolated from the Sargasso Sea
atgagtgcaaatgatattaagaaactggtcgatgaaaaagaagcaaaattcatcgattatagatttacaaacacccaaggtaaggagcaacatgtcactgtaacagcttctgaagagggcatagagactgactgttcagaaggcaaaatgtttgatggttcatctattgcaggctggaaggatattaatgaatcagacatgatacttatgcctgacactgctacagcctttgttgatcctttttacgatgaacccactgttaatgttacatgtgatgtcattgaaccttcagatggttccatatacgaaaaagatcccagagggattgctaaaaaagcagaaaaatatttgattgactcaggtgttgctgatactgcatattttggacctgaaaatgaattctttgttttcgatgatgttaaatttgaagatacgattggtagttgcttcttcaaagtagactcatctgaggcaatctggaatagtggcaagacatatgaagatggtaacatgggacatagacctggtgttaaaggaggatattttcctgtaccaccagtcgacgcccttcaagactgtagatctgcaatgataaccacattacatgaggttggtgttcaatgtgaagttc

SEQ ID NO: 310943 - DNA, 887 bp, Unknown
  Bacterial polypeptide expressing nucleotide sequence isolated from the Sargasso Sea
aatgtctgacgcacaaaaaataatgggaatgataaaagaacatgacatcatttatgttgacttaagatttactgacccgcgtggtaagatgcaacatgtaacccagcatatcgacacaattgacgaagaaacgttggccgaaggtttcatgtttgatgggtcatctatcgctggctggaaggcgatcaatgaatcagacatgaccctaatgcctgatctgtatcgtgcctacgtagatccatttttcgcccaacctacactagcgctattttgtgatgtcttggaaccctctactaaagaggcatattctcgcgaccccagaggaacggccaaagcagcgctcgcccacatggagtcccttggtatcggagatacggcttactttggaccggaagcagaattttttatcttcgaagatgtaaaaattgacgtgtccatgaaccgagcaatgtatgctgtagacagcgtggaggggccctacaatagcgcccgaaaatatgaagagggtaatctaggtcaccgtccgggggtgaaagggggttatttcccagtccctcccgtcgactccggccaggacataaggtcagaaatgttgtcagtcatgtctgacatgggtgtgccagttgaaaaacatcaccacgaggtggcgccatcacaacacgaactcggaatgaaattcggaacgctgattgaaaccgcagacaaccttcaactttacaaatattcggttcaacaagtggcacacgcctatggtgtgtccgccactttcatgccaaaacctatagctggcgacaatggatcgggtatgcatgtacaccaatctatttggtcaaaggggaagccactttttgccggcaatcagtatgctgatttgtcagaagatgcgt

SEQ ID NO: 310944 - DNA, 793 bp, Unknown
  Bacterial polypeptide expressing nucleotide sequence isolated from the Sargasso Sea
gatgttcctggaactactcatcatttcactattccgataaaatttttagaagaagatatctttgaagacggtcttggttttgatggctcttccgtaagaggtttccaggctatagaaaatagtgacatgatagttgttcctgatgtgacaactgcctacatcgatcctttcttttcagaaaaaactattgctttttactgtgatattaaagaccctattactaaggaaaattattcaagagatcctaggaacatagcaaaaaaagctgagggatatttaaaatcgtcaggtatgggtgatactgcatattttggtccagaagctgaatttttcatttttaatgatgttaagtatgattcaggatcaaacttcgcttttcatgaggttgactcaaatgaaggcacttggaatacaggaaaggatgaaggaccaaatctaggtcataaacctcgtcataaagagggctactttcctcttcctccagtagatagtatgcatgatgtaagaactgaaatggttatgactatgcaagatattggtcttacagttgaagcccatcaccatgaagttgctacaggtggtcaacaagagatcgatttagagtttgctccacttgtttcaatggctgatgatttaatgaagtacaaatacgtggtaaaaaatgtagctaaattgcacggactttcagcaacattcatgccaaaacctttgtttggtgataatggctctggaatgcacgttcatcagagcatctggaaagatggtgatacattgatgtataaaaaaaggtaac

SEQ ID NO: 310945 - DNA, 815 bp, Unknown
  Bacterial polypeptide expressing nucleotide sequence isolated from the Sargasso Sea
tatgcgctttactgatataccaggaacaactcaacattttacaattccaataaaatttttagatgaagatatattttctgatgggcttggttttgatggatcttcagttagaggatttcaagaaattcaagacagtgatatgattgttttgccagatgcagcaactgcatacattgatccatttttttctgagaaaactctagcattacattgtaatattaaagatcctgttacattagttgattacagcagagatccaagaaatattgctaagaaagctgaggcgtacttaaaatcatctggaattggtgatacagctttttttggtcctgaagcagagtttttcgtttttaataatgttcaatttgattcaggttcaaactttgcatttcatgaagtagattctactgaaggtacttggaatagtggtactgatgaaaatccaaatttgggtcacaaaccaagacataaagagggatactttcctcttccgccagtagatacacttcaagatgttagaacagaaatggttatgacaatgcaagacattggattaacggttgaggcacatcaccacgaagttgctacaggtggacaatgcgaaattgatttagagttttcacctttattaaaaatggctgatgatatgatgaaatacaagtatgtagttaaaaatgttgctaagcagcacggaatgacagctacatttatgccaaaacctttatttgaagacaatggctcaggtatgcacgttcatcaaagtgtttggaaagatggagatacactaatgtacaaagaaggtaattacgcaaacc

SEQ ID NO: 310946 - DNA, 892 bp, Unknown
  Bacterial polypeptide expressing nucleotide sequence isolated from the Sargasso Sea
aaaaaggctgaagcatatttaaagaaaacaggaattggtgatacagcttactttggtccagagcctgaattttttgtttttgatgacgtcagaattaaaaacgatatgaatgaaacaagtttttcaattgatagttcagaaggtccttataattctggaaaatcttatgataatggcaacatgggtcatagacctggtgtaaaaggaggttattttccagtaccgccagtagatagtgctcaagatatgagaggtgaatatctaaagggactaagagatgttggaattaccgtagagaaacatcaccatgaagttgctcctagtcaacatgaacttggaatgttatttggaaccttggttaatcaagcagacaacgttcaactttacaaatacgtagttcaaatggtttctcactcttttggtaaaactgcaacttttatgcctaagccagttaaaggagataatggttcaggaatgcacactcaccaatcaatttggaaagggaaaactcctgtattttctggaaacaaatatgctggtttatctcaaactgctttatattatattggtggagtattaaaacatgcaaaagcaattaatgcatttgctaatgctactacaaatagttataagagattaataccaggatttgaggctccagttctacttgcatactccgccagaaatagatcggcttcatgcagaattccaatcacattaagtaaaaagggtgcaagatgtgaaataagattcccagatgcatcaggaaatccgtatttaacatttgcttctatgcttatggctggaattgacggtataaaaaataaaattgatccaggtaaatcatttgacaaagatctttacgctttatcagaaaagcaagttaaaaaag

SEQ ID NO: 310947 - DNA, 532 bp, Unknown
  Bacterial polypeptide expressing nucleotide sequence isolated from the Sargasso Sea
aatgagtgcaaatgatgtgctaaaatttattaaagataaagaagctgagtttgttgatcttagatttacagatcctagaggaaaattacaacatttaactatggattcaactgttgttgatgaaaacatgttaaacgatggtgtattttttgatggttcatcaatcgcaggttggaaggctattaatgaatcagacatgatcctaaaaccagacacttcaagattttttttagatccttttacatcacataatactgcagttttattttgtgatattttagatgcagtaaagaaaactccttacgaaagagacccaagaggtgtagcaaaaaaagctgaagaatatttaaaatcatcaggagttggggataaagcgtttttcggaccagagccggaattttttgtttttgatgatgtaaaaattaaaaatgatatgaatgaatgtggatttgcaattgatagtaaagaaggtccatataattcaggaaaagaatatgataatggtaacatgggtcacagacctccaattaaa

SEQ ID NO: 310948 - DNA, 851 bp, Unknown
  Bacterial polypeptide expressing nucleotide sequence isolated from the Sargasso Sea
ttaaatgacggtgtgttttttgacgggtcttcaattgcaggttggaaggctattaatcagtcagacatgcttttaaaacctgacttaactagacctattatcgatccatttaattctcatacaacacttaatattttttgtgatattcttgatgcagtaaaaaaagatccctacgagagagatccaagaggaactgctaaaaaagcagaggcttatttaaaaaaatctggaattggagataaatcttattttggtcctgaaccagaatttttcgtgttcgacgacgttagatttaaaaatgatatgaacgagacaagttttagtattgatagctctgaaggtccatacaatactggaaaaaaatatgaaaatggtaatatgggtcacagacctggaattaaaggagggtactttcctgttcctcctgtagacagtgctcaagatatgagaggagagtatttaaaagctcttagagacatgggtgttaaagtagaaaaacaccaccacgaagttgcacctagtcaacacgagttaggtatgtattttggaacattaactaatatggctgataatcttcaactttataaatatgcagttcaaatggttacacattcttttggtaagacagccacttttatgcctaaacctgtaaaaggtgataatggatcaggtatgcactgtcaccaatcgatttggaaaggaaatacaccagtatttatgggtaatgagtattcaggtttatcaaaaacagctttatactatattgggggaatcctaaaacatgctaaagctatcaacgctttttctaatgctactacgaatagctacaaaagactgatacctggttttga

SEQ ID NO: 310949 - DNA, 415 bp, Unknown
  Bacterial polypeptide expressing nucleotide sequence isolated from the Sargasso Sea
aatgagttcaagcgaagttataaaattaataaaagataaagaaattgagtcagtagacctaagatttacagatccaagaggaaaacttcaacacctaacgatggatgctacttgcgtagatgatgggatgttaaatgatggagttttttttgatggttcttccatagcaggctggaaagcaattaatgaatctgacatgattttaaaaccagatttatcgagaaaaattattgatccttttacttcacataacactttaatacttttttgcgatattttagatgctgtcaaaaaaacaccttacgaaagagacccaagaggaatagcaaaaaaagctgaagcttatttaaaatcaactggtatcggagataaagcatactttggaccagaaccagaattttttgtttttgatgat

SEQ ID NO: 310950 - DNA, 831 bp, Unknown
  Bacterial polypeptide expressing nucleotide sequence isolated from the Sargasso Sea
attgggagataaagcttactttgggccagaagcagaattttttgtatttgatgatgttagatttaaaaatgatatgaatgaaactggatttaaaatagatagctcagaaggaccttataattctggtaaaaaatatgaaaatggaaacatgggtcatagacctggtatcaaaggtggttatttccctgtaccgccagtagatagtgctcaagacatgagaggtgagtttttaaaggctttaaaagatatgggaattaaggttgaaaaacatcatcatgaagtagcaccaagccaacatgaactaggtatgtattttggaactttaactgatcaggctgacaacatgcagctttataaatatggtgtacaaatggttgcacactcttttggaaaaacagcaacttttatgcctaaaccagtaaagggagataatggttcaggcatgcacacacaccaatcattgtggaagggtagcacagctttattttctggaaataaatatgctggactttcagatactgctttacattatataggtggaattttaaaacatgcaaaagcaataaatgctttttcaaattcaactactaacagttataaaagattaatacctggttttgaagctcctgtactactttgctactcagcgaggaatagatctgcttcatgcagaatacctataactttaagtaaaaaagaagcaagatgcgaaataagatttcctgatgcagctggtaacccttatttaactttttcggcaatgttaatggcgggtttagatggaattaaaaataaaataaacccaggtaaaccaatagatgaagatttgta

SEQ ID NO: 310951 - DNA, 622 bp, Unknown
  Bacterial polypeptide expressing nucleotide sequence isolated from the Sargasso Sea
gataatggttcaggtatgcacatccaccaatctatttggaaaggtgatactccagtattttcaggtgatgcgtattctggattaagcgaaactgctttacattatattggcggaatcctaaaacacgctaaagcaattaatgcttttgctaactctacaacaaacagttacaaaagattaattccaggttttgaagctccagttcttcttgcgtattcagcaagaaatagatctgcttcttgtagaataccgatcacattaagcaaaaaaggtgcaagatgtgaaattagattcccagatgctgcaggaaacccgtatttaactttcgcagctatgttaatggctggaattgatggaattaaaaataaaattcatccaggtgagtcttttgataaagatttatatgaattaccacctgaagaagttaaagctattcctacagtttgtggttctttaagagaagcgatggaaagtttagataaagacagagagtttttaactcaaggaggtgtctttactgatgatcaaattgatgcttacattgctcttaagtttgaggaaattcacaaatttgaacatgcacctcatcctgtagagtttgagatgtattacagtagctagt

SEQ ID NO: 310952 - DNA, 817 bp, Unknown
  Bacterial polypeptide expressing nucleotide sequence isolated from the Sargasso Sea
aatgagcaaagtaaaagcagaatatatttggattgatggttatgaaccgaccgcaaatctaagatctaaaacaaagattgttgatggtccagttgaagggttagatcaattgccagactgggggtttgatggttcaagcactttacaagcggatggcaatgatagtgattgcgcccttaaaccagtttattttgtccctgatccaataagggggggggatgatatattagttatgtgcgaggttttaaacgctgatggaacaactcataaaagcaataatcgtgcaaattgcgtagaagtttctgaaaagtatgaatccgaaatcccatggtttgggattgagcaggaatatactttttatgacggctctgaaccattgggtttcccatcggagggttaccctgcacctcaaggagaatattattgtggagttggagccaataacatatttggcagagatattgtagaagaacacctgcaactatgccttgatgctggattagaagtctctggaataaatgcagaggtaatgcctggtcaatgggagttccagattggaccattaggatcacccgaggtcgcagatcaattacatcttgcgaggtggttattacatagaatttctgaagactataatgtcacagtaagtttagagccgaaacctgtgaaaggcgattggaatggagctggtgctcatacaaactttagcaccaagaccatgagagaagatggtggttatgataccattgttgaggcttgtgaaaaacttggaaaaaacattgataaacatattaatgtttatggaagcaaaaatgat

SEQ ID NO: 310953 - DNA, 553 bp, Unknown
  Bacterial polypeptide expressing nucleotide sequence isolated from the Sargasso Sea
atgagtgctaaaaatgttttaaaattaatgaaagataaagagattgagtatgtagatttaagatttacagacccaagaggtaagctgcaacatttaacaatggactctacaattgttgatgaagatatgttgattgatggcgtattttttgatggttcttctatagctggttggaaagccattaatgagtcagatatgattttaaaacctgatctaaacagaaaaattgtagatccttttactactcataatacattagttttattttgtgatattttagatgctgttaaaaaaaatccgtacgaaagagatcctagaggaattgcaaaaaaagctgaggcatatttaaaatcaactggtattggtgatagagcttattttggccctgagccagaattttttgtttttgacgatgtaagaattaaaaacgacatgaatgaaactggttttgcaattgacagtacagaaggtccttataattcaggtagaaaatatgaaaatggaaatatgggtcacagacctggaataaaaggtggttactttccagtgccac

SEQ ID NO: 310954 - DNA, 736 bp, Unknown
  Bacterial polypeptide expressing nucleotide sequence isolated from the Sargasso Sea
tatgagttcaagcgatgtattaaaaactttaaaagataaagatattgaatacgttgatctaagattcacagaccctagaggtaagcttcaacatgtaacaatggacgccaaaatggtggatgatgaaatgttgaatgaaggtatattttttgatggatcttctatcgcaggatggaaagctattaatgagtctgacatgattttaaaaccagatacatcaagagcaatcgtagatccgtttacatctcataacacattaaaccttttttgtgatgtattagatgcaattaaaaaagatccttatgagagagatccaaggggaacagctaaaaaagctgaagcttatttaaaagattcaggaattggagataaagcatattttggtcctgaagcagaattttttgtgtttgatgacgtgagatttaaaaatgacatgaatgaaactggatttaaaatagatagtaaggaaggtccttacaattcaggaagagaatatgaaaatggcaacatgggtcatagaccgggaattaaaggtggttacttcccagttccaccagttgatagtgagcaagatatgagaagtgaatacttgaaagcaatgaaagagatgggaataaaagttgaaaaacatcaccatgaagttgctccaagccagcatgaacttggaatgtattttggtacacttgtagatcaagcagacaatttacaactttataaatacgctgttcatatggtt

SEQ ID NO: 310955 - DNA, 554 bp, Unknown
  Bacterial polypeptide expressing nucleotide sequence isolated from the Sargasso Sea
aatgagttcaaaaaatattcttaagttaatgaaagacaagcaggtagaatttgttgacttgaggtttacagatccaagaggaaaacttcaacatttaactatggatgctactgtagttgatgaagatctactcaataatggagttttttttgatggctcttctattgctggatggaaggcaatcaatgaatcggacatgattttaaaaccagacctggaaagaccgattattgatccatttaattcacatacaacattaaacatattctgcgatattcttgatgcggtgaaaaaagacccctatgagagagatccaagaggaacagcaaagaaagctgaagcctatcttaaaaaatctggaattggcgataagtcttattttggcccagaaccagaattttttgtatttgatgacgtaagatttaaaaacgatatgaacgaaacaagctttagtattgatagttcagaaggtccttacaatactggtagaaaatatgaaaatggtaacatgggtcatagacctggcattaaaggaggatattttcctgttcccc

SEQ ID NO: 310956 - DNA, 710 bp, Unknown
  Bacterial polypeptide expressing nucleotide sequence isolated from the Sargasso Sea
atagctcagaaagctgaaaaatttttgaagtcttcaggtttaggagatacggcatattttggaccagaagcagaattttttgtctttaatgacataaaatatgattcaggctcaaattttgcatttcatgaagttgactcaaacgaaggagcttggaataccggcagaagtgaggaccctaatttaggacataagcctagacacaaacaaggatattttcctctgcctccttcagacagtttgcaagatttaagaactgaaatggttttaactatggaagatattggagttaatgtagaagcctctcatcatgaggtagctactggcggacaatgtgaaatagatttagaattttctccactcttagctatggctgatgatcttttgaaatataaatatgttgtcaagaatgttgcaaagcagcatggtatgactgctacttttatgccaaaacctctatttgaagataatggctcaggcatgcatgttcattcaagtatttggaaaaaaaataaaactttaatgtataaaaaaggtaattatgcagatttaagtgattttgcattgcattacattggtggcattttaaagcatgctccatcattattagcattttgtgcaccaactacaaattcttataaacgtctagtgcctggttttgaagctccggtaaacatagcttactcacaagccaatagaaacagcatctg

SEQ ID NO: 310957 - DNA, 718 bp, Unknown
  Bacterial polypeptide expressing nucleotide sequence isolated from the Sargasso Sea
attctttgtttttgatgatgtaagaataaaaaatgatatgaatgaatgtggatttaagattgacagtaaagaaggtccatataattcgggtaaagagtatgataatggaaatatgggtcacagacctccaatcaaaggtggttattttccagttcccccagttgatagtgaacaagatatgcgtggagagtatttgaaaaatttaaaagaagtaggaattaaagttgaaaaacatcatcatgaagttgcaccaagtcaacatgagcttggaatgtactttggtacattagtaaatcaggctgataacgttcaactttataaatatgttgtgcaaatggttactcactcatttggaaaaactgcaacttttatgccaaaacctgtcgctggtgataatggatctgggatgcatattcaccaatcaatatggaaaggagatactccagtattctctggagaagcttatgctggattatcagaaactgcattacattacattggcggaattttaaaacatgcaaaagcaataaatgcattcgcgaactcaacaacaaatagttataaaagattaataccaggatttgaagcaccggtgttacttgcttactctgctagaaatagatcggcatcttgtagaattcctataactttaagcaaaaaaggcgcaagatgtgaaataagatttcctgatgctgctggaaatccatacttaacattt

SEQ ID NO: 310958 - DNA, 727 bp, Unknown
  Bacterial polypeptide expressing nucleotide sequence isolated from the Sargasso Sea
catgagcaagacctctcaagatgttcttcgtcaaattaaggatgagggcattgagctaatagatttaaaattcactgacttacatggtaagtggcagcatttaacagtagcttcagatctaattgaagaaagctcttttacagaagggcttgcttttgatggctcttctattcgcggttggaaagccataaacgaatctgatatggcaatggttccagatccatcaacgagctggatagaccctttttaccatcacaaaactcttagtttaatttgctcaattcaggagccaaggagtggagagccatatgccagatgtccaagagctttggcgcaaaaggctttggattacttaggaagcacaagtgttgcagatgctgcattttttggtcctgaaccagaattctttatttttgatgatgtccgatacaactcaggagaaggtagtagcttttatagcgttgacacaatagaagctccctggaattcagggagagtagaagaaggaggaaaccttgggtacaaaattcaactaaaagagggatatttcccagtttcacctaatgacacagcccaagatatgaggtcagagatgcttctactgatgggtgagttgggtatacccattgagaagcatcaccatgaagtagcaggagctggtcaacatgaattaggaatgaaatttgctcccctaatcaacgcagctgacaatgtaatgatttacaaa

SEQ ID NO: 310959 - DNA, 862 bp, Unknown
  Bacterial polypeptide expressing nucleotide sequence isolated from the Sargasso Sea
ttaaaaaaaacaggtataggtgataaagcttattttggacctgaagcagaattctttgtttttgatgatgttaaatttaaaaatgacatgaatgaaacaggatttaaaattgatagttctgaaggaccttataatacgggaaaagactacgaaaatggaaatatgggtcatagaccaggaataaaaggtggttattttcccgttcccccagttgatagtgctcaagatatgcgtggtgaatttttaaaagctttaagagatatgggaattaaaacagagaaacaccatcatgaggtagcaccaagtcaacatgagctaggaatgtattttgatactttaacaactcaagctgacaatatgcagctttacaaatatggagttcaaatggttgctcattcttttggaaaaacagcaacatttatgccaaaaccagttaagggtgataacggctctggtatgcatacccaccaatctttatggaaaggtagtacagcattattttctggaaataagtacgcaggtttatcagacatggcactacactatattgggggaattttaaaacatgcaaaagcaatcaatgctttttcaaatagtaccacaaatagttacaaaagattgataccaggttttgaagctcctgtgcttttagtctactcagctagaaatagatcagcatcatgtagaataccaataactctaagcaaaaaagcagcaagatgtgaaatcagatttccagatgctgctggtaatccgtatttaacttttgcagcaatgttaatggcgggaatagatggaattaaaaataaaattaatcctggaaaacctgttgatcaagatttatatgctatgcctgaagaca

SEQ ID NO: 310960 - DNA, 488 bp, Unknown
  Bacterial polypeptide expressing nucleotide sequence isolated from the Sargasso Sea
tatgagcacaagtagtgtaagaaaagtaatgaaagataaagagatcgagtatgttgatcttcgttttaccgatcccagagggaaactccaacacgtaactatggatgtgactgtcgttgacgacgacatgttagaaaatggtgttttctttgatggctcttcaattgcagggtggaaggcgattaatgagtctgatatgattttaaaaccagatttatcaagaacagttgttgatccatttacatcacacaatacccttaatattttttgtgacattcttgatgctgttaagaaagatccttacgaaagagatccaagaggaacagcaaaaaaagctgaagcatatttaaagaaaactggggttggagataaagcttattttggccctgagccggaattttttgtttttgatgatgttagatattctaacgatatgaataaaactggttttgaaattgatagttctgaaggcccatacaatactggaa

SEQ ID NO: 310961 - DNA, 938 bp, Unknown
  Bacterial polypeptide expressing nucleotide sequence isolated from the Sargasso Sea
tatgacaaagatccaagaatatgtcgcaaaaaaagcagaggagtttgtaaaaagctctggtattggtgatagtatattttttggtgcagaagcagaattttttctttttaatgacgtcagaatatcaaccgatccaagtaactcatttttctcagtagattcaggagaagctatttggaataaaggctccgatgaaagacctaacttaggttatcatgtaagaaataagggtggttacttcccctgtcctcctcatgatactatgcaagatgtaaggtccgaaatggttaatcatatggtatctattggaatgaatgtggaagctcaacatcatgaagttgctaccgctggacagcaagaaattgatttaaggtttgatacattactctcccatgctgatgatcttcaaaaatataaatatgttgtaagaaacactgcaaaaagtaatggtctgagtgcaacatttatgcctaaaccgctatcaaacgataatggctcaggtatgcactgtcaccaaagtatttggtcaaatggtaagccaatattttatgcagatagcgggtatgctaacttaagtgatgaagctaagttttatattggtggattactaaaacatgcaccctcattattagcatttacaaatccaacaataaactcatttaaaagactagtcccaggttatgaggctccagtaaaacttgcttactcaaatagaaacagaagtgcaatttgtagaattcccgcatactctccctcacctaaagctaaaagagtagaatttagatgtccagacgcaacagctaacccatacttagctttttcagctatggtaatggcagggctagatggtatcaaaaatcgaatagacccaggtgagccaatggataaaaatctttatgacctacctgcagaagaacaagctaaagtaaaagaagttc

SEQ ID NO: 310962 - DNA, 921 bp, Unknown
  Bacterial polypeptide expressing nucleotide sequence isolated from the Sargasso Sea
ttttataaacataaaactttaagtatgatttgctctattaaagagcctagaagtggtgagccatatgatagatgtccaagatcattagctcaaaaagctttaaagtacctggaatctactggtatagcagatactgcattttttggaccagaaccagaatttttcttgtttgatgatgttagatatgactcaaaagagggttcttgtttttatagtgtggataccatagaagccccatggaatactgggagaatagaagaaggaggaaatttaggatacaaaatccaatataaggaaggttatttccccgtttcgccaaatgacacagctcaagatataaggtctgaaatgcttctactcatgggtgaattgggtattcctacagaaaaacatcatcatgaagttgctggagctggtcaacacgaacttggaatgaaattcgattcattaataaaatcagctgataacgtaatgacttataaatacgttgttagaaatgttgcgaaaaaatatggaaaaactgcaacatttatgccaaaaccagtattcaatgacaatggaactggaatgcacgtacaccaaagtttatggaagagtggacaaccactattttttggtgaaggtgcatatgcaaatttatcacaaacagctagatggtacataggaggcatacttaaacatgcgccttcattccttgcattcactaatccaacaactaacagttataaaagattagttccaggatttgaagctcctgtaaatttagtttattctgagggtaataggtctgctgctgtcagaattcctttaactgggccaagtccaaaagctaaaagattagaatttagatcaggtgacgcgctcgctaacccatatttagctttctcagtaatgatgcttgccgggattgatggaattaaa

SEQ ID NO: 310963 - DNA, 667 bp, Unknown
  Bacterial polypeptide expressing nucleotide sequence isolated from the Sargasso Sea
ctgaaaggcatccaggcctcggacatggccatggtgccggacgccaacacggcctgggtggaccccttctaccggcacaaaaccctgagcatgatctgctcgattcaggagccacgcaccggccagccctacgagcgctgcccccgtgccctggcccagcgggcactgaatcatctggccagcaccggcctggccgacatggccttctttggtcctgagccggagttcttcctcttcgacgacgtccgctacaactcggctgaagggggttccttctacagcgtcgacacgatcgaagcgggctggaacaccggacggatcgaagaaggcggcaacctcgcctacaagatccaggagaaggagggctacttccctgtcgctcccaacgacaccgcccaggacatccgctccgagatgctcctgctgatgggtcagctgggcattcccaccgagaagcaccaccacgaggtggcaggcgctggtcagcacgaactcggcatgaaatttgctgagctgatccaggccgccgacaacgtgatgacgtacaagtacgtcgtgcgcaacgtggccaagaagtacggcaagacggccaccttcatgcccaagccggtcttcaacgacaacggctccggcatgcacgtgcaccagagcctctggaaaggcggtc

SEQ ID NO: 310964 - DNA, 880 bp, Unknown
  Bacterial polypeptide expressing nucleotide sequence isolated from the Sargasso Sea
aattcaataaataaggtaggctatgaggtagatgcagttgatgcttcttggaattcagattcggaatatgacatggggaatatgggccatagaccgggcataaagggaggatactttccagtaaaccccacagatgcaggacaagatattagatcagaaatgctttccacaatgaaaagaattggaatgaaagtagacaaacaccatcatgaggtggcgtcttgtcagcatgaattaggaatgatttttgacacactaaccaagcaagctgacgaactgcaaaagtataaatatatagtacaaaatgtagcccatgcgtatggaaaatctgctacttttatgccgaaacctattgctggagataacggaaccggaatgcatgtaaatatgtcaatatcgaagttgggcaaaccaatattttcgggagacaagtatgcagacctttccgatgaggcgttattttttattggtggaatacttaagcatgcacaatctttgaatgctataacaaacccttctactaattcatacaaaagactaattccagggtttgaagctccagttctgagggcctactctgcgagaaatagatcgggttgcgtaagaattccttgggctgaatctcctaaggcaaaaagggtagaggctcgatttcctgacccatcctccaatccatacctatgtttttcggcgcttcttatggccggactggacggaattaagagcaaaattcatcctggagagagttctgataaggatttatatgaccttcctccagaagaattatcttccattcctacagtctgtggcagccttagagaggccatcaaagctctcgaggaggataatcagtacctattagctggagatgttttactaa

SEQ ID NO: 310965 - DNA, 705 bp, Unknown
  Bacterial polypeptide expressing nucleotide sequence isolated from the Sargasso Sea
ctacgagagagacccaagaggtattgctaaaaaagctgaagcatatttaaaaacatcaggtgttggtgataaagcttactttggacctgaaccagaattttttgtattcgatgatgttaaatataaaaatgacatgaatgaaactagctttaaaattgatagttcagaaggtccttataatactggaaaagattatccaaatggaaatatgggtcatagaccaggaattaaaggtggctactttccagttcctcctgtagacagtgctcaagatattagaagtgaataccttaaaggattaagagatgtaggaattactgttgaaaaacatcatcacgaagttgcaccaagtcaacatgaacttgggatgttattcggtactttagttaatcaagctgataacgtacaactatataaatacgttgtgcatatggtttctcattcttttggaaaatcggcaacttttatgcctaaaccagtaaaaggagataatggatcaggtatgcatgtccatcagtcaatttggaaaggtgatacaccaactttttcaggagataaatattcaggtttatcagaaaccgcactacattatattggtggaattttaaaacacgctaaggcaataaatgcattcgctaatgctacaacaaatagttataaaagattaattcctggttttgaagctccagttctattggcttactc

SEQ ID NO: 310966 - DNA, 931 bp, Unknown
  Bacterial polypeptide expressing nucleotide sequence isolated from the Sargasso Sea
gagccagagttttttgtatttgatgatgtaagatataaaaatgatatgaacgaaacaggatttacaattgatagtaccgaaggtccatataacacaggcaaaaagtacgaaaatggaaatatgggtcatagaccaggaattaagggtggttattttcctgttcctccagttgatagtgctcaagatatgagaagtgaatatctaaaggctatgaaagatatgggtattaaagttgaaaaacatcatcacgaagttgctccaagtcaacatgagttgggtatgtattttggtactttagtagatcaagccgataacttacaactttataaatatgcagttcacatggtaacccattcttttggaaaaacagcaacattcatgccaaaaccagttaaaggtgacaatggatctggtatgcacgtacaccagtcaatttggaaaggtaacacagctttgttttctggaaataagtatgcaggattgtcagacactgcattgcattatatcggcggtattttaaaacacgcaagagctataaatgctttttcaaatgcaactacaaacagttacaaaagactgatacctggttttgaagctccagtgttattagcgtattcagcaagaaatagatctgcgtcatgcagaataccgatcactttaagtaaaaaagctgcaagatgtgaaataagatttcccgatgcctcaggaaatccatatctaacattttcagcaatgttaatggctggtttagatgggattaaaaataaaattgatcctggaaaatcatttgataaagatctttatgcattaagtgaatcagaggtgaaaaaaatacctacagtttgtgggtctttaagagaagctatggaaagtttagacaaagatagggattttctaactcaaggagatgttttcactgatgatcaaatag

SEQ ID NO: 310967 - DNA, 697 bp, Unknown
  Bacterial polypeptide expressing nucleotide sequence isolated from the Sargasso Sea
acctctatttgggattgaacaggaatacaccttctttatggatggaaggcctttaggttggcccgtcgaaggttttccagctccacaaggcccgtattattgcggagttggttcaattgaaattgcgggtcgagacattgttgaagcgcacactaaagcttgcatggatgctggattagctatctctggtacaaatgccgaagtcatgcttggacaatgggaatttcagattggaccagttgatacggtagaagttgctgatcaaatttggatggctcgctatcttctttatcgtgttgccgaagattttggagttgatgcttcggtagctgcaaaacccatcaagggtgattggaatggagctggagcacatacaaatttctctacaaaagctatgcgtaaaagttacgaagcaattatcactgcttgtgaatcattgggagctgaaggaaaaccagctgaacatattgctggatatggtcttggttctgaagagcggttaaccggtgaacatgaaactcaaaggttcgaccagttcagctatggagtttctgaccgcggtgcttcgattcgtatcccatggcaagtacaccttgatcaaaaaggatatatagaagatcgacgaccaaatgcaaatatggatccttatgtggtaacaagattgattacaaatacttgttgttcggccttggcttaa

SEQ ID NO: 310968 - DNA, 862 bp, Unknown
  Bacterial polypeptide expressing nucleotide sequence isolated from the Sargasso Sea
tacatctcataatacattgaacattttttgtgatattttggatgcaataaaaaaagatccttacgaaagagatcccagaggaacagcaaagaaagctgaggcatatttaaaaaaatccggaattggtgataaagcattttttggtcctgaagctgagttttttgtatttgatgatgtaagatttaaaaatgacatgaatgaaacaggcttcaaaattgatagtaccgagggcccttacaatactggaaaaaaatatgaaaatggaaatatgggacatagacctggtatcaaaggtggttactttccagttcctcctgttgatagtgcacaagatatgaggagtgagtatttgaaagcaatgaaagacatgggtattaaagttgagaaacatcaccatgaagttgccccaagtcagcatgaacttggaatgtattttggaactttagttgatcaagcagataacttgcaactatacaagtatgcggttcatatggtttcacattcatttggaaaaactgcaacttttatgcctaaaccagtaaaaggtgataatggatcaggtatgcacgtgcaccaatcaatttggaaaggaaatacagcattattttcaggagataaatatgctggcttatctgatttagctttacactatattggtggaattttaaaacatgcaaaagctataaacgctttttcaaacgcaacaaccaatagttacaaaagattgatcccagggtttgaagcaccagtgttattagcttactcagcaagaaacaggtcagcttcatgcagaatccctattactctaagtaaaaaggctgcgagatgtgaaatcagatttggtgatgcagctggaaaccca

SEQ ID NO: 310969 - DNA, 772 bp, Unknown
  Bacterial polypeptide expressing nucleotide sequence isolated from the Sargasso Sea
atgagtgcaagtgatgttttaaagatgattaaagacaaagaagtggaatttgtggatttgagatttacagatcctagagggaaacttcaacacctgactatggatgctacagtagttgatgaagatatgtgcaatgaaggagttttttttgatggttcatctatagcaggctggaaagcaataaatgagtctgacatgatattaaaacctgatactggcagaatgttcatggatccgtttacatctcataatacacttgtactgttctgcgatattttagacgctataaaaaaaacaccttatgaaagagatcctagaggaatagcaaaaaaagctgaagaatatttaaaatcttctggaattggtgacaaggctttttttggtcctgagccagaattttttgtttttgatgacgttaaaataaagaatgatatgaatgaaactagctttgctattgatagcacagaaggcccttataactcagacaaaaaatacgaaagcggtaatatgggacacagaccaggagttaaaggtggatactttcctgttccaccggttgatagcgctcaggatatgagaggagaatatttaaaaggcctaaaggatgttggtataaaagtcgaaaaacatcaccatgaagtagccccgagccaacatgagttaggaatgtattttggtacgcttgttaatcaagcagataatgtacaactttataagtatgtagtacaaatggtttcacactcattggaaaaactgcaacatttagccaaag

SEQ ID NO: 310970 - DNA, 733 bp, Unknown
  Bacterial polypeptide expressing nucleotide sequence isolated from the Sargasso Sea
ggatccttttacgtctcataatactgtggttttgttttgtgacattctagatgcaatcaaaaaagatccttatgaaagagatccaagaggtgttgctaaaaaagctgaagaatatttaaaagcttcaggtataggtgataaagctttttttggacctgagccagaattttttgtctttgatgatgtaagaatcaaaaatgatatgaatgagtgtggatttaaattagatagtaaagaaggtccttacaactcaggaaaagaatatgaaaatggaaacatgggacacagacctcaaatcaaagggggatatttcccagtaccacctgttgatagtgaacaagacatgcgtggtgaatatctaaaaaatttaaaagaacttggtattaaagttgagaaacatcaccatgaagtagctcctagtcagcacgaacttggaatgtattttggaactttagttgatcaagcagataacgttcagttatacaaatatgttgtgcaaatggttacacattcatttggaaaaactgcaacatttatgccaaaaccagttgctggtgataatggttcaggtatgcacatccaccaatctatttggaaaggtgatacgccagtattttcaggagatgcttatgctggtttgagtgaaactgctttacattatattggtggaattttaaaacatgctaaagcaattaatgcttttgctaactctacaacaaacagttacaaaaga

SEQ ID NO: 310971 - DNA, 816 bp, Unknown
  Bacterial polypeptide expressing nucleotide sequence isolated from the Sargasso Sea
aaaagcttcaggagtcggagataaagcattctttggtcctgagccagaattttttgtttttgacgatgttagaattaaaaatgatatgaatgaatgtggttttaaaattgatagcaaagaaggtccttataattctggaaaagaatatgaaaatggtaatatgggtcatagaccaccagttaaaggcggttattttccagttcctccagttgatagtgagcaagatatgagaggagaatatttaaaaaatttaaaagaagttggaataaaagttgaaaaacatcatcacgaagttgcaccaagtcaacatgagcttggaatgtactttggcactttagttaaccaggctgataatgttcaattatataaatatattgtgcaaatggtaacacattcatttggtaagacggcaactttcatgcccaaaccagttgctggtgataatggatcaggtatgcatattcatcaatcaatttggaaaggtgatacgccagtattttcaggtgacgcttacgcgggactatcagaaactgcattacattatattggtggaattttaaaacatgccaaagcaattaatgcttttgcaaactcaaccactaatagttacaaaagattagttcctggttttgaagctcctgtgttattagcttactctgcaagaaatagatctgcatcttgtcgtataccaattactttaaataaaaaaggagcaagatgtgaaattagatttccagatgcctctggtaatccttatttaacatttgcagcaatgctaatggctggtcttgatggtattaaaaataaaattcaccc

SEQ ID NO: 310972 - DNA, 911 bp, Unknown
  Bacterial polypeptide expressing nucleotide sequence isolated from the Sargasso Sea
aatgcaagatacagggagtgatatccttgatattaaatttatagatttaccaggtacatggcaacacgtttctgttcccacaagtgaagttacagagtctttgtttcaagacggaacaggatttgacggatcatctatacgaggttttcaatcaattgatgaatcggatatgttgctggttccggatgtatctaccgttaagaaagatccttttaacgatggtcaattaacagttattgcagatataagggatccattgactggtgaaagttattctagggaccctagaaatgttgcaaaaaaagctgaagcatatttaaaaaccacaggaattggtgacaattcattttggggtccggaagtagaattttttatatttgattcagtgagatttagctatggagcaaatcacgggtatcattttgttgattcagatgaaggtatatggaattctggtgatttgacaatgctagacggtacaacacttaataaagggatgaggcctagacataaagaaggatatttccctgtaccccctgttgatactttacaagatattcgctcagaaatggttaggactttaataaatggatttaatattgctgttgaaaaacatcatcatgaagttgctacaggaggacaaggcgaaatagatatagtttttgatagtcttgtacaaacagcagataatgtaatgaactataaatatgttgtgaaaaatgtagccgctaaatatgataaagtcgttacatttatgccaaaacctctctttaatgataatgggacaggaatgcatacacatcaatctatttggatagacggagttccgttatttgctggtgatgaatatgctggtctatcaaagcttgctttaaactatattggtgggcttatcaaacatggaaaagcat

SEQ ID NO: 310973 - DNA, 886 bp, Unknown
  Bacterial polypeptide expressing nucleotide sequence isolated from the Sargasso Sea
ttttgatggttcctctattgctggttggaaagctattaatgagtctgacatgatccttaaaccagataattctagagcgatcgtagatccatttacatcacataacacattaaaccttttttgcgatgttttagatgcaattaaaaaagatccatatgaaagagatcctagaggaacagctaaaaaggctgaagcctacttaaaaagttcaggaattggagataaagcattttttggtcctgaagctgaattttttgtatttgacgatgtaagattcaaaaatgacatgaatgaaactggatttaaaatagatagtaaagaaggcccttacaattcaggaagagaatatgaaaatggtaacatgggtcacagaccaggaattaaaggtggttattttccagttcctcctgttgatagtgaacaagatatgagaagtgaatatcttaaagccatgaaagaaatggggatcaaagttgaaaaacatcaccacgaagtagcaccaagtcaacacgaacttgggatgtattttggaactcttgtagatcaagcagataatttacaactttataaatatgctgttcatatggtttctaactcatttggtaaaacagccacatttatgcctaaacctgttaaaggtgataatggttcaggcatgcacgttcaccaatcgatttggaaaggtgatacagctttattttctggcgacaaatatgctggactatccgatacggccttacattacataggtggaattttaaaacatgcaaaagcaataaatgctttttcaaatgctactacgaatagttataaaagactaattccaggatttgaagctccagttttattagcttattcagctagaaacagatcagcatcttgtaga

SEQ ID NO: 310974 - DNA, 824 bp, Unknown
  Bacterial polypeptide expressing nucleotide sequence isolated from the Sargasso Sea
aatgagcgcagcaaacgtattaaaatttatcaaagaaaaagaagcagaatttgtggatctaagattcaccgatccaaggggaaaacttcaacacttaacaatggatgcttcaatagttgatgaaggtatgttgaatgaaggtgtcttttttgacggttcgtctattgctggttggaaagcaattaatgagtctgacatgattttaaaacctgatactgcaagaatgttcatggatccttttacgtctcataatactgtggttttgttttgtgacattctagatgcaattaaaaaagatccttatgaaagagatccaagaggtgttgctaaaaaagctgaagaatatttaaaagcgtcaggtattggtgataaagctttttttggacctgagccagaattttttgtttttgacgatgtaaaaatcaaaaatgatatgaatgagtgcggatttaaattagatagtaaagaaggtccttacaattcaggtaaagaatatgaaaatggaaatatgggtcatagacctcaaattaaaggaggatatttcccagtaccaccagttgatagtgaacaagacatgcgtggtgagtatcttaaaaatttgaaagaagttggtattaaagttgaaaaacatcaccatgaagttgctcctagtcagcacgagcttggaatgtattttggaactttagtaaaccaagctgataatgtgcaattatataaatatattgttcaaatggttacacattcatttggaaaaactgcaacttttatgccaaagccagttgcaggtgacaatggttcaggtatgcacatccatcaatccattt

SEQ ID NO: 310975 - DNA, 501 bp, Unknown
  Bacterial polypeptide expressing nucleotide sequence isolated from the Sargasso Sea
aaaaagcattaattgctttggcagcaccaactacaaactcatacaaacgactaactcctggattgaaagcaccaacaattttggcgctttcagcaaggaacagatctgcagcatgcaggattcctatgtattttcaaaatcctaaagcgaagagagtagaattccgttcggcagatccaacatgtaatccatatttaacatttgctgcaatgttaatggcaggattagatggtattgaaaatggctatgaaccaggagacccattagaatcagaccttttctcattaagtgctgaagatatggcaaaattacctcaagttccaagtagtttggaagaagcgctgcaggcattagaagatgaccatgaatttttattaaaaggtggtgtctttaccgaggaccttattagaggatggattgattttaaacgtgaaaatgacgtagatcctgttaggcttcgccctcatccatatgaattttatttaagttttgatgcttaat

SEQ ID NO: 310976 - DNA, 751 bp, Unknown
  Bacterial polypeptide expressing nucleotide sequence isolated from the Sargasso Sea
ccaataagaggaggagatgatatattggttatgtgcgaggttttgaatgccgacgggacaactcacaagagcaataatcgtgcaaattgcgtagaggtttctgaaaagtacaaatctgagatcccatggtttgggattgaacaagaatatactttttatgatggatctgaaccattgggatttccatcagagggttaccccgcacctcaaggagaatattattgtggagttggagcgaataacatatttggccgagatattgtagaagaacaccttcaactgtgccttgatgctggattagaaatttctggaataaatgcagaagtcatgcctggtcaatgggagttccagattggaccgttaggatcacccgaagtcgcagaccaattacatattgcaagatggttattacatagagtttctgaagattataatgtcacagtaagcttagagccaaaacctgttaaaggtgattggaatggtgctggtgctcatacaaactttagtacaaagactatgagagaagatggtggttacgataccattgttgaggcttgtgaaaaacttggaaaaaacatagataagcatattagtgtttatggaagcaaaaatgatgaaagactaactggccttcatgaaactgctaaaataactgaatttaaatatggagttagcgatcgtggcgcatcaataagaataccaatggctactgcaaatgataaaaagggatatctgaagacaggagacctgc

SEQ ID NO: 310977 - DNA, 880 bp, Unknown
  Bacterial polypeptide expressing nucleotide sequence isolated from the Sargasso Sea
cctaatcgtttactgcgatgtttatgaccctcttaatgggaagccttattctagagacccccgctcgactgcaaaacgagctgaagctttcttaaagagtaccaaaattggtgataaagctttttttggacctgagccagaattttttgtatttgatgacgttcgttcggatgtttccatgaatcacacattctatcaaattgatcatgaagaaggaccctataactctggttcagatttttctgatggcaatattggacatagaccgggggttaaaggtggatattttcctgttccacccgttgactctggacatgacctcaggtcggaaatggttacaactttaatggagatgggtgtttcaatggaaaaacaccatcacgaggttgcaccctctcaacatgaacttggtattaaatttgattcattggtaagatgtgcagataatgtccaggcatataaatatgttgtagctatggttgctcatatttatggcaaaaccgcaacattcatgcctaagccagtcatagatgacaatggaactggcatgcacacacatcagtcaatttggaaaggtagcaaacctctatttgctggatcaggttatgctgacctgtcggatactgccctccattatattggtggaataataaaacacgcaaaaactattaatgccttttccaatccatcgacaaatagttataaaagattaatacccgggttcgaggctccagtcttattggcctattctgcaagaaaccggtccgcctcttgtcgtataccattttccccaagtaaaaatggaaagcgggttgaagtcaggttcccagatgcgacggctaatgcctacctagcattttcatctatgctaatggctggt

SEQ ID NO: 310978 - DNA, 790 bp, Unknown
  Bacterial polypeptide expressing nucleotide sequence isolated from the Sargasso Sea
atgagtgcagcaaacgtattaaaatttatcaaagaaaaagaagcagaatttgtggatctaagattcactgatccaagaggaaaacttcaacacttaacaatggatgcttcaatagttgatgaaggtatgttgaatgaaggtgtcttttttgacggttcgtctattgctggttggaaagcaattaatgagtctgacatgattttaaaacctgatactgcaagaatgttcatggatccttttacgtctcataataccgtggttttgttttgtgacattctagatgcaattaaaaaagatccttatgaaagagatccaagaggtgttgctaaaaaagctgaagaatatttaaaagcttcaggtataggtgataaagctttttttggacctgagccagaattttttgtttttgacgatgtaagaatcaaaaatgatatgaatgagtgtggatttaaattagagagtaaagaaggtccttacaattcaggtaaagaatatgaaaatggaaatatgggtcatagacctcaaattaaaggaggatatttcccagtaccaccagttgatagtgaacaagacatgcgtggtgagtatcttaaaaatttgaaagaagttggtattaaagttgaaaaacatcaccatgaagttgctcctagtcagcacgagcttggaatgtattttggaactttagtaaaccaagctgataacgtacaattatataaatatgttgttcaaatggttacacattcatttggaaaaactgcaacttttatgccaaagcccagttgctggtgac

SEQ ID NO: 310979 - DNA, 550 bp, Unknown
  Bacterial polypeptide expressing nucleotide sequence isolated from the Sargasso Sea
tatgctggactttctaaactgcacttcattatattgggtggaattctaaaacacgctaaagcaattaatgcttttgcaaattcaacaacaaatagttataaaagattaattccaggttttgaagcacctgttcttctagcttattctgctagaaacagatctgcatcatgtcgtataccaattacattaagtaaaaaaggtgcaagatgtgaaattagatttcctgatgcagctggaaatccttatctaacttttgcagcaatgttaatggcaggacttgatggaataaaaaagaaaattaatccaggaaaatcttttgacaaagatttgtatgaattgccagcaaaagaagttgaacgtattcctacagtatgtggatctttaagagaggcaatggaatctttagataaagatagaagcttcttaactcaaggtggtgtatttacagatgatcaaattgatgcttacattgctcttaagtttgaagaaattcacaagtttgaacatgctcctcacccagttgagtttgacatgtattatagtagttaaa

SEQ ID NO: 310980 - DNA, 526 bp, Unknown
  Bacterial polypeptide expressing nucleotide sequence isolated from the Sargasso Sea
ttgcattatattcggtggtatcttaaaacacgcaaaagctatcaatgcattttctaatgcaacaacaaacagctataaaagactaattccaggatttgaagcacctgttcttcttgcatactcagcaagaaacagatctgcatcttgcagaattccaattacactaagtaaaaaagcggcgagatgtgagataagatttggtgatgctgcaggtaacccatatttaacttttgcagctatgttaatggctgggcttgatggaattaaaaataaaattgatccgggtaaatcttttgataaagatttatacgctctatcagaagatgaagttaaaaaaattccaactgtttgtggatctttacgtgaggcaatggaaagtttggataaagatagagatttcttaaaacaaggaaacgtattcactgatgatcaaatcgatgcttatattgcattaaaatttgaagagatacataacttcgaacacacaccacaccctattgagttcgatatgtattacagttgttaa

SEQ ID NO: 310981 - DNA, 958 bp, Unknown
  Bacterial polypeptide expressing nucleotide sequence isolated from the Sargasso Sea
aatgatgaaagacaagcaaattgagtttgtcgatttaagatttacagacccaagaggtaaattacagcacttaactatggatgcatcggtagtcgatggtgacatgttaaccgatggtgtattttttgatggatcatctattgctggatggaaagcaataaatgaatctgacatgatattaaaaccagatttaaacagacaaattgttgatccattcacatctcataatactcttgttttattttgcgatattttagatgcaattaaaagaaatccttatgaaagagatccaagagggatagcgaagaaagctgaagcatatttaaagaagactggtataggtgacaaagcttactttggtcctgaaccagaattttttgtttttgatgatgtaaaaataaaaaatgatatgaatgaaacaagtttttcgatagatagtacagaaggaccatataattctggaaaaagttatgaaaatggaaatatgggtcatagacctggagttaaaggtggatattttccagtccctccagtagatagtgctcaagatataaggggtgaataccttaaaggtttaagagacgtgggtatcacagttgaaaaacatcaccatgaagttgctccgagtcagcacgaacttggaatgctttttggcacactagtcgatcaagctgataatgttcaattatacaaatatgtagttcaaatggtttcacattcatttggtaaaactgcaacgttcatgcctaaacctgtaaaaggtgataatggatcaggaatgcacgttcaccaatcagtttggaagggaaaaactccagttttttccggaaataaatattcaggtttgtcacaaactgcactttattatattggtggtatacttaaacatgctaaggcgattaacgcgtttttcaatgctacaacaaatagttacaaaagattaatttccagtttttga

SEQ ID NO: 310982 - DNA, 855 bp, Unknown
  Bacterial polypeptide expressing nucleotide sequence isolated from the Sargasso Sea
tgcaaaaaagctgaggcatatttaaaaaaaacaggaataggtgataaatcatatttcggtcctgaaccagaattctttgtttttgatgacgtaagatttaaaaatgatatgaatgaaacaagtttcagtattgatagctctgagggtccttacaatactgggaaaaaatatgagaatggtaatttaggtcatagacctggaataaaaggtggttactttccagttccaccagtggatagtgctcaggatatgagaggtgaatatttaaaagcattaaaggatatgggagttaaagtggaaaagcatcaccacgaagtagcaccaagtcaacatgaattaggaatgtattttggtactttgacaaatcaagctgataatgtgcagctttataaatacgccgttcaaatggtaactcattcatttgggaaaactgcaacctttatgccaaagccagtaaaaggagataatggatctggaatgcattgtcaccagtcaatttggaagggtaatacacctttatttatgggtaaggaatatgcgggtttatcaaaagatgcgctttactacataggtggtatattgaaacacgctagagcaataaacgcttttgctaatgcaacaaccaatagttataaaagactgataccaggttttgaagctccggtaattttagcttactcagcaagaaaccggtctgcatcatgtagaatccccgttattatgaaccctaaggccgcaagaatggaaattagatttccagatgcagcaggtaacccttatttaacttttgcttcaatgttaatggcaggtattgacggcataaaaaataaaattgatccaggtaaaccttttgat

SEQ ID NO: 310983 - DNA, 538 bp, Unknown
  Bacterial polypeptide expressing nucleotide sequence isolated from the Sargasso Sea
atgagcgcagctaaaattttaaaattaatgaaagataaagaggtagagtatgtagatcttcgctttaccgacccacgcggaaaacttcaacatttaactatggatggaaaaatggttgatgaagaaatgttaaatgatggagttttctttgatggatcgtcaatagctggttggaaagctatcaatgaatctgacatgatattaaaacctgatcttaataggcaagttatagatccttttacttcacataatacactgattttgttttgtgacattttagatgctgtaaaaaaagatccgtatgaaagagatccaagaagcatagctaagaaggctgaagcttatttaaaaaaaacaggtattggtgataaagcttattttggacctgaagcagaattttttgtatttgacgatgtaaggtacacaaatgatatgcacaatactggatttcaaattgatagttcggaaggtccttataacactggaaaaaaatatgaaaatggaaacatgggtcatagaccaggtataaagggtggtt

SEQ ID NO: 310984 - DNA, 976 bp, Unknown
  Bacterial polypeptide expressing nucleotide sequence isolated from the Sargasso Sea
agatcctacactcgttcttatttgtgatattcaagatccaatcacaggtcaaaagtatgacaaagatccaagatatgttgcaaaaaaagcagaggagtttgtaaaaagttctggtatcggtgacagcatattttttggtgcagaagcagaattttttctttttaatgacgtcagaatatcaaccgatccaagtaactcatttttctcagtagactcaggagaagctatttggaataaaggctccgatgaaagacctaacttaggttatcatgtaagaaataagggtggttacttcccctgtcctcctcatgacactatgcaagatgtaaggtccgaaatggttaatcatatggtatcaattggaatgaatgtggaagctcaacatcatgaagttgctaccgctggacagcaagagattgatttaaggtttgatacactgctttcccatgctgatagccttcaaaaatataaatatgttgtaagaaacactgcaaaaagcaatggtctgagtgcaacttttatgcctaaaccgctatcaaacgacaatggctcaggtatgcactgtcaccaaagtatttggtcaaatggtaagccaatattttatgcagatagcgggtatgctaacttaagtgatgaagctaagttttatattggcggattactaaaacatgcaccctcattattagcatttacaaatccaacaataaattcatttaaaagactagttccaggttatgaggcaccagtaaaattggcatactcaaatagaaacagaagtgctatttgtagaattcctgcttactctccttcgcctaaagctaagagagtagaatttagatgtcctgatgcaacagctaacccgtacttagctttttcagctatggtgatggcaggtctagatggtatcaaaaatcgaatagacccaggtgaaccaatggataaaatctttatgatcttcccgcagaagaacagctaa

SEQ ID NO: 310985 - DNA, 545 bp, Unknown
  Bacterial polypeptide expressing nucleotide sequence isolated from the Sargasso Sea
gaaagctctaagagatgtaggtattaaagtagaaaaacatcatcatgaagtagctccaagtcaacacgaattaggaatgtattttggaactcttgtagatcaagctgataatgttcaactttacaaatatatagttcacatggtttctcattcatttggcaagacagcaacattcatgccaaaacctgttaaaggtgataacggatcaggaatgcatactcaccaatctatatggaaaggtgatacaccagttttttcaggagataaatatgctggactatcagataccgctttacattacataggtggaattttaaaacatgcaaaagctatcaatgcgttttctaatgctacaacaaacagttataaaatattaattccaggttttgaagcaccagtgttattagcatactcagcgagaaatagatcagcttcttgcagaattcctattacattaaataaaaaaggtgcaagatgtgaaattagatttcctgacgcatcaagaaatcctttatttaacttttgctgcaatgttaatggcagga

SEQ ID NO: 310986 - DNA, 589 bp, Unknown
  Bacterial polypeptide expressing nucleotide sequence isolated from the Sargasso Sea
tatgagcgttaaaaatattcaaaaaataatgaaagataaagaaatagactacgttgatttgagatttacagatccaagaggaaaacttcaacatgtcactatggatgcaaaagttgttgacgatgacatgttagaagagggaatattcttcgatggatcttcgatagctggatggaaagctattaatgagtcagacatgattttaaagcctgatttatcgaggccagtagtagatccttttacatctcataatactttaaatattttttgtgatgttttggacgctataaaaaaagatccttatgaaagagaccctagaggtacagctaaaaaagctgaagattatttaaaaaaatccaagattggtgataaagctttttttggaccagaaccagaattttttgtattcgatgacgttagatacaaaaatgatatgaatgaaactggattttcaattgatagtactgagggaccatataacactggaaaaaaatatgaaaatggaaatatgggacatagacctggagtaaagggtggatatttttcagtgcccccggtggatagtgcacaggatatgagaagtgaatat

SEQ ID NO: 310987 - DNA, 896 bp, Unknown
  Bacterial polypeptide expressing nucleotide sequence isolated from the Sargasso Sea
ttgtagatcctatacttcacataatagtttaatattattctgcgatatttttgatgctgtaaaaaaagactcttatgaaagagatccaagaggaattgcaaaaaaagcagaggcatatttaaaaaaaaccggagttggagataaagcttattttggacctgagccagagttttttgtttttgacgatgtaagaattaaaaatgatatgaatgaaacaagttttgcaattgatagtgcagaaggtccttacaattctgggaaaagatatgagaacggtaacatgggacataggcctggaatcaaaggtgggtattttcctgttccgcctgtagatagtgcacaagatatgagaagtgaatatttaaaaggattaagagaagtaggcattactgtagaaaaacatcatcacgaagtagctccaagccaacatgaacttggaatgttatatagtactttagttgatcaagcagataacgttcagctatataagtatgtagttcaaatggtctcgcattcttttggaaagactgcaacatttatgcctaaaccagttaagggtgacaacggttccggaatgcatacacaccaatcaatatggaaaggcaaaacaccagtgttttctggaaatgaatatgctggactttctaaaactgcgctacattatatcggtggaattttaaaacatgcaaaagctataaatgctttttctaatgcaacaacaaatagttataaaagattaattcctgggtttgaagcaccagtacttcttgcttattcagcaagaaatagatctgcttcttgtagaattccaattactctaagtaaaaatggagcaagatgtgaaataagatttcctgatgctgctggaaatccatatttaactttttcagctatgc

SEQ ID NO: 310988 - DNA, 496 bp, Unknown
  Bacterial polypeptide expressing nucleotide sequence isolated from the Sargasso Sea
tatgcctggacagtgggagttccaaattgggcctgtaggagccccagatataggagatcaaatttgggttgcaaggtggttgctttatagaattgctgaagactacaacatttcagcaactctcactcctaagcctgtaaagggtgattggaatggagcaggaatgcacaccaatttttcaacaaaacaaatgagagaagatggtggttatgatgcaattgttgccggctgtgaagcactaggtaaaaatgctgaatttcatgttcaaaactatggagcgggtatagaagaccgtctcacaggtgatcatgaaacacaaaggtttgatacattttcttacggtgtaagtgatagaggcgcatctattagaataccttggcaagttgaagttgataaaaaagggtatttagaagatagaaggccaaatgccaacgcagatccttatgttattgcaacagtaatgattgatactgtttgctcagcggcttctagttaa

SEQ ID NO: 310989 - DNA, 554 bp, Unknown
  Bacterial polypeptide expressing nucleotide sequence isolated from the Sargasso Sea
taaatacgcaggtttatctaacacagcattacactacatcggagggatattaaaacacgctagagctataaatgctttctctaatgcaacaactaatagttataaaagattaataccaggctttgaagcgcctgtattattggcatactcagcaagaaacagatccgcatcatgtagaattccaattacacaaagtaaaaaagctgctagatgtgaagttcgtttccctgatgcagctggaaacccttacttaacattttctgcattattaatggctggtcttgatggaattaagaataaaatcgatccaggtaaatctttagataaagatttgtatgctttaagtgagtctgaagttaaaaaaattccaacagtttgcggttctttgagagaagcaatggagagcttagacaaagatagaaaatttttaactcaaggtaatgttttcactgacgatcaaatagatgcttacatcgctcttaagtatgaagaaatttataattttgagcacactccgcatccaatggagtttcaaatgtattacagctgctaaa

SEQ ID NO: 310990 - DNA, 826 bp, Unknown
  Bacterial polypeptide expressing nucleotide sequence isolated from the Sargasso Sea
tatgagttcaaacgaagtattaaaatttatgaaaaataaagaaattgagtttgttgatctaagattcacagatcctagaggaaaacttcaacatcttactatggatgcaactacagtagatgaagaaatgttaaacgaaggagttttttttgatgggtcctctatagctggatggaaagctatcaatgagtcagatatgatattaaagcctgacttaagtagaaaaattattgatccctatacctctcacaatacccttattcttttctgtgatattttggatgctataaaaaaaaattcttacgaacgagaccctagaggaatagcaaaaaaagctgaaacttatttaaaatctactggagtaggtgataaagcatattttggtcctgaaccggaattttttgtttttgatagtgtgcgttacaaaaacgatatgaacgaaactagtttttctattgatagcaatgaaggtccttacaatacaggaagaaaatatgaaaatggaaacaaaggtcatcgtccaggaataaaaggaggatattttccagtcccaccagttgatagtgcacaagatatgcgaggagaatatttgaagggacttagagatgttggaataactgttgaaaagcatcaccatgaagtagcaccaagccaacatgaattagggatgttattcagtactttagtaaatcaagctgacaacgttcaactttataaatatgtagtacacatggtttcccaatcatttggtaaaaccgcaacatttatgccaaagccagttaaaggcgataatggttctggaatgcatactcaccaatcaatttgg

SEQ ID NO: 310991 - DNA, 856 bp, Unknown
  Bacterial polypeptide expressing nucleotide sequence isolated from the Sargasso Sea
tttgatgggtcaagtacattacaggcagatggaggagacagtgattgtttattaaaaccagtgtggatgtgtcctgacccaattcgtggtggggaaaatattttagtaatgaatgaagtttgcaatcctgatgggacacctcatagatctaattctagagccgctttagttgaaattgcagaaaaatttaaagagcatagaccttggtttggtattgagcaagagtacacgcttatggatggtaaacagccagcgggatggccacaagaaggatttcctgaaagacctcagggcccttattactgcagtgttggatcagaagatgtggctgctcgttctatggtagaagatcacctggatttatgtctagaagcaggattagaagtatcaggaattaatgctgaagtaatgttaggacaatgggagtatcaagtgggacctttacctgctttagaagtaggtgatcaattatgggtagcaagatggcttctcgaaagagttggtgaagaatatggcctaagagtagaacttcatccgaaacctataaaaggtgattggaatggttctggagcacatattaactatagcacagaatcaatgcgcgcagatggggggttgaaagtaattgaagaagcatgtgaaaaactcggaaaaaacattgaaaaacatatagctgtttatggagatgctaatgcagagcgactaacaggtgaccatgaaacatgtagcatcaatgagttcaagtacggtgtaagcgacaggggtgcatctataagaatccctatgggagtagcaaatgatggtaagggatatttagaagatagaagacctgcctctaatgtagacccaatataaa

SEQ ID NO: 310992 - DNA, 358 bp, Unknown
  Bacterial polypeptide expressing nucleotide sequence isolated from the Sargasso Sea
ggttggaaagcaataaatgaatctgacatgatcctgaaaccagatttatcaagaacagttgtagatccttttacttcacataataccttaaatatattttgtgacattttggatgctgtaaaaaaggatccttacgaaagagatccgagaggaactgcaaaaaaagcagaagcatatttaaaaaagacagggattggtgataaggcttattttggtccagagccagaattttttgtatttgatgatgttaggtacaaaaacgatatgaatgaaactagtttttcaattgatagttcagaaggtccatataatactggaaaaaaatacgaaaacagaaatatgggacatcgtccaaaaa

SEQ ID NO: 310993 - DNA, 424 bp, Unknown
  Bacterial polypeptide expressing nucleotide sequence isolated from the Sargasso Sea
atgagcgctgcaaacgttttaaaatttataaaagaaaaagatgctgaatttgtagatctaagatttactgatccaagaggaaaacttcaacatttaacaatggacgcctcaatagttgatgaagatatgttgaatgaaggtgtcttttttgatggttcatcaattgcaggatggaaagcaattaatgagtcagacatgattttaaaacctgatacagcaagaatgttcatggatcctttcacatctcacaatactgtagttttgttttgtgatattctagatgcaattaaaaaagatccgtatgaaagagatccaagaggtgttgctaaaaaagcagaggagtatttaaaagcttcaggtattggtgataaagctttttttggacctgaacctgaattttttgtctttgatgatgtaagaatta

SEQ ID NO: 310994 - DNA, 811 bp, Unknown
  Bacterial polypeptide expressing nucleotide sequence isolated from the Sargasso Sea
agggcatacccacaggagaagcatcaccacgaagttgctggtgctggccaacatgaacttggaatgaaattcgattcgttaataaattctgctgataacgtaatgacttacaaatacgttgttagaaacgttgctaaaaaatatggaaaaactgcaacatttatgcctaagcctgttttcaacgataatggaactggaatgcatgttcaccaaagtctatggaagagtggacagccactattctttggtgaaggggcttatgcaaatttatctcaaacagctagatggtacatcggaggcatacttaaacatgctccttcattcctagcatttaccaacccaactacaaatagttataaaagattggtaccaggattcgaagcacccgtaaatctagtttactctgaaggtaatagatcagctgcagtaagaatacctttaacaggtccaagccctaaagccaaaagattagaattcagatcaggtgacgcacttgcaaacccatatttagcattctctgtgatgatgctagctggtattgatggaattaaaaatcaaattgatcctggtgatggagtagatgtagatttgtttgaacttccagctgatgaacttgccaagatagatacagtaccttcatctctaaatgattcacttaatgcgctcaaggctgataaggattatctattagctggtggagtatttactgaagattttattgataactttatcgatataaaatacgaagaggtgcaacaactaagacaaaggcctcatccacatgaattcttcatgtattacgatgcataat

SEQ ID NO: 310995 - DNA, 906 bp, Unknown
  Bacterial polypeptide expressing nucleotide sequence isolated from the Sargasso Sea
tcggtcccgaacttgaattttttgttttcgatgacgttagatttaaaaacgatatgaatgaaactagttttagtatcgacagttcagaaggcccatataatactggaaagaaatacgaaaatggaaatatgggtcatagaccaggtattaaaggtggttatttcccagtccctccagttgatagcgctcaagatatgagaggtgagtatttgaaagcgctaagagatatgggtgtaaaagtagaaaaacatcatcacgaggtagctccgagtcaacacgagcttggtatgtattttggaactcttactaatcaagccgataatgttcaactatataaatatgctgttcaaatggttacacactcttttggtaagacagctactttcatgccgaaacctgtgaagggagataatggttctgggatgcactgtcaccagtctatttggaaaggaaacactccagtttttatgggaaaagagtatgctggtttgtcaaaagaagcattatattacattggtggaattttaaaacatgctagagcaataaatgcattttctaatgcgacaactaatagttacaaaagactaattccaggttttgaagctccagtaattttagcttattctgctaggaatagatctgcttcttgtagaatacccgttataatgaacccaaaggcagcaagaatggaaataaggtttcccgatgcagctggtaacccttatttaacttttgcatcaatgttaatggcgggtatagatggtattaaaaataaaatagacccaggtaaagctttcgatcaagatttatattccttatcagaggatgaggttaaaaaattaccaactgtgtgtggttctttgagagaggctatgcaaaacttagataaagatagaaaattttaac

SEQ ID NO: 310996 - DNA, 750 bp, Unknown
  Bacterial polypeptide expressing nucleotide sequence isolated from the Sargasso Sea
aacttggtatgtattttggaactttagtagatcaagcagataacgtacagttatataaatatgtagttcagatggtttctcactcatttggtaaaactgcaactttcatgccaaaacctgttaagggtgataatggttctggtatgcatacccaccagtctatttggaaaggtaaaactccagttttttctggcaacaaatatgcaggattatctcaaacagctttgtactacattggtggtatacttaaacatgcaaaagcaattaatgcattttcaaatgctacaacaaatagttataaaagattaattcctggatttgaggcgcctgttttgttagcttactctgctagaaacagatctgcttcttgtagaattccaattacgttaagcaaaaatggtgctagatgcgaaattagatttcctgatgcttcaggaaatccttatttaacttttgcttcaatgttaatggctgggctagatggaattaaaaacaaaattgatccaggcaaatcattcgataaagatttatatgctttatctgaaaatgaagttaaaaaagttccaacagtttgtggctctttaagagaagccatggaaagccttgatagagatagagcttttttaaaacaaggaaatgttttttcagatgatcagattgatgcatatatagctttaaagtttgaggaaatacataatttcgaacatactcctcatccaattgaatttgagatgtattacagctgttaat

SEQ ID NO: 310997 - DNA, 988 bp, Unknown
  Bacterial polypeptide expressing nucleotide sequence isolated from the Sargasso Sea
cagatcgagtttgtcgatctgcgtttcgtcgacatgcgcggcatcgagcagcacgtgaccttcccggtctccatcgtcgagccgtcgctgttcgaggaaggcaagatgttcgacggcagctcgatcgccggctggaagggcatcgccgaatcggacatggtgctgatgccggacccggccagcgcttacgtcgacccgttctacgccgacccgaccctggtgctgacctgcgacgtgctcgacccggccaccatgcagggctatggccgttgcccgcgcggcatcgccaagcgcgccgaggcctacctgaagtcctcgggcatcgccgacctggcgttcttcggcccggaaccggaattcttcatcttcgactcggtccagttcgccaacgacatgggccacaccttcttcaagatcaactccgaggaaggcgcctggaacaccggcaagcactatgacggcgccaacagcggctaccgtccgaccgtcaagggcggctacttcccggtgccgccgaccgattcgctgcacgacatccgcgccgagatgtgcaaggtgctgacccaggtcggcatcgaggtcgaggtgcaccaccacgaggtggccaacgccggccagtgcgagatcggcgccaagttcaacacgctggtgaccaaggccgacgaactgcagcgcatgaagcacgtcatcaagaacgtggcgcaccgcaacggcaagacggtgaccttcatgcccaagccgctggtcggcgacaatggcagcggcatgcacgtgcaccagtcgctggccaaggagggcaagaacctgttctccggcgacggctacggcggcctgtcgcagatggcgctgtggtacatcggcggcatcttcaagcacgcccgcgccatcaacgccttcagcaactcgggcaccaacagctacaagcgcctggtgcccggtttcgaggcaccggtgatgctggcctactcggcgcgcaaccgctcggcgt

SEQ ID NO: 310998 - DNA, 550 bp, Unknown
  Bacterial polypeptide expressing nucleotide sequence isolated from the Sargasso Sea
aatgagctctaaaagtattctaaaattaattaaagataaacaagtagaatttgttgatctaagatttactgatccaagaggtaagttgcagcatttaactatggattctactgttgttgatgacgacttgctaaataaaggagttttttttgatggttcgtccattgctggttggaaagcgataaatgagtctgacatgattttaaagccagacctagatagaccaattattgatccattcaattcacacactacattaaacatattctgcgatattattgatgcagtcaaaaaagatccatatgagagagatccaagaggaacagcaaaaaaagctgaggcttatctaaaaaaaactggaattggagacaaatcttactttggtcctgagccggagtttttcgtatttgatgatgtgagatttaaaaacgacatgaacgaaacaagctttagtattgatagttccgaaggtccttacaataccggtaaaaaatatgaaaacggaaatatgggacacagacccggaattaaaggtggctactttcctgta

SEQ ID NO: 310999 - DNA, 790 bp, Unknown
  Bacterial polypeptide expressing nucleotide sequence isolated from the Sargasso Sea
attttagatgcaattaaaagaaatccttatgaaagagatccacgagggatagcgaagaaagctgaagcttatttaaagaagactggcataggtgataaagcttactttggtcctgaaccagaattttttgtttttgatgatgtaaaaattaaaaacgatatgaacgagacaagtttttcgatagatagtacagaaggaccatataattctggaaaaagttatgaaaatggaaatatgggtcatagacctggagttaaaggtggatattttccagtccctccagtagatagtgctcaggatataagaggtgaatacctaaaaggtttaagagacgtaggtatcacagttgaaaaacatcaccatgaagttgctccaagccagcacgaacttggaatgttatttggtacgttagttgatcaagctgataatgttcaattatataaatatgtagttcaaatggtttcacattcatttggtaaaactgcaacgtttatgcctaaaccagtaaaaggtgataacggatcaggaatgcacgttcaccaatcagtttggaaagggaaaactccagttttttcaggaaataaatactcaggtttgtcgcaaactgcactctattatattggtggtatactaaaacatgctaaggcgattaatgcgttttcaaatgctacaacaaatagttataaaagattaattcctggttttgaagctccagtattacttgcttattcagcaagaaatagatctgcatcttgtagaattcctataactctaagtaaaaaaggagcaa

SEQ ID NO: 311000 - DNA, 921 bp, Unknown
  Bacterial polypeptide expressing nucleotide sequence isolated from the Sargasso Sea
aaaaaagatccttatggaagagatccaagaggaactgcaaaaaaagcagaagaatatctaaaaaaatctggaattggagataagtcgtactttggacctgagccagaattttttgtttttgatgatgtaagatttaaaaatgacatgaacgaaacaagttttagtattgatagttcagagggtccttacaatactggtaaaaaatatgaaaatggaaacatgggtcacagaccagggatcaaaggtggttattttcccgtaccaccagttgacagcgctcaagacatgcgaggtgaatatttaaaagcccttaaagacatgggtgttaaagttgagaaacaccaccatgaggtagcaccaagtcagcacgaattaggtatgtattttggtactttaacaaacatggcagacaacgttcaactttataaatatgccgtacaaatggtaacacattcttttggaaaaacagctacctttatgcctaaaccggtaaaaggtgataatggttcaggaatgcattgccatcaatctatctggaaaggcaacacgccattatttatgggtaaagaatacgcaggtttatctaaagaagctttatactacattggtggaattttaaaacatgcaaaagcaattaacgctttctctaatgcaacaactaatagttataaacgtttaattccaggttttgaagcaccggtaatattagcttattctgcaagaaacagatcagcgtcatgtagaataccggttattatgaatccaaaagctgcaagaatggaaattagatttccagatgctgccggtaatccttactttacttttgcatccatgctgatggctggaattgatgggaataaaaataaaatagatccaggtaaagcttttgatcaagatttatactctttatctgaagatgaa

SEQ ID NO: 311001 - DNA, 814 bp, Unknown
  Bacterial polypeptide expressing nucleotide sequence isolated from the Sargasso Sea
gagaggagagtacttaaaagcattaaaagatatgggtgtaaaagttgagaaacaccatcacgaagtagctccaagtcaacatgaattaggaatgtattttggaacacttactaatcaagcagataacgtacaactttataaatatgccgtgcaaatggtaacgcactcgtttggtaaaacggcaactttcatgccaaaacctgtaaaaggcgacaatggatcaggaatgcactgtcaccaatcaatttggaaaggaaatactccattatttatgggaaaagagtatgcaggtttatcaaaagaagctttatattatatcggtggtattttaaagcacgccagagctattaacgcattttcaaatgcaacaacgaatagttataaaaggttaataccaggttttgaagctccagtaatattggcatattcagctagaaatagatctgcatcatgcagaattccagtaattatgaatcctaaagctgcaagaatggaaataagatttcctgacgctgcaggaaacccatatctaacattcgcctctatgttaatggctgggatcgatggtattaaaaataagatcgatccaggaaaagcatttgatcaggacttatattctctttctgaagatgaagttaaaaaattacctactgtttgtggatctttgagagaagcaatgcaaaacctggataaagataggaaatttttaactgaaggtggagtgttcactgatgatcaaattgatgcgtatattgaattaaaattttcagaaatatataattttgagcatactcctcatccgatcgaattttga

SEQ ID NO: 311002 - DNA, 844 bp, Unknown
  Bacterial polypeptide expressing nucleotide sequence isolated from the Sargasso Sea
atatttcccagtgccaccagttgatagtgaacaggatatgcgtggtgaatatctaaaaaatttgaaagaagttggtattaaagttgaaaagcatcaccatgaagttgctcctagtcagcacgaacttggtatgtactttggaactttagtaaaccaagctgataacgtacaattatataaatatgttgttcaaatggttacacattcatttggaaaaactgcaacttttatgcccaaaccagttgctggtgataatggttcaggaatgcacatccatcaatctatttggaaaggtgataccccagtattttcaggtgatgcgtattctggattaagtgaaactgcacttcattacattggtggaattctaaaacacgctaaagcaattaatgcttttgctaactctacaacaaacagttacaaaagattaattcctggttttgaagctccagttcttcttgcgtattcagcaagaaatagatctgcttcttgtagaataccgatcacattaagcaaaaaaggtgctagatgtgagattagattcccagatgctgcaggaaacccatatttaactttcgcggctatgttaatggctggaattgatggaattaaaaataaaattcatccaggtgagtcttttgataaagatttatatgaattaccacctgaagaagttaaagctatcccaacagtttgcggttctttgagagaagcgatggaaagtttagataaagacagagagtttttaactcaaggcggtgtctttactgacgatcagattgatgcttacattgctctaaagtttgaagaaattcacaaatttgaacatgcacctcatcctgta

SEQ ID NO: 311003 - DNA, 848 bp, Unknown
  Bacterial polypeptide expressing nucleotide sequence isolated from the Sargasso Sea
gaagcatatttaaaaaaaacaggcataggtgataaagcttattttggtccagagcctgaattttttgtttttgatgatgttagaattaaaaatgatatgaatgaaacaggatttgtaattgatagttctgaaggtccttataattctgggaaaaaatatgataatggaaatatgggtcatagacctggaattaaaggtggttattttccagtacctccagttgatagtgctcaagatatgagaggagaatatctaaaaggcttaagagatgttggtattactgttgaaaaacatcatcatgaagtcgcaccaagtcaacacgaattaggaatgttatttggaacgcttgtagatcaagcagataatgttcagctatataaatatgttgttcaaatggtatcacactcttttggaaaaactgcaacttttatgcctaaaccagttaaaggtgataacggatcaggaatgcatattcatcaatctgtatggaagggaaaaacaccattattttcaggaaataaatatgcaggtttgtctcaaactgccttgtattatattggtggaatcttaaaacatgctaaagctataaatgcattttcaaatgctacaacaaatagttacaaaagattaattccaggttttgaggcaccagttctattagcctactctgcaagaaatagatctgcttcatgtagaattccaattacattaagcaaaaaaggtgccagatgcgaaattagatttcctgatgcagctggtaacccatatctcactttcgctgccatgttaatggctggtttagatggtataaaaaataaaatagatccaggtaaatcatttgataaaga

SEQ ID NO: 311004 - DNA, 854 bp, Unknown
  Bacterial polypeptide expressing nucleotide sequence isolated from the Sargasso Sea
gagttcaaataaagtattaaaattgatgaaagataaagagattgaatttgttgacttaagattcactgatccaagaggcaaattgcaacatctaacaatggattcaacaattgttgatgatgatatgcttaacgaaggagtattttttgatgggtcttcaatagctggttggaaagctattaacgagtcagacatgattttaaaacctgatttaagtagacaagtaattgatccttatacttcacataatacattaattatattttgcgatatcttagacgcagtaaaaaagactccttacgaaagagatccaaggggtattgctaaaaaagctgaagcatatttaaaaaaatcaggagtaggtgataaagcttactttggacctgagccagaattttttgtatttgatgatgtaaaaatcagaaatgaaatgaatgaaataggctttaagattgatagttcggaaggcccttataactcaggcaaaaattatgaaaatggaaacatgggacacagacctggaataaaaggtggatattttccagtaccaccggttgacagtgctcaagacatgagaggtgaatatttaaaaggtttgagagaagttggtattacagttgaaaaacaccatcacgaagtcgctccaagtcaacatgaacttggaatgttatacaatactttagtaacacaagcagataacgttcagttatataaatacgtagttcaaatggtttctcattcttttggaaaaactgcaacctttatgcctaaaccagtaaaaggagacaatggttcaggaatgcatacacaccaatcaattggaaaggtaaaaacccagtatttcaggaaataaa

SEQ ID NO: 311005 - DNA, 775 bp, Unknown
  Bacterial polypeptide expressing nucleotide sequence isolated from the Sargasso Sea
atgagcgctagcaagattatcaagctaatcaaagaaaaagaagtggagtatgtagatcttcgttttacagatccaagaggcaagcttcaacacttgactatggatggaaaaatggttgatgaaaaaatgctgaatgaaggagttttttttgatggttcttcaatagcaggatggaaagcaatcaacgaatctgacatgatacttaaaccagatctagatagacaaattattgatccttttacctcgcacaacactcttgttttattctgcgatgttttagatgcagtaaaaaaaacaccctatgaacgcgaccctagaagcatagccaaaaaagccgagtcttatctaaaaaaatcaggtattggagataaagcttattttggtcctgaagcagaattttttgtgttcgatgatgtaaaatacaaaaatgacatgaacgaaataagttttaaaatagatagcgctgaaggtccttacaatactggaaaagattacgaaaacggaaatatgggacatagacctggaataaaaggtggttattttccagtgcctcccgtcgacagcgcccaagatatgagaggagaatttttaaaagctttaagagatatgggaattaaaaccgaaaaacaccatcatgaagttgctccaagtcaacatgaattgggaatgtattttggaacattgactaaacaagcagacaacatgcaactttataaatatggagttcaaatggtagcacattcttttggaaaaacagcaaccttcatgccaaaac

SEQ ID NO: 311006 - DNA, 892 bp, Unknown
  Bacterial polypeptide expressing nucleotide sequence isolated from the Sargasso Sea
aaagacaaacaagttgaatatgtggatctaaggtttacagatccaagaggtaagcttcagcacgtaactcaggatttgcagactgtgaatgaagatatgcttaacaatggaattttctttgacggttcctctatagctggttggaaagcaattaatgagtctgatatgattttaaaacctgatttatcaagcaattttattgatccatttttttcacataccacgttatcacttttttgtgatgtgatggatccaatctcaaaaacattttatgagagagatccacgctcaacagcaaaaaaagcagaggaatatcttaaaaaaacaaagataggagataaggcttattttggtcctgaacctgaattttttgtatttgatgatgtaaggtactccaaccaaatgaataaagtaagttatgaggtcgatagtgcagaagggccttataatactggtaaagtatatgagaatgggaatatgggacacaggccgaaagtcaaaggaggttacttccctgtaccaccggtcgatagcgcccaagatttaagatctgaatgtttaaaagcaatgaaagatatgggtgtaaaagttgaaaaacatcaccatgaagttgcacccagccaacatgagctaggcacattgtttaatactttagttaatcaaggtgatgcaatgcaaatttataaatacgcagttcacaatgttgcacactcttttggtaaaacagctacatttatgccaaagcctgtaaagaatgataatggttcaggaatgcatgttcatcaatcaatttttagtggagaaaaacctttattcgctggtgacaaatacgctggattatctgatacttgtctatattacattggcggtattattaaacacgcaagagcac

SEQ ID NO: 311007 - DNA, 943 bp, Unknown
  Bacterial polypeptide expressing nucleotide sequence isolated from the Sargasso Sea
aaggacgtactaaaattaatgaagtctaagaatattgagtttgtggatcttagatttacggacccaagaggtaaacttcaacatctaacaatggatacaactatcgtagatgaaggaatgctaaatgacggtgtattttttgatggatcgtcaattgcaggatggaaagcaattaatgaatctgacatgatattaaagcctgatttaagtagaaaagtaatagatccttatacatctcataatactctaattttattttgcgatattttagatgcagttaagagggatccttatgaaagagatccaagaggaattgcaaaaaaagctgaagcttatttaaagaaaacaggtataggtgatacagcttactttgggccagagcctgagtttttcgtttttgatgatgtaagaattaaaaacgatatgaatgaaacaagtttttcaattgatagcacagaaggtccttataattctggaaaatcttatgataatggcaacatgggtcacagacctggagtaaaaggaggatattttcccgtaccaccagtagatagtgctcaagacatgaggggtgaatatcttaaaggactaagagatgttggaattaccgtagagaaacatcaccacgaagttgctcctagtcaacatgaacttggaatgttatttggaaccttggttaatcaagcagacaacgtccaactttacaaatacgtagttcaaatggtttctcactcttttggtaaaactgcaacttttatgcctaagccagttaaaggagataatggttcaggaatgcacactcaccaatcaatttggaaagggaaaactcctgtattttctggaaacaaatatgctggattatctcaaactgctttatattatattggtggagtattaaaacatgcaaaagctattaatgcatttgctaatgctactacaaata

SEQ ID NO: 311008 - DNA, 811 bp, Unknown
  Bacterial polypeptide expressing nucleotide sequence isolated from the Sargasso Sea
acaatggatacaacgattgttgatgaagagatgttaaacgatggtgtattttttgatggatcatcaattgcaggatggaaagcaattaatgagtcagacatgatattaaaacctgatttaagcagaaaagtaatagatccttatacatctcataatactttaattttattttgtgatattttggatgctgttaagagagatccatatgaaagagatccaagaggaattgcaaaaaaagctgaagcttatttaaagaaaacaggtataggtgatacagcttactttgggccagagcccgagtttttcgtatttgatgatgtaagaattaaaaatgacatgaatgaaacaagtttttcaattgatagttcagaaggtccatataattctggaaaatcttatgataatggaaacatgggtcatagacctggagtaaaaggaggatattttcctgtaccaccagtagatagcgcacaagatatgagaggtgaatatcttaaaggactaagagatgttggaattacagtagaaaaacaccaccatgaagtagcaccaagtcaacatgaacttggaatgttatttggaactttggttgatcaagcagacaacgttcagctatataaatatgtagttcaaatggtttctcactcttttgggaaaactgcaacttttatgcctaagccagttaaaggagataatggttctggaatgcatacacaccaatcaatttggaaagggaaaactccggtattttcaggaaacaaatatgctggattatctcaaactgctctttattatattggtggtgtattaa

SEQ ID NO: 311009 - DNA, 803 bp, Unknown
  Bacterial polypeptide expressing nucleotide sequence isolated from the Sargasso Sea
agctgagaaatatcttaaatcttctggactgggtgatactgcatattttggaccagaagcggaattctttgtatttaatgatgtgaaatatgattcaggttcaaattttgcttttcatgaagtagattcaattgagggtgcttggaacactgggagagatgaaaatccaaacttgggtcataagcctcgacataaaggaggatattttccattaccccctgcagatagtttacaggatgtaagaactgaaatggttttaactatggaagaaattggggttaacgtagaagcatcacatcatgaagtagctactggaggacaatgtgaaattgatttagaattttctccgttattatcaatggctgatgatcttttaaaatataaatatgttgtaaaaaatgttgcaaagcaacatggtatgactgctacttttatgcctaaaccattatttgaggacaatggctctggcatgcatgttcattcaagtatttggaaaaaaaataagacactaatgtataaaaaaggtaattatgcagacctaagtgattttgcactatattatattgggggaattttaaagcatgcgccatcattattagctttttgtgcaccaactacaaattcttacaagcgattaacaccaggttttgaggcaccagtaaatattgcttactctcaagctaatagaacagcttctgtaaggatacctaataattatacatcaaatccaaaagcaaaaagaattgaattcagatgccctgatccttcttcaaatccatatctagcattttctgctattttga

SEQ ID NO: 311010 - DNA, 591 bp, Unknown
  Bacterial polypeptide expressing nucleotide sequence isolated from the Sargasso Sea
aatgagtgctaaaaatattttaaagtttattaaggataaacaggtagaatacgtagattttagattcaccgaccctagaggtaaattgcaacacgttacacaagatttacttacagttaacgaagatatgttaaacgatggaattttttttgatggctcctcaatagctggttggaaagcaattaacgagtccgacatgatcttaaaacctgatttatcgaatagtttcatagacccatttttttcacacagcacattagcaattttttgtgatgtaatggatccgattacaaaaaattattatgagagagatcctcgatcaactgcaaaaaaagcagaggcatacctaaaaaaaactaagatcggagataaggcatattttggacctgaaccagaattttttgtttttgatgatgtaagattttctaactcaatgaataaagtaagttatgaagtcgatagtgctgaaggtccttataatactggaaaaaaatacgagaatggaaatatgggacatagaccaaaagtcaaaggaggttactttcccgttccaccagtagatagcgcacaagatttaagatctgaatgttt

SEQ ID NO: 311011 - DNA, 721 bp, Unknown
  Bacterial polypeptide expressing nucleotide sequence isolated from the Sargasso Sea
tcgtccggcgccgaaaggaggctacttcccagtaccacccgtggataataacactgatctacgcgcccaaatggtctctaccttggttgaaatgggcgtcggcatggaaaagcatcatcatgaagtggcaccttctcagcacgaacttggtattcttttcaacacgctgctacgcacagcggacaatatccaactttacaagtgggtagtccatatggtggcccatgagaacggtaaaacggcaaccttcatgcccaaacccgtcgttggtgataacggctcgggcatgcactgtcaccagtcggtctggaaagacggcgacactctgttcgccggaaacggttacgcagatttatctgatacagcacttcactatattggtggtattattaagcacgccaaggccatcaatgccttcaccaacccaaccacaaacagctacaagcgattagtcccaggctttgaagcgccggtattacttgcctattcgtcgcgtaatcggtcggcctcttgccgtataccgtttgtcggtaacccaaagggcaaacgtgtggaagtacgattccccgacgcatccgccaatccgtatctcgcctttacggcgatgttaatggccggccttgacggtattcagaataaaatagatccaggcgatccgatggacaaagatctctatgatttgccgcccgaagagctggaaggggtgcctacagtttgtggc

SEQ ID NO: 311012 - DNA, 922 bp, Unknown
  Bacterial polypeptide expressing nucleotide sequence isolated from the Sargasso Sea
agacttgactggcatagcagatactgcattttttggaccagaaccagaattcttcttatttgatgacgtgagatacgactctaaagaaggaggttgtttttatagtgtagatactattgaagctccatggaatacagggagaattgaagaagggggaaaccttggatacaaaatacaatataaagaaggatattttccagtagctccaaatgatactgcgcaagatatcagatctgagatgcttcttcttatgggtgaattaggtatcccgactgaaaaacatcaccatgaagttgctggtgcaggccaacacgagcttggaatgaaatttgattcattaataaatgctgctgataacgttatgacttataaatacgttgtcagaaatgttgcaaaaaaatatggaaaaacagcaacatttatgcccaaacctgtttttaacgacaacggaacaggaatgcatgttcaccaaagtttatggaagagtggacagccactattctttggtgaaggatcatatgcaaatttatctcaaacagcaagatggtatatcggaggcatacttaaacatgcaccatcattcttagcatttactaacccaaccactaatagttataaacgattggttccaggattcgaagcgcctgtaaatctagtttattctgagggtaatagatcagctgcggtaagaatacctttaacaggaccaagccccaaagctaaaagattagaattcagatcaggggacgcacttgcaaacccttacttagcattctctgtaatgatgcttgccggtattgatggaattaaaaatcaaattgatccaggagatggagtagatgtagatttatttgaacttccagctgatgaacttgcaaaaattgatacagtaccgtcatctctaaatgactcacttaatgcg

SEQ ID NO: 311013 - DNA, 592 bp, Unknown
  Bacterial polypeptide expressing nucleotide sequence isolated from the Sargasso Sea
atgagtgcaagtgatgttttaaaattaatgaaagataaagaaattgaatacgtagatttaaggtttacggacccaagaggtaaacttcaacatttaacaatggattcaacagttgttgatgagggaatgttaaatgatggtgtattttttgatggttcatcaattgctggctggaaggcaattaacgagtccgacatgattttaaaacctgatctaggtagaaaagtatttgatccattcacttctcataatacccttgtattgttttgtgatattttagatgcagttaaaaaagatccatatgaaagagatcctagaggtatagcaaaaaaagctgaggcgtaccttaaaacaactggaattggagataaagcatattttggtcccgagccagaattttttgtattcgacgatgtcagaattaaaaatgagatgaatgaaactggttttgtaattgatagtgtggaaggtccatataattcaggaaaaaaatatgaaaatggaaacatgggtcatagacctggagttaaaggtggttatttccctgtaccaccagtagacagtgctcaagatatgagaggtgagttttgaa

SEQ ID NO: 311014 - DNA, 169 bp, Unknown
  Bacterial polypeptide expressing nucleotide sequence isolated from the Sargasso Sea
atgtatgtctggattgacggaactggtgaaggtcttcgttgtaaatcacgaactttgaagatatctgattggaatggtcaacttccgaagccggaggaattgcctaaatggaattatgacggatcatctactggacaagctgaaggttatcttattgtacctagttaat

SEQ ID NO: 311015 - DNA, 828 bp, Unknown
  Bacterial polypeptide expressing nucleotide sequence isolated from the Sargasso Sea
aatgagtgcaagtgaagttttaaaattgatgaaagataaagaagttgagtacgtagatctaagatttactgaccctagaggaaaattgcaacatttaacaatggataaaacagttgttgatgaagaaatgctaaatgatggtgtgttctttgatggttcatcaattgctggatggaaagcaattaatgaatctgatatgattttaaaacctgatcttggaagaaaaattgtagatccttttacttctcataacactcttgttttgttctgtgatattttagatgctgtaaaaaaagatccatacgaaagagatccaagaggaatagcaaaaaaagcagaagaatatttaaaaacaacaggtgttggagataaagcatattttggacctgaacctgaattttttgtattcgatgatgtaagaattaaaaatgaaatgaatgaaactggtttttctatagatagtactgaaggcccatataattctggaaaaaaatatgaaaatggaaatatgggacatagaccaggggttaaaggtggatattttccagttccaccagttgacagtgctcaagatatgcgaggcgagtttttaaaaggtttaagagatgttggtattactgtggaaaaacatcaccatgaagtggctcctagccaacatgagttaggaatgttatttagcacattagtcaaccaagctgataacgttcaattatataaatatgttgtacaaatggtagctcattcatttggtaaaactgcaacttttatgccaaagcctgttaaaggtgacaacggttcaggaatgcatacacaccaatctatttggaa

SEQ ID NO: 311016 - DNA, 616 bp, Unknown
  Bacterial polypeptide expressing nucleotide sequence isolated from the Sargasso Sea
ggtactggtatgcatgtaaatatgtctatatggaaaagcggaaatccgctatttgcaggaaataaatacgcagatctttcggatgaagcactgtattttattggaggaatcctaaaacatgccaaggcacttaatgctataaccaatccagctactaattcatacaaaagattaatccctggatttgaagcacccgttttaagagcatactcagctcgaaatagatcaggatgtgtaagaataccttggacagaaagtccgaaagctaagagagtagaagccagatttcctgatccctcagcaaacccataccttgctttttcagcccttttaatggcaggacttgatggtattcaaaaaaagacggatccaggtgaaccttcagataaagatctttatgatttacctcccgaagaacttttatcaataccaacagtctgtggtagcttaagagaagctgtagaagctttacaagctgatcatgattttatgttagcaggagatgtattttctaaggaccaaattgaagcttatattgaattaaagaatgaggaaattcaagaatttgaacatactcctcatcctattgaatataaattatactattcttgctaat

SEQ ID NO: 311017 - DNA, 678 bp, Unknown
  Bacterial polypeptide expressing nucleotide sequence isolated from the Sargasso Sea
aatggccaagtctccccaagacgttttaagtcagattaaggatgaaggaattgaactcatcgatctaaagttcactgacattcatggtaaatggcaacatctaaccttgacatctgacatgatagaagaagaatcattcactgaaggtcttgcctttgatggatcttctataagaggttggaaagccattaacgcatctgacatgtctatggttccagattcaagtaccgcatggatcgatcctttttataaacacaaaaccttaagtatgatctgctctattcaagagccaagaagtggagaaccctatgataggtgcccaagatcattagcccaaaaggcattaaaatatttagattccacaggtatagcagatactgcattttttggaccagagccagaattctttttattcgatgatgttagatatgactctaaagaaggtagttgtttttatagtgtagatactattgaagctccctggaatactggtcgaacagaagaaggtgggaacctaggttataaaattcaatacaaagagggctatttcccagttgctcctaatgacaccgctcaagacataaggtctgaaatgttattgcaaatggctgaattaggaattccaactgagaagcatcatcatgaagtcgctggagcaggacaacatgaacttggtat

SEQ ID NO: 311018 - DNA, 682 bp, Unknown
  Bacterial polypeptide expressing nucleotide sequence isolated from the Sargasso Sea
cgttgctaaaaaatatgggaaaactgcaacgtttatgcccaagcctgtatttaacgataatggaactggaatgcatgttcaccaaagtttatggaagagtggacagccactattttttggagagggagcatatgcaaatttatctcaaacagcaagatggtacatcggaggaatacttaaacatgctccatcattcttagcatttactaacccaactacaaatagctataaacgattggttccaggattcgaagcacctgtaaatcttgtatattctgagggtaatagatcagctgcagtaagaatacctttaactggtccaagtcctaaagctaaaagattagaattcagatcaggagatgcacttgccaacccttacttagcattctctgtaatgatgcttgcgggtatagatggaattaaaaatcaaattgatcctggtgatggtgtagatgtagatttatttgaacttccagctgatgaacttgccaaaattgatacagtaccctcctctctcaatgattcacttaatgcgctaaaagcagataaggattatctattagctggtggagtatttactgaagattttattgataactttattgatataaaatacgaagaggtacagcaactaagacaaaggcctcatccacatgaatttttcatgtactatgatgcataa

SEQ ID NO: 311019 - DNA, 760 bp, Unknown
  Bacterial polypeptide expressing nucleotide sequence isolated from the Sargasso Sea
gttgatctaagatttacagatccaagaggaaaacttcaacacgttacaatggactcaaaaattgtagatgatggtatgttgaatgaagggatattcttcgatggttcatcaattgcaggatggaaagcaatcaatgagtctgacatgatattaaaacctgatttatcaagaacagttgttgatccttttacatcacataacacgctaaatatattttgtgatgttttggatgctgttaaaaaagatccatacgagagagatcctagaggaactgcaaaaaaagcagaggcctatttaaaaaaaacaggaattggcgataaagcttattttggtcctgaaccagagttttttgtatttgatgatgttagatataaaaatgacatgaatgaaactagtttttcaattgatagctctgaaggtccttataacactggaaaaaaatatgaaaacggaaacatgggacatcgtccaggtattaagggtggatatttccctgtccctccagttgatagtgctcaagatatgagaagtgagtatctgaaagcaatgaaggatatgggtattaaagtagaaaaacatcaccatgaagttgcgcctagccaacatgaacttggaatgtattttaatactttagtaaaccaagctgacaatcttcagctttataaatatgctgtacatatggtttcacattcttttggaaaaaccgcgacctttatgcctaaacctgttaaaggagataatggttcaggtatgcatgttc

SEQ ID NO: 311020 - DNA, 903 bp, Unknown
  Bacterial polypeptide expressing nucleotide sequence isolated from the Sargasso Sea
atttgtagatccattctttacagatcctacactcgttcttatttgtgatattcaagatccaatcacaggtcaaaagtatgacaaagatccaagatatgttgcaaaaaaagcagaggagtttgtaaaaagttctggtatcggtgacagcatattttttggtgcagaagcagaattttttctttttaatgacgtcagaatatcaaccgatccaagtaactcatttttctcagtagactcaggagaagctatttggaataaaggctccgatgaaagacctaacttaggttatcatgtaagaaataagggtggttacttcccctgtcctcctcatgacactatgcaagatgtaaggtccgaaatggttaatcatatggtatcaattggaatgaatgtggaagctcaacatcatgaagttgctaccgctggacagcaagagattgatttaaggtttgatacactgctttcccatgctgatagccttcaaaaatataaatatgttgtaagaaacactgcaaaaagcaatggtctgagtgcaacttttatgcctaaaccgctatcaaacgacaatggctcaggtatgcactgtcaccaaagtatttggtcaaatggtaagccaatattttatgcagatagcgggtatgctaacttaagtgatgaagctaagttttatattggcggattactaaaacatgcaccctcattattagcatttacaaatccaacaataaattcatttaaaagactagttccaggttatgaggcaccagtaaaattggcatactcaaatagaaacagaagtgctatttgtagaattcctgcttactctccttcgcctaaagctaagagagtagaatttagatgtcctgatgcaacagctaacccgtacttagctttttcagctat

SEQ ID NO: 311021 - DNA, 883 bp, Unknown
  Bacterial polypeptide expressing nucleotide sequence isolated from the Sargasso Sea
cgattggtctttcgatggatcatcaacccaacaagccgatggctcaagctctgactgtattattaggcctgtaaacgaatatgttggaccgagaaattctgacagcttggtcatgtgcgaagtcttgtcgccagataggtctgcacacccatcaaatacaagaagcgcttgtgttgatattcttacagatgattggtggtttggttttgaacaagaatatttcttcacaaaccctgaagacggaacaatacttggttgggaagacggaacgccaagaccacaaggggactattattgtggcgtagggtctggcaatgtccaagcacgcgaagtttcggaagcacatatggacgcttgtcttgaggcaggcattatgatcaccgggactaacgcagaagtagctcttggccagtgggaatatcaatgtttcggtaagggccttaaggcagcagatgatttatgggtgagtagataccttcttcatttgattgcagaggagtacggagtgtctgtaaatattcatcccaaacctcaagagggcgactggaatggctcgggaatgcacactaatttttcgaatgaacaaatgagaagcgcgggctcggaagagctatttaattccatgtgtgaaaaactgggcgaggttcatgcagaagggattgccaattacggctcagacaatgaaaagaggctgaccggtaatcatgaaactcaaagcattgacactttttcgtatggcgtcagcgacagaggggcaagcatcagaatacccatctatacagttgaaaacgactggaatggctatttagaggatagaagacccgcttccaatgcagacccatataaaattatttcgcacattgttggtacgctgacacaataa

SEQ ID NO: 311022 - DNA, 745 bp, Unknown
  Bacterial polypeptide expressing nucleotide sequence isolated from the Sargasso Sea
ggtattttatttgatactcttgtaaaccaagctgacaatattcagctttataagtatgtagttcacatggtatcgaattcgtttggtaagactgcaacatttatgccaaaaccggttaagggtgataatggctccggaatgcacactcaccaatcaatttggaaatctgagtctcctattttttctggagataaatattctggattgtctgagatagctctacattatattggtggtattttaaaacatgctaaggcgataaatgctttttcaaatgctacaacaaatagttataaaagattaattccaggatttgaagctcctgtattacttgcttactcagcaagaaatagatctgcttcatgtagaattcctataacattaaataaaaaaggagctagatgtgaaattagattccctgatgcttctggtaacccctatttaactttttccgcaatgttaatggctggtttggatggtattaaaaacaaaattgatccgggaaaatcacttgataaagatttgtatgcgttgtctgaaaatgaaataaaaaatattcctacagtttgtggatcattaagagaggcaatggaaagcctggatacagatagagattttctaaaacaaggaaaagttttcaccgatgatcaaattgatgcatatattgcattaaaatttgaagaaattcataattttgaacatactcctcacccgattgaatttgatatgtattatagctgctaag

SEQ ID NO: 311023 - DNA, 820 bp, Unknown
  Bacterial polypeptide expressing nucleotide sequence isolated from the Sargasso Sea
agggatgtgtttgaagaaggtatcggtttcgacggctcatctataagatgttttcagtcaattgaagcaagtgatatgatattaattccagatatagaaactgcatttgtagatccattctttacagatcctacactcgttctgatttgtgacattcaagatccaatcacaggacaaaagtatgacaaagatccaagatatgttgcaaaaaaagcagaggattttgtaaaaagctccggtattggtgacagtatattttttggtgcagaagcagaattttttctttttaatgacgttagaatatcaaccgatccaagtaactcatttttctcagtagactcaggagaagctatttggaataaaggctctgatgaaagacctaacttaggttatcatgtaagaaataaagggggttacttcccctgtccgcctcatgacacgatgcaagatgtaaggtccgaaatggttaatcatatggtatcaattggaatgaatgtggaagctcaacaccatgaagttgctaccgctggacaacaagaaattgatttaaggtttgatacattactttcccatgctgatgaccttcaaaagtataaatatgttgtaagaaatactgcaaaaagcaatggtctgagtgcaacttttatgcctaaaccgctatcaaacgacaatggttcaggtatgcactgtcaccaaagtatttggtcaaatggtaagccaatattttatgcagatagtggatatgctaacttaagtgatgaagcgaagttttatattggtggattactaaaacatgcaccgtcattactggcatttacaa

SEQ ID NO: 311024 - DNA, 535 bp, Unknown
  Bacterial polypeptide expressing nucleotide sequence isolated from the Sargasso Sea
atacagcattacactacatttggaggaatattaaaacacgctagagcgataaatgctttcgctaatgcaacaacgaacagttataaaagattaataccaggttttgaagcacctgtattattagcgtactctgcaagaaacagatctgcgtcgtgtagaattccaattacacaaaataaaaaagctgcaagatgtgaggttcgtttccctgatgcagctggaaacccttatttaacattttcagcattattaatggctggacttgacggaattaaaaataaaattgatccaggtaaatctttagataaagatttgtatgcattaagtgaatctgaagttaaaaaaattccaacagtttgcggctctttaagagaagctatggagagcttagacaaagatagaaaatttttaacacagggtaacgtttttactgacgatcaaatagatgcttacatcgctcttaaatatgaagaaatttacaattttgagcacactccacatccaatggaatttcaaatgtattatagctgttaga

SEQ ID NO: 311025 - DNA, 909 bp, Unknown
  Bacterial polypeptide expressing nucleotide sequence isolated from the Sargasso Sea
tagcattagaggatttcaaactattgatgaatccgatatgctcttagttccagatgcctctactgcaaaggttgacccattttacaaagggcaagtcactattattgcagatatacgagatccattgactggagaggattacactagggacccaaggaatatagctaagaaagctgaagcttatcttaagactacaggggtcggagatggttcattctggggaccagaagtggaatttttcgtatttgattctgtacagtttagctatggggcaaatcatggatttcatcacatcgattcagacgaaggcatatggaactcaggtgctgataccatgcttgatggtacgactttaaacaaaggcgcgagaccgactcataaaggtggatactttccagctcctcccgcagatactcagcaagaaatgcggagcgagatggtcagaactttaataagcgcttttggtattgcagttgaaaaacaacatcatgaagttgctacagctggtcaaggggagatcgatatcgtattcgatgaactattaaaaacagctgataatgtaatggcatataagtatgtaatcaaaaacgtcgcaaaagaattcggcaaagttgcgacttttatgccgaagcctattttcgaggataatggtactggcatgcatactcaccagtctatctggaaagatggagtgcctttgtttgcaggtgatgaatatgcaggattatctaaattagcacttaattatattggtggattaataaagcatggaaaagcgttgatggctcttgctgctccaactaccaattcatacaagagattgaccccggggtttgaggctccaactattctcgcattatcagcaagaaataggtccgctgcatgtagaattcccatgtattctcaaag

SEQ ID NO: 311026 - DNA, 926 bp, Unknown
  Bacterial polypeptide expressing nucleotide sequence isolated from the Sargasso Sea
tttaaggtttactgaccctagaggaaaaatgcaacatgtttctcaacatgttagcactattgatgaagaaagtttagcagaaggatttatgttcgatggttcttccattgcaggatggaaagcaataaatgaatcagatatgaaattaatgccagattgttctagatcaataattgatcctttttactcacaaccaacattagcccttttttgcgatgttttagacccaatatctggcgattcatatgaaagagacccaagatctacagcaaaacaagcattagattatatggcgaaacaaggtattggggatacagctttttttggtccagagcctgagttttttgtatttgatgatgtaaaatttgaaaatgaaatgaattcatctttttattctattgaccattcagaaggtccttacaattcaggaaaagattttgaagaaggtaacatgggtcataggccaggtataaagggaggatatttccctgtaccacccgtagattcaggtcaagacctaagaagtgaaatggttttatcattaaccgaaatgggagtgcctatggaaaagcatcaccatgaagtagcaccttctcaacatgaattgggaataaaatttggtacacttatagagacggctgataatgtacaactttataaatatgctgttcataatgtagctaactcttttggacaaacagctacttttatgccaaaacctgtggcgggtgataatgggacagggatgcatactcatcaatcaatctggaaagatggtaaccccgtattcgcaggtgataaatattctggcttatctgaaacatgtttgcattatattggaggcataatcaaacatgcaaaggcaattaactgttttactaacccctccacgaactcatataaaagattaattcccaggttttgaa

SEQ ID NO: 311027 - DNA, 821 bp, Unknown
  Bacterial polypeptide expressing nucleotide sequence isolated from the Sargasso Sea
tggacccgaagcggaattctttgtatttaatgatgttaaatatgattcaagttcaaattttgcttttcatgaagtagattcaattgaaggtgcatggaacaccggtagagatgaaaaccctaacttaggccataaacctagacataaaggaggatattttccattaccacctgcagatagtttgcaagatgtaagaactgaaatggtgttaactatggaagaaataggagttaacgtagaagcatcgcatcatgaggtggctactggaggacagtgtgaaattgatttagaattttctcccctactatcaatggctgacgaccttttgaaatacaaatatgttgtaaaaaatgtagcaaagcaacacggtatgacagctacttttatgcctaagccactatttgaagacaatggctcaggtatgcacgttcattcaagtatttggaaaaaaaataagacactaatgtataaaaaaggtaattatgcagacctaagtgattttgcattatattatattggaggaattttaaaacatgctccgtcattattagctttttgtgcaccaacaacaaattcttacaagcgtttaacgccaggttttgaagcgccagttaatatagcatactcccaagctaatagaacagcttctgtaaggatacctaataattatacatcaaatccaaaggctaaaaggatagaatttagatgtccagatccttcttcaaatccctatttagcattttctgcgattttaatggcgggtttagatggtgtaaaaaataaaattaaccctgggaagcctactgacattaatatttatg

SEQ ID NO: 311028 - DNA, 895 bp, Unknown
  Bacterial polypeptide expressing nucleotide sequence isolated from the Sargasso Sea
gttttgtgatatcttagatgcaataaaaaaagatccttatgaaagagatccaagaggtgttgctaaaaaagctgaggaatacttaaaagcttcaggtataggtgacaaagcgttctttggtccagagcctgaattttttgtatttgacgatgtaagaattaaaaacgatatgaatgagtgtggatttaaaattgatagtaaagaaggtccatataattccggaaaagaatatgaaagtggaaatatggggcacagacctccaattaaaggtggatattttccagtacctccagttgatagtgaacaagatatgcgaggtgaatatttgaaaaatttaaaagaagttggaattaaagttgagaaacaccaccacgaagttgctccaagtcagcatgaacttggtatgtattttggaactttagtaaatcaagcagataatgttcaattgtacaaatatgttgttcaaatggtaactcactcatttggaaaaactgctacttttatgccaaagccagttgcaggtgataatggttctggtatgcacattcaccaatccatttggaagggtgatactccagtgttttctggtgatgcttatgcaggcttatctgaaacggctttacattatattggtggaattttaaaacatgctaaagctattaatgcttttgctaactctactacaaatagttataaaagattaataccaggctttgaggctccagtattacttgcatactctgcaagaaatagatcagcttcatgtagaattcctattaccttaagtaaaaaaggagcaagatgtgaaattaggtttccagatgcatccggtaatccatatttaacatttgctgctatgcttatggctggtattgatggaattaaaaataaaatt

SEQ ID NO: 311029 - DNA, 672 bp, Unknown
  Bacterial polypeptide expressing nucleotide sequence isolated from the Sargasso Sea
actgggaaaagaatatgagaatggaaatatgggtcacagaccaggagtaaagggtggttatttccctgttcctccagtcgatagtgagcaagatatgagaagtgaataccttaaagctatgagagatatgggtattaaggttgaaaaacaccatcatgaggttgcacctagtcagcatgaattaggaatgtattttggaactcttgtagatcaagcggacaatttacaactttataaatatgctgttcatatggtttctcattcttttggaaaaactgcaacctttatgcctaagcctgtaaaaggagataatggttctggtatgcatgtgcatcaatctatttggaaaggtgataaggctttattttcaggtgataaatatgcaggtctatcagatacagcacttcactatataggtggtattttaaaacatgcgaaagccatcaatgctttttcaaatgcaacaactaacagttataaaagacttataccaggttttgaagctccagtattgttagcctattcagcaagaaatagatcagcttcgtgtagaattcctattacgttaagtaaaaaagctgcaagatgtgaaataagattcggtgatgctgctggaaacccatatttgacatttgcgtctatgctaatggctggtttggatggtataaaaaa

SEQ ID NO: 311030 - DNA, 763 bp, Unknown
  Bacterial polypeptide expressing nucleotide sequence isolated from the Sargasso Sea
aatgagttcaaataaaattttaaagttaattaaagataaagaaatagaatacgtagatcttagatttaccgatcctagaggaaaacttcaacatttaaccatggattgcaagatggttgatgaagaaatgttaaatgatggagttttttttgatggatcttcaatagctggatggaaggctattaatgaatctgacatgatattaaagcccgatttggctagacaagttgtagacccttttacttcacataatacattaatattgttctgtgatgttttagatgctgtaaaaaaagatccatatgaaagagatcctagaagtattgcaaaaaaggctgaagcatatttaaaaaaaacaggaattggagacaaagcgtactttggaccagaagcagaattttttgtatttgatgatgtaaaatttaaaaatgatatgaatgagacaggatttaaaatcgacagctctgaaggaccttataatacggggaaggattaccaaaatggcaatatgggacataggccaggaattaaaggtggttacttccctgttcccccagttgatagcgctcaagatatgaggggagaatttttaaaagctttaaaagatatgggaattaaagttgaaaaacaccaccatgaagtagcgccaagtcaacatgagcttggtatgtattttggaaccctaactgaacaagcagataatatgcaactttacaaatatggtgttcaaaatggtagctcattctttggaaagacagcaaca

SEQ ID NO: 311031 - DNA, 952 bp, Unknown
  Bacterial polypeptide expressing nucleotide sequence isolated from the Sargasso Sea
gatagtaaagaaggtccatataactcaggtaaagaatacgataatggaaatatgggtcatagacctccaattaaaggaggatattttccagttcctccggttgatagtgagcaagatatgcgtggagaatatcttaagaatttaaaagaagttggaattaaagttgaaaaacatcatcatgaagttgcgcctagtcagcatgagcttggtatgtattttggtacgttagtaactcaagctgataacgttcagctttacaaatatgttgttcaaatggttacacattcttttggaaaaacagctacatttatgccaaaacctgtagcaggagataatggttcaggtatgcatattcaccaatctatatggaaaggtgataagccagttttttctggtgatgcatatgcaggtttatctgaaactgcacttcattatattgggggaattttaaaacatgcaaaagcaataaatgcatttgcaaattcaacaacaaatagttacaaaagactaattcccggttttgaggctccagttttgttagcttactcagctagaaatagatcggcatcttgtagaattcctataactttaagtaaaaaaggtgctagatgtgaaattagatttcctgatgctgctggaaatccttatttaacatttgcagcaatgttaatggcaggcttagatgggataaaaaataaaatacatccaggtgagtcatttgataaagatttatatgatttacctgcagatgaggtaaaatctattcccactgtatgtggatctttaagagaggctatggaaagcttggataaggatagagagttcttaactcaaggtggtgtatttactgatgatcaaatagatgcttatattgctcttaagtttgaagaaattcacaagttcgaacacgcacctcatccagtagaatttgagatgtattacagtagttaat

SEQ ID NO: 311032 - DNA, 774 bp, Unknown
  Bacterial polypeptide expressing nucleotide sequence isolated from the Sargasso Sea
cagcaggtcaaggtgaaattgatttgaggtacgatactatgctttcaatggctgacaaagttatgaggtataaatatgttgttaagaatgttgcacaagatcacggcaaagttgctacatttatgccaaagccaatttataacgacaatggtacaggtatgcatactcaccaaagtatatggaaagacggaaaacctttatttgccggaaatgaatatgctggattaagtaaattagcattgaattatattggtggattaattaaacacggacaagctcttatgggcttgtgtgcgccaacttcaaatagctacaagaggcttgttcctggtttcgaggcacctacaatattaggtctttcagccagaaatagaagtgcagcattcagagtgccaatgtatgatccagacaataaggcagctaaaagaattgagtttagatctgcagatccaacttgtaatccttatttagctttccctgcaatgttaatggcgggtcttgatggtatagaaaatgaaattgaccctggtgatgtactagacgatgatcttttcagtatgcctgaagaagaacaagcaaaattaaaacaagttccaaatagcattgaaggtgcattaaatgcgcttgaagaggaccatgaatttttgcttaagggaaatgtctttactagtgatctgctagaagcttggctttcatataaaagagagacggaagtggatcaagtaagaactcgacctcacccatgggaatactacctgacttttaatgcttaga

SEQ ID NO: 311033 - DNA, 624 bp, Unknown
  Bacterial polypeptide expressing nucleotide sequence isolated from the Sargasso Sea
tttaaaatagatagtacagaaggtccatataacaccggaaaagattatccaaatggtaacatggggcatagacctggtgttaagggtggatactttcctgtgcctccagttgatagtgcacaagatatgcgtagtgaatatttaaaagctatgaaagatatgggaataaaagttgaaaaacatcaccacgaggtagcacctagtcaacacgaacttggaatgtattttggaactttagtagaccaagcagataatttgcaattatacaaatatgctgttcatatggtttctcattcatttggtaaaacagctacgtttatgcctaagcctgttaaaggcgataatggatcagggatgcatgttcaccaatcaatatggaaaggtgataaagcactattctctggtgataagtatgcaggcttatcggaaatagcactaaattacattggtggaattttaaaacacgcaaaagcaataaatgcattttctaacgcgacaactaacagctacaaaaggttaatacctggttttgaagcgccggttcttttagcatattcagctaggaatagatctgcttcttgtagaatacctattaccttgagtaaaaaagctgcaagatgtgaa

SEQ ID NO: 311034 - DNA, 888 bp, Unknown
  Bacterial polypeptide expressing nucleotide sequence isolated from the Sargasso Sea
aaagcggaagcttatttaaaaaaaactggtgtaggagataaagcttacttcggaccagaacctgaattttttgtttttgatgatgtaagatattcgaacgatatgaatcatacaggatttcaaatcgatagttccgaaggtccttataatacgggaaaaaaatacgaaaacggaaacatgggtcaccgtcctggaattaaaggtggttacttcccagtgccacccgttgatagtgcacaagatatgagaagcgaatatctaaaagctatgagagatatgggaattaaagttgaaaaacatcaccatgaagttgctccgagccaacatgagcttggaatgtattttgggacattagttgatcaagcagataaccttcaactttataagtacgcggtacacatggttacacattcatttggtaagacagcaacttttatgcctaaaccagtaaaaggagataatggttctggaatgcactgccaccaatcaatatggaaaggaagtacagcagtattttctgggaataaatatgcaggtttatctgataccgcattacactacattggaggaatattaaaacatgctagagcgattaacgctttctctaatgcaacgacgaatagttataaaagactaataccaggctttgaagctccagtattattagcttactcagcaagaaacagatcggcgtcatgcagaattccaattacacaaagtaaaaaagctgcaagatgtgaagttcgtttccctgatgcagctggaaacccttacttaacattttctgcattattaatggctgggcttgatggaataaaaaataaaatcgatccaggtaaatctttagataaagatttatatgcattgagtgaatctgaagtaaaaaaa

SEQ ID NO: 311035 - DNA, 684 bp, Unknown
  Bacterial polypeptide expressing nucleotide sequence isolated from the Sargasso Sea
aatgagctctgaaaaaattattaagctaataaaagataaggaaatagaatatttagatctaagatttacagatcctagaggaaaactacaacatctaactatggatggaaaactagttgatgaagcaatgttaaatgatggagtttttttcgatggttcttctatagccggctggaaagctattaatgaatctgacatgattctaaaaccagatcttaaaagacaagttatagatccatttacttctcacaatacacttgttctattttgtgatattttagatgctgtcaaaaaaaatccttacgaaagagatcctcgaagtatagctaaaaaagctgaagcttatttaaaaaaaacaggtattggagataaagcctattttggacctgaagcagaattttttgtttttgacgatgtaagatatacaaatgaaatgaaccacactggatttcaaatcgacagctctgaaggtccttacaacacaggaaaaaaatatgaaaatggaaatatgggtcaccgtccaggaattaaaggaggttattttccagttcctcctgtagacagcgctcaagatatgagaggagaatttttaaaagcactcagagatatgggtatcaaaacagaaaagcatcatcatgaagttgctccaagccaacatgaactaggaatgtattttgatacttt

SEQ ID NO: 311036 - DNA, 569 bp, Unknown
  Bacterial polypeptide expressing nucleotide sequence isolated from the Sargasso Sea
aaaagggaattatgcggatttgagtgattttgctttgcattatattggtggaattttaaaacatgctccttcactcttagctttttgcgcacctacaaccaattcctacaaaaggttggttcctggatttgaagcacctgtaaacatagcctattctcaagctaatagaactgcttctgtgagaattccgaataactatactgcaagccctaaagcaaaaagagttgagtttagatgtcctgatccctcttcaaatccctatttagcattttcagcaatattaatggctggtttagatggagttaaaaataaaattaaccccggcaaacctactgacataaatatttatgaagcgcctgcaagtattcttgcaaaaataccttctacacctggctctcttgcagagtctttaaatgcgctagagaaagatcataaatatttattagctggagatgtgtttactaaggataatatcgaaacttatatttcttacaaaagagaaaatgaggtgagcccaatggatataagaccacatccacatgaatttaatctttattatgatgtttaag

SEQ ID NO: 311037 - DNA, 680 bp, Unknown
  Bacterial polypeptide expressing nucleotide sequence isolated from the Sargasso Sea
tatgagtgctagttcagtacttaaggtaatgaatgataaagagatcgaatacgtagatcttagatttactgatccaagaggaaaacttcaacacgtcacaatggattcaaaggttgtcgatgacagtatgttgaatgatggagttttctttgatggctcatcgattgctggttggaaagcaattaatgaatctgacatgattcttaaaccagatttatcaagaacagttgtagatccttttacatcacacaatacactaaatatattttgtgacattttagatgctgtgaaaaaagatccttatgaaagagaccctaggacaactgctaaaaaagctgaggactatttaaaaaaatcaggtataggcgataaagcttactttggaccagaaccagaattttttgtatttgatgatgttagatataaaaacgatatgaatgaaacaagtttttcaattgatagttcggaaggtccttataacactggaaaaaaatacgaaaatggaaatatgggacatcgtccaggtatcaaaggtggatatttcccggttcctccggttgatagtgctcaagatatgagaagcgaatatcttaaagcaatgaaggatatgggaattaaagtagaaaaacatcaccacgaagttgctccaagccaacatgagcttggaatgtattttaaca

SEQ ID NO: 311038 - DNA, 730 bp, Unknown
  Bacterial polypeptide expressing nucleotide sequence isolated from the Sargasso Sea
atgagcgcaaaaaatatacaaaaaactattaaagataaacaaatagaatacgtagatttaagatttactgatccacgaggaaaacttcaacatgtaactatggatgcaaaagtggtggataacgacatgctagaagaaggaattttttttgacggttcctcaatagcaggttggaaagccataaatgagtctgatatgatattgaaaccagatctatcaagaccagtaatagacccatttacttctcataacacacttaatattttttgtgacgttttggatgcagtcaaaaaagatccatatgaaagagatcctagaggaacagcaaagaaagctgaagattatttaaaaaaaactaaaattggagacaaagcattttttggacccgaaccagaattttttgtatttgatgatgttagatataaaaatgatatgaatgagacaggcttctcgattgatagcaccgagggtccttacaatactggaaaaaaatatgaaaatggcaatatgggtcatagacctggtgtgaaaggtggatacttcccagtacctccagtcgatagtgctcaagatatgagaagtgaatatttgaaagctatgaaagatatgggaattaaagttgaaaaacatcatcatgaggtagctccaagtcaacacgaattgggtatgtattttggaactttagttaatcaagcagataacatacaactttataaatacgcagtacaca

SEQ ID NO: 311039 - DNA, 418 bp, Unknown
  Bacterial polypeptide expressing nucleotide sequence isolated from the Sargasso Sea
aatgagcgcagcaaatgttttaaaatttattaaagaaaaagaagcagagtttgtagacctaagatttaccgacccaagaggtaaacttcaacatttaactatggatgtaacagttgttgatgaagatatgcttaataatggagttttttttgacggttcgtctattgcaggatggaaagcaattaatgaatctgacatgattttaaaaccagatacttcaagaatgttcatggatcctttcacttctcataatactgtagttttattttgtgatattttggatgctattaaaaaagatccttatgaaagagatccaagaggagttgcgaaaaaagctgaagaatatttaaaggcttcaggtattggtgataaagctttttttggtccagagcctgaattttttgtttttgatgatgta

SEQ ID NO: 311040 - DNA, 828 bp, Unknown
  Bacterial polypeptide expressing nucleotide sequence isolated from the Sargasso Sea
atagtacagaaggtccatataattctggaaaaaaatatgaaaatggcaacatgggtcatagaccagttgttaaaggtggatacttccctgttcctcctgttgatagcgctcaagacatgagaggtgaatttttaaaaggtttgagagatgttggtattacagttgaaaaacatcaccacgaagttgctccaagtcaacatgaattaggaatgttatttggtacgttagttaaccaagcggataacgtccagttatataaatatgtagtacagatggttgcccattcatttggcaaaacagctactttcatgccaaaacctgtaaagggggataatggttctggaatgcatactcaccaatcaatttggaaaggtgatactcctgtattttctggagataagtactctggattatcagaaacagcactacattatattggtggaattttaaaacatgcaaaagcaattaatgctttttcaaatgctactacaaatagttacaaaagattaataccaggatttgaggctcctgttcttttagcatattctgcaagaaacagatctgcatcatgtagaatcccgattacattaagtaaaaagggtgcaagatgtgaaataagatttccagatgcagcaggaaacccatatttgactttttccgctatgctaatggctggtttagatggaattaaaaataaaattcatccaggtgagtcttttgataaagatctttatactttaccagaagaggaaattaaaaatattccaactgtgtgtggttcgcttagagaagcaatggaaagcctagatacagatagagagttttgaa

SEQ ID NO: 311041 - DNA, 643 bp, Unknown
  Bacterial polypeptide expressing nucleotide sequence isolated from the Sargasso Sea
atgccgaaaccaatcgcaggtgacaatggcaccggcatgcattgcaatatgtcgatttggaaggatgggaagcccctttttgctggagataagtatgctgacctatctgacgaggcattatggtttatcggtggtattttgaaacatgccaagtccctgaacgcatttaccaatccatcaaccaactcctacaaaagacttataccaggcttcgaggcgcccgttttaagagcttactcagcacgaaacagatcaggatgtgtacgtattccatggactgagtcgccaaaagcgaaaagagtggaagctcggtttccagatccgtcctccaatccatatttgtgcttttctgctttaatgatggctggacttgacggtataaagaacaaaattgaccctggcgaagcaatggacaaaaacctgtatgaccttccagcagaggagcttgctgatattccaacagtttgtggaagccttcgagaagcaattgagtgccttgaagctgatcatgagtatttactcgctggagacgtttttaccaaagaccaaattgagggctacattgaactcaaaatggaagaaattgagacctatgaacatacacctcatccagttgaatatgggatgtattacagctgctaaa

SEQ ID NO: 311042 - DNA, 643 bp, Unknown
  Bacterial polypeptide expressing nucleotide sequence isolated from the Sargasso Sea
atgagcgctaaggacgtactaaaattaatgaagtctaagaatattgagtttgttgatcttagatttacagacccaaggggtaaacttcaacatttaacaatggatacaactatcgtagatgaaggaatgctaaacgaaggtgtattttttgatggatcgtcaattgcaggatggaaagcaattaatgagtctgacatgatattaaaacctgatttaagtagaaaagttatagatccttatacatctcataatactttaattttattttgcgatattttagatgcagttaagagagatccctatgaaagagatccaagaggaattgcaaaaaaagctgaagcatatttaaagaaaacaggaattggtgatacagcatactttggtccagagcctgagttttttgtttttgatgacgtcagaattaaaaacgacatgaatgaaacaagtttttcaattgatagttcagaaggtccatataattcaggaaaatcttacgagaatggaaacatgggtcatagacctggagtaaaaggagggtattttcctgtgccaccagtagatagtgctcaagatatgagaggtgaatatcttaaaggactaagagatgttggaattactgtagaaaaacaccaccatgaagtgc

SEQ ID NO: 311043 - DNA, 547 bp, Unknown
  Bacterial polypeptide expressing nucleotide sequence isolated from the Sargasso Sea
tctggcttatcacaaacagctttatattatattggtggtattttaaaacatgctaaagctattaatgctttttctaatgcaacaaccaatagttacaaaagattaataccaggttttgaagcacctgttttgttagcttattcagcaagaaacagatcagcatcatgcagaatccctattactttaagtaaaaaaggggcaagatgtgaaattagatttcctgatgcagctggtaatccgtatttaacttttgctgctatgttaatggcaggacttgacggtattaagaaaaaaattaatccaggtaaatctttcgataaagatctttacacattgtcagaaaatgaaatcaaaaatataccaactgtttgtggttctttaagagaagctatggaaagcttagatacagacagagactttttaaaacaaggaaatgtatttactgacgatcaaattgatgcttatatcgctcttaaatttgaggaaatttacaatttagaacatactcctcacccaatagagtttgatatgtattacagcagttaat

SEQ ID NO: 311044 - DNA, 826 bp, Unknown
  Bacterial polypeptide expressing nucleotide sequence isolated from the Sargasso Sea
ggtccttacaattcaggaagaaaatatgaaaatggaaatatgggacatagacctggaataaaaggtggttattttcctgtacctcctgttgatagtgcacaggacatgagaggtgaatatttaaaaggtttaaaagatgtaggtatcactgtcgaaaaacatcatcatgaagtagctcctagtcaacatgaacttggaatgttatttagcactctcgttaatcaagcagataacgtccaactatataagtatgttgttcaaatggtatcacattcctttggtaaaaccgcaacttttatgcctaaacctgttaaaggagataatggttctggtatgcatacacaccaatctatttggaagggaaagaccccagttttttctggaaacaaatatgctggcttatcgcaaacagctctttattacattggtggaatattaaagcatgcaaaagcaattaatgctttttctaatgcaacaactaatagttacaaaagattaatacctggttttgaagctccagtattgttagcatattctgctagaaatagatctgcttcttgcagaatccctattactttaagtaaaaaaggtgcaagatgtgaaataagatttcctgatgcttctggtaacccttatttgactttctcggcaatgttaatggcgggtctagatggaataaaaaataaaatcgatccaggaaaatctttagataaagatttatatgcattaacagaaaatgaagttaaaaaagttccaactgtttgtggctctcttagagaagctatggaaagtcttgatagagatagagcttttttaaaaaaaggca

SEQ ID NO: 311045 - DNA, 451 bp, Unknown
  Bacterial polypeptide expressing nucleotide sequence isolated from the Sargasso Sea
tatgtctaagtctccacaagatgttttaagtcaaattaaagatgaaggaattgaactcatcgatttaaaattcacagacatccatggtaaatggcaacatttaactcttacatcagacatgattgaagaggattcattcacggaaggtctagcatttgatggttcatcaataagaggttggaaagcaattaatgcctccgatatgtcaatggttcctgatgcaagtacagcatggatagatcctttttataaacataaaactctgagtatgatctgctctatccaggagcctagaagtggtgaaccctatgatagatgtcctagatctttagctcaaaaggctttgaaatacttggaatctactgggattgctgatacagcattttttggaccggaaccagaattcttcctatttgatgacgtgagatacgactctaaagaaggttcctgc

SEQ ID NO: 311046 - DNA, 874 bp, Unknown
  Bacterial polypeptide expressing nucleotide sequence isolated from the Sargasso Sea
ttaaaaaaatctggtgttggcgatactgcttattttggccctgaaccagaattttttgtttttgatgacgtaaaatataacaatgacatgaataaaacaggttttgaaattgatagcatcgagggcccatataacactggaaaaaaatatgaaaatggaaacatgggacacagacctggtgtaaaaggtgggtactttccggtcccccccgttgatagttctcaagatttaagatctgaatgtttgaaagccatgaaggatatgggtgtaaaggtcgaaaagcaccatcacgaagttgctccaagccaacacgagcttggaactttatttaatactctaacttaccaaggagatgggatgcaaatttataaatatgcagttcaaaatgttgctcaatcttttggtaaatctgcaacgtttatgcctaagcccgtgaaaggtgataatggttcggggatgcatactcatcaatcaatatggaaagatggaaagccattatttgcaggaaaaaaatatgctggtttatctgatcaatgtttgcattatattggtggtattattaagcatgcgagagcgattaatgctttctccaacgctacaacaaacagttataagagattgatacctggctttgaagctcctgtattattagtttactcatcaagaaatagatcggcgagctgtagaataccttttagcaccagcgaaaaaggcaaaagagttgaggtaagatttccagatgcagctggaaatccatacttaacattctcagctatgttaatggcaggattagatggaataaaaaacaaaattaatcctggtgatgcgttagataaagatttgtacgctttaccagagaatgaattgagcggaa

SEQ ID NO: 311047 - DNA, 664 bp, Unknown
  Bacterial polypeptide expressing nucleotide sequence isolated from the Sargasso Sea
atgttcgacggctcctccatccatggctggaaaggcatcgaagcctccgacatgatcctgatgccggtcgacgaaaccgccgtgctggatccgttcaccgaagagccgaccctgatcctggtctgcgacatcgtcgagccgagcaccatgcagggctacgatcgcgatccgcgctccatcgccaagcgcgccgaagagttcctgaaaggcaccggcatcggtgacaccgtattcgtcggcccggagccggagttcttcatcttcgaccaggtcaagttcaagtcggacatctccggctcgatgttcaagatctactccgagcagggctcctggatgaccgaccaggacgtcgaaggcggcaacaagggccaccgcccggccgtcaagggcggctacttcccggttccgccgtgcgatcacgaccacgaaatccgtaccgccatgtgcaacgccatggaagaaatgggcctggtcgtcgaggttcaccaccacgaggtggcgactgccggtcagaacgagatcggcgtgaagttcaacaccctggttgccaaggctgacgaagttcagaccctgaagtactgcgtacacaacgtcgccgacgcctatggcaagaccgcgaccttcatgccgaagccgctgtatggcgacaacggttcgggtatgc

SEQ ID NO: 311048 - DNA, 634 bp, Unknown
  Bacterial polypeptide expressing nucleotide sequence isolated from the Sargasso Sea
catcaggctaccccgctcctcaaggaggaactactgtggtgttggctctgatgaagtatatggaagatcaatatctgaagatcatgctactgcttgcatggaagctggtctaaatatttctggaacaaatgcagaagttatgcctggacaatgggaattccaaattggacctgttggtgctccaaatattggagatgaaatttggattgctagatggttactttatagaatcgctgaagattataatatttctgcaactcttacacctaaacctgtgaaaggtgattggaatggagctggtatgcatactaatttctcaacaaaacaaatgagagaagatgatggatactcagcaataattgcaggttgcgaagcattagaaaaaaatgcagaatttcacgtacaaaattatggagatggaattgaagatcgtttaactggagcccatgaaacacagaaatttgacactttttcgtatggagttagcgacagaggagcatctattagaattccatggcaagtcgaaaaagatcaaaaaggttatctagaagacagaaggccaaacgcaaatgctgatccatacgtaattgccactgtaatgatagatacgatttgttctgccgcttcagcctag

SEQ ID NO: 311049 - DNA, 592 bp, Unknown
  Bacterial polypeptide expressing nucleotide sequence isolated from the Sargasso Sea
tatgagttcaagtgaagttttaaaattgatgaaagataaagaagttgaatatgtagatcttaggtttactgatcctcgtggaaaactccaacatttaactatggatgccaaaatggttgacaaagatatgttaaatgatggtgttttttttgatggttcatcaatcgctggttggaaagctataaatgaatcggatatgatactaaaaccagatcttgatagaaaagttatagatccttttacttcccataatacattaattttattttgcgatgttttagatgcggtaaaaaagacaccttatgaaagagatccaagaagtatagcaaaaaaggcggaagtttatctaaaaaaatcaggtataggtgacaaagcctacttcggtccagaagcagaattctttgtatttgatgatgttaaatacaaaaatgaaatgaatgaaacgggatttaaaatagacagtattgaaggtccatataatactggaaaagattatccaaatggaaacatgggtcatagaccaggaattaaaggtggttattttccccgtccacctgttgattccgctcaggatatgagaggagaattttaa

SEQ ID NO: 311050 - DNA, 706 bp, Unknown
  Bacterial polypeptide expressing nucleotide sequence isolated from the Sargasso Sea
attaatgattcagacatgattttaaaaccagattatcaaggaacggtagtagatccatttacatcgcataacacgttaaatatattttgtgacattcttgatgcgattaaaaaagatctttacgaaagagatccaagaggtacggcaaaaaaagcagaagaatatttaaagaaaactggtgtgggagataaagcttacttcgggccagaaccagaattttttgtttttgatgatgttagatattcaaacgatatgaatcatacgggatttcaaattgatagttctgaaggtccgtataacactggaaaaaaatatgaaaatggaaatatgggtcacagaccaggtattaaaggtggttatttcccagttccacctgttgatagtgctcaggatatgagaagtgaatatttaaaagcaatgaaggatatgggaattaaagttgaaaaacatcaccatgaagttgctcccagccaacatgagcttggaatgtattttggaacattagttgatcaagcagataatcttcaactttataagtacgctgtgcacatggttacacactctttcggtaagacggcaacttttatgcctaaaccagttaaaggtgataatggttctggtatgcactgtcaccagtcaatatggaaaggaagtactgcagtattttctggaaataaatatgctggtttatctgatacagcattac

SEQ ID NO: 311051 - DNA, 578 bp, Unknown
  Bacterial polypeptide expressing nucleotide sequence isolated from the Sargasso Sea
aataacagttgaaaaacaccaccatgaagttgccccaagtcaacatgagcttggaatgatgtttggaactttagttgatcaagcagataatgttcaattatataaatatgttgttcaaatggtttctcattcatttgggaaaactgcaacttttatgccaaaacctgtaaaaggagataacggttcaggaatgcatactcaccaatcaatttggaaaaacgacactcctattttttcaggtgataaatattctggattgtccgaaactgcacttcattatataggaggtattttaaaacatgctaaagcaattaatgctttttcaaatgctactacaaatagttataaaagattaatacctggttttgaggctcctgtgctattagcatattccgctagaaatagatctgcttcttgtagaattccaattactttaagcaaaaaaggagctagatgcgaaataagatttcctgatgcatcaggaaacccttatttaacttttgcttcaatgcttatggctggactagatggaataaaaaataagattaatccagggaaatcttttgacaaagaccttt

SEQ ID NO: 311052 - DNA, 589 bp, Unknown
  Bacterial polypeptide expressing nucleotide sequence isolated from the Sargasso Sea
tcatttggtcaaaagtggatccctatttgctggtaaagaatatgctggtttatcggatacatgtcttcactacattggtggtataatcaagcatgcgaaggctataaatgccttttccaatgcaacaacaaatagttataaaaggttagttccaggatttgaagctccagttttattagcttattccgctagaaatagatcagcttcttgtagaattccctatgctccctctgctaacggtaaaagagtagaagtaagatttggagatgcatctggaaacccttactttacatttgcagcaatgttaatggccgggattgacggaattaaaaataaaattcaccctggtgacgccacggataaagacctttatgatctacctgaaaaagatttaaaaggtataccaactgtgagttctagtctaagggagtctttagattcattagataaagacagggaatttttaaaagctggaaatgtatttacagatgatttaattgactcttatatatcattaaagatggatgaagttttacaatttgaacatactccacatccagtcgaatttaagatgtattattccgtctag

SEQ ID NO: 311053 - DNA, 904 bp, Unknown
  Bacterial polypeptide expressing nucleotide sequence isolated from the Sargasso Sea
tatggggcacagaccattggttaaaggtggttatttcccagtaccacctgttgatgcacttcaagattgtaggtctgcgatgatcactacccttcatgaagttggtgtccagtgtgaagtacatcatcatgaggtagcaactgcaggacaatgcgagattggtacactgttcaatacacttgtaaaaaaagcagatgaagttcaaaaatataagtatgttgttcaaaatgtagctcacgcttttggtaaaaccgctactttcatgccaaaacctgttgtaggtgacaatggtacaggtatgcatgtacaccagtcactctccaaggatggtaaaaatatctttgctggtgataagtacgggcatatgtctcaggaagcattatggtatattggtggtatcataaaacatgcaagagcattaaatgcttttactaatgcatctactaatagttacaaaagattaatacctggatttgaagctcctgtcattcttacttactcagctagaaatagatcagcttctataagaattccatatgttatgtctgataaagcgagacgtattgaggttagatttccagattcgacagctaatccatatttagcattttctgcgatgatgatggctggccttgatggtatcaaaaataaaatagatccgggtcctgctatggataaggatttatttgctatatcaagagaagaggaagctcttcttccaactgttgcgccaggtcttgatattgcattagatgctttagataaggacagggagtttttaaatacaggggatgtatttacaaatacaatgattgactcatacatcgatttgaaaatggatgaagtgcaaagattaagacaatctacacatccatgtgaaattgagatgtactacagtctgtaa

SEQ ID NO: 311054 - DNA, 490 bp, Unknown
  Bacterial polypeptide expressing nucleotide sequence isolated from the Sargasso Sea
ttagctttttgtgcacctactaccaattcttataaaagattagttccaggatttgaagctccagtaaacattgtttattctcaaagaaacagaactgcttctgtaagaatcccagcgtactcacaaagtcctaaatcaaaaagaatggaatttagatgcccagatccaagtgcaaatccatatttagcattttcagcaatgcttatggctggtttagatggtattaaaaataaaattaatccaggagaaccaacagatatcaatctttatgcggctagtgatgatgtattatctaaaattcaatcaacacctgggtcattagctgagtcgcttgaagctcttgaaaatgaccatgattttcttctagaaggggatgtatttactaaagatgtaattgatacatatattagctataaaaaagaaagtgaggttgatcctataaatattagacctcatccgcatgagtttaaattatactatgacgtttaaa

SEQ ID NO: 311055 - DNA, 925 bp, Unknown
  Bacterial polypeptide expressing nucleotide sequence isolated from the Sargasso Sea
tatgtttgatggatcatctatcgctggttggaaagctattaacgagtctgatatgagcctgatacccgatccactgactggtgtcatggacccattttcagctcaaccatcaatgatactattttgcgatgttcaagaacccactacaggaggaaactacttaagagacccgcgttctatagcaaaaaatgctgaagcatatctggcatcaacaaatattggggatacttcttattttggccctgaaccagaattttttgttttcgatgatgtgcgctataatgtagaaatgagctcttgcttttatgaatttgaatctgaagaaggaccttatacttccggtaatacgatcgatgatggaaacctcggtcatcgtcctactattaaaggcgggtattttcccgttccaccagtagacagcgcttcagatttaagagctgaaatggtcacggtcatgggcgaaatgggcctccatatggataaacatcatcatgaggttgcgccatcacaacacgaactggggctcaccttccagactctggtcaagtgtgcagacaacgttcaaatatataaatatgttactcaaatggtggctcacacatatggaaaaacagctactttcatgccaaaacctgttgcaggagataatggctcaggtatgcatacccaccaatcaatttggaaaaatggaaagccagtatttgctggaaacgaatatgctgatttgtcagacacggctttgcattacattgggggaataattaaacatgcgagagctattaatgcttttagcaacccaacaacaaatagttataagaggctcattcctggatttgaagctccagttttactggcatactcagcccgcaacagatctgcatcgtgcagaattccattttccccctcgccaaatggaaaaagaatt

SEQ ID NO: 311056 - DNA, 709 bp, Unknown
  Bacterial polypeptide expressing nucleotide sequence isolated from the Sargasso Sea
tatgagcgctaaggacgtactaaaattaatgaagtcaaagaacattgagtttgtagatcttagatttacggacccaaggggtaaacttcaacatttaacaatggatacaactatcgtagatgaaggaatgcttaatgacggtgtattttttgatggatcgtcgattgcaggatggaaagcaattaatgaatctgatatgatattaaagcctgatttaagtagaaaagtaatagatccttatacatctcataatactttaattttattttgtgatattttagatgcagttaagagagatccctatgaaagagatccaagaggaattgcaaaaaaagctgaagcatatttaaaaaaaacaggaataggtgatacagcatactttggtccagagcctgaattttttgtttttgatgacgtcagaattaaaaacgatatgaatgaaacaagtttttcaattgatagttcagaaggtccttataactctggaaaatcttatgataatggaaacatgggtcatagacctggagtaaaaggaggatattttcctgtaccaccagtagatagtgcacaagatatgagaggtgaatatcttaaaggactaagagatgttggaattactgtagaaaaacaccaccatgaagttgctccaagtcaacatgaacttggaatgttatttggaactttagtcgatcaagcagataacgtccaa

SEQ ID NO: 311057 - DNA, 526 bp, Unknown
  Bacterial polypeptide expressing nucleotide sequence isolated from the Sargasso Sea
ttacattatattcggtggaatattaaaacatgcaaaagcaattaatgcttttgctaacgctactacaaacagttataaaagattaatacctgggtttgaagctcccgtgcttttagcatattctgcaagaaacagatctgcatcttgtcgtatcccaattactttaagtaaaaaaggtgctagatgtgaaatcagattccctgatgcctcaggaaatccatatttaacttttgctgcaatgttaatggcaggaattgatggtattaaaaataaaattcatccaggtgagtcatttgataaggatttatatgatttaccacctgaagaagttaaatctatacctactgtctgtggatcgttaagagaagctatggaaagtttggataaggacagagaatttttaactcaaggtggtgtatttactgatgatcagattgatgcttatattgcactaaaatttgaagagatacataaatttgagcacgctcctcacccagtggaatttgaaatgtattacagctgttag

SEQ ID NO: 311058 - DNA, 802 bp, Unknown
  Bacterial polypeptide expressing nucleotide sequence isolated from the Sargasso Sea
gaaacgacagtcaacattacttgtgacgtaatcgagcctagcaccatgcaaggttatgagcgttgcccacgctctatcgctaaacgtgccgaagagtacctgaaatcaaccggtatcgctgacactgtattgtttggacctgagccagagtggttcatgtttgatgacgtgcgtttcaaaaacactatgtctacagctttcttcgctatcgactcagctgaagctgcatggaactcagacaaagtatacgaaggcggtaacaaagctcaccgtcctggtatcaaaggcggttacttcccggtaccaccagtagatcaacaccacgatatccgtagcgccatgtgtgtggtgctggaagaaatgggtcaggtcgttgaagctcaccaccacgaagttgcaactgcaggtcagaacgaaatcgcaactcgtttcaataccttaactaaaaaagctgacgaaattcaggtattaaaatacgtgattcacaacgtagctaacctgtacggcaaaactgtaacctttatgccaaaacctctggttggcgataacggttcaggtatgcactgtcaccagtcattagcaaaagacggtgtcaacctgtttgctggtgataaatatgctggtttgtcagaaactgcgctgtactacatcggcggtatcatcaaacatgcgaaagcaatcaatgccttcactaacccttctactaactcgtacaagcgtttagtaccgcatttcgaagctcctgtaatgctggcatactcagcccgtaaccgttcagcttcaatccgtatcccactggtac

SEQ ID NO: 311059 - DNA, 643 bp, Unknown
  Bacterial polypeptide expressing nucleotide sequence isolated from the Sargasso Sea
atgagtgcagcaaacgttttaaaatatattaaagaaaaagatgcagaatttgtagatctaagattcactgatccaagaggaaaacttcaacatttaacaatggatgcttcaatagttgatgaaggtatgttgaatgaaggtgttttttttgatggttcatctatcgcaggatggaaagcaattaatgagtctgacatgattttaaaaccagatacagcaagaatgttcatggacccttttacgtctcataatactgtagttttgttttgtgatattctagatgcaattaaaaaggatccatatgaaagagatccaagaggtgttgctaaaaaagctgaagaatatttaaaagcttcaggtattggggacaaagcgttttttggacctgagccagaattttttgtttttgatgatgtaagaattaaaaatgatatgaatgaaagtggatttaaaattgacagtaaagaaggtccatacaactcaggtaaagagtatgaaaatggaaacatgggacacagaccacagatcaaaggaggttatttccctgtaccacctgttgatagtgaacaagatatgcgtggtgaatatttaaaaaatttgaaagaagttggtataaaggtgaaaaacatcaccatgaggtgct

SEQ ID NO: 311060 - DNA, 535 bp, Unknown
  Bacterial polypeptide expressing nucleotide sequence isolated from the Sargasso Sea
atgaccgctagcaagattaataaattaataaaagacaaagaaattgaatatgttgatttaaggtttaccgacccgagaggcaagctacagcatttgactatggatgcttcagttgttgatgaagatatgttggatcaaggtgtattttttgatggttcatcaatcgcagggtggaaagcaataaacgagtcagatatgatattaaagcctgacttatctcgaccaattatcgatccatttaattcacatacaacattaaatatcttttgtgatattatggacgcggtaaaaaaggatccttacggaagagacccaagaggaacagctaaaaaagccgaaaattatttaaaagattctggtattggagataaagcttactttgggccagagccagaatttttcgtgtttgacgatgtaagattcaaaaatgatatgaacgaaaccagtttttctattgatagctctgagggcccgtataacactggaaaaaaatatgagaatggtaatttaggccataggccaggaattaaaggtg

SEQ ID NO: 311061 - DNA, 799 bp, Unknown
  Bacterial polypeptide expressing nucleotide sequence isolated from the Sargasso Sea
atgagagacatgggtgttaaagttgaaaaacatcaccatgaagttgcacctagtcaacatgaactaggaacattatttaatactttagttaaccaaggtgatgctatgcaaatttataaatacgcagttcataatgtagctcactcttttggtaaaacagctacattcatgcctaaaccggtaaagaacgataacggttcaggaatgcatgttcatcaatcaatttttagtggtgaaaaacctttatttgctggagacaaatacgctggattatctgatacttgtttatattacattggcggaattattaaacatgccagagcgcttaatgctttttcaaacgcttcaacaaatagttataaacgactaatacctggttttgaagctcctgtactattagcatattcatcaagaaatagatcagcaagttgtagaataccatttagtgatagtaaaaaaggtaaaagggtggaagtaagatttggagatgcatctggaaatccttatttaacttttgcatctatgctaatggctgggatagacggtataaaaaataaaatcaagcctggtaagccaatggatcaagacttatatgctttaggccccgaagaactcaaaggaattccaactgtatgttcatctttacgtcaagcttgtgtcgcattagatgaagatagaaaatttttaactgagggtggagtgtttactgatgatcaaatagacgcctacataagcttaaaaatggaagaaggtaacaaactttcagatactccacatcctattgaatttcgaatgtaat

SEQ ID NO: 311062 - DNA, 517 bp, Unknown
  Bacterial polypeptide expressing nucleotide sequence isolated from the Sargasso Sea
attgggtggaattttaaaacatgctaaagctataaacgctttttcaaacgcaacaaccaatagttacaaaagattgatcccaggatttgaagccccagtgttattagcgtactcagcgagaaacaggtcagcttcatgtaggattccaatcactctaagtaaaaaagctgcgagatgtgaaattagatttggtgatgcagctggaaacccatacttgacttttgcagcaatgcttatggctggactagatggtattaaaaatagaattgatccaggtaaatctttcgataaagatctttatgctttatctgaaaatgaagttaaaaaaatacctactgtttgtggctcattaagagaagcaatggaaagtttggataaggacagagattttttaaaacaaggtaacgtattcactgatgatcagatagatgcttacattgctttaaaatttgaggaaatacataatttcgaacacacaccacacccaatagagttcgatatgtattatagttgttaa

SEQ ID NO: 311063 - DNA, 896 bp, Unknown
  Bacterial polypeptide expressing nucleotide sequence isolated from the Sargasso Sea
tatgactgctagcagtgttttaaaattaataaaagataaagagattgagtacgttgatttaagattcacagatccaagaggaaaacttcaacacttaacaatggattcaacaattgttgatgaaggaatgttaaatgatggagtatttttcgatggttcgtcgattgctggttggaaagctataaatgaatcagatatgattttaaaaccagatttaactaggaaggtgatagatccttttacttctcataacactctaattttattttgtgatatattggatgcggtcaaaagaaactcttatgaaagagatcctagaggaatagctaaaaaggcagaggcatatttaaaaaaaactgggatcggagataaagcttattttggaccagagccagaattttttgtttttgacgatgttagaattaaaaacgatatgaatgaaactagttttgcaatagatagttctgaagggccatacaattctggtaaaaaatatgataatggaaatatgggtcatagacctggagtaaaaggaggatattttcctgtaccacctgtggacagcgctcaagatatgagaggtgaatacttaaaaggattaagagacgtaggaattactgttgaaaaacatcaccatgaagtagctccaagccaacatgagttaggaatgttatttggtacattagttgatcaagcggacaatgttcaactttataaatatgttgttcaaatggtatctcattcgtttggaaaaactgcaacttttatgccaaaaccagtaaaaggagataatggatcaggaatgcatactcaccaatctatttggaaaggcaaaacaccggttttctcaggaaacaagtacgcaggtttgtctcaaactgctctgtattacattg

SEQ ID NO: 311064 - DNA, 907 bp, Unknown
  Bacterial polypeptide expressing nucleotide sequence isolated from the Sargasso Sea
acttggcatcacttttcaaaccacataaatacttttgaaatggatgtgtttgaagaaggtatcggtttcgacggctcatctataagatgttttcaatcaattgaagcaagtgatatgatattaattccagacatagaaactgcatttgtagatccattctttacagatcctacactcgttcttatttgtgatattcaagatccaatcacaggtcaaaagtatgacaaagatccaagatatgttgcaaaaaaagcagaggagtttgtaaaaagttctggtatcggtgacagcatattttttggtgcagaagcagaattttttctttttaatgacgtcagaatatcaaccgatccaagtaactcatttttctcagtagactcaggagaagctatttggaataaaggctccgatgaaagacctaacttaggttatcatgtaagaaataagggtggttacttcccctgtcctcctcatgacactatgcaagatgtaaggtccgaaatggttaatcatatggtatcaattggaatgaatgtggaagctcaacatcatgaagttgctaccgctggacagcaagagattgatttaaggtttgatacactgctttcccatgctgatagccttcaaaaatataaatatgttgtaagaaacactgcaaaaagcaatggtctgagtgcaacttttatgcctaaaccgctatcaaacgacaatggctcaggtatgcactgtcaccaaagtatttggtcaaatggtaagccaatattttatgcagatagcgggtatgctaacttaagtgatgaagctaagttttatattggcggattactaaaacatgcaccctcattattagcatttacaaatccaacaataaattcatttaaaagactagttccaggttatgaggcac

SEQ ID NO: 311065 - DNA, 529 bp, Unknown
  Bacterial polypeptide expressing nucleotide sequence isolated from the Sargasso Sea
aatgagtgccagtaaagttttaaagttaatgaaagaaaaagaagtagagtatttagatctaagattcactgatcctagaggaaaacttcaacatttgaccatggatggaaaaatggttgacgaagaaatgttaaatgaaggtgttttcttcgatggttcttcaatagctgggtggaaagcaattaatgaatctgacatgattttaaaacctgatcttgaaagacaagttatagatccttttaactcacatagtacattaattttattttgtgacatcctagatgctgtaaaaaaaaatccttatgaaagagatcccagaagtatagcaaaaaaagctgaggcttatttaaaaaaaactggtattggagataaagcttattttggacctgaagcagaattttttgtattcgacgatgtaaaatttaaaaatgatatgaacgaaacaggatttaaaattgatagttcagaaggaccatataatacagggaaaaattatgataacggaaatatgggtcatagacctggtata

SEQ ID NO: 311066 - DNA, 814 bp, Unknown
  Bacterial polypeptide expressing nucleotide sequence isolated from the Sargasso Sea
atgaataaaacaagttttgaaattgatagtaacgaaggcccttacaatacagataaaaaatatgaaggtggtaaccttggtcacagaccaggtatcaaaggaggatatttccctgtcccaccagttgatagtgcacaagatttaagatctgaatgtttgaaagcaatgaaagatatgggtgtaagagtagaaaaacatcaccacgaagttgctccatctcagcacgagttgggaacactctttgataccttagtaacaaatgcagataacatgcaaatttataaatatgctgtgcaacaagtggcgaactcctttggtaagtcggcaacctttatgcctaaacctgtaaaaggagataatggttcgggaatgcatacacaccaatcgatctggaaagatggtaagccattgtttgctggtgatgaatatgcaggtttatcaaaaacttgtttacactacataggcggtatcattaaacatgcaaaagcaataaatgcattttctaattcaacgactaacagttataaaagactaattcctggatttgaagcgccagtattattggcttattcatctagaaatagatctgcgagttgcagaataccttttacaaacagtcctaaaggaaaaagagttgaagttcgttttccggatgccgcgggcaatccttacctaacgttcgcttcaatgctaatggcaggtttagatggaataaaaaataaaattgatccaggtaaaccatttgacaaagatttgtacgcactttcagaagatgaactaaaaggagttcctacagtatgtggttcgttaagag

SEQ ID NO: 311067 - DNA, 595 bp, Unknown
  Bacterial polypeptide expressing nucleotide sequence isolated from the Sargasso Sea
atgtcaatttggaaagatggaaagcctctttttgcaggagacaagtatgccgacctatctgacgaagctttatggtttattggcggcattttgaaacacgcaaagtcattaaatgcatttacaaatccatcaaccaattcatacaagaggcttatacctggcttcgaagcacctgttttaagagcttattcagcaagaaatagatcaggatgtgtgcgtatcccatggactgagtcaccaaaggcaaaaagggtagaggcacgttttccagatccgtcatctaacccctacctatgcttttcggcccttatgatggctgggcttgatggcataaagaacaaaattgaccctggcgaagcaatggacaaaaatctttatgacctcccagcagaagagcttgctgatattccgactgtttgcggaagcctgcgggaagcaatcgagtgtcttgaagctgatcatgaatatttactcgctggagatgtcttcacaaaagaccaaatcgaaggctacattgaactcaaaatggaagaaatcgagacgtatgaacatacgcctcatccagtcgagtacggaatgtattacagctgctaaa

SEQ ID NO: 311068 - DNA, 843 bp, Unknown
  Bacterial polypeptide expressing nucleotide sequence isolated from the Sargasso Sea
aggatgtccgctcaagcatgtgccttgccatgcaggatatgggtcttggcgtagaagtccaccaccacgaggtaggcaccgcaggccagggcgagattggcgtgcgctttgataccctggtctccaaagccgatcagacgcagatttacaagtactgtgtgcacaatgtggcccatgcgcatggcttaacggcaacctttatgcccaagcctctcgtgggggacaacggcagcggcatgcatgttcaccagtcgatcttcaaaggcggagataacacattcgccggagacgaatacggcggtctcagtgaaactgccctttactacatcgggggaattttcaagcatgcccgcgctttgaatgcgttcaccaatgccagcaccaacagctataagcgtctggtgccaggctttgaggcgcccgtcatgctggcgtactcggcaagaaaccgctcagcgtcctgccgcatcccgtatgtgagtaatccgaaggcgcggcgaattgaagtccgtttccctgatcccacggccaatccctacctcgcgttttccgcaatgctgttggcgggtcttgatggtattcagaaccgcattcaccccggcggtcccatggacaaggatctttatgatctgccgcccgaagaggaaaaggaaatcgccacggtggcgcattcccttgatcaggcgctcgacgcactggatgctgaccgcgagtttctgaaggtcggcggagtgatgagtgatgacatgattgacggctatatcgatctcaagatggagcaggtccagcgcttgcggatggccactcatccggctgagtttgatatgtactacagcgtttagg

SEQ ID NO: 311069 - DNA, 811 bp, Unknown
  Bacterial polypeptide expressing nucleotide sequence isolated from the Sargasso Sea
tgcagactctgatttaatattaaaaccggacccaagtacatttgcaattattccatggcttacagaaaaaaagacagccagattgttgtgtgatgtatactggggcggaggaagaggacgtcttgagagtgatcctcgaggaatttgccaaaaagcagaagcatttgtcaagacacaaggatttgattttagtaattggggaccagaagtagaattttttgtatttgataaggtacattgggatgttttaacaccatacaaaggacaatcctattcaattgaatcttctgaatcaccatggagccaagaaggaactggctatcctatggggttgcaagaaggatattacccaagtactccgtcagacactcttgcaccattcagaaatgaatgtgtagatgttttgaacgataattttggaattttatgtgataatcatcatcatgaagtagcaactgcaggacagtgtgaaattgatataaaatatgatttaatgactaattctgctgatggtgcacaatcatacaagtatgttgtaagaaatgttgcacaacaatttggaaaagtagcaacaatgatgccaaagccaatttcaatggatgcaggttctggaatgcatacaaatgttagtttgtggaaaaaagatgacaatacgttttatgacaaagatgaagtattagaactaagtcaaatcggtcgttatttctgtggaggagtaatggaacatgcaaaaggattaactgcaattacaaatcctacaacaaactcataccatagattagttccaggttatgaagcaccagtttacatt

SEQ ID NO: 311070 - DNA, 586 bp, Unknown
  Bacterial polypeptide expressing nucleotide sequence isolated from the Sargasso Sea
ctggaaaggcgatacaccagtattttctggcgatgcttatgctggattatctgaaaccgcattacattacataggtggaatattaaaacatgcaaaagcaatcaatgcatttgcaaatgctacaactaatagctacaaaagattaatacctggttttgaggctcctgtgcttttagcatactcagcaagaaataggtctgcatcatgtcgaatacctattactttgagtaaaaagggtgctagatgtgaaattaggtttccagatgcttcaggaaatccttatttaactttcgcagctatgttaatggcaggaatagatggtattaaaaataaaattcatcctggtgagtcttttgataaagatttatatgatttaccacctgaagaggtaaaatctattccaactgtatgtggatcattaagagaagcaatggaatgcttagataaggaccgagagtttttaactcaaggtaatgtttttactgatgaccagatagatgcttatattgctcttaaatttgaggaaattcataaattcgagcatgcacctcatcctgtagaatttgagatgtattacagctgttaa

SEQ ID NO: 311071 - DNA, 451 bp, Unknown
  Bacterial polypeptide expressing nucleotide sequence isolated from the Sargasso Sea
atgagcgctaaggacgtactaaaattaataaaatctaagaacattgagtatgtggatcttaggtttacagacccaagaggaaaacttcaacatttaacaatggatacaactatcgtagatgaaggaatgctgaatgacggtgtattttttgatggatcttcgattgcaggatggaaggcaattaatgagtctgatatgatattaaaacctgatttaagtagaaaagtaattgatccttatacatctcataacaccttaatcttattttgtgatattttagatgccgtaaaaaggaatccctatgaaagagacccaagaggaattgcaaaaaaagctgaagcatatttaaagaaaacaggtattggtgatacagcttactttggaccagagcctgaatttttcgtttttgatgatataagaattaaaaacgatatgaatgaaacaagttttt

SEQ ID NO: 311072 - DNA, 711 bp, Unknown
  Bacterial polypeptide expressing nucleotide sequence isolated from the Sargasso Sea
ataacgttcaactttataaatatgtagtacaaatggtctctcattcttttggaaagactgcaacttttatgccaaaaccagttaaaggagacaatggttcaggaatgcatactcaccaatcaatttggaaaggtaaaaatccaatattttctggaaataaatatgcaggtttatcagaaactgcacttcattatattggtggaatcttaaaacatgctaaagcaattaatgctttttcaaacgcaacaacaaatagttataaaagattaattccaggctttgaagctcctgttttattggcatactctgcaagaaatagatctgcttcatgcaggattccaattacattgagcaaaaaaggtgcaagatgtgaaattagatttcctgatgctgcaggaaacccttatttaactttttctgcaatgttaatggcaggattagatggtattaaaaataaaattaatccgggaaaacctcttgatgaagatttatatgcattaccggaagataaagtaaaaaatattccaactgtttgtggatcactaagagaagctatggaaaatttagatagagatagaggttttttaaaacaaggtggtgtatttactgatgaccaaattgatgcatttattgcactaaaatttgaagaaatttataaccttgagcacactccacatcctatggagtttgagatgtattatagctcttaaa

SEQ ID NO: 311073 - DNA, 745 bp, Unknown
  Bacterial polypeptide expressing nucleotide sequence isolated from the Sargasso Sea
atgagtgctagttcagtaaaaaagattattaaagacaaagaaatcgaatacgtagaccttaggtttacagacccaagaggaaaacttcaacacgttactatggatgcaacagtagttgatgaagacatgttaaacgaaggtgtattctttgatggctcgtctattgctggatggaaggcaattaatgagtctgacatgattttaaaaccagatttatctagaacagtagtagatccatttacatcacataatacgcttaatatattttgtgacattcttgatgcgattaaaaaagatccttacgaaagggatccaagaggtactgcaaaaaaagcagaggaatatttaaagaaaacaggtgtgggagataaagcttacttcgggccagaaccagaattttttgtttttgatgatgttagatattctaatgatatgaaccatacgggatttcaaattgatagttctgaaggtccatataacactggaaaaaaatatgaaaatggaaatatgggtcacagaccaggtattaaaggtggttatttcccagttccacctgttgatagtgcccaggatatgagaagtgaatatttaaaggcaatgaaggatatgggaattaaagttgaaaaacatcaccatgaagttgctcctagccaacatgagcttggaatgtattttggaacattagttgatcaagcagataatcttcaactttataagtacgctgtacacatggttacccactctt

SEQ ID NO: 311074 - DNA, 853 bp, Unknown
  Bacterial polypeptide expressing nucleotide sequence isolated from the Sargasso Sea
gcagtgacaaaagaaccttatggtagggacccaagaggaacagcaagaaaagctgaggctttggtaaagtctagcggtgtcggtgatacaatatacatgggtcctgaagcagaattctttgtttttgatgatgttaaattttcagttgaaatgaataaatctatgtttgcgatagatagcactgaaggtccttacaatactgatagagactacgaaactggaaaccttggtcatcgaccaggtatcaaaggtggttactttcctgttccaccagttgatagtgctcaagatattcgatcagaatttttggaagagctaaaaaatcttggcttaaagatggagaaacatcaccacgaagttgctccaagtcaacacgagttaggattgatgtttgatactctattaaagcaggcagataacatgcaactttataaatatggggttcatatggtagcaaattcttttggcaaaacagcaactttcatgccgaagccagtaaaaggagacaatggtacaggtatgcacactcaccaatctatctggaaagatggcaaacctttgtttgcaggtgataaatatgctggtttgtctgatatggctctaaattatataggaggtatcatcaaacacggaaaggctttgaatgcattcacaaatgcaagcacaaatagttataaaagattaattcctggatttgaggctccagtaatacttgtatattcagctagaaatagatcggcttcatgcagaattcctgtttctgatagccctaaaggaaaaagggttgaggttcgttttcctgatcctagtgccaacccttatttagccttttcagctatgctgatggctgggt

SEQ ID NO: 311075 - DNA, 863 bp, Unknown
  Bacterial polypeptide expressing nucleotide sequence isolated from the Sargasso Sea
agaaagttctgatttagtactaaagccagtttgtgtaaaaccaaatccacttgatggtattgggaactaccttgcactttgtgaagttctagacacagagcataagccagttgaaactaatcatcgagcaaaattagctgagctaatggacgagttgtcagatgagtttgacccatatgtcggtatggagcaagagtacactttatttaagaaagataaaacaccattaggctggccagaccacggtaatcctcaaccacagggaccttattactgtggtgttggtacagacgaagtatttgagagagacttcatagaagagcacactgatgcctgtattaatgcagatatcaaaatttgtgggaccaatgcagaggttatgccaggtcaatgggaataccaaattggctatcgagatattgaaggagaaaaggctgatcctttaacaatatcagatgagatatggatttcccgctggttgctatatcgcctatcagaagaatacaatatcatagcgaagttagatgcaaaaccagttaagggtgattggaatggtgctgggatgcataccaacttttctacgaagcaaacccgtgataaaacaagtggcttagaagctatccatactgccgtcaaagcacttgaaaataatcacaatgctcatattacaaagtatggattcggtcttgaagatcgcctaactggtgaacatgaaacttgccgaattgatcagttcaaatcgggtgttgcagatagaggctcctccattagaataccattacatatcagcgaggcaggttgtggttattttgaggatcgaagaccatcggcaaatgcaaatccatatgaggtatgtacaatgt

SEQ ID NO: 311076 - DNA, 985 bp, Unknown
  Bacterial polypeptide expressing nucleotide sequence isolated from the Sargasso Sea
atcttgatgcccgatgatgcgaccgcagtcgttgatccgttcacggaagaggtacccgtaaacctgagatgcaacatcgttgagccaagtactatgcaagggtacgagcgtgacccccggtcagtggctcttcgcgctgaagagtatttgaagtccaccggaatcggtgatgcatccttcttcggaccagaacccgaattttttgtcttcgataacgtgcagtggaaggctgatatgtctggagcgatgtataaaatcgatgccgaggaagcggcttgggcaagcagcgctgagtttgaaagtggcaacatggcacaccgaccaggtgtcaaaggcggctatttccctgtccctccaatcgactctgcaatggatctgagaactgccatgtgcgaaaccatgggagcaatgggcctacaggtagaggttcaccaccacgaagttgcgaccgcctgtcaaaacgaaattggagtgaagttcaacactctcgtaaataaggctgatgaagttcagatacttaagtacgttgtgcacaacgttgctcatgcctacggcaaaaccgcaacctttatgcccaagccattggtcggcgataatggatcgggtatgcactgccatcagtccatctggaaaaatggcgaaaacttatttgcaggaaatggttatgccggcctgtctgatcaggctctttattatatcggcggaattatcaaacatgcacgagctatcaatgcttttgcaaacgcatcaacaaactcatacaaacgcttggtccctggattcgaggcgcccgtgatgctcgcatattcagcacgcaaccgttctgcatcaatccgtatcccatacgtttcaagcgccaaaggccgtcgtattgaagtccgtttccccgacccaacagcgaatccatatctagcattttccgcgatgttaatggctggtcttgatgggatacagaacaagattgacccagggaagctgcaagtaa

SEQ ID NO: 311077 - DNA, 767 bp, Unknown
  Bacterial polypeptide expressing nucleotide sequence isolated from the Sargasso Sea
tatgtctaagtctccacaagatgtattaagtcaaattaaagatgaaggaattgaactcatcgatttaaaatttactgacatccatggtaaatggcagcatttaactcttacatcagacatgatagaagaggaatcatttacagaaggtctagcatttgatggttcatcaataagaggttggaaagcaattaatgcctccgatatgtcaatggttcctgatgcgagtacagcatggatagatcctttttataaacataaaactctaagtatgatttgctctatccaagagcctagaagcggtgaaccctatgatagatgcccaagatcattagctcaaaaagctttaaaatatttagaatcaactgggatagccgacacagcattttttggtccagagccggaattcttcttgtttgatgacgtgagatatgattcaaaagagggttcttgcttttatagtgtagatactatcgaagctccatggaacacaggaagaatcgaagaaggtgggaatttaggatacaagatccaatataaagaaggatattttccagtttctccaaatgatactgctccagatatcagatctgaaatgctacttttaatgggtgaattaggtatacccacagaaaaacatcaccatgaagttgccggtgccggtcaacacgaacttggaatgaaattcgattcgttaataaattctgctgataacgtaatgacttataaatacgttgttaggaacgtaacaaaaaaatatggaaaaactt

SEQ ID NO: 311078 - DNA, 643 bp, Unknown
  Bacterial polypeptide expressing nucleotide sequence isolated from the Sargasso Sea
ttatgccaagcctgttgctggtgacaacggttcaggtatgcatatacaccaatcaatttggaaaggtgatacgccagtattttctggtgatgcttatgcaggtttatctgaaactgctttacattatataggtggaattttaaaacatgcaaaagcaataaatgcatttgctaactcaacaactaatagttacaaaagattagttccaggttttgaagctccagtattattagcttattctgctagaaatagatctgcttcatgtcgtataccaattacactaagtaaaaaaggtgcaagatgtgaaattagatttcctgatgcttcaggtaatccatatttaacttttgcagcaatgttaatggctggtcttgatggaattaagaataaaatacacccaggtgaatcttttgacaaagatttatatgaattaccccctgaagaggttaaagctattccaactgtgtgtggatcattaagagaagcaatggaaagtctcgataaagatagggagtttttaactcaaggtgatgtatttactgatgatcaaatagatgcttatattgcgcttaagttcgaagaaattcataagtttgaacacgcacctcatccggtagaattcgagatgtattacagtagttaa

SEQ ID NO: 311079 - DNA, 732 bp, Unknown
  Bacterial polypeptide expressing nucleotide sequence isolated from the Sargasso Sea
attgacggtggtcctaatcattggacaaagacctggatataaaggtggttacttcccagctgccccaattgacactatgcatggtataaggggagaaatggttcgaataatggttgaccaacttggttttcatgttgaaaaacatcatcacgaagttgcaacaggtggacaaggtgaaattgatttaaagtatgacacaatgttatcaatggctgataaagttatgagatataaatatgttgtcaaaaatgtagctcaatcatatggaaaagtagccacattcatgcctaaacctatttacaatgacaatggtacaggtatgcatactcatcagagcatatggaaagatggaaaaccattatttgctggtaatgaatatgctggcctaagtaaactggctttaaattacattggcggtttaattaaacatggtcaagcactaatgggattgtgtgcaccaacttctaatagctataaaagacttgttcctggtttcgaagctcctacaatattaggtttatctgccagaaacagaactgctgctttcagggttcctatgtatgatcctgataataaagcagctaaaagagttgaatttaggtctgcggacccaacttgtaatccatatttagcattccctgcaatgttaatggcaggtctagatggaatagaaaatgaaattgatcctggtgatgtattagatgaagatttatttagtttatctgacgaaga

SEQ ID NO: 311080 - DNA, 532 bp, Unknown
  Bacterial polypeptide expressing nucleotide sequence isolated from the Sargasso Sea
atgagcgccagttcagttaaaaagattattaaagataaagagatagaatacgtagacctaaggtttacagacccaagaggaaagcttcaacatgtaaccatggatgcaacagtagttgatgaggacatgttaaacgaaggagttttctttgatggttcgtcaattgctggatggaaggcaattaatgagtcagacatgattttaaaaccagatttatcaagaacagtagtagatccatttacatcgcataatacgcttaatatattttgtgacattcttgatgcgattaaaaaagacccttacgaaagggatccaagaggtacagcaaaaaaagcagaagagtatttaaagaaaacaggtgttggagataaagcttacttcggaccagaaccagaattttttgtatttgacgatgttagatattcaaatgatatgaatcatacgggatttcaaattgatagctctgagggtccatataacactggaaaaaaatatgaaaatggaaatatgggtcacagaccaggtataaaag

SEQ ID NO: 311081 - DNA, 733 bp, Unknown
  Bacterial polypeptide expressing nucleotide sequence isolated from the Sargasso Sea
aatgagtgcaagtaaagttttaaaattgataaaagataaagagatagagtacgttgaccttcggtttactgacccaaaagggaaacttcagcatttaactatggacgggaacatggttgatgaagaaatgttaaatggtggagttttttttgatggatcttcaatagctggttggaaggctattaatgaatctgacatgattttaaaacctgatcttaatagacaaattattgatcctttcacgtctcataatacacttattttgttctgcgatgtattagatgctgtaaaaaaagacccttacgaaagagatccaagaagtatagcaaaaaaagctgaggcttatttaaaaaagacaggtataggagataaagcttattttggacctgaagcagaattttttgtatttgataatgttaaattcaaaaacgatatgaatgaaactggatttaaaatcgatagttctgaaggaccttataattcaggaaaagattatgaaaatggtaacatgggtcataggcctggaataaaaggcggttattttcctgttccccctgtagatagcgctcaggatatgagaggagaatttttaaaagctttaaaagacatgggtattaaagttgaaaaacatcaccatgaagtagcaccaagccaacatgaacttggtatatactttggaactttaactgatcaagcagataacatgcaactatataaatatggggttcaaatg

SEQ ID NO: 311082 - DNA, 463 bp, Unknown
  Bacterial polypeptide expressing nucleotide sequence isolated from the Sargasso Sea
gttggagcaccagatataggtgatcatatctgggtagcaagatggcttctttataggattgctgaagactggaatatatcagcaactttaaatcctaaaccagttaaaggtgattggaatggtgctggtatgcatactaacttttcaacaaaacaaatgagagaagatggaggctacgaagctattgttgcaggatgtgaagctttaggtaaaaatgctgatttgcatgtcaaaaattatggggcaaatattgaagacaggcttactggagaccatgaaactcaaagttttgatactttttcctacggagttagtgacagaggtgcatcaattagaattccatggcaagtagaggttgataaaaaaggctatttagaagacagaaggccaaatgccaatggagacccatacgtcatcgcaatgttgatgattgatacagtttgttcagcagcttctagctaga

SEQ ID NO: 311083 - DNA, 607 bp, Unknown
  Bacterial polypeptide expressing nucleotide sequence isolated from the Sargasso Sea
tatgcatactcaccaatcaatatggaaaggtgatactccagtattttcgggtgataaatacgctggtttgtcagagacagcattgcattacataggtggaattcttaaacatgctaaggcgattaacgcttttgctaatgctacaacaaatagttataagagattaattccaggttttgaagctcccgttcttttagcttactcagcaagaaacagatctgcctcttgtagaataccgataactcttagtaaaaaaggtgcaagatgtgaaattagatttcctgatgcttctggaaacccttacttaacttttgctgccatgttaatggcaggaattgatggaataaaaaataaaatacatccaggcgagtcttttgataaagatttatacgatctacctccagaagaggtaaaatctattccaaccgtatgtggatcattaagagaagctatggagagtttggataaagatagggagtttttaactcaaggtgatgtatttactgatgatcagattgacgcttacattgcattaaaatttgaggaaattcacaaatttgaacatgcacctcatcctgtagagtttgagatgtattatagctgctag

SEQ ID NO: 311084 - DNA, 619 bp, Unknown
  Bacterial polypeptide expressing nucleotide sequence isolated from the Sargasso Sea
atgggtagaataaaagcagaatatatttggatggatggtcataggccaacttcaaaattacgttctaagacaaaaatattagataagccggtaactaaattagaggatttgcctgagtggggttttgatggttcaagtacaatgcaagctcaaggaaatgatagtgattgtgctttaataccggtatgttttactcctgatccaattagaaggggtgataatattttagttatgtgtgaagttaataatgctgatggtactccacataagacaaatacaagggctcaattaaggaaagttgctgaaaaatattctgatcaagatgcgtggtttggtattgaacaagaatatactttctttcaaggtagaaatcctttaggttggcctcaaggcggatatcctgctcctcaaggaccattttattgtggcgttggagcagatgaagtttatggcagagaaattgttgaagatcatatggaggcttgtatggatgcaggtataatgatatctggaattaatgcagaggttatgcctgggcaatgggaattccaagttggtcctttgggtccacttcaggtttcagatgaattatggattgcacgatgggttattatataga

SEQ ID NO: 311085 - DNA, 784 bp, Unknown
  Bacterial polypeptide expressing nucleotide sequence isolated from the Sargasso Sea
ggtgacaacatacttgtgatgtgtgaaacatttttaactgatcaggaaactccgcacccgaccaatacaagagcacttgcacgggcagctgaagaaaaatacggagatcaagatccttggttcgggctcgagcaagaatacacaatgattgatccagaaactggatggcctgcaggatttccaccaaacggcttcccagccccgcaagggccatactattgtggtgttggcgctctaaaaatacatggccgtgcagctgtcgaacaacataccactttgtgtatcgaagctggtcttaaaatttcaggaacaaatgcagaagttatgcctggtcaatgggaattccagatcggccctgcaggaactgtagaagtaggagatcatctatggatagctcgctatttgctctatcgggtgggtgaggagcataacattgaaatcagcatagaagccaagcccatgaaaggggattggaatggcgctggtatgcataccaacttctcaacatcagctatgagggaaggtttcgaagcgatcacagcagcatgtgaatccctaggagctcctggagttcctgaaaaacatctcgctggatatggagtaggtatcgaagatcgcctaacaggagaacacgaaactcagcgatatgaccagttcagttatggagtatcagatcgtggagcttctatccgtataccctggcaggtttcacaagctcaaaaaggttacatagaggaccgtcggcctaatgccaacgctgacccttacgttgttgctgccctca

SEQ ID NO: 311086 - DNA, 658 bp, Unknown
  Bacterial polypeptide expressing nucleotide sequence isolated from the Sargasso Sea
gacatttatgcccaacctcttccaggtgaaaatggcagcggaatgcacgtacatctgtcaatttttaatgacgaaaataccaatgcattttacgacaagaatgacccgcagcatttaagcggtactgctaaacacttcatcgctggtgttttagatcatgctcgtgaaattgcactagtcacgaaccaaacctacaattcatacaaaagactggtgccaggctatgaagctccagtttatatagcttgggcagaaagaaaccgttcggcatcggtgaggatcccgctttacaaaccagggaaggaagttgccactcgcatggaactgcgtttcccagacccaacatgcaacccgtacttggctttcagcgtcatgttatcagcaggattggacggactaacaaacaaaacaggaattccagacgaaatgaccatggatctttacaaactcagcaattctgaccgcaagaagctgaacatcgaagcgctaccacatgatctcttcgaagcggttgaagtcgcggaatccagtgagttcttgaaagaggctcttggggaggatgtccacggaaaactcatcgaaacgaaacattctgaagtggacaaattcaggttacatgtatcagacaaagacctaagggaacatttgatactgtagt

SEQ ID NO: 311087 - DNA, 897 bp, Unknown
  Bacterial polypeptide expressing nucleotide sequence isolated from the Sargasso Sea
aacttttaaaaaaagtaaaaaatgaagatatcaaaatggttgatcttcgtttcactgatatgcctggttcaacccatcatatatcaattccatttaaatatcttaaagaagatttatttaaagatggagtaggttttgatggttcatcagtaagaggttttcaatctatagaaaatagtgatatggcaatggtgcctgatgttactacagcttatatagaccctttttattcagaaaaaacaattgcattttactgtgatgttgttgaccctataagttatgaaagttatgaaaaagatccaagatacatagcaaaaaaagctgaaaaatatttaaaatcctctggtatgggtgatactgcttattttggtcctgaggcagaattttttgtatttaatgatgtaaaatatgactcgggttctaatttttcatttcacgaagttgattctactgaaggagcttggaatactggaaaggatgaaaatccaaacctaggacataagcctagacataaaggaggctactttcctcttcctccatctgatagtttgcaagatgttagaactgaaatggtattaactatggaagaaatagggataaatgttgaagcttctcaccatgaagtagcaacaggtggtcagtgtgaaattgatttagaattttctcctctattgtcaatggctgatgatcttctaagatataaatacgttgttaaaaatgttgctaaacaatatggaatgactgccaccttcatgcctaaacctctttttgaagataatggatcaggtatgcacgttcattcaagtatatggaagaaaaataaaaccttaatgtataaaaaaggtaattacgcagatttaagtgattttgcattacattacataggaggaatatgaa

SEQ ID NO: 311088 - DNA, 767 bp, Unknown
  Bacterial polypeptide expressing nucleotide sequence isolated from the Sargasso Sea
aatgagtgcagaaaaagttttaaaatttattaaagaaaaagaagcagaattcgttgatttaagatttactgatccaaggggaaaacttcaacatttaacaatggattcaactgttgttgacgcagatatgcttaatgaaggtgttttttttgatggatcatctatcgctggttggaaagcaattaatgagtcagacatgattttaaaaccagatacttctagaatgtttatggatccttttacttctcacaatactgtagttttgttttgtgatattttagacgcaattaaaaaagatccttatgaaagagatccaaggggtgtggctaaaaaagctgaagaatatttaaagtcgtctggtattggtgataaagcattttttggtccagaaccagaattttttgtttttgatgatgtaagaatcaaaaatgatatgaatgaatgtggatttaaaattgatagcaaagaaggtccatataattcaggaaaagaatatgagagtggaaacatgggacacagacctccaatcaaaggtggatacttcccagtgccaccagttgatagtgaacaagatatgcgtggtgaatatctaaaaaatttaaaagaagtaggaattaaagttgaaaaacatcaccatgaggttgctccaagtcagcacgagcttggaatgtattttggaactttagtgaatcaggctgataatgttcagttatataaatatgttgttcaaatggtaactcactcgtttggtaaaactgcaactttta

SEQ ID NO: 311089 - DNA, 842 bp, Unknown
  Bacterial polypeptide expressing nucleotide sequence isolated from the Sargasso Sea
aaagaaggtccctataattcttggtaaagaatacgaaaatggaaacatgggtcacagacctggtgtaaaaggaggatacttccctgttccgcctgttgatagtgaacaagacatgagaagtgaatatttaaaaaacttaaaagaggtgggtataaaagttgaaaaacatcaccacgaagttgcgccaagtcagcatgaattaggaatgtattttggaactttagttgatcaagctgataacgtacaattatataaatacgttgttcaaatggtaactcactcatttggaaaaacagcaacattcatgcctaaaccagttgcaggtgataatggttctggaatgcatactcatcaatcaatatggaaaggtgatacaccagtattttctggtgatgcttattcaggtttatcggaaacagctttacattacattggtggaattttaaaacatgctaaagcaattaatgcattttcaaatgcgactacaaatagctataaaagattaattcctggttttgaagctccagtcttactagcttactcagctagaaatagatcagcatcatgcaggatccctattactttgagtaaaaaaggcgcaagatgtgaaattagattcccagatgcatcaggaaatccttacttaacttttgcagcaatgttaatggctggaatagatggaattaaaaataaaattcatccaggcgaatcatttgacaaagatttatatgaactaccaccagaggaagttaaatctattccgactgtatgcggatcactaagggaagcaatggaaagtttagacaaagacagagaatttttaactcaaggtggtgtcttta

SEQ ID NO: 311090 - DNA, 864 bp, Unknown
  Bacterial polypeptide expressing nucleotide sequence isolated from the Sargasso Sea
ttacaacctgattttgatagtgccgtaatagatccgtttactgctcagcctagtctgatacttttttgtgatataatagagcctagtacaggaaaaaggtatgacagagatcctagatcaactgcaattagagctgaagaatatatgaataaatcaggaattggagatgctgtctattttggtcctgaagctgaattttttgtttttgacgacgttaaatggaatgtctccatgaatcatacaggatataaaattgactcagaagaaggtccatataattctggcgaggattttgatggaggaaatattggtcatagaccatctgtcaaaggaggatattttcctgttccacctgtagattctatgacggatataagagcagaaatggttacatctatgatggaaatgggacttcctatggaaaagcatcatcatgaagtagcaccctctcaaaatgaattaggttttaaattcggccctatgatcaaagcagctgattggattcaaatgtataagtattgtgttcatatggttgctcactcatatggaaaaacagcaacatttatgcctaaacctatagtggatgataatggttctgggatgcattgccatcaatcaatctggaaagggaaaactcctgtattcgctggaaaaggttatgctggattaagtgatacttgtttatattatataggaggaataattaaacatgctaaagcattaaatgcttttactaatgctagcactaattcatataaaaggctagttccaggctttgaagctcctgttttgcttgcatattcaggaagaaatagatctgcatcttgtagaattccatatgcgacaagtaaaaatgcaaaaaga

SEQ ID NO: 311091 - DNA, 676 bp, Unknown
  Bacterial polypeptide expressing nucleotide sequence isolated from the Sargasso Sea
aatgaccgcaagtaatgttttaaaattgataaaagataaagaagttgaatacgtagacttaagatttactgatcctaggggaaaactacagcatttaacaatggatgcaacagtggttgatgaaggaatgttaaacgatggtgtattctttgatggttcatcaattgctggatggaaggcaattaatgaatcagatatgatcttaaaacctgatcttggaagaaaagttgtagatccttttacgtctcataatactcttattttattctgtgatattttagatgctgtaaaaaaagatccttatgaaagagatcctagagggattgcaaaaaaagctgaagcatacttaaaaaaaacaggcataggtgataaagcttattttggcccagaacctgaattttttgtatttgatgatgttagaattaaaaatgaaatgaatgaaacaagttttgcaattgatagtgctgaaggtccatacaactcaggaagaaagtatgaaaatggaaatatgggtcatagacctggtataaaaggtggctactttccagtaccaccggttgatagcgcgcaggatatgaggagtgaatatttaaaaggtttaagggatgttggtataaaagttgaaaaacatcaccatgaagtagcgccaagccaacatgaacttggtatgtatttt

SEQ ID NO: 311092 - DNA, 538 bp, Unknown
  Bacterial polypeptide expressing nucleotide sequence isolated from the Sargasso Sea
atgagttcaaaagatattttaaagcttataaaagacaagcaagtagaattcgtagaccttagatttactgatccaaagggcaaacttcaacatttgacgatggactcaactgtagttgatgaagacatgcttgataaaggagtgttttttgacggttcttctatagctggctggaaagcgataaatgagtcagatatgattttaaaacctgatttggatagacctataattgatccttttaattctcatactactttaaatattttttgtgatattttagatgctgtaaaaaaagatccttacgaaagagacccaagaggcactgcaaaaaaagctgaagcttatcttaaaaaaactggaataggtgataaatcttattttggccccgagccagaattttttgtttttgacgacgtgagatacaaaaatgatatgaacgaaaccagcttttcaattgatagctctgagggtccatataatacaggaaaaaaatatgaaaatggcaacatgggtcatagacctggagttaaaggcgggt

SEQ ID NO: 311093 - DNA, 512 bp, Unknown
  Bacterial polypeptide expressing nucleotide sequence isolated from the Sargasso Sea
tatgagtgccagttcagttaagaagattataaaagataaagagatcgaatacgtagacctaaggttcacagacccaagaggaaaacttcaacatgttactatggacgcaacagtagttgatgaagacatgttaaacgagggagttttctttgatggttcatctattgctggttggaaagcaattaatgaatcagacatgattttaaaaccagatctatcaaggacggtagtagatccatttacatcgcataatacgcttaatatattttgtgacattcttgatgcgattaaaaaagatccttacgaaagggatccaagaggtacagcaaaaaaagcagaagagtatttaaagaaaacaggtgtgggagataaagcttacttcggaccagaaccagaattttttgtttttgatgatgtcagatattcaaatgatatgaatcatacgggatttcaaattgatagttctgaaggtccatataacactggaaaaaaatatgaaaatggaaatatgg

SEQ ID NO: 311094 - DNA, 785 bp, Unknown
  Bacterial polypeptide expressing nucleotide sequence isolated from the Sargasso Sea
aaaacatcatcacgaagttgcaccaagccaacacgaactaggaatgttatttggaacacttgtagatcaagcagataatgtacaattatataagtatgttgttcaaatggtctcgcattcttttggaaaaactgcaacatttatgcctaaaccagttaagggggacaatggatcaggaatgcatatacatcaatctatatggaaaggaaaaactccattgttttcaggaaataaatatgcgggattatcccaaacagctttatattatattggaggaatcttaaaacacgctaaagctataaatgcattttcaaatgctacaacaaatagttataaaagattaataccaggttttgaagctccagttctattagcttattcagcaagaaatagatctgcatcatgcagaataccaattacgctaagtaaaaaaggtgcaagatgtgaaattagattcccagatgctgctggcaacccttatttaacttttgctgcaatgttgatggctggtttagatggaataaaaaataaaatagatccaggtaaatcatttgataaagatttatatacactttctgaaaatgaaataaaaaatattccaactgtttgtggctcattaagagaagcaatggaaagtttagatacagatagaaaatttttaaaacaaggtaacgtatttacggacgaccagattgatgcttatatagcattaaaatttgaagaaatttataatctagaacatactcctcatcctattgagtttgatatgtactatagctgttaaa

SEQ ID NO: 311095 - DNA, 658 bp, Unknown
  Bacterial polypeptide expressing nucleotide sequence isolated from the Sargasso Sea
accattaggattattaaaaaaaaatacagatatagaaggttttttaggtccacaaggaccttattattgtggggtcggtgcaggtaaagtgtttggtagaaaaatagctgaaaaagttttagaaaatgctttaaaatgtagattaaatattacaggacttaattttgaagtagcacctggacaatgtgaattacaattatgtgaaaaaggtctaaaagctgctgatgatttgatgttacttagatatttattagttagaacagctgaagattttaatgttggtatagaattacatcctaaacctgttaagggtgattggaatggttctgggtgtcatactaattatagtacaaaatctatgagagaaaacggcggtatgaaacatataatggaagcaattaaaaaattagaattaaaacataaagaacatatatcagtttatggtatagataatgatcaaagattaactggtaaacatgaaactgcttcagtagataaatttagttatggagttgctgatagaggttcatctattagaattccaagatttactgatagggatggtaaaggatatttagaggatagaagaccagcaagcaatatggatccttatttagtaacatcaaaaattgttgaaaccactattttaaataattaa

SEQ ID NO: 311096 - DNA, 739 bp, Unknown
  Bacterial polypeptide expressing nucleotide sequence isolated from the Sargasso Sea
gtatttcggtactttgacaatcaggcagataacgttcaactttacaaatacgctgtacaaatggttacacattcatttggtaaaacagctacttttatgcccaaaccagtaaaaggagataatggatccggaatgcattgtcatcaatctatttggaaaggcagtacacctgtttttatgggtaaagagtacgctggtttgtccaaagaggcattatactatattggtggaattttaaaacatgcaagagcaattaatgctttttcaaacgcaactacaaacagttataaaagactgataccaggatttgaagctcctgttattttggcatactcagctagaaacagatctgcttcttgtagaataccggtaataatgaatcctaaagcagccagaatggaaataagatttccagacgctgcaggtaatccttacttaacttttgcttcaatgttaatggcgggtattgatggaataaaaaataaaattgatcccggaaaagccttcgaccaggatctatattctttatctgaggatgaagtaaaaaagcttccaactgtatgtgggtctttaagagaggcaatgcaaaatctagataaagatagaaaatttttaacagaaggtggtgtatttacggatgaccaaattaatgcgtatattgaattaaagttccaagaaatttacaatttcgaacatactccacatcctattgaatttgagatgtattacagcggctaaa

SEQ ID NO: 311097 - DNA, 523 bp, Unknown
  Bacterial polypeptide expressing nucleotide sequence isolated from the Sargasso Sea
gatgtcagtagaaaaggcattagagctgattaaagaaagtgaagcgaagtttgtagatttacgttttaccgatacaaaaggtaaagaacaacacgtatctatccctgcgggcctagttgatgaagagtttttcgaagaaggtaaaatgttcgacggttcttcaatcgctggctggaaaggtattaacgaatcagacatggttcttcttccagatgctgacagctgtgttgttgaccctttcgcagaagagacacaagtaaacatccgttgtgacatcgttgagccttcaacaatggaaggttatgagcgtgacccacgttcagttgctcgccgcgcagaagaattcctaaaatcaactggcatcggtgacactgtattctttggtccagagccagagttcttcctattcgacgacgttaaattccatactgacatggcgggttctttctacaagatcgactcttctgaagccaagtggaactcaggtgaagaatttgaaggcggtaacatggcgcaccgtcct

SEQ ID NO: 311098 - DNA, 787 bp, Unknown
  Bacterial polypeptide expressing nucleotide sequence isolated from the Sargasso Sea
gaaaaacatcaccatgaagttgctccaagtcaacacgaattaggaatgtattttggaacattagttaatcaagcagacaatgttcaattatataaatatgttgtacaaatggtaactcattcttttggaaaaactgcaacatttatgcctaaaccagttgctggagacaatggttctggaatgcacattcatcaatcaatatggaaaggtgatacaccagtattttctggtgaagcatatgctggattatctgaaacagctcttcattacattggtggtatattaaaacatgcgaaagcaattaatgcattcgcaaattcaacaacaaatagttataagagattaatacctggatttgaagctccagttcttttagcatattcagccagaaatagatctgcatcttgtcgtataccaatcactttaagtaagaaaggtgcaagatgtgagataaggttcccagatgcagctggaaatccttatttaacttttgctgcaatgttaatggctggcttagatggaataaaaaataaaattcatcctggcgagtctttcgataaagatttgtatgatttacctgctgaagaagttaaatctattccaactgtatgtggatctttaagagaagcgatggaaagtttagacaaagatagagagtttttaactcaaggtggcgtatttactgacgatcaaatagatgcttatattgctttaaaatttgaggaaattcacaaatttgaacacactcctcatcctgttgagtttcagatgtactacagtagttaat

SEQ ID NO: 311099 - DNA, 898 bp, Unknown
  Bacterial polypeptide expressing nucleotide sequence isolated from the Sargasso Sea
ggtcacagacctggtattaagggcggatatttcccagtgccaccagttgatattgctcaagatatgagaagtgaatatttaaaagctatgaaagacatgggtattaaagttgaaaaacatcaccatgaagtggcaccaagccaacacgaattaggtatgtactttggaacacttgtagatcaagcagataatttgcaactttataagtacgccgttcacatggtatctcactcatttggcaagacagcaacatttatgcctaaaccagttaaaggtgataatggttctggaatgcacgtacaccaatctatatggaaaggtgataaggcattattttcaggagacaaatatgctggactatcggatcttgctttaaattacattggtggaattttaaaacatgctaaagcaatcaacgcattttctaacgcaacaactaatagttataagagattaattcctggatttgaagcaccagtattattagcttattctgcaagaaatagatcagcttcatgtagaataccaataacattaagtaaaaaagctgcaagatgtgaaatcagatttggtgatgcagctggaaatccttacttaacttttgctgctatgttaatggctgggttagatggaattaaaaataaaattaatcctggtaaatcttttgataaagacctttatgcattatcagaggaggaagtgagtaaaatcccaactgtctgtggttctttaagagaagcaatggagagcttagataaggacagaaaattcttaactgaaggtggtgtttttacagacgaccagattgatgcatacatttcattgaagatggaagaggttcataattttgaacatactccacatccaattgaatttgagatgtattacagttgttaat

SEQ ID NO: 311100 - DNA, 866 bp, Unknown
  Bacterial polypeptide expressing nucleotide sequence isolated from the Sargasso Sea
tgatagtttacaagatgttagaactgaaatgtttttaactatggaagatattggtatcaatgttgaagcatcacatcatgaagtggcgactggtgggcaatgtgaaattgatctagaattctccccacttctgtcaatggctgatgatctgttaagatataagtatgtagttaaaaatgttgcaaagcttcatggccttacagctacttttatgcctaaaccactctttgaagataatggatctggtatgcacgttcattcaagtatttggaaaaaaaataaaactctcatgtataagaagggtaactatgctgacttaagtaattttgcccttcattatattggtggaattttaaaacatgcaccatctcttttagcattttgcgcacctacaactaattcttataaaagattagttcctggattcgaagcaccagtaaacatagcttattcagcagcaaatagaactgcatcagttagaataccaaataattatactgcaagccctaaggctaaaagaatagagtttagatgtcctgatccttcagctaacccttacttagcattttctgcaatattaatggctggtttagatggtgttaaaaataaaattaatccaggaaaacctactgacataaacatttatgaagctcccgcaagcgttttagcaaaaataccttcaacgcctggatcacttgctgaagctttagatgctctagaaaaagataataaatatttgttagcaggcgatgtatttacaaaagataacattgaaacttatatttcttataaaagagagagtgaagttagcccaatggatttaagacctcatccacatgagtttaacctttattatgatgtctaaa

SEQ ID NO: 311101 - DNA, 802 bp, Unknown
  Bacterial polypeptide expressing nucleotide sequence isolated from the Sargasso Sea
tatgggaattaaagttgaaaaacatcaccatgaagttgctccgagccaacatgagcttggaatgtattttggaacattagttgatcaagcagataatcttcaactttataagtacgccgtgcacatggttacacactcttttggtaagacggctacttttatgcctaaaccagttaaaggtgataatggttctggaatgcactgtcaccagtcaatatggaaaggaagtacagcagttttttctggaaataaatatgctggtttatctgatacagcattacactacatcggaggaatattaaaacacgctagagcgataaatgctttcgctaatgcaacaacgaatagttacaaaagattaataccgggttttgaagcgcctgtattattggcatattcagcaaggaacagatctgcatcatgcagaattccaattactcaaagtaaaaaagctgcaagatgtgaggttcgtttccctgatgcagctggaaacccttatttaacattttctgcattattaatggctggacttgacggaattaaaaataaaattgatccaggtaaatctttagataaagatttgtacgctttaagtgagtctgaagttaaaaaaattccaacagtttgtggttctttgagagaagctatggaaagtttagataaagatagaaaatttttaactcaaggtaatgtttttacagacgatcagatagatgcttacatcgctcttaagtatgaagaaatttacaactttgagcacactccacatccaatggagtttcaaatgtattatagctgttag

SEQ ID NO: 311102 - DNA, 552 bp, Unknown
  Bacterial polypeptide expressing nucleotide sequence isolated from the Sargasso Sea
tatgagttctgatgatgtgctaaaatttatgaaagaaaaagaagttgaatttgtagaccttaggtttactgatccaagaggaaagttacagcatttaacaatggattcaacaattgtagatgatgaaatgttaaatgatggagttttttttgatggttcatcaattgctggttggaaagcaataaatgagtcagatatgatattaaaaccagatttgggaagaaaaattatggatccatttacttctcataatactcttgtattattttgtgacataatggacgccgttaaaaaagatccttacgaaagagatccaagaggtattgcaaagaaagctgaagcttatctgaaatcaacaggaattggagacaaggcgtattttggaccagaacctgaattttttgtttttgacgatgttagaattaagaatgatatgaatgaaactgggttttcaattgatagtacagaaggtccttacaactcaggtaaaaaatacgacaatggcaatatgggacataggccaggtataaagggaggatatttccctgtccc

SEQ ID NO: 311103 - DNA, 601 bp, Unknown
  Bacterial polypeptide expressing nucleotide sequence isolated from the Sargasso Sea
agtgtttggaaagatggggatacactgatgtataaagaaggaaattatgcaaatcttagtgacttagctctcaactatattggtggtatcttgaaacatgcacctgcgcttttagcattctgtgcgccaactactaactcttacaaaagattagtccctggttttgaggcaccagtaaacattgtttattctcaaagaaatagaacagcttcagtaagaattcctgcttactctcagagccctaaatctaagagaatggaatttagatgccctgatcctaccgcaaatccttatttagcattttcagcaatgttaatggcaggattagacggaataaaaaataaaattgatcctgggaaaccaacagacattaatctttatgctgcgagtgatgaagtattatcaaaaatacaatcaacccctggatccttagctgaatctcttgaagctcttgaaaaagatcatgcatttttattagagggtgatgtatttactaaagatgttattgatacatacattagctacaaaaaagaaaatgaggttgacccaattaatataaggcctcatccacacgaatttaaattatactacgatgcgtagt

SEQ ID NO: 311104 - DNA, 406 bp, Unknown
  Bacterial polypeptide expressing nucleotide sequence isolated from the Sargasso Sea
aatgagcgtaagtaaagttttaaaattaatgaaggaaaaagaggtagaatacgtagatctgcgttttactgatcccaaaggaaaactgcaacatttaaccatggatggaaaaatggttgatgaaaaaatgttaaatgatggagttttttttgatggttcttcgatagctggatggaaggctattaatgaatctgacatgatattaaaacctgatcttgatagacaagttatagatccttttacttcgcacaatacactcattttattctgtgatgttttagacgcagtaaaaaaaaatccgtatgaaagagatcctagaagtatagccaagaaagctgaatcatacttaaaaaaaacaggtattggagataaagcttattttggaccagaagcagaattttttgtt

SEQ ID NO: 311105 - DNA, 760 bp, Unknown
  Bacterial polypeptide expressing nucleotide sequence isolated from the Sargasso Sea
tatgagcgctagtgatgtacttaaaacgattaaagataaagaagctgagtttgtagatcttagatttacggacccacgaggaaaacttcaacacttaacaatagactctactgtagtagacgaagatatgttaaatcaaggtgtcttttttgatggttcgtcaatagctggttggaaagcaataaatgaatctgacatgatacttaaaccagatttatcaagaatgtttatggacccttttacttctcataatacattagttttattctgtgatattttagatgctgtaaagaaaaacccttatgaacgtgatccaaggggtacagctaaaagagcagaggaatatctaaaatcctcaggtattggtgataaagcttttttcggaccagaaccagaattttttgtttttgatgatgtaagaattaaaaacgatatgaacgaaactagttttgctattgatagcacggaaggtccttacaattctgggaaaagatatgaaaatggaaacatgggacatagacctggtatcaaaggaggatattttccagttccaccagttgatagtgctcaagatatgagaggcgaatatttaaaaggattaaaggatgttggtattaaagttgaaaaacatcaccatgaagttgctccaagtcaacacgagctaggtatgtattttggtacactagtaaaccaagcggataatgttcagttatataaatatgttgttcaaaatggttacacactcattggaaaaacagct

SEQ ID NO: 311106 - DNA, 778 bp, Unknown
  Bacterial polypeptide expressing nucleotide sequence isolated from the Sargasso Sea
atgagtgctagttcagtaaaaaagataatgaaagataaagagatcgaatatgtagatcttagattcactgacccaagaggaaaacttcagcatgttactatggatgcaacaatagttgatgaagacatgttaaacgaaggtgttttctttgatggttcatctattgctggatggaaagctattaatgagtcggatatgattttaaaaccagatttatcaagagcagtggtagatccctttacatcacacaatacactaaacatattttgtgacattcttgatgcaattaaaaaagatccttacgaaagagatccaagaggtacagcaaaaaaagcggaagtatatttaaagaaaactggtgtgggagataaagcttactttgggccagaaccagaatttttcgtttttgatgatgtaagatattcaaacgatatgaatcatacgggatttcaaattgatagttctgaaggtccatataacactggaaaaaaatatgaaaatggaaacatgggtcatcgtcctggaattaaaggaggttacttccctgtgccaccggttgatagcgcacaagatatgagaagtgaatatttaaaagcaatgaaggatatggggattaaagttgaaaaacatcaccacgaagttgctccgagccaacacgaacttggaatgtattttggtactttagttgaccaagcagataatcttcaactttataaatatgcagttcatatggttacacactcattggaaaaacagcaacttttatgcctaaaccagt

SEQ ID NO: 311107 - DNA, 784 bp, Unknown
  Bacterial polypeptide expressing nucleotide sequence isolated from the Sargasso Sea
aaaacatcaccatgaagttgctccgagccaacatgagcttggtatgttatttagcactttggtaaaccaagctgataacgttcaactttacaaatatgttgtgcatatggtttctcaatcatttggtaaaacagcaacatttatgcctaaaccagttaagggagacaatggttcaggaatgcatactcatcaatctatctggaaaggtaaaacaccagttttttctggaaataaatattctggattatctgatactgctttgcattatattggtggaattttaaaacatgctaaagcaattaatgctttttcaaatgctactacaaatagttataaaagattaattccaggatttgaagcacctgtgttacttgcatattctgcaagaaacagatctgcttcatgcagaattcctattaccttaaataaaaaaggagctagatgtgaaattagatttcctgatgcttctggaaacccatatttaactttcgcttcaatgttaatggcaggtttagatggaataaaaaagaaaattaatccaggtaaatcgcttgataaagatttatatgccttgtcagaagatgaaataaaaaacatacctactgtttgtggttctttaagagaggccatggaagctttagatactgatagaagttttttaaaacaaggtggagtttttacagatgatcaaattgatgcttatattgctttaaaatttgaagaaatacataactttgagcatactcctcatccaattgaatttgatatgtattatagctgctaa

SEQ ID NO: 311108 - DNA, 552 bp, Unknown
  Bacterial polypeptide expressing nucleotide sequence isolated from the Sargasso Sea
aatgagtgcaggaaaagttttaaaatttataaaagaaaaagaagcggagtttgttgatctaagatttaccgatccaagaggaaaacttcaacatttaacaatggatgcatcaatagtagatgaagaaatgttaaatgaaggtgtattctttgatggttcttctattgctggatggaaagcgattaatgaatctgacatgattttaaaacctgatacagcaagaatgttcatggatccttttacgtctcataatactgtagttttgttttgtgacattctagatgcaattaaaaaagacccttatgaaagagatccaagaggtgttgcaaaaaaagctgaagaatatttaaaagcttcaggtattggtgataaagcattttttggacctgagcctgaattttttgtatttgatgatgtgagaattaaaaatgagatgaatgagtgtggatttaaaatagatagtaaagaaggtccttacaactcaggtaaagaatatgaaaatggaaacatgggacatagacctcaaattaagggaggttatttcccagtgcc

SEQ ID NO: 311109 - DNA, 781 bp, Unknown
  Bacterial polypeptide expressing nucleotide sequence isolated from the Sargasso Sea
aatatgggacataggcctggcatcaagggaggttattttcctgtgccaccagtagattctgctcaagacttaaggagtgaaatggtcttgtccttagttgacatgggagtgcctatggagaaacatcaccatgaggttgcaccatcacagcacgaattaggtatgatgtttggaacactaatagatacagccgataatgttcaactttacaaatatgcggttcataatgttgctcactcttttggccaaacagctacatttatgcctaaaccagtggcaggtgataatggaacaggaatgcatactcaccaatcaatatggaaggatggtaaaccacttttcgcaggtgataaatatgctaatttatctcaaacttgtttgcactacataggtggtattataaaacacgcaaaagccattaatgcatttactaacccatcaacaaattcttacaaaagattaatacctggttttgaagcccctgtaattttagcttactcagcaagaaatcgttctgcctcttgtcgtattccatttactgatagtccaaatggaaaaagggttgaagttaggtttcctgacgctactgccaatccttacctagcattttctgcaatgttaatggcaggattagatggtatacaaaataaaatagatcctggcgaagcgatggatcaagacttgtatgagcttcctgctagtgaacttacaagcattccaacagtatgcggttcattaagggaagctctagatgctttggcaaatgacatgtcatttttaa

SEQ ID NO: 311110 - DNA, 559 bp, Unknown
  Bacterial polypeptide expressing nucleotide sequence isolated from the Sargasso Sea
aatgagtgcagcaaacgttttaaaatatatcaaagaaaaagatgcggaatttgtagatctaagatttacagacccaagaggtaaacttcagcatttaactatggactcaacggtagttgatgagggaatgttaaatgaaggagtattttttgacggttcttctattgcaggatggaaagcaattaatgagtctgatatgattttaaagcctgatacttcaagaatgtttatggatcctttcacgtctcataatacagtagttttgttttgcgatattcttgatgctataaagaaaacaccatatgagagagatcctagaggtatagcaaaaaaagcagaagaatacttaaaatcctctggaattggtgataaagcattttttggtccagagcctgagttttttgtatttgatgatgtgagaattaaaaatgatatgaatgagtgtggctttgtcctagacagtaaagaaggtccctataattccggtaaagaatatgaaaatggaaacatgggtcatagacctggtgtaaaaggaggatacttccctgttccccctgta

SEQ ID NO: 311111 - DNA, 808 bp, Unknown
  Bacterial polypeptide expressing nucleotide sequence isolated from the Sargasso Sea
tccaagaagtattgcaaaaaaagctgaggcctatttgaaatcaacaggtgttggtgacaaagctttttttggaccagagccagaattttttgtgtttgatgatgttcgttataaaaatgatatgaatgaaacaagttttaaaatagatagtacagaaggtccttataacactggaagaaaatatgaaagtgggaatatgggtcaccgtcctggtataaaaggtggatactttcctgtgccgccagttgatagtgcccaagatatgagaggtgaatatttaaaaggattaagagatgtaggaataactgttgaaaaacatcatcatgaagttgcgccgagtcaacatgagcttggaatgttatatagcacacttgttaatcaagctgacaatgttcaactttacaaatatgtagttcatatggtttctcattcttttggtaaaacagcaacctttatgccaaaacctgtaaagggagacaatggttcaggcatgcatactcaccaatctatatggaaaggtaaaacgcctattttttctggcaataaatactcaggactttcggatacagctttacattatattggaggaattttaaaacacgcaaaagctattaatgctttttcaaatgcaacaacaaatagttataaaagattaataccaggatttgaagcgccagtattgttagcttactctgcaagaaacagatccgcttcatgtagaattccaatcacattaagtaaaaaaggtgcaagatgtgaaattagatttccagatgcatcaggaaacccttatctaacatttgcagca

SEQ ID NO: 311112 - DNA, 460 bp, Unknown
  Bacterial polypeptide expressing nucleotide sequence isolated from the Sargasso Sea
aatgaaaattaaagctgaatatatatggatagacggtaaaacacctaccgctaaattaagaagtaaaaccaaaattatggatcaaggtactgaacctcctatttggggttttgatggatcaagtaccgaacaagctacaggagaccaatctgactgtgtactaaaacctgtatcgcagtttccagatccaattaggggtggagataacatactcgttatgtgcgaagtattaaatgtagacatgacaccacatgcttcaaatacaagggcagcatgcgttgcttccgctgaaaacttttctgagtttgaaccaatgtttggtttagaacaagaatatacattttatgagcaatcatatgattcgctaaagtatggacaaccactaggatttcctccttcaggttatccagctccccaaggtggttattattgcggtgtaggagcagatgaagtgtatggt

SEQ ID NO: 311113 - DNA, 821 bp, Unknown
  Bacterial polypeptide expressing nucleotide sequence isolated from the Sargasso Sea
ccttaagccagataattctagagcgatcgtagatccattcacatctcataatacattaaatcttttttgcgatgttttagatgcaattaaaaaggatccttatgagagagatcctagaggaacagctaaaaaagctgaagcttacttaaaaagttcaggaattggagataaagcattttttggtcctgaagctgaattttttgtttttgatgatgtaagattcaaaaatgacatgaatgaaaccggatttaaaatagatagtaaggaaggtccttacaattcaggtagagaatacgaaaacggtaacatgggtcacagaccaggaattaaaggtggttatttccctgttccgcctgttgatagtgaacaagatatgaggagtgaatatctaaaagctatgaaagaaatgggaattaaagttgaaaaacaccaccatgaagttgcacctagtcaacacgaacttggaatgtattttggaactcttgtggatcaagcggataatttacaactttataaatatgctgttcacatggtttctaactcgtttggtaagacagctacttttatgcctaaacctgttaaaggtgacaatggttcaggtatgcacgttcaccaatcaatttggaaaggtgatactgcgttattttctggtgataaatatgcgggcttatcagatacagcattacactatataggtggaattttaaaacacgcaaaagcaataaatgctttttctaatgctacgacgaatagttaccaaagactaattccaggatttgaagctccagtttttatagcttattcagctagaaatagatcag

SEQ ID NO: 311114 - DNA, 796 bp, Unknown
  Bacterial polypeptide expressing nucleotide sequence isolated from the Sargasso Sea
tcatcacgaagttgcaactgcaggacaatgtgaaattgatatcaaatacgattacatgacaaatgctgcagatggtgcacaatcctacaaatatgttgttagaaatgttgcagctgaatttggtaaagtagcaacaatgatgccaaaaccaatttctatggactcaggttcgggaatgcacacaaatgttagtctatggaaaaaagatgtcaacacattttatgataaagatgaagacttggaattaagtcaaactggacgttatttctgtggaggagtaatggaacatgcaaaaggactaacagctattacaaaccctacaactaactcataccacagattagttccaggttatgaagcaccagtttacattgcatggagttcaagtaatcgttctgcaacaattagaattcctggacatttcaagggagaaaaatatgcatttatgaaaagaatggaatatcgtgttcctgatccagcttcaaatccatatctagtattttcagcagtcttggctgcaggattagatggtattaagaaaaagattgagccaggtgatccagttaaagaagacatttacaaaatgacaaaatctgaaagaatcaaacgaggaattgacacgttgcctgcaaatcttggaagagcattagatgaattggaaagtgacagaaaatatctatccccaatatttgataatgaggttttagataagattatagagttagaaagaagagatcatagagaaattgctatcaggcctcatccacatgaattctatctttactttgatgtctaa

SEQ ID NO: 311115 - DNA, 681 bp, Unknown
  Bacterial polypeptide expressing nucleotide sequence isolated from the Sargasso Sea
acgtgccccgtgataatggtaaagccgctacattcatgccgaagccaatgtttaacgacaacggaaacggaatgcacacccaccagtcattgtggaaaaacggtcagcctctttttgccggagatcagtatgcaggtttgagtcaggacgctttatattacattggtggaatcttgaatcatgctcctgctttggctgctttcaccaaccccctgactaattcctacaagcgtctggttccgggttttgaagcaccgattaacctggcttattcaaaccgaaaccgttctgctaccgttaggattccagttgttgattcccccaaagcacgtcgcctggaataccgctgcccagattctggtgccaatgtctacattgcttttgcagcaatgctgatggcaggattggatggaatacagaacaaaattgatccgggtgatccaatggatgtgaatatatatgaccttcctccggaaaagctgaacaaaatcggtaagatgccaagttccttgcgtgaatcacttgatgctttagagtcggataacgaattccttttgaaaggaaacgttttcaccaaagacgtgatcgaatactggttggattacaagatggaagaagaggtcaaagcgatcgattcccgaccccatccccacgaattcaatctgtactttaactactgat

SEQ ID NO: 311116 - DNA, 586 bp, Unknown
  Bacterial polypeptide expressing nucleotide sequence isolated from the Sargasso Sea
gattattattgtggtagaaacattggtgatagaatttcaagacaacatttaaatgcatgtattaaagcaggtattagtatttgtggaacaaacgcagaagttatgttaggacaatgggaatatcagattggtgcaggtggttcaatccatatgagtgatgatttatgggtagcaagatggttgatggaaagaatttgtgaaaaatggggattagaagtttcattacatccaaagccaattcaaggtgattggaatggtgctggttgtcatactaatttttctacaaaacaaatgagagaagatggtggatgggataagataattgaagcttgtgaaaagttatcagaaaatccacaagaacatattgaagtttatggtgaagataacgaacaaagattaacaggtgaacacgaaacttgttctattaatgaatttcgttatggtgtttcagatagaggagcatctattcgtattccatggcaagtagaagtagatggttgtggttatttagaagatagaagaccatcatctaactgcgacccatatattgttgcagaaaagttggtatctacgatttgtaaatgat

SEQ ID NO: 311117 - DNA, 652 bp, Unknown
  Bacterial polypeptide expressing nucleotide sequence isolated from the Sargasso Sea
atgagttcaagtaaaattttaaaattaatgaaagataaagaggctgaatttgttgacctaagatttaccgatccaaggggaaagctacaacacttaacaatggattctaaaattgttgatgaagaaatgttaaatgaaggagtattttttgatggatcttcaattgctggatggaaagctatcaatgaatctgacatgattttaaaacctgatttaaacaggggtattatggatccttatacatctcataatactttagtgctattttgtgatattttagatgctgttaaaaagaatccgtacgaaagagatccaagaggaattgccaaaaaagctgaagcatatttaaaaactactggtgttggagataaagcttattttggtcctgagccagaattttttgtatttgatgatgtaaaaataaaaaatgatatgaatgaaattggattttctattgatagttcagaaggtccatacaattcaggaaggaattatgaaaatggaaatatggggcatagacctggagtaaaaggtggatactttccagttcctccagttgatagtgctcaagatatgagaggagaatacttaaaaggcttaaaagaagttggaattactgttgaaaaacatcaccatgaagggctccaagtca

SEQ ID NO: 311118 - DNA, 948 bp, Unknown
  Bacterial polypeptide expressing nucleotide sequence isolated from the Sargasso Sea
tttaaaaaaatctggtgttggtgacaaagcatattttggccctgaaccagaattttttgtttttgatgacgtaaaaataaaaaatgaaatgaatgaaataggatttaagattgatagctcagaaggaccttacaactctggaaaaaattatgaaaatggaaatatgggacatagaccaggagttaaaggtggatattttccagtaccccccgttgatagtgctcaagacatgagaggtgaatacttaaaaggattaagagaagttggtattacagttgaaaaacaccatcatgaggttgcaccaagccaacatgagcttggtatgttatataatactttagtaacacaagctgataacgttcagctttataaatatgttgtacaaatggtctctcattcttttgggaagactgcaacttttatgccaaaaccagtaaaaggagataatggttcaggaatgcatactcaccaatcgatttggaaaggtaaaactccaatattttctggagataaatacgcaggtttatctcaaacagcacttcattatattggtggaattttaaaacatgctaaagcaattaatgctttttcaaatgcaacaacaaatagttataaaagattaattccaggttttgaagctccagttttattagcttactctgcgagaaatagatctgcatcttgtagaattccaattacattaaataaaaaaggtgcaagatgtgaaataagatttcctgatgctgcaggaaacccttatttaactttttcagctatgctaatggcgggactagatggtataaaaaacaaaattaatccaggcaaacctcttgatgaagatttatacgctttaccagaagataaagtcaaaaatataccaacagtatgtgggtcattaagagaagcaatggaaagtttagatagagatagaagctttttaaaacaagg

SEQ ID NO: 311119 - DNA, 930 bp, Unknown
  Bacterial polypeptide expressing nucleotide sequence isolated from the Sargasso Sea
tatcaaaacgacatgaatcatacaggatttcaaattgatagttctgaaggtccctacaatacaggaaaaaagtacgaaaacggaaacatgggtcaccgtcctggaattaaaggaggttactttccagtgccacccgttgatagtgctcaagatatgagaagtgaatatctaaaagcgatgaaagatatggggattaaagttgaaaaacatcaccatgaagttgctccaagccagcatgaacttggaatgtattttggtactttagttgatcaagcagacaatcttcaactttataaatacgctgtacatatggttacacattcatttggcaagacagctacttttatgcctaaacccgtaaaaggcgacaatggttctggaatgcactgtcaccaatcaatatggaaaggaagtacagcggtattttctggaaataaatatgcaggtttatctgatgcagcattacactacattggaggaatattaaaacacgctagagcgataaacgctttcgctaatgcaacaactaatagttataaaagattaataccaggctttgaagcgcctgtattactggcatactcagcaagaaacagatctgcgtcgtgtagaattccaattacacaaagtaaaaaagctgctagatgtgaagttcgtttccctgatgcagctggaaacccttacttaacattttctgcattattaatggcaggtcttgatggaattaaaaataaaatcgatccaggcaaatctttggataaagatttgtacgcattaagtgaatctgaagttaaaaaaattccaacagtttgcggttctttaagagaagctatggagagcttagacaaagatagaaagtttttaactcaaggtaatgttttcactgacgatcaaatagatgcttatatcgctcttaaatatgaagaaatt

SEQ ID NO: 311120 - DNA, 1012 bp, Unknown
  Bacterial polypeptide expressing nucleotide sequence isolated from the Sargasso Sea
atgtctaagtctccacaagatgtattaagtcaaattaaagatgaaggaattgaactcatcgatttaaaattcacagacatccatggtaaatggcaacatttaactcttacatcagacatgatagaagaggattcatttacagaaggtctagcatttgatggttcatcaataagaggttggaaagcaattaatgcctcagatatgtcaatggtcccagatgcaagtacagcatggatagatcctttttacaaacataaaactctaagtatgatttgctctatccaagagcctagaagtggagagccttatgatagatgcccaagatctttggctcaaaaggctttaaagtacttagaatctactgggatagctgatacagcattttttggacctgaaccagaattcttcctatttgatgacgtgagatacgactcaaaggagggttcttgcttttacagtgtagatacaatagaagctccatggaacacaggcagaattgaagaaggtggaaatttaggatacaagatccaatacaaagaaggttattttcctgtttctccaaatgatactgcgcaagacatcagatctgaaatgctacttttaatgggtgaattaggcatacccaccgaaaagcatcaccatgaagttgctggtgccggtcaacacgagcttggaatgaaatttgattcattaataaattctgctgataacgtaatgacttataaatacgttgtcaggaatgttgcaaaaaaatatgggaaaacagcaacgtttatgcccaagcctgtatttaacgataatggaactggaatgcatgttcatcaaagtttatggaagagtggtcagccactattttttggtgaaggagcatatgcaaatttatctcaaactgcaagatggtatatcggaggcatacttaaacatgctccatcattcttagcatttactaacccaaccacaaatagttataaacgattggttccaggattcgaagcacctgtaaatctagtct

SEQ ID NO: 311121 - DNA, 1408 bp, Unknown
  Bacterial polypeptide expressing nucleotide sequence isolated from the Sargasso Sea
tatgagcgctaaggacgtaattaaactaattaagtctaagaatattgagtttgtggatcttagatttacagacccaaggggtaaacttcaacatttaacaatggatacaactatcgtagatgaaggactgctaaatgacggtgtattttttgatggatcgtcaattgcaggatggaaagcaattaatgagtctgacatgatattaaagcctgatttaagtagaaaagtaattgatccttatacatctcataatactttaattttattttgcgatattttagatgcagttaagaaagatccatatgaaagagatccaagaggaattgcaaaaaaagctgaagcttatttaaaaaaaacaggtataggtgatacagcttactttgggccagagcctgaatttttcgtttttgatgatgtaagaattaaaaatgatatgaatgaaacaagtttttcaattgatagtacagaaggtccttataactccggaaaatcttacgacaatggaaacatgggtcatagacctggagtaaaaggaggatattttcctgtaccaccagtagatagtgctcaagatatgaggggtgaatatcttaaaggactaagagatgttggaattactgtagaaaaacaccaccatgaagttgctccaagtcaacatgaacttggaatgttatttggaactttggttgatcaagcagacaacgttcaactatataaatatgtagttcaaatggtttctcactcttttggtaaaactgcaacttttatgcctaagcctgttaaaggtgacaatggttctggaatgcatactcaccaatcaatttggaaagggaaaactccgatattttctggaaacaaatatgctggattatcacaaactgctctttactatattggtggagtattaaagcatgcaaaagcgattaatgcatttgctaatgctactacaaatagttacaaaagattaataccaggatttgaggctccagttttacttgcatattctgcaagaaacagatcagcatcatgtagaattccaatcacattaagcaaaaaaggtgcaagatgtgaaataagattcccagatgcatcaggaaatccatatttaacatttgcttctatgcttatggctggaattgatggaataaaaaataaaattgatccaggtaaatcgttcgacaaagacctttatgctttatcagaaaagcaagttaaaaaagtgccaactgtttgcggttctttaagagaggcaatggaggctttggataaagatagaagtttcttaactcaaggtaatgtatttactgatgatcaaatagatgcgtacatagaacttaaatatgaagaaattcataattttgaacatacgccgcaccctattgaattcgacatgtattatagctgttaa

SEQ ID NO: 311122 - DNA, 397 bp, Unknown
  Bacterial polypeptide expressing nucleotide sequence isolated from the Sargasso Sea
aaccgttctgcgtctattcgtattcctcacgtaactagcgataaagcgcgtcgtattgaagtacgtttccctgacccaacagctaacccatacctagcgttcaccgctatgcttatggccggtatcgacggtattaagaacaagatccatcctggtgattcaatggataaagacttgtacgacctaccgccagaagaagctgctgaaattccaacagttgcaagctcgctagagatggcgcttgaagcccttgataacgaccgcgacttccttaaagcaggtggcgttatgactgacgacatgattgatgcatacatcgaccttaagtctgaagaagtaactaaacttaacatgactactcacccagttgagttcgacatgtactacagcgtgtaaa

SEQ ID NO: 311123 - DNA, 910 bp, Unknown
  Bacterial polypeptide expressing nucleotide sequence isolated from the Sargasso Sea
cctggcttacaaaatccagctgaaagagggttatttccccgtcgctcccaacgacaccgctcaggacattcgttcggagatgctcctgttgatgggtcagctggggatccccaccgaaaagcatcaccacgaggtggccggtgccggacagcacgagctcggcatgaaattcgccgaactgattgaagcggcagacaacgtcatgacgtacaaatacgtcgtgcgcaatgtggcgaagaagtacggcaaaacagccacattcatgcccaagccggtcttcaacgacaacggctccggcatgcacgttcaccagagcctctggaaaggtggccagccgctgttcttcggcgaaggcacctacgccaatctgtcccagacagcccgttggtacatcggtggaatcctgaagcatgccccggcattcctggccttcaccaaccccaccaccaacagctacaagcgcctggtgcccggattcgaagcacccgtcaatcttgtctactccgaaggaaaccgctccgctgcggttcgtatccctctcaccggccccagcccgaaggccaagcgcctcgaattccgttccggtgatgccctggccaatccttatctggccttcagcgccatggtgatggcgggcctggatggcatcaaaaaccagatcgaccccggcgacggtgaagatcgtgatttgtttgaactgcctgccgaagagctggccaagatcgccacagtccccccgtcactgaacggcgccctggaagcgctcaatgccgatcgcggcttcctcaccgccggcggcgtattcagcgacgatttcatcgacaactggatcgatctcaaatacgaagaggtccagcagctgcgccagcgccctcatccccacgagtttgcgatgtactacgacgcttga

SEQ ID NO: 311124 - DNA, 952 bp, Unknown
  Bacterial polypeptide expressing nucleotide sequence isolated from the Sargasso Sea
attgatttctggatcaaactttgcctttcatgaagttgactctactgaaggaacttggaatagtgggtctgatgaaaatccaaatttaggacataaaccgagacacaaggaaggttattttcctcttccacctgtagatactttacaagatgtaagaactgaaatggttatgactatgcaagacataggtttaagtgttgaagctcatcatcatgaagttgctacaggtggtcaatgtgaaattgatttagaattttcaccattattaaaaatggctgatgatatgatgaaatataaatatgtagtcaaaaatgttgcgaaacagcatggtatgactgcaacatttatgcctaaaccactttttgaagataatggttctggaatgcacgtccatcaaagtgtttggaaggatggtgacactctaatgtataaggaaggcaactatgctaatctaagtgatttagcacttaactacataggtggtatccttaaacatgcaccagctttattagcattttgtgctcccactacaaattcttataaaagattagttccagggtttgaagctcctgtaaatattgtttactctcaaagaaatagaactgcttctgtaagaatacctgcttattcacaaagtcctaaatcgaaaagaatggaattcagatgtcctgacccaagtgcaaatccatatcttgcattttctgccatgttaatggctggattggatggaattaaaaataaaattaatcctggcgatcctacagatattaatttgtatgctgcaagtgatgaagttttgtcaaaaattcaatccactccgggatctttagctgaatctcttgaagctcttgaaaaagatcatgcatttttattagaaggtgatgtattcacaaaggatgttattgatacttacataagttacaaaaaagatagtgaggttgaccccaattaa

SEQ ID NO: 311125 - DNA, 950 bp, Unknown
  Bacterial polypeptide expressing nucleotide sequence isolated from the Sargasso Sea
tagtaccgagggaccatataacaccggaaaaaaatatgaaaacggaaatatgggacatagaccaggagtaaaaggtggatattttccagtgccgccagtagatagtgcacaggatatgagaagtgaatatttaaaagccatgaaagatatgggtattaaagttgaaaagcatcaccatgaggttgctccaagtcaacacgagctcggtatgtattttggtactttagtgaatcaagcagacaatattcaactttataaatatgcagttcatatggttacgcactcttttggaaaaactgcaacgtttatgcctaagcccgttaaaggtgataacggatcaggaatgcacgttcaccaatcaatatggaatggcaatactcctttatttatgggaaatgaatatgcaggtttatcaaagacggcacttcattatatcggtggaatattaaaacatgcaagagcaataaacgcatttgcaaatgcaacaacgaatagttacaaaagattaataccaggtttcgaagctccagttctactagcttactcagcgagaaatagatctgcatcctgcagaattccaataacattaagtaaaaaagctgcaagatgtgaaatccgatttccagacgcttcaggaaatccatatttaactttcgcatctatgttaatggcaggtttagatggtattaaaaataaaattgatccgggtaaatcttttgacaaagatttatatgctttgagtgaagcagagataaaaaaaattccaactgtatgtggatctttaagagaagcaatggaaagtttggataaagatagaaagtttttaactcaaggaaatgtatttactgacgatcaaatagatgcatacatagacttaaaaatggaagaaattcataacttcgagcatacacctcatccaattgagtttgatatgtactatagttgttaat

SEQ ID NO: 311126 - DNA, 691 bp, Unknown
  Bacterial polypeptide expressing nucleotide sequence isolated from the Sargasso Sea
aatgagcgcagcaaatgttttaaaatttattaaagaaaaagaagcagaatttgtagatttaagatttactgatccaagaggaaaactgcaacatttaacaattgatacttcagttgttgatgaagatatgcttaatcaaggtgtgttctttgatggctcatctattgctggttggaaagctattaacgagtctgacatgattttaaaacctgacactgctagaatgtttatggatccatttacttctcataatactgtggtgttattttgtgatattttagatgctgtgaaaaaatctccttatgaaagagatcctagaggtgttgcaaaaaaagctgaagagtatttaaaatcatctggtattggtgataaagcgttctttggtcctgagccagagttttttgtatttgacgatgtaagaataaacaatgatccaaataatactgggtttgttttagatagtaaggaaggtccttataattctggaaaagtttatgaaaatggaaacatgggacacagacctcctgtaaaaggtggttatttccctgtaccaccagttgatagtgaacaagacatgcgtggtgaatatttaaaaaatttaaaagaagttggaattaaagttgaaaaacatcaccatgaagtagctccaagtcagcatgagcttggtatgtactttggtactttagttgat

SEQ ID NO: 311127 - DNA, 1408 bp, Unknown
  Bacterial polypeptide expressing nucleotide sequence isolated from the Sargasso Sea
atgagtgcagaaaacgttttaaaatttattaaagaaaaagaagctgaattcgtagatttaagatttactgatccaagaggaaaacttcaacatttaacaatggacgcaacaattgttgatgcagatatgttaaatgaaggtgttttttttgatggatcatctattgctggttggaaagcaatcaatgaatctgacatgattttaaaaccagatactgcaagaatgtttatggatccatttacttcccacaatactgcagttttgttttgtgatatcttagatgcaataaagaaagatccttatgaaagagacccaagaggtgttgccaaaaaagctgaggaatacttaaaagcttcaggtataggtgacaaagcgttctttggtccagagcctgaattttttgtatttgacgatgtaagagttaaaaacgatatgaatgagtgtggatttaaaattgatagtaaagaaggtccatataattctggaaaagaatatgaaagtggaaatatggggcacagacctccaattaaaggtggatattttccagtacctccagttgatagtgaacaagatatgcgaggtgaatatttgaaaaatttaaaagaagttggaattaaagttgagaaacaccaccacgaagttgctccaagtcagcatgagcttggtatgtattttggtactttagttgatcaagcagataatgttcaattgtacaaatatattgttcaaatggtaactcactcatttggaaaaactgctacttttatgccaaagccagtagcaggagataatggttctggtatgcatattcaccaatccatttggaaaggtgatacaccagttttttctggtgatgcttatgcaggcttatctgaaacggctttacattatattggtggaattttaaaacatgctaaagctattaatgcttttgctaactctactacaaatagttataaaagattaataccaggttttgaggctccagtattacttgcatactctgcaagaaatagatcagcttcatgtagaattcctattaccttaagtaaaaaaggagcaagatgtgaaattaggttcccagatgcatctggtaatccatatttaacattcgctgctatgcttatggctggtattgatggaattaaaaataaaactcatccaggtgagtcttttgataaagatctttatgaattgccaccagaagaagtgaaagctattccaacagtatgtggatcattaagagaagcaatggaaaatcttgacaaagatagagaatttttaactcaaggtggtgtatttacagacgatcaaattgatgcttacatagctctaaagtttgaagaaattcataaatttgagcatgcacctcaccctgttgagtttgagatgtactacagtagctaat

SEQ ID NO: 311128 - DNA, 762 bp, Unknown
  Bacterial polypeptide expressing nucleotide sequence isolated from the Sargasso Sea
aatgagtgcagcccaagttcttaaatttattaaggataaacaaattgagtatgtggatctaagatttactgatccacgaggaaagctacagcatgtaaccatggatgtaggagttgttgattcagatatgctaaatagtggtgtattttttgatggttcttcaattgctggatggaaagctattaatgaatcggacatgattttaaagcctgatttaaacagaaaagtcattgatccatttacatctcacaacacacttatattattttgtgatattttggatgcggttaaaaaaaatccctatgaaagagatccaagaagtattgctaaaaaagctgaagcctatctaaaaaaaagtggtattggagataaagctttctttggtcccgaagcagaattttttgtatttgatgatgtaaaatataaaaatgaaatgaatgaaacaggtttcaaaattgatagctcagaaggtccctacaatacaggtaaagattatgataatggaaacatgggtcatagacctggaataaaaggaggatattttcccgttcctcctgtagatagcgctcaagacatgagaggtgagtttttaaaagctttaagagatatgggaattaaagtagaaaaacatcatcatgaggttgctccgagtcaacacgaattaggaatgtattttggaactttaacagatcaagctgataacttacaactttacaaatatggagtacatatggttgctcattctttggaaagacagcaact

SEQ ID NO: 311129 - DNA, 1060 bp, Unknown
  Bacterial polypeptide expressing nucleotide sequence isolated from the Sargasso Sea
aaaaaaactggcgtgggagacaaagcttactttggaccagaaccagaattttttgtttttgacgatgtaagatatgcaaacgatatgaatcacaccggatttcaaattgatagttctgaaggtccttacaatacaggtaaaaaatatgaaaacggtaacatgggacatcgtccaggaattaaaggaggttacttccctgtaccaccggttgatagtgcacaagatatgagaagtgaatatttaaaagcaatgaaggatatgggaattaaagttgaaaaacatcaccatgaagttgctccgagccaacatgaacttggaatgtatttcggtactttagttgaccaagcagacaatcttcaactatataaatatgcagtacatatggttacacactctttcggtaagacagctacttttatgcctaaaccggtcaaaggagataatggttctggtatgcactgccaccaatcaatatggaaaggaagtacagcagtattttctgggaataaatatgcgggtttatctgataccgcattacactatattggtggaatattaaaacatgctagagcgataaatgctttctctaatgcaacaaccaatagttataaaagattaataccaggctttgaagcgccggtactgctagcttactcagcaagaaatagatctgcgtcttgtagaattccaattacgcaaagtaaaaaagctgcaagatgtgaagttcgtttccctgatgcagctggaaatccatacttaacattttctgcattattaatggcaggtcttgatggaattaaaaataaaattgatccaggtaaatctttagataaagatttatatgcattaagtgagtcagaagttaaaaaaattccaacagtttgtggttctttgagagaagctatggaaagtttagataaagatagaaaatttttaactcaaggtaatgttttcactgacgatcaaatagatgcttacattgctcttaaatatgaagaaatttacaattttgagcacactccacatccaatggagtttcaaatgtactacagctgctaaa

SEQ ID NO: 311130 - DNA, 1221 bp, Unknown
  Bacterial polypeptide expressing nucleotide sequence isolated from the Sargasso Sea
agtctgacatgatattaaaaccagatctttccagaaaagtaattgatccttttacatctcataacacattagtattattttgtgacattttggatgctgttaaaaaaaatccttacgaaagagatccaagaggaatagcaaaaaaagctgaagcatatttaaaagaaactggtataggtgataaagcgttttttggacctgagccagagttttttgtttttgatgatgtgagaattaaaaatgatatgaatgagactggatttgtaattgatagttccgaaggtccttacaactctggaaaaaaatatgaaaatggcaatatgggtcacaggcctggaattaaaggtggatattttcctgtaccaccagttgatagtgctcaagatatgaggggagaatatcttaaaggtcttcgtgacgtaggaattactgttgaaaaacaccatcatgaagttgctcctagtcaacacgaactaggcatgaaatttagtacactagttgatcaagcagacaatgttcagctttataaatatgttgttcaaatggtttctcattctttcggtaaaacggcaacatttatgcctaagcctgtaaaaggtgataatggatctggtatgcatattcaccaatctttgtggcagggtgacactccgttattttcaggacatagatattctggtttatcagatacagctattcactacattggaggaatcttaaaacacgctaaagctataaatgctttttcaaatgctaccacaaatagttataaaagattaattcctggttttgaagctccagtacttttagcatattctgcaagaaacagatcggcatcatgtagaattccaataacgttgagtaaaaaaggtgcaagatgtgagataagatttccagatgctgcaggaaatccatatctaactttttctgctatgttaatggctggcttagatggtataaaaaataaaatagatccaggcgagtcttttgataaagatttgtacactttatctgaaagtgaaattaaaaatatccctaccgtatgtggttcgttgcgtgaggctatggaaagtttggatattgaccgaaattttttaaaagaaggaaatgtatttactgacgatcaaattgatgcttatatcgcactaaagtttgaggaaatatataatcttgaacatactcctcatcctattgagtttgatatgtactacagtagttaat

SEQ ID NO: 311131 - DNA, 871 bp, Unknown
  Bacterial polypeptide expressing nucleotide sequence isolated from the Sargasso Sea
gttatttccagtaccgccagttgacagtgctcaagacatgaggggtgaatatttaaaaggtttaagagaagtcggcattacagttgaaaaacaccaccatgaagtcgctccaagtcaacatgaacttggaatgttatacaatacattggtaacgcaagcagataacgttcagctatataaatatgtagttcaaatggtttctcattccttcggaaaaactgcaacctttatgcccaaacctgtaaaaggtgataatggttcaggaatgcacacacatcaatcaatttggaaagggaaaaatccagtattttcaggaaataaatatgcaggtttatcagaaactgcacttcattatattggaggaatattaaaacacgctaaagcaattaatgctttttcaaacgcaacaacaaatagttataaaagattaattccaggttttgaagctccggtcttattagcttactcagcaagaaacagatctgcttcatgcagaattccaattacattaaacaaaaaaggtgcaagatgcgaaattagatttcctgatgctgcaggaaacccttatttaactttttcagcaatgttaatggcaggattagatggtattaaaaataaaattaaccctggtaaacctcttgatgaagatttgtatgcattaccagaagataaagtaaaaaatattccaactgtttgtggatcactaagagaagctatggaaagtttagatagagatagaggttttttaaaacaaggtggtgtatttactgatgaccaaattgatgcatttattgcattaaaatttgaagaaatttataaccttgagcatactccgcaccctatggagtttgaaatgtattacagctcttaa

SEQ ID NO: 311132 - DNA, 1012 bp, Unknown
  Bacterial polypeptide expressing nucleotide sequence isolated from the Sargasso Sea
atgaaggtaaaagcagaatatatttggattgacggatatgaacctactgccaatttaagatcaaaaactaaagtgttggatggagcagtatcttcagtttctgaactaccaacttggggttttgatgggtcaagcacattgcaggcagatggaggagatagtgattgtttactaaaaccagtgtggatgtgtccggacccaattcgtggcggggaaaatattttagtaatgaacgaagtttgtaatcctgatggtacaccacataaatcaaattctagggctgctttagtagagattgccgaaaaatttaaagaacataaaccttggtttggtatcgaacaggagtacacacttatggatggtaagcaaccagcaggatggccagaagaaggatttcctgaaagaccccaaggaccttattattgcagcgtaggatctgaagatgttgctgctcgctcaatggtagaagatcacctagatttatgtctagaggcaggattagaagtgtcaggaatcaatgctgaagtaatgttgggacaatgggaatatcaagtaggacctttacctgctttagaggttggtgatcaattgtgggtagcaagatggcttctcgaaagagttggtgaagaatatggcctaagagtagaactacatccaaaaccaataaaaggcgattggaatggatctggagcacatattaactatagtacagaatctatgcgtgcagacggagggttgaaagtaattgaagaagcatgtgaaaaactcggacaaaacgttgataaacatattgcagtttatggagatgctaatgatgagcgtttaactggagatcatgaaacatgtagcatcaatgagtttaagtatggcgtaagcgatagaggagcatcaattagaattcctatgggggtagcaaatgatggcaagggatatttagaagacagaaggcccgcatcaaatatcgacccatataaagcatgcgctgctttaatagacacaacttgtagttaaa

SEQ ID NO: 311133 - DNA, 1408 bp, Unknown
  Bacterial polypeptide expressing nucleotide sequence isolated from the Sargasso Sea
atgagcgctagtaaagtaattaaacaaatgaaagataaagacattgaatatgtcgatttaagatttacagatccaagagggaaattacaacatgtcacaatggactcaaaagtagtagatgaggagatgcttgatgaaggtatattttttgatggatcgtctatagctggatggaaagcgataaatgagtctgatatgattttaaagccagacttatcaagaacagtcattgacccttttacaagtcataatactatgaatattttttgtgatgttatggacgcaatcaaaaaagatccctacgaaagagatccacgtggaactgcaaaaaaagcagaagcgtacttaaaaaaatcaggaattggagacaaggcatatttcggtccagaggcagaattttttgtgtttgatgacgtaaaatataaaaatgatatgaacgaaactggttttaaaatagatagtacagaaggtccatataatactggaaaagattatccaaatggtaacatgggacatagacctggtgttaagggtggatactttcctgttcctccagttgatagcgcacaagatatgcgtagtgaatatttaaaagctatgaaagatatgggaataaaagttgaaaaacatcaccacgaggtagcacctagtcaacacgaacttggaatgtattttggaactttagtagaccaagcagataacctgcaattatacaaatatgctgttcacatggtttctcattcatttggtaaaacagctacgtttatgcctaagcctgtgaaaggcgataatggatcagggatgcatgttcaccaatcaatatggaaaggtgataaagcactattctctggtgataaatatgcaggcttatcggaaatagcactaaattacattggtggaattttaaaacacgcaaaagcaataaatgcattttctaacgcgacaacaaacagctacaaaaggttaatacctggttttgaagcaccggttcttttagcatattcagctaggaatagatctgcttcttgtagaatacctattaccttaagtaaaaaagctgcaagatgtgaaataagatttggtgatgctgctggaaatccatatttaacatttgctgcaatgttaatggcgggattggacgggattaaaaataaaatagatccaggtaaatcttttgataaagatttatatgcattatcagaagcagaagttaaaaaaattccaactgtttgtgggtctttaagagaagcaatggaaagtttagataaagatagagattttttaaaacaaggtaatgtatttactgatgatcagatagatgcttatattgctttgaagtttgaggaaattcacaattttgagcacactcctcaccctatcgaatttgatatgtactatagctgttaaa

SEQ ID NO: 311134 - DNA, 1408 bp, Unknown
  Bacterial polypeptide expressing nucleotide sequence isolated from the Sargasso Sea
tatgagttcaaataaagtattaaaattgatgaaagataaagagattgaatttgttgacttaagattcactgatccaagaggtaaattgcaacatctaacaatggattcaacaattgttgatgatgatatgcttaacgaaggagtattttttgatggatcttcaatagctggttggaaagctattaacgagtcagacatgattttaaaacctgatttaagtagacaagtaattgatccttatacttcacacaatactctaattatattttgcgatatcttggacgcagtgaagaagactccttacgaaagagacccaaggggtattgctaaaaaagccgaagcatatttaaaaaaatcaggagttggtgataaagcttattttggtcctgagccagaattttttgtatttgatgatgtaaaaattaaaaatgaaatgaatgaaataggctttaagattgatagttctgaaggcccttataactcaggcaaaaattatgaaaatggaaacatgggacacagacctggagtaaaaggtggatattttccagtacccccggttgacagtgctcaagacatgagaggagaatatttaaaaggtttgagagaagttggtattacagttgaaaaacaccatcacgaagttgctccaagtcaacatgaacttggaatgctatacaatactttagtaacacaagcagataacgttcagttatataaatacgtagttcaaatggtttctcattcttttggaaaaactgcaacctttatgcctaaacctgtaaaaggtgataatggctcgggaatgcatacacaccaatcaatttggaaagggaaaaatccagtattttcaggaaataaatattcaggtttatcagaaactgcgcttcattatattggaggaatattaaaacatgctaaagcaattaatgctttttcaaatgcaacaacaaatagttataaaagattaattccaggtttcgaagctccagtcttattagcttattctgcaagaaacaggtctgcttcatgtagaatcccaattacactaaataaaaaaggtgcaagatgtgaaataagattccctgatgccgcaggaaacccttatttaactttttcagcaatgttaatggcgggattagatggtattaaaaataaaattaatccaggaaaacctcttgatgaagatttatattctttgccagaagacaaagtaaaaaacattccaacagtttgtggatcattaagagaagcaatggaaagtttagatagagatagaagttttttaaaacaaggtggtgtatttactgatgaccaaattgatgcttttattgcattaaaatttgaagaaatttataaccttgagcacactccacatccaatggagtttgaaatgtattacagctcttaa

SEQ ID NO: 311135 - DNA, 852 bp, Unknown
  Bacterial polypeptide expressing nucleotide sequence isolated from the Sargasso Sea
aagcagatggatcaagctctgattgtattcttagacctgtatatgaatacacgggacctagaaactccgacagtctggttatgtgtgaagttttatcaccagataggtctgcacatccatcaaatacgcggagcgcctgcgttgatcttgtaacagatgattggtggtttgggtttgaacaagaatattttttcacgaaccccgaggatggaacaattctaggctgggaagatggaaccccaagaccacagggtgattactattgtggtgttggctctggcaatgtccaagctagagaagtttctgaggcacacatggatgcttgtcttgaggcaggtattatgattactggcaccaatgcagaggtagcgcttggtcaatgggagtatcaatgttttggtaagggtcttaaagcagctgatgatttgtgggtaagtagatacttgctccatctaatcgcagaagagtatggcgtttctgtaaacattcatccaaagccgcaacaaggtgattggaatggttctggaatgcacactaatttttccaacgagcaaatgagaagcgcaggctcagaagaactgatgacttctatgtgtgacaagctgggagaggttcatgcagaagggatatcaaattatggttcggataatgatatgcgattgactggaaatcatgaaactcaaagcattgatacattttcctatggggtgagcgatagaggcgcaagcattcggattcctatctatacagttgagaatgactggaatggttatctagaagacagaaggcctgcttcaaatgcagatccatataaaatcatttcgcacattgttggtacgctgacaaaataag

SEQ ID NO: 311136 - DNA, 1189 bp, Unknown
  Bacterial polypeptide expressing nucleotide sequence isolated from the Sargasso Sea
aatgagtgctagtaatgtattaaaaacccttaaagataaaaatattgagtatgtggatctaagatttactgatccaagaggtaaacttcaacacgtcactatggatgcaaagatggtagacgatgatatgttgaaagaaggtattttctttgatggatcatcaattgcaggttggaaagctatcaatgagtcagatatgatacttaaaccagataccaatagagcaattgtagatccgtttacatctcataacactctaaatttattttgtgatgttttagacgctataaaaaaaactccctatgaaagggatccaagaggaactgcaaaaaaagctgaggcttatttaaaagactctggcattggtgataaggcattttttggtcctgaagcagaattttttgttttcgacgatgtaagattcaaaaatgatatgaatgagactggatttaaaattgatagtaaagaaggtccttacaatactggaaaagaatatgaaaatggtaacatgggtcatagaccaggaattaaaggaggttattttcctgtaccaccagttgacagtgagcaagatatgagaagtgaataccttaaggctatgaaagatatgggaattaaagtggaaaaacatcaccacgaagttgctccaagccaacatgaactaggtatgtactttggaactcttgtcgatcaagcagataacttacaactttataaatatgcagttcatatggtttctcattcttttggcaaaaccgctacttttatgccgaaacctgttaaaggtgataatggttcaggtatgcacgttcatcaatcgatttggaaaggtgatactgcattattttctggtgataaatacgcaggactatcggatacggcattacactatattggtggtattttaaaacatgcgaaagcaattaatgctttttcaaatgctacaacaaatagttataaaagattaattccggggtttgaagctccagttttattagcttattcagcaagaaatagatcagcttcatgtagaattcccatcactttaagtaaaaaagcagctagatgtgagattagatttggtgatgctgcaggcaatccatatttaactttctcagcaatgttaatggctggtttagatggaattaagaataaaattgatccaggtaaatcattcgataaagacctt

SEQ ID NO: 311137 - DNA, 1153 bp, Unknown
  Bacterial polypeptide expressing nucleotide sequence isolated from the Sargasso Sea
ttgtcaatattttgtgatattttagatccaataagtggggacccttatgatagagaccccagatctacagcaaaaggtgcattaaattacatgaaaagtttaggaataggtgataatgctttttttgggccagaaccagaattttttatttttgacgatgtaaaaatggaggtttcaagcaccgtaagttatgctgaagtggattcttctgaaaacccagggaacagcgcgcgtgactatgatgctggtaatatggggcatagacctggtataaaaggtggttacttcccagtaccgccagttgatagcggacaagatattaggagtgaaattgtttcagtattgtcagacatgaatgtccctatggaaaaacatcaccacgaagttgcacctgctcaacatgaattaggattaaaatttggaacattaatagatacggctgacaatgtgcaactttataagtatgcagttcatatggtagcccattcatatggaaaaacttcaacatttatgcctaaaccagtagcaggagataatggttcaggaatgcatgttcaccaatcaatatggaaatcaggtaaaccgctatttgctggcaatgaatacgcaaatctttctgaaactgctcttttctatattggtggcattataaaacatgcaaaagctcttaatgcatttacaaacccctccacaaatagctataaaagattggttccaggttttgaagcgcctgtacttttagcttattcttctagaaataggtctgcatcttgccgaatcccttttgcacagagtccaagtggaaaaagagttgaaataagatttcccgatgcaatgtcaaatccttatttagcttttgcctctatgcttatggcaggactggatggaatccaaaataaaattcatccaggtgagtctatggataaagacttatatgatttacctattgatgaattagcaaatgtaccaactgtttgtgggtctctaagagaagctttggaatccctacaaactgataatgacttccttacacaaggaggtgtgttttctaaagatcagattaatgcatatgtagaattaaaaatggaagaagtgattaattttgagcatgctccacatccaattgaatatcaaatgtattattcatcttaat

SEQ ID NO: 311138 - DNA, 1240 bp, Unknown
  Bacterial polypeptide expressing nucleotide sequence isolated from the Sargasso Sea
aggatggaaagcaattaatgaatctgacatgatattaaagcctgatttaggtagaagagtaatagatccttatacatctcataatactttaattttattttgcgatattttagatgctgttaagagagatccatatgaaagagatccaagaggaattgcaaaaaaagctgaagcatatttaaaaaaaactggaatcggagatacagcttactttggtccagagcccgagttttttgtttttgatgacgtaagaattaaaaacgacatgaatgaaacaagtttttcaattgacagttcagaaggtccatataattctggaaaatcttatgataatggaaacatgggtcatagacctggagtaaaaggaggatattttccagtaccaccagtagatagcgctcaagatatgagaggtgaatatcttaaaggacttagagatgttggaattactgtagaaaaacaccaccatgaagttgcccctagtcagcatgaacttggaatgttatttggaactttagttgatcaagcagataatgttcaactatacaaatacgtagttcaaatggtttctcactcttttggaaaaactgcaacttttatgcctaagccagttaaaggagataatggttctggaatgcatactcaccaatcaatttggaaagggaaaactccagtattttctggaaataaatatgctggattatcacaaactgctctttactatattggtggagtattaaagcatgcaaaagcaataaatgcatttgctaatgctactacaaatagttacaaaagattaataccaggatttgaagctcctgttttacttgcatattctgcaagaaatagatctgcttcatgcagaattccaataacattgagtaaaaaaggtgcaagatgtgaaataagattcccagatgcatcaggaaatccatatttaacatttgcttcaatgcttatggctggaattgacggaataaaaaataaaattgatccaggtaaatcgtttgacaaagatctttatgctttatcagaaaagcaagttaaaaaagtgccaactgtttgtggctctttgagagaagcgatggaagctttggataaagatagaagtttcttaactcaaggtaatgtatttactgatgatcaaatagatgcttacattgaacttaaatatgaagaaattcataatttcgaacatacgccgcatcctattgaattcgacatgtattatagctgttaa

SEQ ID NO: 311139 - DNA, 541 bp, Unknown
  Bacterial polypeptide expressing nucleotide sequence isolated from the Sargasso Sea
ttgcactttattaccattggtggtatattaaaacatgctccatcattattagctttttgtgcacctacaacaaattcatataagcgattggtgcctgggtttgaggcacctgtaaatattgcttattctgctgctaatagaactgcttctgttagaatacctaataactatacagctagcccaaaagcaaaaagaattgagtttagatgtccagatccttcctcaaatccttatctagcattttctgcgatattaatggcaggcttagatggtgttaaaaacaagactaatccaggtaaacctacggacataaatatttatgaagctccagctagtgtcttagcaaaaattccttcaacgcctggttcacttgctgagtctcttgatgctttagagaaagatcataaatatttgcttaacggcgatgtatttactaaagataacattgaaacttacattgcttacaaaagggaaaatgaggttagcccaatggatttaagacctcatccacatgagtttaatctttattatgatgtctaaa

SEQ ID NO: 311140 - DNA, 1012 bp, Unknown
  Bacterial polypeptide expressing nucleotide sequence isolated from the Sargasso Sea
ttttttgtatttgatgatgtaagaattaaaaatgatatgaatgagtgcggctttatacttgatagtaaagagggtccttataattctgggaaagaatatgaaaatggaaatatgggtcacagacctggtgttaaaggaggatacttccctgttccacctgtagatagtgaacaagatatgagaagtgaatatttaaaaaacttaaaagaagttggaattaaagttgaaaaacatcaccatgaagttgcccctagtcaacatgaattaggaatgtattttggaactttggttgatcaagccgataatgtacaattatataaatacgttgttcaaatggtaactcactcatttggaaaaacagcaacatttatgcctaaaccagttgcaggtgacaatggttctggaatgcacactcaccaatcaatatggaaaggtgatacacctgtattttctggtgaagcttatgcaggattgtcggaaacagcgttacattatatcggtggaattttaaaacatgcaaaagcaattaatgcattttcaaatgcaactacaaatagctacaaaagactaattcctggttttgaggctccagtattattagcctactcagcaagaaatagatcagcatcatgtagaattcctattaccttaagtaaaaaaggtgcaagatgtgaaattagatttcctgatgcttcaggaaatccttatttaacttttgcagcaatgctaatggctggaatagatggaattaaaaataaaatccatccaggagaatcatttgataaagatttatatgaactaccaccagaggaagtaaaatctattccaactgtttgcggatctttaagagaggctatggaaagtttagataaagatagagaatttttaactcaaggtgatgtttttactgatgatcaaattgatgcttatattgctttaaaatttgaagaaattcataaatttgaacatgcacctcatcctgttgagtttgagatgtattacagttgctaaa

SEQ ID NO: 311141 - DNA, 1408 bp, Unknown
  Bacterial polypeptide expressing nucleotide sequence isolated from the Sargasso Sea
atgagttcaaaagatgttttaaaaatgatgaaagataaagatatagagtttgttgacctaaggtttacagacccaagaggtaaattacaacatcttactatggattcaactgtcgttgacaacgatatgttaaatgacggggttttttttgatggttcatctattgctggttggaaagcaattaatgagtcagatatgatactaaaacctgatttaagtagaaaagtaatcgatccatatacttcacataacactttaatattattttgtgatattttagatgcagtaaaaaaagatccttatgaaagagatccaagaggaatagcaaaaaaagcagagcagtatttaaaaaaaagtggtatcggcgatagggcttattttggtcctgaaccagaattttttgtttttgatgatgtcagaattaaaaacgatatgaacgaaacaggtttttcaatagatagtactgagggcccatataactcaggtaaaaaatatgaaaatggcaacatgggtcatagaccaggaattaaaggaggttattttccagtgcctccagttgacagtgctcaggatatgagaggtgaatatttaaaaggattaagagatgtgggtataacggttgaaaaacatcatcatgaggtagccccaagtcaacatgagttaggaatgctttttggaactttagtaaaccaagcagataatgttcagttatataaatatgttgtccaaatggtttctcattcatttggtaaaactgctacatttatgcctaagcctgttaaaggtgataacggatcaggtatgcatacccaccaatcaatatggaaaggtaaaactccagtattttctggagataaatatgcaggcctttcacaaaccgccctttattacattggaggaatcttaaaacatgcaaaagcaattaatgcattttcaaacgctacaacaaacagttataaaagattaataccgggttttgaagctccagtattgctagcctactcagcaagaaatagatctgcttcatgtagaattccaattacactgagtaaaaaaggcgcaaggtgtgaaattagattccctgatgccgcaggaaatccatatttaacatttgcagctatgttaatggcaggattagatggtattaagaaaaaaattaatccaggtaaatcatttgataaagacctttatacattgccggaagatgaaattaaaaatattcctaccgtttgtggttctttaagagaagcaatggaaagtttagatactgatagagattttttaaagcaaggaaacgtatttactgatgatcaaattgatgcttacattgctctaaaatttgaggaaatttataatttagaacatacacctcacccaattgagtttgacatgtattacagtggttaaa

SEQ ID NO: 311142 - DNA, 700 bp, Unknown
  Bacterial polypeptide expressing nucleotide sequence isolated from the Sargasso Sea
atgagcgcagctaatgttttaaaatttattaaagaaaaagaagcagaatttgtagatctgagatttactgaccctagaggtaaacttcagcatttaactatggacgtaactgttgttgatgaagacatgctgagcaatggagttttttttgatggttcatcaattgcaggatggaaagcaattaatgaatctgatatgattttaaaaccagatactgctagaatgtttatggacccttttacttctcataacactgcagttttattttgtgatattttagatgctattaaaaaagatccttacgagagagatcctagaggagttgcaaaaaaagctgaagagtatttaaaagcatcaggtattggtgataaagcattttttggtccagagcctgagttttttgtttttgatgatgtaagaattaaaaataatatgaatgaatgtggttttgttttagatagtaaagaaggaccttataattctggtaaaaaatatgaaaatggtaacatgggtcatagacccggagttaaaggtggttattttcctgtacctccggttgatagtgaacaagatatgagaggtgaatatttgaaaaatttaaaagaagtaggtattaaagttgaaaaacaccaccatgaagttgcaccaagtcaacacgaattaggaatgtatttcggaacattagttcaacaagcagata

SEQ ID NO: 311143 - DNA, 762 bp, Unknown
  Bacterial polypeptide expressing nucleotide sequence isolated from the Sargasso Sea
cagcttgtgccgcatctgcagaaaatttttctgaatttgaaccaatgtttggtttagaacaggagtacacattttatgagcaatcatatgattctctaaaatatggccaacctttaggctttccaccatcaggctaccccgctcctcaaggaggatactactgtggtgttggctctgatgaagtatatggaagatcaatatctgaagatcatgctactgcttgcatggaagctggtctaaatatttctggaacaaatgcagaagttatgcctggacaatgggaattccaaattggacctgttggcgctccaaatattggcgatgaaatctggattgcaagatggttactttacagaattgctgaagattacaatatttctgcaactcttacaccaaagcctgtgaaaggcgactggaatggagctggtatgcatactaacttctcaacaaaacaaatgagagaagatggcggatacggtgctgttattgcaggttgcgaagcattagaaaaaaatgctgaatttcatgttcaaaactatggagatggaattgaagatcgtttaactggagctcatgagacacaaaaatttgacaccttttcatatggagttagtgatagaggagcatctatcaggattccatggcaggtcgaaaaagatcaaaaaggttatctagaagacagaagaccaaatgcaaatgctgatccttacgtaattgctactgtaatgattgatacgatttgttctgctgcttcagcttagc

SEQ ID NO: 311144 - DNA, 1411 bp, Unknown
  Bacterial polypeptide expressing nucleotide sequence isolated from the Sargasso Sea
aatgtcagttgaatcagttttaaagcaacttgaagaattagaagttaagtttgttgatttacgttttaccgacaccaaaggtaaagagcagcacgtatctattcctgctcatcaggtagacgctgatttcttcgaagacggcaaaatgtttgacggttcgtcaatcgctggctggaaaggcattaacgaatcagacatggtactgatgccagacccaaccacgtttgtattagacccatttaccgaagaaaccacagctctgatccgctgtgacattctcgagccaggcactatgactggttatgaccgcgacccacgttctatcgcgaaaaaagcggaagaatacttacgctctaccggtatcgctgacactgtattagttggaccagaaccagaattcttcctgttcgacgacgtacgtttcggtactgacatgtctggttgtttcgtgaaaatcgacgctaaagaagcggcatggaactctggcactagctacgaaggtggtaacactggtcaccgtccattcgtgaaaggcggttacttcccagtagctcctgttgactcatcacaagacttacgtagcgctatgtgtttagtgctcgaagaaatgggtcaagtcgttgaagctcaccaccatgaagtggcgactgcgggtcaaaacgaaatcgcaactcgcttcaacactctgactaagaaagcggacgaaatccaaattctgaagtacgtagtacacaacatggctcacgcctacggtaagactgcgactttcatgcctaagccaatcgttggcgacaacggtagcggtatgcacgttcaccaatctctgtctaaagacggtgtgaacctgttcgctggcgacaaatacgctggtttaagtgaaactgcactgtactacatcggtggtatcatcaagcacgctcgcgcgctgaacgctttcactaacccaagcactaactcttacaagcgtttagtaccacacttcgaagcgccagtgatgttagcttactcagcacgtaaccgcagcgcttcaatccgtattccagtggtaccaagccctaaaggccgtcgtatcgaaactcgcttcccagatccacatgcaaacccatacttaggtttcgcagcgctgctgatggcaggtatcgacggtatccaaaacaagatccatccaggcgaagctatggataaagacttgtacgatctgccagcggaagaagcggctgaaatcccacaagtagcgacgtcattagaaaacgcacttgagaacctgcaagctgaccacgagttcttaactcgcggcggtgtattcagcgaagatttcatccagtcttacattgcactgaaatctgcagaagctgagcgtgtaagccgtacaactcacccattagagttcgagatgtactacagcctgtaa

SEQ ID NO: 311145 - DNA, 1408 bp, Unknown
  Bacterial polypeptide expressing nucleotide sequence isolated from the Sargasso Sea
atgagtgcagcaaacgtattaaaatttatcaaagaaaaagatgcagaatttgtggatctaagatttactgatccgagaggaaaacttcaacacttaacaatggactcttcagtagttgataatggtatgttgaatgaaggtgtcttttttgacggttcgtctattgctggttggaaagcaattaacgagtctgacatgattttaaaacctgatactgcaagaatgttcatggatccttttacgtctcataatactgtggttttgttttgtgacattttagatgcagttaaaaaagatccttatgaaagagatccaagaggtgttgctaaaaaagctgaagaatatttaaaagcttcaggaattggtgataaagcattttttggacctgaacctgaattttttgtttttgatgatgtgagaattaaaaatgatatgaatgagtgtggatttaagttagatagtaaagaaggtccttacaactcaggaaaagaatatgaaaatggaaacatgggacatagacctcaaattaaaggaggatattttccagtaccaccagttgatagtgaacaggacatgcgtggtgaatatcttaaaaatttaaaagaagttggaattaaagttgaaaaacatcaccatgaagtagctcctagtcagcacgagcttgggatgtatttcggaactttggttaatcaagcagataacgttcagttatacaaatatgtagtgcaaatggttacacactcatttggaaaaactgcaacatttatgccaaaaccagttgctggtgataatggttcaggtatgcacatacaccaatctatttggaaaggtgatactccagtattttcaggggatgcatacgcaggcttaagtgaaacagcattacattatattggtggaattcttaaacatgctaaagcaattaatgcttttgctaactctacaacaaacagctacaaaagattaataccaggttttgaagctccagttcttcttgcatactcagcaaggaatagatctgcttcttgcagaataccgataactttaagtaaaaaaggtgcaagatgtgaaattagattcccagatgcagctggaaacccatatttaacttttgctgcaatgttgatggctggacttgatggaattaaaaataaaatccatccaggtgaatcttttgataaagatttatatgaattaccacctgaggaagttaaagctataccaacagtttgtggctctttaagagaagcgatggaaagtttagataaagacagagagtttttaactcaaggcgatgtctttactgatgatcagattgatgcttatattgctctgaagtttgaagagatacacaaatttgaacatgcacctcatcctgtagagtttgagatgtattacagtagctaat

SEQ ID NO: 311146 - DNA, 817 bp, Unknown
  Bacterial polypeptide expressing nucleotide sequence isolated from the Sargasso Sea
aaagctttaagagatatgggagttaaggtagaaaaacaccaccatgaagttgctcctagccaacatgaacttggtatgtactttggtactcttacaaatcaagctgacaatattcagctctataagtatgcagtgcaaatggttacacactcattcggtaaaactgcaacatttatgccaaaaccagtcaaaggagataatggatctggcatgcattgtcatcaatcaatatggaaaggatctactccaacttttatggggaaagaatatgccggtttatctaagacagctctttattacattggtggtattttaaaacatgctaaagccataaatgctttttctaatgcaacaacaaatagctacaaaagacttataccaggatttgaagcaccagtaatcttggcttattcagctagaaacaggtctgcctcttgtaggataccagttattaataaccctaaagctgcaaggatggaaattagatttcctgatgcagcaggaaatccttacttaacttttgcttcaatgttaatggcaggaattgatggtataaaaaataaaattgatccgggaaaatcttttgataaagatttatattctttgtcagaaaaagaattaaaaaaagttccaacagtttgtggttcacttagagaagcgatggaaagtttagataaggatagaaaatttttaactcaagggaatgttttcactgatgaccaaattgatgcatatattgctctaaagtttgaagaaatacataactttgaacatacgcctcatccaattgagtttgatatgtactatagctgttaaa

SEQ ID NO: 311147 - DNA, 1417 bp, Unknown
  Bacterial polypeptide expressing nucleotide sequence isolated from the Sargasso Sea
atgaatcaaacagaactaattaaatttgctagtgaaaataatgtggaaatcgttgattataagttctgtgatttccctggaacatggcaccatttttcaacacctatatcatgcttaaatgatgatgtttttgaagaaggtgtaggttttgatggttcaagtattagaggtttccagtccatacaggaaagtgatatgttgcttttcccagatccagagacagcttttattgatcctttcacaaagcaccagacttttagtattacatgcaacatcaaagatcctataaccgcccagccatatacaagggatcctagattccttgcccagaaagcagagcagtatcttaaatccactggaatagcagattttagttattggggccctgaagtcgagttttacattttcgaccatgtcagttttgaccaaacctacaatgaaggcttttatcatgtagactctgttgaaggtgcttggaatacgggagataactctcaacagaaccttggttacaaaccccgctataaggagggatacttcccggtagctccaatggatcacatgcaggatatccggtcagaaatggttaaaacattagagcaagttgatattgatgtggaagttcatcatcacgaggtcggaacaggcggacaggcggaaattgatatgcgttttgacagccttactcgtatggcagataaagttttgttatacaagtacattgttaaaaacgttggcaagaaccacggtaaaacggtaacaatgatgcccaagccaatttttatggataacggatcaggaatgcatgtccatcaaagtctctggaaaggtgaaaaaaacgttttttatgatgcctcaaaatacggtttgttaagtgatacagcacgacactatatcggtggtctgctaaagcatgctgacgcgctttgtgcttttattgctccaacaacaaattcatatcggagacttgtaccaggatacgaagcccctattaatcttgtttattcgcttcgaaacaggagtgcatgcattcgtattccaacatattccaacagtgaaaaagcgcgaagaatcgaatttcggactccagaccccagctctaatccatacttagctttctcagcaatgctaatggcaggacttgatggcgttatcaacaaaattgaacctccagaaccagttgataaagatttgtatgatctaaagcctgaagaaatgaaagacgtgaaatctgtagtaggctcgttggacgctgcactggacgcacttgaggaagatcatgcatttcttttgaaaggtgatgtattcactcaggacgtaatcgacatgtggctgagttacaagagagaacgtgaagttgatgcaatgcggctaagacctcatccgtatgaattctctctttactatgacgtctaat

SEQ ID NO: 311148 - DNA, 959 bp, Unknown
  Bacterial polypeptide expressing nucleotide sequence isolated from the Sargasso Sea
aaataatggaaaagggacagagccaccaatatggggttttgacggttcaagcacagagcaagcaacaggagataattcagattgcgttcttaagcctgtttctacattccatgaccctataaggggtggagacaatatattagttatgtgtgaagtattaaatgttgacatgactccacatacttcaaacacaagagcagcttgtgaggcagcagctgaaaattttgctgaatttgaaccgatgtttggtttagagcaagagtacacattttatgagcagtcttatgattctcttaaatatggtcaaccattaggctttcctccttctggctatccagcacctcaaggaggttattattgcggagttggagcagatgaagtttatggaagagacatctcagaagaacatgcgtcagcatgtatggccgctggtctagaaatttctggaactaacgcagaagtgatgcctggacagtgggaattccagataggccctgttggagcgccggaaataggagatcatatttgggtagcaaggtggttgctttatagaattgcagaagattataatatctcagctacattagatccgaaacctgtaaaaggggactggaatggtgcaggaatgcatacaaacttttctacaaagcagatgagagaagatggaggatatgaagccattattgctggatgtgaagccttaggaaaaaatgccgaacttcatgttaaaaattatggttcgggaatagaagaccgcttaacaggcgatcatgaaactcagaagtttgatactttttcttatggtgttagtgatagaggagcttcaatcagaataccttggcaggtagaggtagacaaaaaaggatatctggaagacagaagaccaaacgcgaatgcagatccttatgtaattgctatgttaatgattgatactgtctgttcagcagcttctagctaga

SEQ ID NO: 311149 - DNA, 1423 bp, Unknown
  Bacterial polypeptide expressing nucleotide sequence isolated from the Sargasso Sea
atgtctaaatctcctcaagatgttttaagtcaaattaaagacgaaggaattgaactcatcgatttaaaattcactgatattcatggaaaatggcaacatttaactcttacatcagacatgatagaggaggattcttttacagaaggtttggcatttgatggctcatcaataagaggttggaaagcaattaatgcctcggatatgtcaatggtgcctgatgcaagtacagcttggatagatcctttttataaacataaaactttaagtatgatttgctctattcaagagccaagaagcggggaaccttatgatagatgtccaagagctttagctcaaaaggcattaaaatatttagactcgactggtatagcagatactgcattttttggaccagaaccagaattctttttatttgatgatgttagatatgactctaaagaaggaggttgtttttatagtgtagatactattgaagctccatggaatacagggagaattgaagaagggggaaacctaggatacaaaatacaatataaagaaggatattttccagtagctccaaatgatactgcgcaagatatcagatctgagatgcttcttcttatgggtgaattaggtatccccactgaaaaacatcaccatgaagttgctggtgccggccaacacgagcttggaatgaaatttgattcgttaataaatgctgctgataacgttatgacttataaatacgttgtcagaaatgttgcaaaaaaatatgggaaaacagcaacatttatgcccaaacctgtatttaacgacaacggaacaggaatgcatgttcaccaaagtttatggaagagtggacagccactattctttggtgaaggatcatatgcaaatttatctcaaacagcaagatggtacatcggaggcatacttaaacatgcaccatcattcttagcatttactaacccaaccacaaatagttataaacgattggttccaggattcgaagcacctgtaaatctagtttattctgagggtaatagatcagctgcagtaagaataccattaactggtccaagccctaaagctaaaagattagaatttagatcaggtgacgcacttgcaaatccttacttagcattttctgtaatgatgcttgccggtattgatggaattaaaaatcaaattgatcctggtgatggagtagatgtagatttatttgaacttccagctgatgaacttgcaaaaattgatacagtaccttcatctctaaatgactcacttaatgcattaaaagctgataaggattatctattagctggtggagtatttactgaagattttattgataactttatcgacataaaatacgaagaagtacaacaactaagacaaaggcctcatccacatgaattcttcatgtattacgatgcataat

SEQ ID NO: 311150 - DNA, 607 bp, Unknown
  Bacterial polypeptide expressing nucleotide sequence isolated from the Sargasso Sea
atgagtgctaaaaacgttttaaaattaatgaaagataaagaaattgagtatgtagatttaagatttacagacccaagaggaaaacttcaacatttaacaatggactccacagtcgtcgatgaagatatgttgattgatggcgtattttttgatggttcttctatagctggttggaaagctattaatgagtcagacatgattttaaagcctgatctaagtagacaaattgttgatccttttactactcataatactctcgttttattctgtgatattttagatgctgttaaaaaaaatccttacgaaagagatcctagaggaattgcaaaaaaagctgaagcatatttaaaatcaactggtattggtgacaaagcttattttggtcctgaaccagaattttttgtttttgatgatgtaagaattaaaaatgacatgaacgaaactagttttgcgattgacagcacagaaggtccttataattcaggtagaaaatatgaaaatggaaatatgggtcacagacctggaataaaaggtggttattttccagtaccaccagtcgatagtgctcaagatgtgcgaggtgaatatttaaaaggtttaagagatg

SEQ ID NO: 311151 - DNA, 1049 bp, Unknown
  Bacterial polypeptide expressing nucleotide sequence isolated from the Sargasso Sea
tataggtgataaagctttttttggacctgagccagaattttttgtttttgacgatgtaagaatcaaaaatgatatgaatgagtgtggatttaaattagatagtaaagaaggtccttacaattcaggtaaagaatatgaaaatggaaatatgggtcatagaccacaaattaaaggaggatatttcccagtaccaccagttgatagtgaacaagacatgcgtggtgaatatcttaaaaatttgaaagaagttggtattaaagttgaaaaacatcaccatgaagttgctcctagtcagcatgaacttggtatgtattttggcactttagtaaaccaagctgataacgtacaattatataaatatgttgttcaaatggttacacattcatttggaaaaaccgcaacatttatgccgaagccagttgctggtgacaacggttcaggtatgcacatccaccaatctatttggaaaggtgatactccggtattttcaggtgatgcgtattctggattaagtgaaactgcgttacattatattggcggaattttaaaacatgctaaagcaattaatgcttttgctaactctacaacaaacagttacaaaaggttaattccaggtttcgaagctccagttcttcttgcgtattcagcaagaaatagatctgcttcttgtagaataccgatcacattaagtaaaaaaggtgcaagatgtgagattagatttccagatgctgcaggaaacccatatttaacttttgcagctatgttaatggctggaattgatggaattaaaaataaaattcatccaggtgagtcttttgataaagatttatatgaattaccacctgaagaagttaaagctattcctacagtttgtggttctttaagagaagcaatggaaagtttagataaagatagagagtttttaactcaaggcggtgtctttactgatgatcagattgatgcttacattgctctaaagtttgaagaaatacacaaatttgaacatgcacctcatcctgtagagtttgagatgtattacagtagctaat

SEQ ID NO: 311152 - DNA, 1054 bp, Unknown
  Bacterial polypeptide expressing nucleotide sequence isolated from the Sargasso Sea
gatgtcatgcgaaaacgtattgaaactaattaaggagaacgatataaaattcgtcgatctccgtttctgcgacacaataggaaaagaacagcatgtaacggtgcccgcgactgtggttgacaaagagatgctaaaagatggaaaaatgttcgatggttcgtccatagcaggctggaagagcatcaatgagtcagacatgattttaatgcctgatacagatagtgcagttgtagatccattttttgatgatgaaacattaaatatacgttgcaatgtattagagccatcaaccatggcaggctatgaccgtgatccgcgctcaattgctaaacgcgctgaagattatctcaaatcaactgggattgctgatacggcatttttcgggcctgaaccggaattttttatctttgatgaagtccgttggggagacgaattacattcagggttttacgaagtagattccgaagaaggatgttggaatagcgatcgcatagatgaagataaaaatattggacacagaccaggtgtcaaaggcggatattttccagtccctcctgtcgattcttgtcagaatattcgttctgcaatgtgttcagttttggaggaaatgggagttacagtcgaggttcatcaccacgaagttgcaacggctggtcaagctgagattggaaccacttgtaagacacttactagaaaagcagatgagcttttaattttaaagtatgtgattcagaatgttgctcatagttttggtaaaactgcgacttttatgccaaaacctttagttggtgacaatggtaatggtatgcacgtccaccaatcattagtaaaaggagataagaatctttttgctggcgacaagtatggcaatctttcggatatagcattgcattatattgctggtatttttaaacatgcgcgtgctataaatgctttttcaaatgccagtactaatagctataaacgcttagttcctgggtttgaagcaccaacacttttagcatattcggcaagaaatcgttccgcttcatgtcgtattccatgggtttcaaac

SEQ ID NO: 311153 - DNA, 1414 bp, Unknown
  Bacterial polypeptide expressing nucleotide sequence isolated from the Sargasso Sea
atgagtgtggaagatgtactaaaaatagttaaagaaaaagaagttaaatttatagattacagatttaccaatacaagcggtaaggagcagcatgttacagttactgcatctgaagacggtataaatactgatttctctgaaggaaaaatgtttgacggctcttcaatagctgcatggaaagacattaacgaatcagatatgattttaatgccagatgcatcaacagcagtgatggatcccttttatgacgagccaacattagcagtctcatgtgatgtaattgagcctgaagatggtaaaccatatgaaaaagatccaagatctattgccaagaaagctgaagagcatttgaaaagtagtggtatagccgatacagcatactttggtcctgagaatgaattttttgtttttgatgatgttcgttttgaagacaaactaggtagttgttttttcagcgtagactctactgagggatgctataacagtggtaaaacgtatgaggaaggaaacatgggtcacaggccactagttaaaggtggatacttccctgtacctccggtggattcccttcaggattgtcgttcagctatgataacaactcttcaggaaatgggaattaaatgtgatgttcatcaccatgaggttgctaccgcaggtcagtgtgaaattggcgttgcgtttaatactctagttaccaaagctgatgaagtacaaaaatataaatatgttgtgatgaatgtagctcatgcttatggcaaaacagctacatttatgccaaaaccacttgttggagataatggtactgggatgcatgtgcatatgtctctagccaaaggtggtaaaaatatctttgctggaaaagaatatggtaatttatcgcaagaagcactttggtatattggaggaatcatcaaacatgcaagagcgcttaatgcattcacaaatgcatcaaccaatagttataaaagattaattcctggttttgaggcaccggtaatattaacatactctgcacgaaatagatcagcatctataaggataccttatgtaactagtgataaggctcgtaggattgaggtcagattccctgattctactgctaatccttatctcgcattcagtgcattaatgatggctgggctagatggaataaaaaataaaattgatccaggtccatctatggataaagatctttttgaaatttcatctgatgaagagaagttacttcctacagtagcaccagggctagatgtagccctagaggctcttgataaagatagggcgttcttgaaggaaggcgatgtctttactgataaaatgatagattcatacattggtcttaaatatgaagatgttcaaagactaagacagtcaactcatccatgtgagtttgaaatgtattacagtctataac

SEQ ID NO: 311154 - DNA, 1432 bp, Unknown
  Bacterial polypeptide expressing nucleotide sequence isolated from the Sargasso Sea
atgaaattaaaaagctcgactccaaaagatttaatgtctgaaattaaagatatggacattaagatggttgatatgcgctttactgatataccaggaacaactcaacattttacaataccaattaaatttttagacgaagatatattttctgacggacttggttttgatggatcttcagtaagaggtttccaagaaattcaagacagtgatatgattgttttgccagatgcaacaacagcttatattgatccatttttttcagaaaaaactttagcattacattgtaatattaaagatccagtaactttggttgattatagtcgtgatccaagaaatattgctaaaaaagctgaagcatatttgaaatcatctggtattggcgatacagcattttttggaccagaagcagaattttttgtgtttaataacgttcagtttgactcaggatcaaactttgcatttcatgaagttgattctgttgaaggtacttggaatagtggtgctgatgaaaacccaaacttaggtcataaacctagacataaagaaggttattttcctttaccaccagttgatacacttcaagatgtaagaactgaaatggtaatgacaatgcaagacattggtcttacagttgaagcacatcaccatgaagttgcaacaggtggacaatgtgaaattgatttagaattttcgcctttactaaaaatggctgatgatatgatgaaatataagtacgttgttaaaaatgttgctagacaacatggaatgacagctacatttatgcctaaacctttattcgaagataatggttcaggtatgcacgttcatcaaagtgtttggaaagacggtgacacattaatgtataaagagggtaactatgctaacctaagtgatttagctctaaattatattggcggtatacttaaacatgcacctgctcttttagctttttgtgcccctactactaattcttataaaagattggtcccaggctttgaggctccggtgaacattgtttactctcaaagaaatagaactgcatctgttagaattcctgcttattctcaaagccctaaagcaaaaagaatggaatttagatgtccagatccaagtgcaaatccatacttagcattctcagcaatgttaatggcaggattagatggaattaaaaataaaattaatcctggtgatccaacagatataaatctctatgctgctagcgatgaagttttgtctaaaattcaatctacgcctggatctttagctgaatctcttgaagctcttgaaaaagatcatgcatttttattagagggtgatgtattcaccaaagatgtaattgaaacttatattagctataaaaaagagagtgaggttgaccctattaatattagacctcatccacacgagtttaaactatactacgacgtgtaga

SEQ ID NO: 311155 - DNA, 997 bp, Unknown
  Bacterial polypeptide expressing nucleotide sequence isolated from the Sargasso Sea
atgaaaaaactagaatacgtatggctggatggatatcagccagaaccaatgatgaggagcaaagttaaggttattgatggagaaattcccggaaatagcggctctgatttaccagattggtctttcgatggttcatcaacacaacaagctgaaggcggtgactctgactgtatactcaagccagtaacaacttattcagggccactacattcagatagtttggtgatgtgtgaagtaatgtcaccagacaagtctccacatccttttaatacaagaaatgcatgcattgatcttctttcagatgagtggtggtttggctttgagcaagagtattttttcactaaccctgaggacggaacaattcttggctgggaagatggaacgccaaggccacaaggggattattattgtggtgttggcgccggcgatgtttatggtagagagatttcacaagcacacatggatgcctgtatagatgctggcattaaaattactggaaccaatgctgaagttgcactaggccaatgggaataccaatgttttggcaagggcctgaaagcagcagatgacctttggatgagcagatatcttcttcatcttgtagcagaagagttcggcgttgctgttaatacccatccaaaaccacaagagggcgattggaatggctcaggaatgcataccaacttctcaaatgatgagatgagaaacaatggctcggaggagctcatgaattcattatgtgaaaagcttggagctgtgcatgaggaaggcatcagtaattatggctcagataatgaaaagagactgactggaaatcatgaaactcaaagcattaacacattctcttatggagtgagtgatagaggcgccagtatccggattcctatctatacggttgagaacaactggaatggttatctagaagacagaagacctgcttcaaatgcggatccatacagaatcatttcgcacattgttggcacgctgacaaaataac

SEQ ID NO: 311156 - DNA, 490 bp, Unknown
  Bacterial polypeptide expressing nucleotide sequence isolated from the Sargasso Sea
tatgagttcaaataaagtattaaaattgatgaaagataaagagatcgaatttgtcgacttaagattcactgatccgagaggtaaattacaacatctaacgatggattcaacaattgtagatgatgacatgcttaatgatggagtgttttttgatgggtcttcgatagcgggttggaaagcaattaacgagtcagacatgattttaaaacctgatttaagcagacaagtaattgatccttatacttcacataatactttaattatattttgcgatatcttagatgcagtgaaaaaaactccatatgaaagagatccaagaggtattgctaaaaaagctgaagcatatttaaaaaaatctggtgttggtgacaaagcatattttggtcctgaaccagagttttttgtttttgatgatgtaaaaattaaaaatgaaatgaacgaaataggatttaagattgatagttctgaaggtccttacaattcaggtaaa

SEQ ID NO: 311157 - DNA, 1408 bp, Unknown
  Bacterial polypeptide expressing nucleotide sequence isolated from the Sargasso Sea
atgagtgcaaaggatgttttaaaatttatcaaagacaaagaagctgaattcgtcgacttaagatttactgacccaagaggtaaacttcaacatttgactatggatgcaactgctgttgatgatggcatgttaactgatggagtattttttgatggatcttcgatagctggttggaaagctataaatgagtctgatatgattttaaaacctgatctaagcagaaaaattgttgatccctatacctcacataatactcttattttgttttgtgacattttagatgctgttaataaaaatccatatgaaagagatccaagaggtattgcaaaaaaagctgaagcatatttaaaaaaatcaggtgtaggagataaagcttattttggtccagagccagaattttttgtatttgatgatgttagaattaaaaatgatatgaatgaaacaagcttctcaattgatagtacggaaggtccttataattctggaagaaaatatgaaaatggaaacatgggacacagacctggtatcaaaggtggttatttccccgtaccaccagttgatagcgcacaagatatgagaagtgaatacctaaaaggtttaagagatgttggtataaaagttgaaaaacatcaccatgaggtagcaccaagtcaacacgagcttggaatgtattttggaactttggttgatcaggcagataacgtacaattatataagtacgtagttcagatggtatctcactcatttggtaaaacagcaacttttatgccaaagccagtgaaaggtgataatggttctggtatgcatactcaccaatcaatttggaaaagtaagaccccagtattttcaggagataagtatgctggtttatctcagaccgctttatattatataggcggtatattaaaacatgctaaggcaatcaacgcattttcaaatgcaactacaaacagttataagagattaatcccgggctttgaggcaccagttttattggcttactcagcaagaaatagatcagcatcttgcagaattccaataacgctaagtaaaaacggtgcaagatgtgaaataagatttcctgacgcttctggaaacccttatttgacatttgcttcgatgttaatggcaggacttgatggaataaaaaataaaattgatccagggaaatcatttgataaagatttgtatgctttatcagaaagtgaagttaaaaaagttccaacggtgtgcggatctttaagagaagcaatggaaagtttagatagagacagagcctttcttaaggaaggaaacgttttcactgatgatcaaattgatgcttatattgcattaaaatttgaagaaatatataatttcgaacatacgccacatccaattgagttcgaaatgtattacagctgttaaa

SEQ ID NO: 311158 - DNA, 838 bp, Unknown
  Bacterial polypeptide expressing nucleotide sequence isolated from the Sargasso Sea
tatgagcgcgagggacgtattaaaagaaattaaatctaagaatgttgagtatgtagatcttagattcactgatccaagaggtaaacttcaacaccttacaatggacaaaactatagttgatgaggaaatgttaaatgacggagtattttttgatggatcgtcgattgctggatggaaagcgattaatgagtctgacatgatactaaaaccagatttaagtagaacagtaattgatccttatacatcgcataatacaatgattttattttgtgatattttagatgccgttaagagagatccgtacgaaagagatccaagaggtattgcaaaaaaagcagaagcctatttaaagaaaactggaattggagacaaagcttactttggtccagaaccagaattttttgtttttgatgatgtaaaaattaaaaatgacatgaatgaaactggtttttcaattgacagttctgaaggaccttacaattcaggaaaatcatatgataatggtaacatgggtcatagacctggaattaaaggaggatattttcctgtgccaccagttgatagtgcgcaagatatgagaggtgaatacttaaaaggtcttagagatgtaggtattacagttgaaaaacatcaccatgaagttgcaccaagtcagcatgaactaggaatgttgttcggaacattagtcgatcaagcagataacgtccaactttataaatatgtagttcagatggtctcacattcatttggtaagactgctacatttatgccaaaaccagttaagggtgataatggttctggtatgcatacacaccaatcaattggaaaggtaaaaatc

SEQ ID NO: 311159 - DNA, 590 bp, Unknown
  Bacterial polypeptide expressing nucleotide sequence isolated from the Sargasso Sea
tgctgatgaagtttatggaagagcgatttccgaagctcatgctacagcttgtattgaagctggattgggtatttcaggtacaaatgctgaagttatgcctggtcagtgggagttccaaattggacctgtaggtgctccagacattggtgatcaaatttggattgcaagatggttgctttacagaatagccgaggattggaatatttctgcaacactaaatccaaaacctgtaaaaggtgattggaatggtgctggtatgcacaccaacttttcgactaaacaaatgagagaagatggcggatacgatgcaattgttgcaggatgtgaagctcttggtaaaaacgctgatttgcatgtaaaaaattatggtgcaaacattgaagatagattaacaggtgaccatgaaactcaaagtttcgacactttttcttatggagttagtgacagaggagcatcaataagaatcccttggcaagttgaagtcgacaaaaaaggttatttagaagacagaagacctaatgctaatggtgatccttatgtaatcgctatgttaatgattgatactgtatgttcagcagcttctagctaga

SEQ ID NO: 311160 - DNA, 1264 bp, Unknown
  Bacterial polypeptide expressing nucleotide sequence isolated from the Sargasso Sea
tatgagcgcaaaggacgtactaaaattaatgaagtctaagaatattgagtttgttgatcttagatttacagacccaaggggtaaacttcaacatttaacaatggatacaactatcgtagatgaaggaatgctaaatgatggtgtattttttgatggatcgtcaattgcagggtggaaagcaattaatgagtcagacatgatattaaagcctgatttaagtagaaaagtaatagatccttatacatctcataatactttaattttattttgtgatattttagatgcagttaagagagatccctatgaaagagatccaagaggaattgcaaaaaaagctgaagcatatttaaagaaaacaggaattggtgacacagcgtactttggtccagagcctgagttttttgtttttgatgacgtcagaattaaaaacgatatgaatgaaacaagtttttcaattgatagttcagaaggtccatataattctggaaaatcttatgataatggaaacatgggtcatagacctggagtaaaaggaggatattttcctgtaccaccagtagatagtgcacaagatatgagaggtgaatatcttaaaggactaagagatgttggaattactgtagaaaaacaccatcatgaagttgctccgagccaacatgaacttggaatgttatttggaactttggttaatcaagcagataacgttcaactatacaaatatgttgttcaaatggtttctcactcttttggtaaaactgcaacttttatgcctaaacctgttaaaggtgataatggttctggtatgcatactcaccaatcaatttggaaaggaaaaactcctgtattttctggaaataaatatgctggattatcacagactgctctttactacattggtggagtgttaaagcatgcaaaagcgattaatgcatttgctaatgctactacaaatagttacaaaagattaataccaggatttgaagctcctgttttacttgcatactctgcaagaaatagatccgcttcatgcagaattccaatcacattaagtaaaaaaggtgcaaggtgtgaaataagatttccagatgcatcaggaaatccatatttaacatttgcttctatgcttatggctggaattgatggaataaaaaataaaatagatccaggtaaatcgtttgacaaagacctttatgctttatctgaaaagcaagttaagaaggtgccaacagtttgcggttcgttaagagaagcaatggaagcttta

SEQ ID NO: 311161 - DNA, 1408 bp, Unknown
  Bacterial polypeptide expressing nucleotide sequence isolated from the Sargasso Sea
tatgagcgcaaaaaacattcaaaaaacaatgaaagacaaatctattgagtatgtagatttaaggtttacagatccaagaggaaaacttcaacatgtaactatggacgcaaaggtagttgatgatgaaatgcttgaagagggaatattttttgatggatcatcgatagctgggtggaaggcaataaatgagtctgatatgattttaaagcctgatttatcaagaccagttgttgacccttttacatctcataacactctaaatttattttgcgatgttttagatgctatcaaaaaaaatccatatgagagagatccgagaggaacagcaaaaaaagctgaggaatatctaaagaaaagtaatataggtgataaagcattttttggacctgaaccagagttttttgtattcgatgatgttagatataaaaatgatatgaatgaaacaggttttaaaatagatagtactgaaggtccttataacacaggtaaagaatatgataacggtaacatgggtcatagacctggagtcaaaggaggatattttccagtgcctccagttgatagtgctcaagatatgagaagcgaatatcttaaagctatgaaggatatgggtattaaagtagagaaacatcaccacgaagttgcaccaagtcaacacgagctaggaatgtattttgggacattagtaaatcaagcagataacatccaactttataaatatgctgttcatatggtaacccattcttttggtaaaactgctacttttatgccaaaacctgtaaaaggtgataatggatctggaatgcatgttcaccaatcaatatggaaaggaaatactcctttgtttatgggaaataaatatgctggtttatctgacactgcgttatattatattggaggaatactaaaacatgccagagctataaatgctttttctaacgcaacaactaacagttataaaagattaattccaggttttgaagcaccagttctattagcttactctgcaagaaatagatctgcttcatgcagaattccaataacattaagtaaaaaagcagcgagatgcgaaattcgttttccagatgcatctgggaatccatatttaacatttgcatctatgttaatggcaggacttgatggaattaaaaacaaaattgatccaggtaaatctttcgacaaagatttatatgcattaagcgaaagtgaagttaaaaaaattccaacagtttgcggctctttaagagaagcaatggaaagtctagataaagatagaaagtttttaactcaaggaggagttttcactgacgatcaaattgatgcatatatagatcttaaaatggaagaggttcataatttcgaacatacacctcatccaattgagtttgatatgtattatagttgttaa

SEQ ID NO: 311162 - DNA, 1414 bp, Unknown
  Bacterial polypeptide expressing nucleotide sequence isolated from the Sargasso Sea
atgaaatcagcgaaagaagtgattgactttgcaaagaaaaataatgctgtgatggtcgatttaaaatttattgattttcttgggacctggcaacattttgcagtttctatttctgatctcagtgaagaaatgctggaagaaggaaggatgtttgacggttcgagtattcgatgttggcagaccattgacagcagcgacatgaaagtcatgcccgatttgagtacgaccaccatggatccgttttatgcccatccgaccttatcgatcatctgcgatatcatcgatccgatcactggagagggttatacccgcgatcccaggaatattgcttccaaagcagaaaagtatttgatctcgacagggattgcggatacggcatttttcggtcctgaagcagagttcttcatgttcgacgatgtacgttatgcccaggacgccgagggtggattttacgcgatagattctcctgaatgcccttggaataccggaaccgatgagcctggtggcaataaggcctacaaatatggccacaaattaggatatttccccaccgcacccttcgaccaggacagagacatccgcgcggagatggtgctgaaactagaggaaatggggattacggtggaagcccagcatcatgaggttgcacctgcgcagcatgaaatcgacatcaagttcgacaccctgttgaaaacagcagacaatttacagtggttcaaatatgtcatccgaaacgttgcccgtgaaaatggtaaagccgcgacattcatgccgaagccaatgttcaatgacaacggaaacggaatgcacacccaccagtcattgtggaaaaacggtcagcctctttttgccggagatcagtatgcaggtttgagtcaggacgctttatattacattggcggaatcttgaatcatgctcctgctttggctgctttcaccaaccccctgactaattcctacaagcgtctggttccaggttttgaagcaccgatcaacctggcttattcaaaccgaaatcgttctgctactgtaaggattccagtggtggattctcccaaggcacgtcgactggaatatcgctgcccagaccctggcgccaatgtctacattgcttttgcagcaatgctgatggcaggattggatggaatacagaacaaaattgatccgggtgatccaatggatgtgaacatctatgacctgcctccggaaaagctgaacaaaattggtaagatgccaagttcgttgcgtgattcacttgatgctttagagtcggataacgaattccttttgaaaggaaacgttttcactaaagacgtcattgaatactggttggattacaagatggaagaagaggtcaaagcgatcgattcccgaccccatccccacgaattcaatctgtactttaactactgat

SEQ ID NO: 311163 - DNA, 552 bp, Unknown
  Bacterial polypeptide expressing nucleotide sequence isolated from the Sargasso Sea
tatgccaaaagttagtgatattttaaaagagataaaagatacagatataaagttcgttgatctacgttttacagacccaagaggaaaacttcaacacgtaactatggatgcatctgttatggatagtgacgcgttcgcagaaggtattatgtttgacgggtcatcgattgctggatggaaggccattaatgagtctgacatgacactaatgccagatccagatactgcgcacacagacccgttctttgcacagtcaacaatgggtattttctgtgatattttggatcctatatctggtgatggctatgagagagatcctcgttctgtcgcaaagaaagcagaagcgtatctcaaatcgacaggcattggagacacatcgtcttttggtcccgaggctgaattctttatgtttgatgatgttaggtttgcagcggatccatatcagactggttttgaactagattgcacagagctcccatcaaatacagcaacggaatatgagtcaggtaatctcggtcataaaccaagaacgaaaggtggatatttccctgt

SEQ ID NO: 311164 - DNA, 835 bp, Unknown
  Bacterial polypeptide expressing nucleotide sequence isolated from the Sargasso Sea
ctgactgcaatacttaaaccagtaacaacatatcctggcccattgcactcagatagcctagtgatgtgtgaagtaatgtctcccgacaaaactccacacccctcaaatacaagaaatgcttgtattgatcttctatcagatgagtggtggtttggcttcgaacaagaatacttctttaccaatcctgaagacggaacaatattgggttgggaagatggaacaccaagaccacaaggagactattactgcggtgttggtgcaggagatgtttatggaagagatatttctcaagcacacatggatgcctgtatagatgctgggattaaaataactggcactaatgcagaggttgctctcggacaatgggaatatcaatgtttcggtaagggccttaaggcagcagacgatctttggatgagcaggtacctccttcatctagtggcggaagagtttggtgttgctgttaatactcacccaaaaccccaagagggtgactggaatggctcaggaatgcataccaatttttcaaatgatgagatgagaaactctggttcagaagagctcatgaactctctatgcgaaaaactaggagctgtccatgaagaaggcattaaaaactatggctcggataacgataaaaggttgactggaaaccatgaaacccaaagtatcgacacattctcctatggggtgagtgatagaggggcaagcattacaatcccaatatacacagtcgagaataactggaatgggtatcttgaggacagaagacccgcctccaatgcagacccatataaaattatttcgcacattgttggcacactgacaaaataaa

SEQ ID NO: 311165 - DNA, 1000 bp, Unknown
  Bacterial polypeptide expressing nucleotide sequence isolated from the Sargasso Sea
atggccaaaacccctcaggacgtccttcgacagatcaaggacgaaggcattgagctgatcgacctgaagttcactgatctccatggcaagtggcaacacctgacggtgtgcaccgatctgctggaggaggactcctttaccgaaggactggcgtttgacggttcctctatccgaggctggaaatcgatcaacgcctccgacatggcgatggttcccgatgccagcacggcctggatcgatccgttctaccgccacaaaaccctgagcatgatctgctccattcaggagcctcgcagtggtgaggcctacgaccgctgcccccgtgccctggcccaacgagctctgaaccacctgagctccaccggcctggccgacacggctttcttcgggccagagcccgagttctttctcttcgacgacgttcgctacaactccagcgaaggcggggcgttctacagcgttgacaccatcgaagctccctggaacaccggccgcctggaagagggtggaaacctggcttacaaaattcagctgaaagaggggtatttccccgtcgcccccaacgacaccgctcaggacatccgctccgagatgctcctgttgatgggccagctggggatccctaccgaaaagcaccaccacgaggtggccggtgccggacagcacgagctcggcatgaaattcgccgaactgatccaggctgcggacaacgtcatgacgtacaaatacgtcgttcgcaacgtggcgaagaagtacggcaagacagccaccttcatgcccaagccggtcttcaacgacaacggctccggcatgcacgtccaccagagcctgtggaagggtggccagccgctgttcttcggtgaaggcacctacgccaatctgtcgcagaccgcgcgttggtacatcggcggaatcctgaagcatgctccggcattcctggccttcaccaaccccaccaccaacagctacaagcgcctggtgcctggatttgaagcaccgg

SEQ ID NO: 311166 - DNA, 781 bp, Unknown
  Bacterial polypeptide expressing nucleotide sequence isolated from the Sargasso Sea
catcaccatgaggtagctcctagtcagcacgaacttggaatgtattttggaactttagtaaaccaagcagataacgttcagttatataaatatgttgtacaaatggttacacattcatttggaaaaactgcaacatttatgccaaaaccagttgctggtgacaatggttcaggtatgcacatccatcaatctatttggaaaggtgatacaccggtattttcgggtgatgcttatgctggtttgagcgaaactgctttacattatattggtggaattttaaaacacgctaaagcaattaatgcttttgctaactctacaacaaacagttacaaaagattaattccaggtttcgaagctccagttcttcttgcgtattcagcaagaaatagatctgcttcttgtagaataccgatcacattaagtaaaaaaggtgcaagatgtgagattagattcccagatgctgctggaaacccatatttaactttcgcagctatgttgatggctggaatagatggaattaaaaataaaattcatccaggtgaatcttttgataaagatttatatgaattaccacctgaagaagttaaagctatcccaacagtttgtggttcattaagagaagcaatggaaagtttagataaagacagagagtttttaactcaaggtggagtctttactgatgatcaaattgatgcttatattgctctgaagtttgaagaaattcataagtttgaacatgcacctcatcctgtagagtttgagatgtattacagtagctagt

SEQ ID NO: 311167 - DNA, 1180 bp, Unknown
  Bacterial polypeptide expressing nucleotide sequence isolated from the Sargasso Sea
tttaagtagacaagtaattgatccttatacttcacataatactcttattattttctgtgatatcttagatgcagtcaaaaaaactccttatgaaagagatccaagaggaatagctaaaaaagctgaagcatatttaaaaaaatctggcgttggtgataaagcttattttggtcctgagccagaattttttgtctttgatgatgtaaaaataaaaaatgaaatgaatgaaataggatttaagattgatagttcagaaggtccttacaattcaggtaaaaattatgaaaatggaaacatgggtcatagaccaggagtaaaaggtggatattttccagtacctccagttgatagtgctcaagacatgagaggtgaatatttaaaaggattaagagaagttggtattacagttgaaaaacaccatcacgaagttgctccaagtcaacatgaacttggaatgctatataatactttagtaacacaagcggataacgttcagttatataaatatgtagtacaaatggtttctcattcttttggaaaaactgcaacctttatgcctaaacctgtaaaaggtgataatggttcaggaatgcatacacaccaatcaatttggaaaggtaaaaatccaatattttcaggaaataaatatgctggtttatctgaaaccgcacttcattatattggtggaattttaaaacacgctaaagcaattaatgctttttcaaatgcaacaacaaatagttataaaagattaattccaggttttgaagctccagttttgttagcttactcagcaagaaatagatctgcttcatgtagaataccaataacattaagtaaaaaaggtgcgagatgtgaaataagatttcctgatgctgcaggaaacccatatttaactttttctgctatgttgatggctggactggatggtattaaaaataaaattaatccaggtaaaccccttgatgaagatttgtatgctctgccagaagataaagtaaaaaatattccaactgtttgtgggtctttaagagaggctatggaaagtttagacagagatagaggttttttaaaacaaggtggtgtattttctgatgaccaaattgatgcgtttattgcattaaaatttgaggaaatttacaatcttgaacatactccgcatccaatggagtttgaaatg

SEQ ID NO: 311168 - DNA, 1282 bp, Unknown
  Bacterial polypeptide expressing nucleotide sequence isolated from the Sargasso Sea
tatgcttgataacggtgtattctttgatggctcctcaatagctggatggaaagcaattaacgagtcagatatgattttaaaacctgacttggatagaccaattattgatccatttaattctcatactactttaaacattttttgtgatattttagatgcagttaaaaaaaacccttatgaaagagatccgagagggactgcaaaaaaagctgaagcatatttaaaaaaatctggcattggagataaatcatacttcggccctgaaccagaattttttgtttttgatgatgtaaggttcaaaaatgatatgaacgaaacaagtttcagcatagatagctcagagggaccttacaatactgggaaaaaatatgaaaatggtaatatgggtcacagacctggtataaaaggtggttactttcctgtcccaccagtagacagcgcacaagacatgagaggtgaatatttaaaagctcttaaagatatgggagtaaaagttgaaaaacaccatcacgaggtagctccaagtcagcatgaactaggaatgtactttaataccttaacgaatatggcagataacgtacagctttataaatatgcagtacaaatggttactcattcttttggaaagacagctacatttatgccgaagcctgtaaaaggcgataatggatctggaatgcactgccaccaatctatttggaaaggaagcacgccattatttatgggtaaagaatacgcaggtctttctaaagaagcgttatactatataggtggaatattaaaacacgctagagctataaacgctttttcaaacgctacaacaaatagttacaaaagattaatcccaggttttgaggctccagtaattctagcatattcagcaagaaatagatctgcctcatgtagaattccagtaataatgaatccaaaagcagctagaatggaaataagatttccagacgccgcaggtaatccttacttaacttttgcatcaatgttgatggctggtatagacggtattaaaaacaaaattgatccaggtaaagcttttgatcaagatttatattctctatcagaagatgaagttaaaaaattacctactgtttgcggttccttaagagaggcaatgcaaaacttagacaaagatagaaagtttttaactgaaggtggagtatttactgacgatcaaatcgatgcttatatcgagttaaaattccaagaaatctataaatttgaacacacaccacatccaattgaatttgagatgtattacagcggctaa

SEQ ID NO: 311169 - DNA, 727 bp, Unknown
  Bacterial polypeptide expressing nucleotide sequence isolated from the Sargasso Sea
cttgtggatcaagcagataacttacagctttataaatatgctgttcacatggtttctaactcatttggtaaaacagctacattcatgcctaaacctgttaaaggtgacaatggttcaggtatgcacgttcaccaatcgatttggaaaggtgataaagcattattttctggtgataaatatgctggtttgtcagacacagctttacactacataggtggaattttaaaacatgcaaaagcaataaatgctttttctaatgctacgacgaatagttacaaaagactaattccaggatttgaggctccagttttattagcttattcggctagaaacagatcagcatcttgtagaattcctattactctaagtaaaaaagcagctagatgtgaaattagatttggtgatgctgctggtaatccatatttaacattctctgcaatgttaatggctggtttagatggaattaagaataaaattgatccaggtaaatcatttgataaagatctttatgctttatcggaagatgaagttaagaaaattccaactgtttgtggatctttaagagaagcaatggaaagtcttgataaagatagagatttcttaaaacaaggtaatgtatttactgatgatcaaatagatgcttatattgcattaaagtttgaagaaatacacaattttgaacacacacctcatccgatagagtttgagatgtattacagttgttaat

SEQ ID NO: 311170 - DNA, 1192 bp, Unknown
  Bacterial polypeptide expressing nucleotide sequence isolated from the Sargasso Sea
cggggttttctttgatggatcttctatatctggctggaaagctataaatgagtcagacatggttctcaaaccggacttaaccacaacggtaatggatccttttacagcccaaccaacattaattgtattttgcgatgttctcgatgcggtgtcaaaggaaccatatgagagagatccaagaggaactgcaagaaaagcagaagagtatgtcaaagcaagtggaattggcgatactatatatatgggtccagaagcagagttttttatatttgatgatgtaaaatttcaagttgatatgaacaaatcaatgtttgaaattgatagtactgaaggtccatataattctggacgctcttacgaaagtggcaacttagcacacagaccaggtgttaaaggaggatattttcctgtaccgcctgttgatagcgcacaagatataagaacagaatttcttgaagaattaaaaaatttaggactgaagatggaaaaacatcatcatgaagttgctccaagtcaacatgaattgggactgaagtttgatactttacttaaacagggcgatgctatgcagctttataagtatggtgtacacatggtcgctaatgcatttggtaaaactgctacattcatgcctaaaccagttaaaggtgataatggaactggaatgcatacacaccaatccatatggaaaaatggcgaacctctatttgcaggagataaatatgcaggcttatccgagatggcattgcactacattggtgggatcataaaacatggaagagcgcttaacgcgtttacaaatgctagcacaaacagttataagagactgataccagggtttgaggcccctgtaatacttgtatactcagcaagaaacagatctgcctcatgtcggatacctgtttcagataatccgaaaggaaaaagagttgaagtaaggtttccagatccttcggcaaatccttatttggcattttcagcaatgctaatggcagggatggacggtataaaaaataaaattgatccaggaaatgctgctgatgaagatctttatgaattaccagaggcagaggttaaaaaattgccaactgtttgtggctctcttagagaggcacttgaggcggttgacgaagatagagcttttttaactgaaggtggagtatttactgatgaccaattgatgcatatatag

SEQ ID NO: 311171 - DNA, 1411 bp, Unknown
  Bacterial polypeptide expressing nucleotide sequence isolated from the Sargasso Sea
gatgtcagtagaaaaggcattagagctgattaaagaaagtgaagcgaagtttgtagatttacgttttaccgatacaaagggtaaagaacaacacgtatctattcctgcgagcgttgttgatgaagagtttttcgaagaaggtaaaatgttcgatggttcttcaatcgctggctggaaaggcatcaacgaatcagacatggttcttcttccagacgcaacaagctgcgtagttgaccctttcgctgaagagacacaagtaaacatccgttgtgacatcgttgaaccttcaacaatggaaggttatgagcgtgaccctcgttcagttgctcgtcgtgcagaagaattcctaaaatcaactggcatcggtgacacatgtttcttcggcccagagccagagtttttcctttttgatgacgtacgcttccacactgacatggcgggttctttctacaagattgactcttctgaagcaaagtggaactctggcgaagagtttgaaggcggcaacatggcacaccgccctggcgttaaaggcggttacttcccagtaccaccagtggactctgctcacgatatccgtgctgcaatgtgtctagttatggaagagatgggccttgttatcgaagcgcaccaccacgaagtagcaactgctggccaaaacgaaattgcttgccaattcaatacgctagttaagaaagctgacgaaattcaagtttacaagtatgttgttcacaacgttgcacacgcatacggtcaaacagctacctttatgcctaagccgcttgttggcgataatggttctggtatgcactgtcaccaatctatctctaaagatggcgtaaacatctttgcaggtgacaagtacgcaggtctttctgaggaagcactttactacattggtggtatcatcaagcacgcgcgcgcaatcaacgcgtttgctaacgcttctactaactcatacaagcgtctagttcctggattcgaagcaccggtaatgcttgcatactctgcacgtaaccgttctgcatctattcgtattcctcacgtaactagcgataaagcacgtcgtattgaagtacgtttccctgacccaacagctaacccatacctagcgttcactgctatgcttatggcgggtatcgacggtattaagaacaagatccaccctggtgattcaatggataaagacttgtacgacctaccgccagaagaagctgctgaaattccaacagttgcaagctcgctagaaatggcacttgaagctcttgataacgaccgtgacttccttaaagctggtggcgttatgactgacgacatgattgatgcatacatcgatcttaagtctgaagaagtaacgaaacttaacatgactactcaccctgttgagttcgacatgtactacagcgtgtaa

SEQ ID NO: 311172 - DNA, 795 bp, Unknown
  Bacterial polypeptide expressing nucleotide sequence isolated from the Sargasso Sea
aatgagtgcaagcgatgttttaaaaacgattaaagataaagatattgaatacgttgatctaagattcacagatcctagaggtaaacttcaacatgtaacaatggacgctaaaatggtggacgatgaaatgttgaatgaaggaattttttttgatggatcctcaatagctggatggaaagctatcaacgagtccgatatgatacttaagccagatttatctagggcaatagtcgatccgttcacatctcataatacactaaatcttttttgtgatattttggatgcaataaaaaaagatccttacgaaagagatccaaggggtacagctaaaaaagctgaggcttatttaaaaagttcaggtattggagataaggcattttttggtcctgaagcagaattctttgtatttgacgatgttagatttaaaaatgatatgaatgaaactggttttaaaattgatagcaaagagggtccatataattctggaagagaatatgaaaatggaaatatgggtcataggccaggtattaagggcggttattttccagttccaccagtggatagtgaacaagatatgagaagtgaatatctaaaagctatgaaagatatgggtattaaagtagaaaaacaccatcacgaggttgctccaagtcaacatgaacttggaatgtattttggaactcttgtagatcaggcagataatttgcaactttataaatatgctgttcatatggtttctcactcatttggcaaaactgcaacttttatgcccaaacctgtaaaaggtgataatgg

SEQ ID NO: 311173 - DNA, 1328 bp, Unknown
  Bacterial polypeptide expressing nucleotide sequence isolated from the Sargasso Sea
aaaattacaacatttaactatagattctacagctgtggataatgacatgttaaatgatggtgttttttttgatggctcgtctatagctggatggaaagcaataaatgagtcagatatgattttaaaacctgacttatctagaacagtaatagatccatttacctcgcataatacactaatattgttttgtgatatatttgatgctgttaaaaaaaattcatacgaaagagatccgagaggtatagctaaaaaggctgaagcttatttgaaatcaacaggtattggagataaggcatacttcggaccagagccagaattttttgtatttgatgatgttagaattaaaaatgatatgaatgaaattggtttttcaatcgatagctcagaaggtccatacaattcaggaagaaaatatgaaaacggaaatatgggtcatagacctggaattaaaggaggatatttccctgttccacctgttgacagcgcacaagatatgagaagtgaatatttaaaaggtctaagagatgtaggaataaaagttgaaaaacatcaccatgaagtagcgccgagtcaacatgaattaggaatgtattttggaactttagtagatcaagcagataatgttcaattgtataaatatgttgttcaaatggtgtctcattcttttggtaaaacagcaacatttatgcctaagcctgttaaaggtgataatggatctggtatgcatacacatcaatctatatggaaaggaaaaactccagtcttttctggaaataaatatgcaggattgtcagatacagctcttcactatataggaggaattttaaaacatgctaaagcaatcaatgctttttcaaatgcaacaacaaatagttataaaagattaattcctggttttgaagcaccagtattattagcatactctgcaagaaacagatctgcttcttgtagaataccaattacactaaataaaaaaggtgcaagatgtgaaataagatttccagatgcggcaggaaatccatatttaacatttgctgcaatgttgatggcaggtttagatggaattaaaaataaaataaatccaggaaaatcatttgataaagatttatattcattaagtgaagaagaagttaaaaaagttccaactgtatgtggttcattaagagaagcaatggagagtttagatacggatagagcttttctaaaaaaaggaaatgtttttacagatgatcaaattgatgcttatattgctctaaagtttgaagagatacataattttgaacacactcctcatccaatcgaatttgatatgtattacagtagctaaa

SEQ ID NO: 311174 - DNA, 1402 bp, Unknown
  Bacterial polypeptide expressing nucleotide sequence isolated from the Sargasso Sea
tttaaaaaaaataaaaaatgaagatattaaaatggttgatcttcgtttcactgatatgcctggctcaacccatcatatatcaataccaattaaatttcttaaagaagatttatttaaagatggagtaggctttgatggctcatcagtaagaggttttcaatctatagaaaatagtgatatggcaatggtgccggatgtcactacagcttatatagatccattttactcagaaaaaacaattgcattttactgtgatgttgttgaccctataagttatgaaagctatgaaaaggacccgagatatatagcaaaaaaagcagagagatatttaaaatcctctggcctaggtgatactgcatattttggacctgaagcagaattttttgtttttaatgatgtaaagtatgattcggggtctaatttttcatttcatgaagttgactctactgaaggagcttggaatacaggaaaggaagaaaatcctaacctaggtcataagccaagacataaaggaggctattttcctcttcctccatcagatagtttgcaagatgtcagaactgaaatggtattaacaatggaagaaataggaataaatgttgaagcttcgcaccatgaagtagcaacaggaggacagtgtgaaattgacttagaattttctcctttactgtctatggcagatgatcttctacgatataaatatgtcgttaaaaatgttgctaaacaatatggaatgacagctacttttatgccaaagcctctttttgaagataatggttctggaatgcacgttcattcaagtatatggaaaaaaaataaaaccttaatgtataaaaaaggtaattatgcagatttaagcgattttgccttacattacattggaggcattttaaaacatgctccatctttattagctttttgtgcacctaccactaattcttataagagattagtcccaggtttcgaggctcccgtaaatatagcttattctcaagcaaatagaactgcttcagtaagaatacctaataactatactgctagtccaaaggctaaaagggttgagtttagatgtccagatccatcatcaaacccctaccttgcattttcagcaattttaatggcaggtttagatggagttaaaaataagattaatcctggaaagccaacagatattaatatttatgaagcaccagctagtgtgcttgctaagataccttcaactcccggatctttagctgagtcactaaatgcactggaaaaagataataaatatttgctacaaggaggagtatttacaaaagataatattgaaacatatatatcatacaaaagagaaaatgaagttagtccaatggatcttagacctcatccacatgaatttaatttatattacgacgtataa

SEQ ID NO: 311175 - DNA, 466 bp, Unknown
  Bacterial polypeptide expressing nucleotide sequence isolated from the Sargasso Sea
tatgagttcaaaggatgtattaaaaacaatgaaagataaagaaatagagtttgttgatttaagattcacagacccaagaggtaagctgcaacatcttactatggactcatcagttgttgatgaaggtatgcttaatgatggagtattttttgatggttcatcaattgcaggttggaaagcaataaatgaatctgacatgattttaaaaccagatttatcaagaaaaatagttgatccgtatacttcacataatactttaattttattttgtgatattttagatgctgtaaaaaaagatccttatgagagagatccaagaggaatagctaaaaaagctgagaaatatttaataaaaagtgggatcggagataaagcttattttggtcctgaacctgaattttttgtttttgatgatgtaagaattaaaaatgatatgaatgaaacaggtttttcaattgatagtact

SEQ ID NO: 311176 - DNA, 1290 bp, Unknown
  Bacterial polypeptide expressing nucleotide sequence isolated from the Sargasso Sea
acgctgatatgcttaatgacggtattttttttgatggttcatcaattgcgggttggaaagcaattaatgagtctgacatgatacttaaaccagatttatcaagaacagttgttgatccttttacatcgcataacactttaaatatattttgtgatattttagacgctgtaaagaaaaatccttacgaaagagatcctagagggacagcaaagaaagcagaagattatttaaaaaaaacaggaattggtgataaagcttattttggtccagagccagaattttttgtatttgatgatgttagatataaaaatgatatgaacgaaactagtttttcgattgacagctctgagggtccttacaataccggaaaaaaatacgaaaatggaaatatgggacatcgtccaggcattaaaggtggttatttcccagtacctccagttgatagtgctcaagacatgagaagtgaatatcttaaagcaatgaaagatatggatattaaagttgaaaaacaccatcatgaagttgctcctagccaacatgagttaggaatgtactttagtactttggtaaatcaggcagacaatctccagctatacaaatatgcagtgcatatggtttctcattcatttggaaaaacagcaacatttatgcctaaacctgttaaaggtgataatggttcaggtatgcatgtgcaccagtctatttggaaaggtggcacagcaactttttcggggaataaatatgcggggttgtctgatacagccctacattatattggaggaatattaaaacacgcaaaagcaattaatgctttttccaactctacaacgaatagttataagagattaataccaggtttcgaggctccagtattgttagcatattcagcaagaaatagatcagcttcatgtagaatacctattactttaagtaaaaaagctgcgagatgtgaagttcgttttccagatgctgcaggtaatccttatttaactttctctgcattgttaatggcaggacttgatggaattaagaataaaattgatcctggtaaatctttggacaaagatctttatgcgttaagtgagtccgaggttaaaaaaattccaacagtttgtggttctttgagagaggcaatggaaaacttagacaaagatagaaaatttttaacccaaggtaatgttttcactgacgaccagatagatgcttatatcgctcttaaatatgaagaaatttataattttgagcacactccacatccaatggagtttcaaatgtactacagttgctaag

SEQ ID NO: 311177 - DNA, 1408 bp, Unknown
  Bacterial polypeptide expressing nucleotide sequence isolated from the Sargasso Sea
atgagtgctagttcagttaaaaagattataaaagataaagagattgaatacgtagatttaagatttaccgacccaagaggaaaacttcaacatgttaccatggatgcaacaatagttgacgaggacatgttgaatgaaggagttttctttgatggttcatctattgctggatggaaagcaatcaatgagtctgacatgattttgaaaccagatttgtcaagaacagtcgtggacccttttacttcacacaatacacttaatatattttgcgacattcttgatgcaattaaaaaagacccttacgaaagagatccaagaggtacagccaaaaaagcggaagcttatttaaaaaaaactggtgtgggagataaagcttacttcggaccagagcctgaattttttgtttttgatgatgtaagatattcaaacgacatgaatcatacaggatttcaaattgatagttctgaaggtccctacaatacaggaaaaaaatacgaaaacggaaacatgggtcaccgtcctggaattaaaggaggttacttcccagtgccacccgttgatagtgcacaagatatgagaagtgaatatctaaaagcgatgaaagatatggggattaaagttgaaaaacatcaccatgaagttgctccaagccagcacgaacttggaatgtattttggtactttagttgatcaagcagacaatcttcaactttataaatacgcggtacatatggttacacattcatttggtaagacagctacttttatgcctaaacccgtaaaaggcgacaatggatctggaatgcactgtcaccaatcaatatggaaaggaagtacagcagtattttctggaaataaatatgcaggtttatctgatacagcattacactacatcggaggaatattaaaacacgctagagcgataaatgctttcgctaatgcaacaactaatagttataaaagattaataccaggctttgaagcgcctgtactattggcatactcagcaagaaacagatctgcatcttgtagaattccaattacacaaagtaaaaaagctgctagatgtgaagttcgtttccctgatgcagctggaaatccttacttaacattttctgcattattaatggcaggtcttgatggaattaagaataaaattgatccaggcaaatctttagacaaagatttatatgctttaagtgagtctgaagttaaaaaaattccaacagtttgtggctctttaagagaagccatggaaagcttggataaagatagaaaatttttaactcagggcaatgttttcactgatgatcagatagatgcttacatcgctcttaaatatgaagaaatttataattttgaacacactccacatccaatggagtttcaaatgtactacagctgctaaa

SEQ ID NO: 311178 - DNA, 1462 bp, Unknown
  Bacterial polypeptide expressing nucleotide sequence isolated from the Sargasso Sea
ttgccgtataaagtgataggtggcaaagccactcagataaaatattcttcagatgaggtattctctagaataaaacatgaaggtatcaaattcatagacctccaatttactggtttaacaggtagatttcatcatactacaatttcagcagacacttttactcctcaacaaatggaagatggtttaccaaaattagatggttcctcaattgtaggatttacagacattgctgactctgatttaatattaaagccagacccaagtacatttgcaattattccatggctcacagaaaaaaagacagccagattgttgtgtgatgtatactggggcggaggaagaggacgtcttgagagtgatcctcgaggaatttgccaaaaagcagaagcatttgtcaaaactcaaggatttgattttagtaattggggaccagaagtagagttttttgtatttgataaagtacattgggatgttttaacaccctacaaaggacaatcgtattcaattgaatcttctgaatcaccatggagccaagaaggaactgggtatcctatgggattacaagaaggatattacccaagtactccatcagacactcttgcaccattcagaaatgaatgtgtggatgttttgaacgataattttggaattttatgtgataatcatcatcacgaagtagcaactgcaggacaatgtgagattgatataaaatatgatttaatgactaattctgctgacggtgcacaatcatacaagtatgttgtaagaaatgttgcacaacaatttggaaaagtagcaacaatgatgccaaaaccaatttcaatggatgcaggttctggaatgcacacaaatgttagtttgtggaaaaaagacgagaatacgttttatgataaagatgaagtattagaactaagccaaaccggtcgttatttttgtggaggagtaatggaacatgcaaaaggattaactgcaattacaaatcctacaacaaactcataccatagactagttccaggttatgaagcaccagtttacatcgcatggagttcaagtaatcgttctgcaactattagaatcccaggtcactttagaggagagaaatatgcatacatgaaaagaatggaataccgtgtaccggatccagcatcaaacccatatcttgtattttcagcagtattagctgcaggtttggacggaattaaaaagaaaatagaacctggcgacccagttaaagaagacatctacaaaatgacaaaatcagagagaaagaagcatggaattgacactttgcctgcaaatcttggaagagcattagatgaattggaaagtgacagaaaatatctaaccccaattttctcaaatgaagttttagataagattatagatttagagagaagagaccacagggaaattgcaattaggccacacccacatgagttttatctttactttgatgtttgat

SEQ ID NO: 311179 - DNA, 982 bp, Unknown
  Bacterial polypeptide expressing nucleotide sequence isolated from the Sargasso Sea
aatgcaaacaatgaaaatattagagtatatatggcttgacggttatcagcctgaaccatctataagaagtaaaattaaagttactaaggatgagaccccaccagattggtcatttgacggatcatctacccagcaagctgaaggtggaagctctgattgtttaattcttccagtgcaaacgtatgatggccctctttttgctgaccatcttgtcatgtgtgaggttgaaactggtgagcataaaacgcatccatcaaatatgagagcaggggctgctcaagttgtaacggatgagtggtggtttggatttgagcaggaatacttttttacagatatgaatggcgagccattaggatgggaagatggaacgcctaggcctcaaggagattattattgcggtgttggtgcgaccaatgtaaagggcagagaaatatcagaagtccatcttgaggcatgcttggctgctggaataaaaatcacaggaaccaatgctgaggttgctctgggtcaatgggaatatcaatgctttggtaaggggataaaagctgcagatgatttatgggtaagtagatatttattatacaagatagctgaggattatgaagttggagttaatattcaccctaagcctaaaacaggtgattggaatggttccggtatgcatacaaatttttctaatgatgaaatgagaaataatggatcagaaaaactataccattctttatgcgataagcttggtgaggctcatgaagatggcatcaatgcttatggctcagataatgatatgaggcttaccggacttcatgaaacacagagtattgatcagttttcatatggagttagtgatcgcggtgcaagcatcagaatacctatctatactgtagaaaataattggaatggatatttagaagataggcgacctgcatcaaacgcagatccctatcgaatagtaaaacatattgtaggcacattaacaaaatag

SEQ ID NO: 311180 - DNA, 1351 bp, Unknown
  Bacterial polypeptide expressing nucleotide sequence isolated from the Sargasso Sea
tatgaaatataactgcaaaactccaaaagagttattaaaaaaaattaaaaatgaagaaattaaaatggttgatcttcgtttcacagacatgcctggatcaacacatcatatctcaattccagttaaatatttaactgaagatttgtttaaagatggtgttggttttgacgggtcatctgtcagaggttttcaatccattgaaaatagtgatatggcaatggtgccggatgtaactagtggatatattgatccttttttctctgaaaaaacaattgcatttacttgtgatgttgtggatccaattacatacgaaagttatgatagagatcctagatatattgcaaaaaaagcagaaaaatatcttaaatcatcaggtatgggcgatacagcttattttggtcctgaagctgaattttttgtatttaatgatgttaagtatgattcaggttctaactttgcttttcatgaagtagactctgctgaaggagcgtggaacacaggaaaagacgaaaacccaaacttaggtcacaaaccaagacataaagggggatattttcccttacctccatctgatagtttacaagatgtaagaactgagatggttttaactatggaagaaattggcattgatgttgaggcatcacatcacgaagttgcaactggtggtcaatgtgaaattgacttacagttttctccactgttattaatggcagatgatcttttacgctataaatatgtagtaaaaaatgttgctaaacaacatggtatgactgcaacatttatgccaaagccgctatttgaagataatggatcaggtatgcatgtacattcaagtatatggaaaaataataaaaccctcatgtacaaaaaaggtaattatgcggacctgagtgattttgctctatattatataggtggaatattaaaacatgcacattcacttttagcattttgtgctccaactactaattcttataaaagattgactcctggattcgaagcacctgttaacatagcctactctcaagcaaatagaactgcctctgtaagaattccaaataattacactgcaagtccaaaagcaaaaagagttgagtttagatgtcctgatccttcgtcaaatccttatttagcattttcagcaatattaatggctggattggatggagttaaaaataaaattaatccaggcaagcctactgatataaatatttacgaagctcctgcaagtgttcttgcaaaaataccttccactcccggttctctggcagagtctttaaatgctcttgaaaaagatcataaatatttattagctggagatgtgtttactaaggataatatagaaacctat

SEQ ID NO: 311181 - DNA, 699 bp, Unknown
  Bacterial polypeptide expressing nucleotide sequence isolated from the Sargasso Sea
tttataaatatgtagtacaaatggtaacacattcatttggtaagactgcaacattcatgccaaaacctgttgcgggtgacaacggatcaggaatgcatactcatcaatctatttggaaaggagatacacctgtattttctggcgatgcttatgctggcttatctgaaacagctttacactacattggtggaattttaaaacatgctaaagcaataaacgcttttgctaatgcaacaacaaatagttataaaagattaattccaggatttgaagctccagttcttttagcttactcagcaagaaatagatcagcatcttgtaggattccaattaccttaagtaaaaaaggagcgagatgtgaaattagattccctgatgcatcaggaaatccttatctaacttttgcggcaatgttaatggcgggtatcgatggaattaaaaacaaaatacaccctggtgagtcttttgataaagatttatatgatctacctcctgaagaggtgaaatctatcccaactgtatgtggctcattaagagaagctatggaaagtttagataaagatagagagtttttaactcaaggtggagtattcactgacgatcaaattgatgcttatattgcactaaagtttgaagaaattcacaagtttgaacatgcacctcatcctgtagagtttgagatgtattacagttgttaat

SEQ ID NO: 311182 - DNA, 1408 bp, Unknown
  Bacterial polypeptide expressing nucleotide sequence isolated from the Sargasso Sea
aatgagtgcagcaaacgtattaaaatttatcaaagaaaaagaagcagaatttgtggatctaagattcactgatccaagaggaaaacttcaacacttaacaatggatgcttcaatagttgatgagagtatgttgaatgaaggtgtattttttgacggttcgtctattgctggttggaaagcaattaatgagtctgacatgattttaaaacctgatactgcaagaatgttcatggatccttttacgtctcataatactgtggttttgttttgtgacattttagatgcaattaaaaaagatccttatgaaagagatcctagaggtgttgctaaaaaagctgaagaatatttaaaagcttcaggtataggtgataaagctttttttggacctgagccagaattttttgtttttgacgatgtaagaatcaaaaatgatatgaatgagtgcggatttaaattagatagtaaagaaggtccttacaactcaggaaaagaatatgaaaatggaaacatgggacacagacctcaaattaaaggaggatatttcccagtaccaccagttgatagtgaacaagacatgcgtggtgaatatcttaaaaatttaaaagaagttggcattaaagttgaaaaacatcaccatgaagtagctcctagtcagcacgaacttggaatgtattttggaactttagttaatcaagcagataacgttcagttatacaaatatgttgtgcaaatggttacacattcatttggaaaaactgcaacatttatgccaaagccggttgctggtgacaatggttccggtatgcatatacatcaatccatttggaaaggtgatactccagtgttttcaggtgatgcgtattctggattaagtgaaaccgcattacattatattggtggaattctaaaacacgccaaagcaattaatgcttttgctaactctacaacaaacagttataaaagattaattccaggttttgaagctccagttctccttgcatattcagcaagaaatagatctgcttcttgtagaataccgatcacattaagcaaaaaaggtgcaagatgtgaaattagattcccagatgctgcaggaaacccatatttaactttcgcagctatgttgatggctggaattgatggaattaaaaataaaattcatcctggtgagtcttttgataaagatttatatgaattgccacctgaagaagttaaagctatcccaacagtttgtggttctttaagagaagcaatggaaagtttagataaagacagagagtttttaactcaaggcggtgtctttactgacgatcagattgatgcttacattgctcttaagtttgaagaaattcacaaatttgaacatgcacctcatcctgtagagtttgagatgtattacagtagctaa

SEQ ID NO: 311183 - DNA, 1019 bp, Unknown
  Bacterial polypeptide expressing nucleotide sequence isolated from the Sargasso Sea
tatgagcgctagggacgtattaaaacaaattaaatctaagaatgttgagtatgttgatcttagattcactgatccaagaggaaaactgcaacaccttaccatggataaaacaatagttgatgaaggtatgctgaacgacggagtattttttgatggttcttcgattgctggttggaaagcgataaatgagtcagacatgatattaaaaccagatttaagcagaacagtaatggatccatatacatcacataatacaatgattttattttgcgatattttggatgctgttaaaaaagacccatacgaaagagatccaaggggaatagctaaaaaagcagaagtatatttaaaaaaaactggaattggagacaaagcttactttgggccagagccagaattttttgtttttgatgatgtaaaaattaaaaatgatatgaatgaaactggtttttcaattgacagttctgaaggaccttataattcaggaaaatcatatgataatggtaatatgggtcacagacctggtattaaaggaggctattttcctgtgccaccagtagatagtgctcaggatatgagaggcgaatacttgaaaggtctaagagacgtaggtattactgttgaaaaacaccaccatgaagttgcacctagtcaacatgaactaggaatgttgtttggaacattagttgatcaagctgataatgttcaactttataaatatgtagttcagatggtttcacattcatttggaaagactgctacttttatgccaaaaccagtaaaaggtgacaatggctctggaatgcatactcaccagtcaatttggaaaggtaaaactccagtattttctggtaacaagtatgctggtctatctcaaacagctctttattatattggtggtattttaaaacacgctaaggcaataaatgcattttcaaatgctactacaaatagttataaaagactaatcccaggatttgaggcaccagttttacttgcatactctgcaagaaacagat

SEQ ID NO: 311184 - DNA, 1114 bp, Unknown
  Bacterial polypeptide expressing nucleotide sequence isolated from the Sargasso Sea
aatgtcagagattattcaaaaaataaaagacgaggacgttaaatttgttgacttgagatttacagatcctcacggtaaagaacaacacgtaacgatgcctgctcatgtagttgatgagagcatgcttgaaggcggaaaaatgtttgatggatcatcaatagctggatggaaaggaattaatgaatcagacatgattcttaaacccgacctatctacagctgttatagacccatttttcagtgatacaactcttaacataacttgtgatattttagagccttcaaacggtgaaggttataacagagatccgagaacgattgcaaaaaaagctgagaaattcttaattgattctggggtggctgatactgcttattttggtccagagcctgaattttttgtatttgatgatgtgagatattctaacgagattggatcatctttttacgaaattgataccgaagaagcatgttataactctggaaaagtttatgaagatgggaatactggtcatagacccggtgtaaaaggcggatacttcccagttccacctgttgattctttacaagatattagatctgcaatggtcacagttcttgatgaaatgggtgtagaatgcgaagttcaccaccatgaagttgcaacagctgggcagtgtgaaattggtaccaaatatgaaactttagttaaaagagcagattggaaccaaattcttaagtacgttgtgatgaatgtcgcccataattacggtaaaactgctacttttatgcctaagccaattattaacgataatggaaacggaatgcatgttcaccaatcattatttaaagatggtaataatttatttgagggagatttgtacggcggcttatctcaaactgcgctttattatattggaggtataatcaaacatgccaaagctattaacgcattttctaactcagctacaaatagttataaaagattagtgcccggcttcgaagcacctacaattcttgcatattcagctagaaatagatctgcaagtattaggattccttatgaagcaaatccaaaggctagaagaattgaagtaaggtttccggactcttgcggtaatccatactacacattacag

SEQ ID NO: 311185 - DNA, 427 bp, Unknown
  Bacterial polypeptide expressing nucleotide sequence isolated from the Sargasso Sea
aatgagtgcagaaaacgttttaaaatttattaaagaaaaagaagctgaattcgtagatttaagatttactgatcctagaggaaaacttcaacatttaacaatggacgcaacaattgttgatgcagatatgttaaatgaaggtgtattttttgatggatcttctattgctggttggaaagcaatcaatgaatctgacatgattttaaaaccagatactgcaagaatgtttatggatccatttacttcccacaatactgcagttttattttgtgatatcttagatgcaataaaaaaagatccttatgaaagagatccaagaggtgttgctaaaaaagctgaagaatacttaaaagcttcaggtataggtgataaagcattctttggtccagagccagaattttttgtatttgatgatgtaagaattaaa

SEQ ID NO: 311186 - DNA, 925 bp, Unknown
  Bacterial polypeptide expressing nucleotide sequence isolated from the Sargasso Sea
gatactgactatgaaatgggcaacactggtcatcgccctggtattaagggtggttacttcccagtaaatcctattgatgacgggcaagatatccgctctgaaatgctttcaacgatgaagcgtttaggtatgaaagttgacaaacaccatcacgaggttgcttcatgccagcacgagttaggtttaatctttgacagtcttacaaagcaaggtgatgatcttcagaaatataaatatgtcattcataatgttgcacaggcttacggcaaatcggcaactttcatgccaaagcctatagctggtgataacgggactggaatgcacgtcaatatgtctatttggaaaggtggtaaaccacttttcgcgggcgataagtatgctgatctatctcaagaggctctctactatattggaggcatcttgaagcatgcaaaatcactaaatgctttcacaaatccatcaactaattcttacaaacgtttaatcccaggatttgaagcaccagtgcttcgagcatactctgcaagaaataggtctggttgtgtccgcatcccatggactgaatctccaaaagctaagcgtgttgaggctcgttttcccgacccatcatcaaatccatatttgtgcttttcagctctcttaatggctgggttagatggaataaagaataaagtaaatccaggggaagccatggataaaaacctctatgatcttccggccgaggaactggcagatattccaacggtttgtggttctttacgagaagccattgaagagcttcagaaggatcatgattaccttctagctggcaacgttttcacaaaagatcaaattgatggatatattgagctgaaaatggaagaaattgagtcctatgagcatactccgcatccagtagagtatggcatgtactacagctgttaat

SEQ ID NO: 311187 - DNA, 976 bp, Unknown
  Bacterial polypeptide expressing nucleotide sequence isolated from the Sargasso Sea
tatgaacgaatgtggatttattttagacagtaaggaaggtccttacaattctggtaaagaatatgaaaatggtaacatgggtcatagacctggagtaaaaggtggatattttcctgtagctccagtcgacagtgagcaagacatgcgaagtgaatacttaaaaaacttaaaagaagttggaattaaagttgaaaaacatcaccatgaggttgctccaagtcaacatgagttaggaatgtatttcggaacactagttcaacaagcagataatgttcaactatataaatacgttgtacaaatggtaacacattctttcggcaaaacggcaacttttatgccaaaaccagtagctggtgataatggctcaggtatgcacacccaccaatcaatatggaaaggagacactccagtgttttcaggtgatgcatatgcgggattatctgaaacagctttacattatattggtggaatactaaaacatgctaaagcaattaacgcttttgctaacgctacaactaatagttataaaagattaataccaggttttgaagctccggtgcttttagcttattctgcaagaaatagatcggcttcttgtagaattcctataacattgagtaaaaaaggtgctcgatgtgaaattagatttcctgatgcatctggaaatccatatttaacatttgctgctatgctaatggcaggaatagacggtattaaaaataaaatacatccaggtgagtcttttgataaagatttatatgaacttccgcctgaagaagtaaaatctattccaactgtttgtggttctttaagagaagcaatggaaagtttagataaagatagagaattcttaactcaaggtggtgtatttacggatgatcagattgatgcttatattgctcttaaatttgaagaaattcataagtttgagcatgcacctcatccagttgaatttgagatgtattatagctgttag

SEQ ID NO: 311188 - DNA, 1408 bp, Unknown
  Bacterial polypeptide expressing nucleotide sequence isolated from the Sargasso Sea
atgagtgcagaaaacgttttaaaatttattaaagaaaaagaagctgaattcgtagatttaagatttactgatccaagaggaaaacttcaacatttaacaatggactcaactgttgttgacgcagatatgcttaatgaaggtgtattttttgatggatcgtctatcgctggttggaaagcaatcaatgaatcagacatgattttaaaaccagatacttctagaatgtttatggatccttttacttctcataatactgcagttttgttttgtgatattttagatgcaattaaaaaagatccttacgaaagagatccaaggggtgtggctaaaaaagctgaagaatatttaaagtcgtctggtattggtgataaagcatttttcggtccagaaccagaattttttgtttttgatgatgtaagaatcaaaaacgatatgaatgagtgtggatttaaaattgatagtaaagaaggtccatacaactctggaaaagaatatgaaagtggaaatatggggcacagacctccaattaaaggtggatatttccccgtaccaccagtggatagtgaacaagatatgcgtggtgaatatcttaaaaatttaaaagaagtaggaattaaagttgaaaaacaccaccatgaagttgctccaagtcagcatgagcttggaatgtattttggaactttagtaaatcaagcagataatgttcagttatataaatatgttgttcaaatggtaactcactcgtttggtaaaactgcaacctttatgcctaagccagtggctggagataatggttctggtatgcatattcaccaatcaatttggaaaggtgacacaccagttttttctggtgatgcttacgcaggattatctgaaactgctttgcattatattggtggaattttaaaacatgcaaaagctattaatgcttttgctaactctactacgaatagttataaaagattgataccaggttttgaggctccagtattacttgcatactctgcaagaaatagatcagcttcatgtagaattccaattaccttaagtaaaaagggtgcaaggtgtgaaattaggttcccagatgcatctggtaatccatatttaacatttgctgcaatgcttatggctggaattgatggtattaaaaataaaattcacccaggtgagtcttttgataaagatctttatgaattaccaccagaggaagtaaaagctattccaacagtttgtggatctttgagagaagcaatggaaagtttagataaagatagagaattcttaactcaaggtggtgtgtttacagatgatcaaattgatgcatacattgctcttaaatttgaagaaattcataaatttgaacatgcacctcatccagttgaatttgagatgtattacagcagttagt

SEQ ID NO: 311189 - DNA, 1408 bp, Unknown
  Bacterial polypeptide expressing nucleotide sequence isolated from the Sargasso Sea
tatgagcgctaataaagtattaaaacagatgaaggataaagacattgaatatgtcgacttaagattcacagatccaagaggtaaacttcaacatgtcacaatggattcaaaggtagtagatgaagaaatgcttgatgaaggtattttttttgatggatcgtctatagctggatggaaagctataaatgaatctgacatgattttaaagcctgacttatcaagaacagttattgacccttttactagtcataatacgatgaatattttttgtgatgttatggacgcgatcaagaaggatccatacgaaagagatccacgtggtactgcaaaaaaagcagaggcttacctaaaaaaatcagggattggtgataaagcttactttggtcctgaggcagaattctttgtgtttgatgatgtaaaatataaaaatgacatgaatgaaacaggatttaaaatagatagtacagaaggtccctataatactggaaaagattatccaaatggaaacatgggtcatagacctggagtaaaaggtggttatttccctgtccctccagttgatagcgcgcaagatatgcgtagtgaatacttaaaagctatgaaagatatgggaattaaagttgaaaaacatcaccacgaagtagcaccaagtcaacatgaacttggaatgtatttcggaactttggtagaccaagcagataacttacaattatataaatatgctgttcatatggtttctcattcttttggtaaaacagccacctttatgcctaagcccgtaaaaggcgataatggatcaggtatgcatgttcaccaatcaatatggaaaggcgataaagcattattttctggtgataaatatgctggattatcagatatagcattaaattacattggtggtattttaaaacacgcaaaagcaatcaatgcattttctaatgcaacaacaaacagttacaaaaggttaatacctggttttgaagcacctgtccttttagcgtattcagctagaaacagatctgcatcttgcagaatacctattactttgagtaagaaagcagcaagatgtgaagtaagatttggtgacgctgctggaaacccttatttaacttttgcagctatgttaatggctggactagatggaattaaaaacaaaatagatccaggaaaatcttttgataaagatttatacgcgttgtcagaatctgaggttaaaaaaattccaactgtttgtgggtctctgagagaagcaatggaaagcctggataaagatagagatttcttaaaacaaggaaatgtatttactgatgaccagatagatgcatatattgctttgaagtttgaggaaattcacaactttgaacacactcctcacccaatagaatttgatatgtactatagttgttaa

SEQ ID NO: 311190 - DNA, 1408 bp, Unknown
  Bacterial polypeptide expressing nucleotide sequence isolated from the Sargasso Sea
atgaccgcagcaaatgttttaaaatttatcaaagttaaagaagcagaatttgtagacttaagatttactgacccaagaggaaaattacaacatttaacaatggatgctggcgttgttgataaagatatgttggataatggagtattttttgatggatcctctattgctggatggaaagcaattaatgaatctgacatgattttaaaacctgatactgctaggatgttcatggatccttttacatcacataatacagttgttttattttgcgatatcttagatgcagttaaaaaaaatccttatgaaagagatccaagaggagttgctaaaaaggctgaaaaatatcttaaagcttcaggaattggagataaagctttttttggtcctgaaccagaattttttgtttttgatgatgttagaattaaaaatgacatgaacgaatgtggatttaagattgatagtaaagaaggtccatacaattctggtaaagaatatgataatggtaatatgggccacagacctccagtaaaaggtgggtatttccctgtgcctccagttgatagcgaacaagatatgagaggtgaatacttaaaaaatttaaaagaagttggaattaaagttgaaaagcatcaccacgaagtagctccaagtcaacatgaattaggtatgtattttggaactcttgttgatcaagctgacaacgtacaattatataaatatgttgtacaaatggttacacattcgtttggaaaaactgcaacgtttatgcccaaacctgtagctggagataatggttctggtatgcatattcatcaatcaatttggaaaggtaatactccagtattttctggcaatgcatattccggactatcaaaaacagctctacattatattggtggtattttaaaacatgcaaaagcaattaatgcttttgcaaactcaacaactaatagttataaaagattaattccaggttttgaagcaccagttcttcttgcttactcagctagaaatagatctgcatcatgtcgtataccaattacattgagtaaaaaaggggcaagatgtgaaattagattccctgatgctgctggaaatccttatttaacttttgctgcaatgttaatggctggtcttgatggaataaaaaagaaaattaatccaggaaaatcatttgataaagatttatatgaattaccagcaaaagaagttgaaaaaatcccaacagtctgtggatccttaagagaagctatggaaagtttagataaagatagaagtttcttaactcaaggtggtgtattcacagatgatcagattgatgcttatattgcacttaagtttgaagaaattcacaaatttgaacatgctcctcacccagttgagtttgacatgtattacagtagttaaa

SEQ ID NO: 311191 - DNA, 871 bp, Unknown
  Bacterial polypeptide expressing nucleotide sequence isolated from the Sargasso Sea
ttatttcccagttccacctgttgatagtgaacaagatatgagaagtgaatatctaaaagctatgaaagaaatgggaattaaagttgaaaaacaccatcatgaagttgcaccaagtcaacacgaacttggaatgtattttggaactcttgtggatcaagcagataacttacagctttataaatatgccgttcacatggtttctaactcatttggtaagacagctacatttatgcctaaacctgttaaaggagacaatggttcaggtatgcacgttcaccaatctatttggaaaggtgatactgcattattttctggtgataagtatgcaggcttatctgatacagctttacactacataggtggaattttaaaacatgcaaaagcaattaatgctttttctaatgctacgacgaatagttacaaaagactaattccaggatttgaagctccagttttattagcttattcagctagaaacagatcagcgtcttgtagaattcctatcactttaagcaaaaaagcagctagatgtgaaattagatttggtgatgctgctggtaatccatatttaactttctctgcaatgttaatggctggtttagatggaattaagaataaaattgatccaggtaaatcatttgataaagatctctatgctttatcagaagatgaagttaaaaaaattccaactgtttgtggatctttaagagaagcgatggaaagtcttgataaagatagagattttttaaagcaagggagtgtatttactgatgatcaaatagatgcttatattgcattgaagtttgaagaaatacacaactttgagcacacacctcatccgatagagtttgagatgtattacagttgttaa

SEQ ID NO: 311192 - DNA, 1012 bp, Unknown
  Bacterial polypeptide expressing nucleotide sequence isolated from the Sargasso Sea
atgagtaaaataagagcagaatacatttggatggatggccatgaaccaacccagaaacttagatcaaaaacaaaggtgcttgatggcccagttgaatcattagatgatctgccattatggggttttgacgggtccagcacaaaccaggcagatggaaatgatagtgactgcatgttaaagccagtatataaaattccagatcctattaggggaggagatgacattcttgtaatgtgcgaggttatgaatccagacggatcagtacatgcatcaaataccagagctcatttaagagtagtagcagagcaacacaaagaccaagaagcttggtttggcattgaacaagaatacaccttgtttgaagggcgaaaccctttgggctggccagaaggtggttatccagcaccacagggaccattttattgtggtgtcggagcagatgaagtatttggacgagatatcgttgaagaacatctagagctatgccttgatgcagggctagaggtttcaggaatcaatgcggaggttatgcccgggcagtgggaatatcaagttgggccattagggccattagaatctgctgatcaaatgtggttgtctcgatggctactatatagagtttcagaggattttggtgtaagtgcaacgcttcatccaaaacccgtaaaaggcgattggaatggcgcaggcgcacatacaaattttagcacaagatcaatgcgggaagaaggtggaatgaaagttattgaagacgcatgtgaaaaattaagccagaaacatgatgaacatattgatgtttatggtgctcacaatgaagaaagacttactggcctacatgaaacatgtagcatcaaagaatttcgatatggcgtgagtgatcgtggtgcttccataaggattccaatgcaaacagctaatgatggctatggctaccttgaagatagaagaccatctgcaaatatggacccatataaagtttgtgcaatattaattgaaactacctgtggttaat

SEQ ID NO: 311193 - DNA, 784 bp, Unknown
  Bacterial polypeptide expressing nucleotide sequence isolated from the Sargasso Sea
atgagcgctagttcagtaaggaagattataaaagataaagagatcgaatacgtagatctaagattcacagacccaagaggaaaacttcaacatgtaactatggatgcaacaatagttgatgaagatatgttaaacgaaggagttttctttgatggttcatctattgctggatggaaagcaattaatgaatccgacatgattttaaaaccagatttatcaagagcagtcgtagacccttttactacacacaatacacttaatatattttgcgacattcttgatgcgattaaaaaagatccttacgaaagagatccaaggggaacagcaaaaaaagcagaaggatatttaaagaaaactggtgtaggagataaagcctacttcggaccagaacccgaattttttgtttttgatgatgttagatattcaaacgatatgaatcatacaggatttcaaattgatagttctgaaggtccatataacactggaaaaaaatatgaaaatggaaatatgggtcacagaccaggtattaaaggtggttatttcccagttccgcctgttgatagtgcacaggatatgagaagtgaatatttaaaagcaatgaaggacatgggaattaaagttgaaaaacatcaccatgaagttgctccgagccaacatgaacttggaatgtattttggaacattagttgatcaagcagataatcttcagctatataagtatgcagtacacatggttacacattcatttggtaagacagcaacttttatgcctaaacctgtaaaag

SEQ ID NO: 311194 - DNA, 1408 bp, Unknown
  Bacterial polypeptide expressing nucleotide sequence isolated from the Sargasso Sea
catgagtgcaaaagatgtattagaaactatcaaagataaagagatagaatacgtagatttaagatttacagatccaagaggtaaacttcagcacgtaactatggatgctaaaatggtcgatgatgaaatgttgaatgaaggtatattttttgatggatcatctattgcaggttggaaagctattaatgagtctgacatgatacttaagcctgatttatcaagagcaattgtagatccttttacgtctcataacactatgaatcttttttgtgatattttagacgcaataaaaaaagatccttatgaaagagatccaagaggaacagctaagaaggcagaagcttacttaaaaagttcaggtattggagataaagcattttttggaccagaagcagaatttttcgtatttgatgatgtaagatttaaaaatgatatgaatgaaacaggttttaagatcgatagtaaggaaggtccttataattctggaagagaatatgaaaatggaaacatgggtcatagaccaggaattaaaggtggttacttcccagttccaccggtcgatagtgaacaagatatgagaagtgaatatttgaaagcaatgaaggacatgggtattaaagttgaaaaacatcaccatgaagttgctccaagtcaacatgagcttggaatgtattttggaactttagtggatcaagcagataatttacaattatataaatatgctgttcatatggtttcccactcatttggtaaaactgcaacttttatgcctaaacctgtcaaaggagataacggttcaggaatgcacgtacaccaatcaatttggaagggtgacactgcattattttctggggataagtatgctggtttatcagaaactgcattacattatatcggtggaattttaaaacacgctaaagctataaatgcattttcaaatgcaacaactaatagctacaaaagattgattccaggatttgaagcgcctgttttattagcttactcagcaagaaacagatcggcatcatgtaggattcctattactttaagtaaaaaagctgcaagatgtgaaattagatttggtgatgcagcaggtaacccttatttaacttttgctgctatgctaatggctggtttggatggaattaaaaataaaattgatccaggtaaatcattcgataaagatctttatgcattatcagaagatgaagttaaaaaaattccaactgtttgtggatctctaagggaagctatggaaagtttagataaagatagagattttttaaaagaaggaaatgtttttactgatgatcaaattgatgcttacatcgcattaaaatttgaagaaatacataattttgaacacactcctcatccgattgagttcgaaatgtattacagctgttaa

SEQ ID NO: 311195 - DNA, 598 bp, Unknown
  Bacterial polypeptide expressing nucleotide sequence isolated from the Sargasso Sea
atgaaaattaaagctgaatacatatggatagacggtaaaacaccaactgcaaagttaagaagtaaaaccaaaattatggatcaagggacagaacctccaatttggggatttgatggatccagtacagaacaggcaacaggagatcaatctgattgtgttttaaaacctgtagcacaatttccagatcctataagaggtggagataacatactcgtcatgtgcgaagtattgaatgtagacatgacaccacatgcttcaaatacaagggcggcctgtgttgcttctgctgaaaacttttctgagtttgaaccaatgtttggcttagaacaagagtatacattttatgagcaatcatacgattcgcttaagtatggacaaccattaggatttcctccttcaggatatccagccccacaaggtggatactattgtggcgtaggagcagatgaggtatacggtcgttcaatttccgaagatcatgcaactgcttgtatggaagctggactaaatatttctggaacaaatgcagaagtaatgcctggacagtgggaatttcaaattggacctgtaggagctcccagatattggagatcaaatt

SEQ ID NO: 311196 - DNA, 880 bp, Unknown
  Bacterial polypeptide expressing nucleotide sequence isolated from the Sargasso Sea
taaaggtggttactttcctgttccaccagttgatagtgaacaagacatgagaagtgaatatttaaaagcgatgaaagaaatgggtattaaagtagaaaagcaccaccatgaggttgcaccaagtcaacatgagcttggaatgtactttggaactcttgtagatcaagctgataacttacaactttataaatatgctgttcacatggtttctaattcatttggtaaaacagctacatttatgccaaagcctgttaagggtgataatggttcaggtatgcacgttcaccagtcaatttggaaaggtgatactgcattattttctggtgacaaatatgcaggattgtctgatacagctttaaactacataggtggaattttaaaacatgctaaagcaataaacgctttttcaaatgctacaacgaatagttacaaaagactaatcccaggatttgaagctccagttttattagcttattcggcaagaaacaggtcagcatcttgtagaattcctatcactttaagtaaaaaggcagctagatgtgaaattagatttggtgatgcagctggaaacccttatctaacttttgctgcaatgttaatggctggtttagatgggattaaaaataaaatcgatccaggtaaatcatttgataaagacctttatgcgttgtctgaggacgaagttaaaaaaatccctactgtttgtggatctttaagagaagcaatggaaagtcttgataaagatagagatttcttgaagcaaggtaatgtattcactgatgaccaaattgatgcttatattgctttaaagtatgaggaaattcacaatttcgaacatactccgcatccaattgaatttgaaatgtattatagctgttaa

SEQ ID NO: 311197 - DNA, 1132 bp, Unknown
  Bacterial polypeptide expressing nucleotide sequence isolated from the Sargasso Sea
cttgacgccgtaaaaaaggatccatacgaaagagatccaagaggaacagcgaaaaaagctgaggcctatttaaaaaaatctggaattggagataaatcttattttggtcctgaaccagaattttttgtgttcgacgatgttagatttaaaaatgatatgaacgaaacaagttttagcattgatagttctgaaggtccgtacaatacaggaaaaaagtatgaaaatggtaacatgggtcatagaccaggaattaaaggaggatattttcctgttcctcctgtagatagtgcacaagatatgagaggagaatatctaaaagctcttagagatatgggcgttaaagtagaaaaacaccaccacgaggttgctccaagtcaacacgagcttggtatgtattttggaacattaactgacatggctgataatctccaactctataaatatgcagttcaaatggttacccactcttttggtaaaacagcaacttttatgcctaaacctgtaaaaggtgataatggatctggtatgcactgtcaccaatcaatttggaaaggaagtacaccagtatttatgggtaaagaatattctggtttatcaaaaactgctttgtattatattggtggaatattaaaacatgctaaagctataaatgctttttctaacgctactacaaacagttataaaagattaatacctggttttgaagcccctgtaattttagcatactcggcaagaaatagatcagcatcatgtagaattccaatcataaacaatcctaaagctgcaagaatggaaattagattccctgatgcagctggcaatccttacttaacttttgcttcaatgttaatggcaggaattgatggaattaaaaataaaattgacccaggtaaatcttttgataaagatttgtatacactatctgaaagtgaagtgaaaaaattacctacagtatgcggttcattaagagaagcaatgcaaagtcttgataaagatagaaaatttttaactcaaggaaatgtttttacagatgatcaaattgatgcttatattgatttaaaattccaagaaatatataagtttgaacacactccacatcctattgagtttgaaatgtactatagtggataat

SEQ ID NO: 311198 - DNA, 1214 bp, Unknown
  Bacterial polypeptide expressing nucleotide sequence isolated from the Sargasso Sea
ttcgaagcggtccgcattcgacggctcgtcgatcgccggctggaaaggcatcgaagcgtcggacatgctgctggtgccggatgcaaacaccgcgcacatcgacccgttctacgaagagccgaccctggtcctgacctgcgacgtggtcgagccgtcggacggcaagggctacgaccgcgacccgcgctcgatcgccaagcgcgctgaagcctacctgaagagcaccggcctgggcgacaccgcctactttggtccggaacccgaattcttcatcttcgacggcgtgacctggaacatcgacatgcagggttgcttcgtgaagatcaattccgaagaagcaccgtggtcgtcgggcaaggagttcgaacacggcaactcgggccaccgtccgggcaagaagggcggctacttcccggttgccccgatcgacacgttccaagacatgcgctcggaaatgtgcctgatcctggaatcgctgggtattcccgttgaagtgcaccaccacgaagtggcaggccaaggccagaacgaaatcggcacgaagttcagcacgctggtgcaacgcgccgactggacccagctgcaaaagtacgtgatccagaacgtcgcgcacacctatggcaagacggcgacgttcatgccgaagccggtcgtgggcgacaacggttcgggcatgcacgttcaccagtcggtgtggaaggacggccagaacctgttcgcaggcaacggctacgctggtctgtcggagttcgcgctgtactacatcggcggcatcatcaagcacgcccgcgcgctgaatgccctcaccaacccgggtacgaactcgtacaagcgtctggtgccgggcttcgaggctccggtcaagctggcttactcggcacgtaaccgttcggcctcgatccgcattccgtacgttgcgaacccgaagggccgtcgtatcgagacccgcttcccggatccgctgatgaacccgtacctgggcttctcggcgctgctgatggccggtctggatggcgtgcagaacaagatccacccgggcgaagctgccgacaagaacctgtacgacctgccgccggaagaagacgcaaagatcccgaccgtgtgctcgagcctggatcaggccctcgagtacctggacaaggaccgcgaattcctgacccgcggtggggtgttctccaacgccatgctcgacgcctacatcgagctgaagatgg

SEQ ID NO: 311199 - DNA, 1408 bp, Unknown
  Bacterial polypeptide expressing nucleotide sequence isolated from the Sargasso Sea
tatgagctcaaatgacattttaaaattaatgaaagataaagagatagaatatatcgatttaaggtttactgatcctaggggaaagttacaacatttaactatggactcaactgcagtcgatgaagatatgttaaatgaaggagtattttttgatggatcatcaatagctggttggaaggcaattaatgagtctgacatgatattaaagccagatctttccagaaaagtaattgatccttttacatctcataacacattagtattattttgtgacattttggatgctgttaaaaaagatccttatgaaagagatccaagaggaatagcaaaaaaagctgaagcatatttaaaagaaaccggcataggagataaagcgttttttggacctgagccagagttttttgtttttgatgatgtgagaattaaaaatgatatgaatgaaactggatttaaaattgatagttccgaaggtccttacaactccggaaaaaaatatgaaaatggcaatatgggtcacagacctggaattaaaggtggatattttcctgtaccaccagttgatagcgctcaagatatgagaggagaatatcttaaaggtcttcgtgacgtagggattactgttgaaaaacaccatcatgaagttgctccaagtcaacacgaactaggtatgaaattcagtacactagttgatcaagcagataatgttcaactttataagtatgttgtccaaatggtttctcattcttttggtaaaacagcaacatttatgcctaaacctgtaaaaggtgataatggatctggtatgcatattcaccaatctttatggcagggtgacactcctttattttcagggcatagatactctggtttatcagatacagctattcactacattgggggaattttaaaacacgctaaagctataaatgctttttcaaatgctactacaaatagttataaaagattaattcctggttttgaagctccagttcttttagcatattctgctagaaatagatctgcatcatgtagaattccaataacgttgagtaaaaaaggtgcaagatgtgagataagatttccagatgctgcaggaaatccatatctaactttttctgctatgttaatggctggcttagatggaataaaaaataaaatagacccgggagagtcttttgataaagatttgtacactttatctgaaagtgaaattaaaaatatccctacagtatgtggttcattacgtgaggctatggaaagtttagatactgatcgaaattttttaaaagaaggaaatgtatttactgatgatcaaattgatgcttatatcgcattaaagtttgaagaaatatacaatctagaacatactcctcatcctattgagtttgatatgtactacagtagttaa

SEQ ID NO: 311200 - DNA, 742 bp, Unknown
  Bacterial polypeptide expressing nucleotide sequence isolated from the Sargasso Sea
atgtattttggaactttagtcaatcaagctgataacgttcaattatataaatatgttgtacaaatggttacacattcatttggaaaaactgcaacttttatgcctaaaccagttgcgggtgataatggttcaggtatgcacatccaccaatcaatttggaaaggtgataccccagtattttcaggtgatgcttatgcaggtttaagtgaaactgcgttacattatattggtggaattttaaaacatgctaaagcaattaatgcctttgctaactctacaacaaacagttacaaaagattaattccaggttttgaagcaccagttcttcttgcatattcagcaagaaatagatctgcttcttgtagaataccaattacattaagtaaaaaaggtgcaagatgtgaaattagattcccagatgctgcaggaaatccttatttaacatttgcagctatgttgatggctggaattgatggaattaaaaataaaattcatccaggtgagtcttttgataaagatttgtatgaattaccaccagaagaagttaaagctatcccaacagtttgtggttctttaagagaagcaatggaaagtttagataaagacagagagtttttaactcaaggcggtgtctttactgatgatcagattgatgcttacattgctttgaagtttgaagagatacacaaatttgaacatgcacctcatcctgtagagtttgagatgtattacagtagctaat

SEQ ID NO: 311201 - DNA, 1030 bp, Unknown
  Bacterial polypeptide expressing nucleotide sequence isolated from the Sargasso Sea
atgaaaattaaagctgaatacatatggatagatggtaaaacaccaactgcaaaattaagaagtaaaaccaaaatcatggatcaaggcacagagcctccaatttggggatttgatggatcaagtactgaacaagcaactggagatcagtctgactgtgttttaaaacctgtatcacagttcccagatccgataagagggggagacaacatattagttatgtgtgaagtattaaatgtagatatgacaccacatgcttcaaatacaagagcagcatgtgttgcttctgcagaaaacttttctgagtttgaaccaatgtttggtttagaacaagaatatacattttatgaacagtcatacgattccttgaaatatggacaacctctaggattccctccttcaggctatccagctccccaaggtggttactactgtggtgtaggagcagatgaggtatatggtcgttcaatttcagaagaccacgcaactgcttgtatggaagcgggcttaaacatatcaggaacaaatgcagaagttatgccaggacagtgggagtttcaaattggacctgtaggtgcacctgctattggagatcaaatatggattgcaagatggcttttgtacaggatcgcagaagattacaacatttctgcaactctaactccaaagccagtaaaaggagactggaatggtgctggtatgcatacaaacttctctacaaaacaaatgcgtgaagatggtggatatgacgcaatagttgcaggatgtgaggctttaggtaaaaatgctgaatttcatgttcaaaactatggcgctgggattgaagatcgtcttactggagatcatgaaactcaaagatttgatactttttcttacggtgtaagtgatagaggagcttcgattaggattccatggcaagttgaagtagataaaaaaggctatttagaggatagaagaccaaacgcaaacgcagatccttatgtaattgcaacggttatgattgatactgtttgttctgcagcatcaagctaat

SEQ ID NO: 311202 - DNA, 1012 bp, Unknown
  Bacterial polypeptide expressing nucleotide sequence isolated from the Sargasso Sea
aatgaaaataaaagcagaatatatttggattgatggatatgaacccactgctggtttaaggtcaaaaacaaaagttctggatggagcagtttcatctgtttctgaacttccaacatggggctttgatggatcaagtacattgcaggcagatggaggagacagcgactgtttattgaaaccagtatggatgtgtcctgacccaattcgtggtggcgaaaatattttagtaatgaatgaggtttgtaatcctgatggaacacctcataaatctaattctagagcagctcttgtcgatattactgaaaaatttaaagaacacaaaccttggtttggaattgaacaagagtatacattaatggacggaaagcaaccagctggatggccacaagaaggttttcctgaacgacctcaaggaccatactattgtagtgttggtgctgaagatgttgctgctagatcaatggtcgaagatcatctagatttatgtttggaagcaggtttagaagtatccggaataaatgcagaggtaatgttaggacagtgggaatatcaagtaggaccattacccgctttagaagttggcgatcaattgtgggtagcaagatggttgcttgaaagagttggtgaagaatatggcttaagagtagaactgcatcctaaacctataaaaggtgattggaatggctccggagcgcatattaactatagcacagagtcaatgcgtgccgatggtggattgaaagtaatcgagcaagcatgtgaaaaacttggacaaaacattgacaaacatattgctgtttatggagatgctaatgaagagcgtttaactggcgatcatgaaacctgtagcatcaaagagttcaagtatggtgttagtgatagaggggcatcaataagaatccccatgggagtagcaaatgatgggaagggatatttagaggatagaagacctgcatcaaatgttgacccgtacaaagcatgtgcagctttaatagaaacaacttgtagttaa

SEQ ID NO: 311203 - DNA, 1351 bp, Unknown
  Bacterial polypeptide expressing nucleotide sequence isolated from the Sargasso Sea
gcgcttcaccgataccaaaggtaaagaacagcacgtcacaattccttctcatcaggtaaatgccgaattcttcgaagaaggcaaaatgtttgatggctcctcgattggtggctggaaaggtattaacgaatctgacatggttctgatgccggatgcgaccactgcgctgatcgacccgttctatgaagaaccgacgctgatcatccgctgcgatatcctggaaccaggtacgctgcagggctacgaccgtgacccgcgctccatcgccaaacgcgcggaagaatacctgcgctctaccggtctggcggacaccgttctgttcgggccagaacctgagttcttcctgttcgacgatatccgtttcggcgcctctatctccggctcccacgttgctatcgacgacatcgaaggcgcatggaactcctccaccaaatacgaaggtggtaacaaaggtcaccgcccaggcgtgaaaggcggttatttcccggttccgccggttgactcctctcaggacatccgttctaccatgtgtatgatcatggaagagatgggcctggttgttgaagctcaccaccacgaagtggctaccgcgggtcagaacgaaatcgctacccgtttcaacaccatgaccaaaaaagcggacgaaattcagatctacaaatacgttgtgcacaacgtggcgcaccgttttggtaaaaccgcgaccttcatgccgaagcctatgttcggcgacaacggttccggtatgcactgccacatgtctctgtccaagaacggcgttaacctgttctctggtgacaagtatgcaggcctgtctgaacaagcgctgtactacatcggcggcgttatcaagcacgctaaagcgatcaacgccctggcaaacccgaccaccaactcctacaagcgtctggtcccgggttacgaagcaccggtcatgctggcttactctgcccgtaaccgttccgcttccatccgtatcccggtagtcacctcgccgaaagcacgccgtatcgaagtgcgcttcccggacccggcggctaacccgtacctgtgcttcgcagcactgctgatggctggccttgacggtatcaagaacaaaatccatccgggcgaagcgatggacaaaaacctgtacgacctgccgccggaagaagcgaaagagatcccacaggttgcaggctctctggaagaagcactgaacgcgctggacgctgaccgtgagttcctgacggctggcggcgtgttcaccaacgacgctatcgatgcttacatcgccctgcgtattgaagaaaacgaccgcgtacgcatgactccgcacccggttgaattcgaactgtactacagcgtctga

SEQ ID NO: 311204 - DNA, 545 bp, Unknown
  Bacterial polypeptide expressing nucleotide sequence isolated from the Sargasso Sea
ggtttatcagaaaccgcacttcattatattgggtggaattttaaaacacgctaaagcaattaatgctttttcaaatgcaacaacaaatagttataaaagattaattccaggttttgaagctccagttttgttagcttactcagcaagaaatagatctgcttcatgtagaataccaataacattaagtaaaaaaggtgcgagatgtgaaataagatttcctgatgctgcaggaaacccatatttaactttttctgctatgttgatggctggactggatggtattaaaaataaaattaatccaggtaaaccccttgatgaagatttgtatgctctgccagaagataaagtaaaaaatattccaactgtttgtgggtctttaagagaggctatggaaagtttagacagagatagaggttttttaaaacaaggtggtgtattttctgatgaccaaattgatgcgtttattgcattaaaatttgaggaaatttacaatcttgaacatactccgcatccaatggagtttgaaatgtattacagctcttaaa

SEQ ID NO: 311205 - DNA, 1198 bp, Unknown
  Bacterial polypeptide expressing nucleotide sequence isolated from the Sargasso Sea
catgtcacaatcggttttagattttattaaagaaaatgacgttaagttcattgatttacgctttactgatacaaagggtaaagagcaacatgtatctattcctcatcaccaagttgatgaagattttttcgaagacggtaaaatgttcgacggttcttcaattgctggttggaaaggcataaacgaatcagatatggttttaatgcctgttgctgaatcagtaaaacttgaccctttcactgaagaaacaacattaatcgtacgttgtgacgttgtagagccttctacacttcaaggctacgagcgtgacccgcgttctgttgcaaaacgtgctgaagattacatgcgctctacaggtattgctgataccgtattatttggcccagagccagagttcttcctttttgacgatgttaaatacaaatcagacatgtctggttcaatgtacaaagttgacgctgtagaagcggcatggaactcagataaagattatgaaggcggtaacactggtcaccgtccaggtgttaaaggcggttacttcccttgttcacctgtagattcttcacaagattggcgttcagctacgtgtttagtacttgaagagctaggtcaagtagtagaagcacatcaccacgaagtagcaacagcaggccaaaacgaaattgctacgcgttttaacagcatggttttaaaagcagatgaaatccaagaaatgaaatatgttattcataacatggctcatttgtacggaaaaacagctacattcatgcctaagccaattgttggtgataacggttctggtatgcactgtcaccagtctttagctaaagacggtgttaacttgtttgctggcgataaatacggcggtctttctgaagaagcgctttattacattggcggtattatcaagcatgctaaagctattaacgcatttgctaacgcatcaactaactcgtacaaacgtttagtaccaggctttgaagcacctgtaatgcttgcatactctgcacgtaaccgttctgcttcaatccgtatcccagtagtaccatctgcgaaaggtcgtcgtatcgaagtacgcttcccagatccaacagctaacccataccttgctttctcagcaatgcttatggctggccttgacggtatcaaaaacaagatccaccctggcgatgcaatggataaagatttatacgactta

SEQ ID NO: 311206 - DNA, 1033 bp, Unknown
  Bacterial polypeptide expressing nucleotide sequence isolated from the Sargasso Sea
tatgaaatacaactgcaaaacaccaaaagaacttttaaaaaaaattaaaaatgaaggtattaaaatggttgatcttcgttttactgatatgcctggttcaacacatcacatctcaataccaataaaatatctaactgaagacttgtttaaagatggcgttggatttgatggatcttcagtaagaggtttccaatctattgaaaatagtgacatgacaatggtgcctgacattgctactggatatttagatcctttctattctgaaaaaacaattgcattttattgcaatgttgtggatccaataacttataaaagctattcaagagaccctaggcacattgctcaaaaagctgaaaagtatttaaaatcttcaggcctaggagatacagcatactttggtcctgaagcagaattttttgtttttaatgatgttaagtatgattctggttcaaattttgcatttcatgaagttgattcaactgaaggagcatggaatactggaagagacgaaaatcctaacttaggtcacaaaccaagacataaaagtgggtactttcctttacctccagctgacagcttacaagatatacgaactgagatggttcttacaatggaagatataggaattaatgttgaagcttcacatcatgaagtggctactggtggtcagtgtgaaattgatttagagttttcaccacttctctcaatggctgatgatcttctaaagtacaaatatgttgtaaaaaacgttgctaaattgcacggtctaacagctacgtttatgccaaagccactttttgaagataatggttcaggcatgcacgttcactcaagtatttggaaaaagaataaaacattgatgtataagaaaggtaattatgcagacttaagtaattttgctttaaattacataggcggaatattgaaacatgccccatctttattagcgttttgtgcacctacgacaaattcttataagcgtttagtaccaggctttgaagcacccagtaaacattgcatattcacaagctaa

SEQ ID NO: 311207 - DNA, 1012 bp, Unknown
  Bacterial polypeptide expressing nucleotide sequence isolated from the Sargasso Sea
aatgaaggtaaaagcagaatatatctggattgatgggtatgaacctactgcaaacttaagatcaaaaaccaaagtattagatggagcagtttcttctgtttcagagcttccaacctggggttttgatgggtctagcacattgcaggcagatggaggagatagtgattgtttgttgaaaccagtatggatgtgtcctgatccaattcgtggtggagaaaatattttagtaatgaacgaggtttgtaatcctgatggaacacctcataggtctaattctagggcagctttagtagaaatcgctgaaaaattcaaagagcacaagccttggtttggtattgagcaagagtatacgctcatggatggaaaacagcctgctggatggcctgaagaaggatttcctgaaagacctcaaggaccttactattgcagtgttggctctgaagatgtagctgctcgctctatggttgaagatcacctagacttatgtttagaagcaggattagaagtatcaggaataaacgcagaagtaatgttaggacaatgggagtatcaagttggacccctacctgctctagaagtcggcgatcaattatgggttgcaaggtggttacttgaaagagtaggagaagaatatggtctgagagttgaacttcatccaaagccgataaagggtgattggaatggttctggggctcacattaactatagcacagaatcaatgagagcagatggaggtttaaaggttattgaagatgcatgtgaaaaacttggtcaaaatatagataaacatatagctgtttatggagatgctaatgcagagcgactaacaggtgaccatgaaacatgcagtatcaatgaatttaaatatggagttagcgacaggggtgcatctataagaatccctatgggggtagcaaatgatggtaagggatatttagaagatagaagacccgcctctaatgtagacccttataaagcttgcgcagctttaatcgatacaacttgtagttaa

SEQ ID NO: 311208 - DNA, 1411 bp, Unknown
  Bacterial polypeptide expressing nucleotide sequence isolated from the Sargasso Sea
atgactacttcaagtgaagcattaaaggcattcagagattctggagccaaatatttagatctaagatttactgatgttaaaggtaaatggcagcacctcacaatggatgggactgttgtagatgaggatcttcttaataatggtgtattctttgatggttcatctattgcgggatggaaagcaataaatgaatccgatatggttctcaagcctgatctctccaccacagtcatggacccattcacagctcagccaacaatgatgattttttgcaatattcttgatgcagttacaaaagaaccctatcaaagagatccacgtgggactgcaaaaaaagcagaagaatatgttaaatcaagtggtataggtgactcagtttacattggtcctgaagcagagttttttgttttcgatgacgttaagtttcaagtagaaatgaataaatctagctttgagattgatagttctgaagggccttataacagtgcaaaaaattatgaaagtggaaaccttggtcacagacctggaataaaaggaggttattttcctgtacctccagttgacagtgctcaagatataagaactgagtttcttgaggagttaaaaaatttaggtcttagaatggaaaagcatcatcatgaagttgctcctagtcaacatgagcttggtttattgtttgatactctcttaaaacaaggagatgggatacaattatataaatatggtgtacacatggttgctaattcttttggtaaaacagctacgtttatgcctaagccagtaaaaggtgataatgggtccggtatgcatgttcatcaatcgatttggaaagatggaaaacctctttttgcaggagatggatatgcgggattatccgaaactgcccttcattatattggaggtataattaaacatggcaaagctcttaacgcttttacaaacccaagcactaatagttataagcgtcttattcctggatttgaagcccctgtgatactagtttactcagcaagaaacagatcagcctcgtgcagaatacctgtatctgatagtccaaaaggaaaaagagttgaagtaaggtttcctgatccaactgcaaatccatacttggcatttgctgcaatgcttatggcaggaatggatggaataaaaaataaaattcatcctggagatgcaagtgatcaagatctctatgaactttcagataatgaagttgcaaagctgccaacagtttgtggctctttaagagaagctttagaggcagttgatcaagatagagcatttttaactgaaggtggcgtttttactgatgatcaaattgacggttacatagatcttaaaatgcaggaggtatatgatttagaacactcacctcaccctgtagaattcaagaactacttcagtgtataga

SEQ ID NO: 311209 - DNA, 1346 bp, Unknown
  Bacterial polypeptide expressing nucleotide sequence isolated from the Sargasso Sea
tatgaagccccgtgaagttatcgcgatgtgtcgcgagaaagaagtcaaagcagtcgatctccgatttgttgattttcttggtacctggcagcatttcacaataccagttgccaagttggaagaagaagtttttgaagatggaatcgggtttgatggctcaagcattcgtggctggcaggcaattaatgaaagcgacatgttgcttgttccggttccggatacagcatttgttgatccattcacaaccgtgccaacgcttgccgtcatctgcatggtgcaagatccaattacccgtgaagactattctcgtgacccacgattcattgctcgtaaagcagcgatttatttagaaggaactggtattgctgatacgtgctttattggtccggaagcagagttttttgtttttgatgcagctcactttgatcaaactgcccatgagggcttttattcaatcgactcagctgaagccgaatggaatcgaggcagcggcagtcatgggtatcaggtgcgacaccgtcagggttacagcccagttccaccaactgatcagatgatggatatccgcacagaaatgatgctcaccatgattcagtgtggtatcgatgtcgaagcacaacatcatgaagttgcctcagccggtcaatgtgaaattgatatgcgatatcagagccttgtacggatggctgatcacctctgtctctataaatatattgttcggaacgtcgcgcggagacacggacggacagcgacattcatgccaaagccaatttacggagatagtggatcaggaatgcatgtgaatctttccttatggaaagaaggcaagcctctgtttggtggctctggctatgcaggactatctgacatggcactgcatgcactcggtggaattctgaaacatgcacgagcgcttcttgcactgacgaatccaacgacaaatagctacaaacgacttgtcccgggttatgaggcacccattaatttggcgtattctcagcgaaaccgttcggcagcatgtcgaatcccgatgtactcaaccaatccaaagacgaaacggattgaatttcgttgtccagatccaacgtgtaatccatatcttgcgttttctgcagttcttatggcagctatcgatgggattcaaaatcatattgatcctggtgaaccacttgaccgtgatatctacgatatgccgccggaagaattggccaacgtttcaagaacgccagcagctcttggtgaatcaattgatgcactcgagcaggatcatgattttcttctgcgcggcgatgtgttcactgaggacgtcatccgtacctggatttcacataaaagaaatcacgaga

SEQ ID NO: 311210 - DNA, 1408 bp, Unknown
  Bacterial polypeptide expressing nucleotide sequence isolated from the Sargasso Sea
aatgagtgcagcaaacgttttaaaatatattaaagaaaaagatgcagaatttgtggatctaaggttcactgatccaagaggaaaacttcaacatttaacaatggatgcttcaatagttgatgaaggtatgttgaatgagggtgtattttttgatggttcatctatcgctggttggaaagcaattaatgagtctgacatgattttaaaaccagatacagcaagaatgttcatggatccttttacgtctcataatactgtagttttattttgtgatattcttgatgcaattaaaaaagatccatatgaaagagatccaagaggtgttgctaaaaaagctgaggaatatttaaaagcatctggtattggagataaggcgttttttggacctgagccagaattttttgttttcgacgatgtaagaatcaaaaatgatatgaatgaaagtggatttaaaatagatagtaaagaaggtccatacaattcaggtaaagaatatgaaaatggaaatatgggacatagaccacaagttaaaggaggttatttccctgtaccacctgttgatagtgaacaagacatgcgtggtgaatatttaaaaaatttgaaagaagttggtatcaaagttgaaaaacatcaccatgaagttgctccaagtcaacacgagcttggtatgtattttggaactttggttgaccaagcagataatgtccaactttataaatatgtagttcaaatggttacacattcatttggaaaaactgcaacgttcatgccaaaaccagttgcgggtgataatggatctggtatgcatattcaccagtctatttggaaaggtgatactccagtattttcaggtgaagcgtatgcaggactttcagaaactgcattacactatattggtggaattttaaaacacgctaaagcaattaatgcttttgctaactcaacaacaaacagttacaaaagattaattcctggttttgaagcgccagtactattagcttactctgcaagaaatagatcagcgtcatgtagaattccaattactttaagtaaaaaaggtgcaagatgtgaaattagatttccagatgcagctggtaatccttacctaacgtttgcagcaatgttaatggcaggtattgatggaattaaaaataaaatacatccaggtgagtcttttgataaagatttatatgaattaccaccagaagaagtaaaagctataccaactgtttgtggatctttaagagaagcaatggaaagtttagataaagatagagagtttttaactcaaggtggtgtatttactgatgaccaaatcgatgcttatatagctcttaagtttgaggaaattcataaatttgaacacgcacctcatcctgttgagtttgagatgtattacagtagttaa

SEQ ID NO: 311211 - DNA, 1051 bp, Unknown
  Bacterial polypeptide expressing nucleotide sequence isolated from the Sargasso Sea
gggacctgaggttgaatttttcatatttgattcagctagctttgactatggaccaaatcatggattccatcatgttgattcagatgaaggtatttggaactccggagaaagccatatgttagatggtattactcttaataaatcacacagaccaaaacacaaaggtggatacttccctgtttctcctgttgatactcaacaagatataagaaatgaaatgataagaataatgcaagattcttttgatataaaagttgaaaagcaacatcacgaagtagctacagctggtcaaggagaaattgatatagtttacaacacacttttagaaactgctgataatgtaatggcttacaaatatgtggtaaaaaatgttgcaaaaagacacggtaaagttgccacatttatgcctaagcctatttttgaagataatggtacaggaatgcatacccatcaatctatctggaaagatggcaagcctctttttgcaggagatttatatggtggattctcacaattagggctaaattatacaggtggattaattaagcatggtaaagcattaatggcattagctgctccaactactaattcttataaaagacttactcctggatttgaagctccaactattcttgctctatcagcaagaaatagatctgcagcttgtagagtgcctatgtattttcaaaaccctgcagcaaaaagaattgagtttagatctgcggatccaacttgtaacccttatttgactttttctgctatgttattagcaggtcttgatggaatagaaaatggttatgaccctggggaacccttagagcaagatttgtttgaacttcctctagaagaacaggcaaaactacctcaagttccttcaagtcttgaagaagcactaaatgcacttgaagaagatcatgactttcttctgaagggcggagtttttactgaagatgttattcgatcttggattgatttcaaaagagagaatgatgttgacccagtcagactaaggcctcatccttatgagtttttcctttcttttgacgcttag

SEQ ID NO: 311212 - DNA, 925 bp, Unknown
  Bacterial polypeptide expressing nucleotide sequence isolated from the Sargasso Sea
atgatttgttctattcaagagcctagaagcggtgaaccttatgatagatgcccaagatcattagctcaaaaggctttaaaatacttagagtctactggaatcgctgatacggcattttttggaccggaaccagaattcttcttatttgatgacgtgagatacgactcaaaagaaggctcctgtttttacagtgtagatacaattgaagctccatggaacacaggaagaattgaagagggtggaaatttaggatacaagatccaatacaaagaaggttatttcccagtttctcctaatgatactgcgcaagacatcagatctgaaatgctacttttaatgggtgaattaggcatacccacagaaaagcatcaccatgaagttgctggtgccggtcaacacgaacttgggatgaagttcgattcgttaatcaattctgctgacaacgtaatgacttataaatacgttgtaaggaatgttgctaaaaaatatgggaaaactgcaacatttatgcccaaacctgtatttaacgataatggaactggaatgcatgttcaccaaagtttatggaaaagtgggcagccactattttttggtgaaggagcatatgcaaatttatctcaaacagcaagatggtacatcggaggcatacttaagcatgctccatcattcttagcatttactaacccaactacaaatagttataaacgattagttccaggatttgaggcacctgtaaatctagtttattctgagggtaatagatcagctgcagtaagaatacctttaacaggtccaagccctaaagctaaaagattagaattcagatcaggtgatgcgcttgcaaatccttacttagcattttctgtaatgatgcttgctggtattgatggaattaaaatcaaattgatcctggtgatggagtaga

SEQ ID NO: 311213 - DNA, 910 bp, Unknown
  Bacterial polypeptide expressing nucleotide sequence isolated from the Sargasso Sea
tatgagcgctaataatgtgttaaaacaaatgaaagataaagacattgaatatgtcgacttaagatttacagatcctagaggaaaattacagcatgttactatggattcaaaagtagtagatgaagagatgttggaagaaggtatattttttgatggatcgtctatagctggttggaaagcaatcaatgaatcagacatgattttaaagcctgacttatctagaacagtaattgatcctttcactagtcataatactatgaatattttttgcgatgttatggatgcaataaagaaagatccatacgaaagggatccacgtggaactgcaaaaaaagcagaagcatacttaaaaaaatcaggaattggggacaaagcatattttggaccagaagcagaattttttgtgtttgatgatgttaaatacaaaaatgatatgaacgaaacaggatttaaaatagatagcactgaaggtccgtataatactggaaaagattatccaaatggtaacatggggcatagacctggtgttaaaggtggatattttcctgtgcctccagttgatagtgcgcaagatatgcgtagcgaatatctaaaagctatgaaagatatgggaataaaagttgaaaaacatcaccacgaggtagcaccaagtcaacatgaacttggaatgtatttcggaactttggtagaccaagcagataatttacaattatataaatatgctgtacatatggtttctcattcttttggtaaaacagctacctttatgcctaagcccgtaaaaggcgataatggatcagggatgcatgttcaccaatcaatatggaaaggtgataaggcattattttctggtgataaatatgctggactatcagatgtggctttaaattacattggtggtattttaaaa

SEQ ID NO: 311214 - DNA, 1051 bp, Unknown
  Bacterial polypeptide expressing nucleotide sequence isolated from the Sargasso Sea
aatgacgaaggtaaacgacgtattaaaaaaaattaaagacaatggcgttaaatatttagacttaaggtttacagaccctaggggcaagcttcaacacttgacgatggattgttcagtagtagatgaaagcttgctgaacgaaggtgttttttttgacggatcttcaatagctggttggaaagccatcaatgagtcagacatggtgcttagacccgacttatcaactacagtgatggacccatttacagctcaaccaacaatgatggtgttctgtgatattcttgatgccataactaaagagtcctacgaaagagacccaagaagtactgcaagaaaagcagaagaatttgttaagagcagtggtgttggcgatactgtttatattggaccagaggcagaattttttgtgtttgatgatgttaaatttcaagttgatatgaataaatcaatgtttgaaattgatagcactgaagggccttataactcaggaaaaaattatgaaagtggcaatttagctcataggcctggaataaagggtggctactttcctgtacctcctgttgatagcgctcaagatctaagaacagaatttcttgaggagttaaaaaacttagggttaaaaatggaaaaacatcatcacgaggttgcaccaagtcaacatgaattaggtcttctatttgataccttgctcaaacaaggagatgcaatgcagctttataagtacggtgtacacatggttgcaaacgcttttgggaaaactgcaacatttatgcctaagcctgttaaaggtgataacggtacaggcatgcatacgcatcaatcaatttggaaaaatggagagcctttatttgcaggagataaatatgcaggactttcagatatggctttaaactatattggcggaataataaaacatggcaaggcgcttaacgcatttacaaacgcaagtacaaatagttacaaaagattaatccctggctttgaagcccccagtgatattagtttactcagcgagaaacaggtctgcatcatgcagaatacctgtatctga

SEQ ID NO: 311215 - DNA, 973 bp, Unknown
  Bacterial polypeptide expressing nucleotide sequence isolated from the Sargasso Sea
atgaaaaaattagaatatatatggctggatgggtttcagccagaaccaagcctaagaagcaaagttaaagtcacggatggaactcctccagactggtctttcgatggctcatcaacccaacaagccgatggctcaagttctgactgtattattaggcctgtaaacgaatatattgggcctagaaattctgacagcttggtcatgtgcgaagttttgtcgcctgaccggtctgcacacccatccaacaccagaaaccagtgtgttgatattcttacagacgattggtggtttggctttgaacaagaatatttcttcacaaaccctgaagacggaacaatacttggttgggaagatggaacaccgagaccacaaggcgactattattgtggcgtaggatctggaaatgtccaagcacgcgaagtttcggaagcacatatggacgcttgtcttgaggcaggcattatgataaccggcactaacgcagaagtagcgcttggccagtgggaatatcaatgtttcggtaagggcctaaaggcagcagatgatttatgggtgagtagataccttcttcatctgattgcagaggagtacggagtgtctgtaaacattcatcccaagcctcaagagggcgactggaatggctcgggaatgcacactaatttttcgaatgaacaaatgagaagcgcaggctcggaagaactatttaattccatgtgtgaaaaactgggcgaggttcatgcagaagggattgctaattacggctcagacaatgaaaagaggctgactgggaatcatgaaactcaaagcattgacactttttcttatggcgtgagcgacagaggggcaagtatcagaatacccatctatacagttgaaaacgactggaatggctatttagaggatagaagacccgcttccaatgcagacccatataaaattatttcgcacattgttggtacgctgacacaataaa

SEQ ID NO: 311216 - DNA, 1150 bp, Unknown
  Bacterial polypeptide expressing nucleotide sequence isolated from the Sargasso Sea
attgatagaaaatcactatgttctttatctaaatttatatatccattcatcatattctcgaaacaataatttaatattttgggatttccaaatatttaaattaaatactacattagtaaatatgaaaataaaagcagaatatatatggatagatggaaaaactcctaccagtaaattaaggagtaaaacaaaaataatggaaaaagggacagagccaccaatatggggttttgatggttcaagcacagagcaagcaacaggggataattcagattgtgttcttaagcctgtttctacgttccatgaccctataaggggtggagataatatattagttatgtgtgaagtattaaatgtagacatgactccacatactacaaacacaagagcagcgtgtgaggcagcagctgaaaattttgctgaatttgaaccgatgtttggtttagagcaagagtacacattttatgagcagtcttatgattcactgaaatatgggcaaccattagggtttcctccttctggctatccagcacctcaaggaggttattattgcggagttggagcagatgaagtttatggaagagacatctcagaagaacatgcgtcagcatgcatggcagctggtctagaaatttctggaactaatgcagaagtgatgcctggacaatgggaattccagataggccctgttggagcgccggatataggagatcatatttgggtagcaaggtggttgctttatagaattgccgaagattataatatctcagctacattagatccgaaacctgtaaaaggagactggaatggcgcaggaatgcatacaaacttttctacaaagcagatgagagaagatggaggatatgaagccattattgctggatgtgaagccttaggaaaaaatgccgaacttcatgttaaaaattatggttcgggaatagaagaccgcttaacaggcgatcatgaaactcagaagtttgatactttttcttatggtgttagtgatagaggagcttcaatcagaataccttggcaggtagaggtagacaaaaaaggatatttggaagacagaagaccaaatgctaatgcagatccttatgtaattgccatgttaatgattgatacggtctgttcagcagcttctagctag

SEQ ID NO: 311217 - DNA, 977 bp, Unknown
  Bacterial polypeptide expressing nucleotide sequence isolated from the Sargasso Sea
ttgtttttatagtgtagatactattgaagctccatggaatacagggagaattgaagaagggggaaacctaggatacaaaatacaatataaagaaggatattttcctgtagctccaaatgatactgcgcaagatatcagatctgagatgcttcttcttatgggtgaattaggtatccccaccgaaaaacatcaccatgaagttgctggtgcaggccaacacgagcttggaatgaaatttgattcgttaataaatgctgctgataacgttatgacttataaatacgttgtcagaaatgttgcaaaaaaatatggaaaaacagcaacatttatgcccaaacctgtttttaacgacaacggaacaggaatgcatgttcaccaaagcttatggaagagtggacagccactattctttggtgaagggtcatatgcaaatttatctcaaacagcaagatggtacattggaggcatacttaaacatgcaccatcattcttagcatttactaacccaaccactaatagttataaacgattggttccaggattcgaagcacctgtaaatctagtttattctgagggtaatagatcagctgcggtaagaatacctttaacaggaccaagccctaaagctaaaagattagaattcagatcaggtgacgcacttgcaaatccttacttagcattctctgtaatgatgcttgctggtattgatggaattaaaaatcaaattgatcctggtgatggagtagatgtagatttatttgaacttccagctgatgaacttgcaaaaattgatacagtaccatcatctctaaatgactcacttaatgcgctaaaagcggataaggattatctattagctggtggagtatttactgaagattttattgataactttatcgatataaaatacgaagaggtacaacaactaagacaaaggcctcatccacatgaattcttcatgtattacgatgcataaa

SEQ ID NO: 311218 - DNA, 917 bp, Unknown
  Bacterial polypeptide expressing nucleotide sequence isolated from the Sargasso Sea
atacgaaaatggaaatatgggtcatagacctggaataaaaggtggatatttccctgtgcctccagtggatagcgctcaagacatgagaggagaatatttaaaaggtttaagagatgttggtattacagttgaaaaacatcaccatgaagttgctccaagtcaacatgaactaggaatgctttttggaactttagttgatcaagcagataatgttcagttatataaatatgtagtacagatggtttctcattcatttggaaaaactgcaactttcatgccaaagcctgttaaaggtgataatggatcaggaatgcacacacatcaatctatatggaaaggtaaaaatccagttttttctggaaataaatatgctggactgtctcaaacagctttatattatattggtggggtactaaaacatgctaaagctattaatgcttttgctaatgcaacaacaaatagctataaaagactaattcctggttttgaagccccagtattattagcttattctgcaagaaatcgatctgcatcatgcagaattccaattactttgagtaaaaaaggagcaagatgtgaaattagatttcctgacgcttcaggtaatccatatttaacttttgcgtctatgttaatggcaggaatagacggaataaaaaataaaattgatcctggtaaatcttttgacaaagatttgtatgctttatctgagaaagaactaaaaagagttccaacagtttgtggatctctaagagaggcaatggaaaatttagataaagatagaaagtttttaactcaaggaaacgtatttactgatgatcaaatagacgcttatatagctttgaagtttgaagaaatacataattttgaacatactcctcaccctattgagtttgatatgtattatagttgttagt

SEQ ID NO: 311219 - DNA, 592 bp, Unknown
  Bacterial polypeptide expressing nucleotide sequence isolated from the Sargasso Sea
atgagtgcagaaaacgttttaaaatatatcaaagagaaggaagcagagtttgtagatctaagattcactgatccaagaggaaaacttcaacatttaacaatggatgcttcagtagttgacgaaggtatgttgaacgaaggcgtcttttttgacggttcgtctatagctggttggaaagcaattaacgagtcagacatgattttaaaacctgatactacaagaatgttcatggatccttttacgtctcataatactgtggttttgttttgtgacattctagatgcaattaaaaaagatccttatgaaagagatccgagaggtgttgcaaaaaaagctgaagaatatttaaaagcctcgggtattggtgataaagctttttttggacctgagccagaattttttgtttttgacgatgtaagaattaaaaatgatatgaatgagtgcggttttaaactggatagcaaagaaggtccttataactcaggaaaagaatatgaaaacggaaacatggggcacagacctcaaattaaaggggggtattttccagtaccaccagttgatagtgaacaagacatgcgtggtgaatatctta

SEQ ID NO: 311220 - DNA, 510 bp, Unknown
  Bacterial polypeptide expressing nucleotide sequence isolated from the Sargasso Sea
aatgagtgctagcgaagttttaaaatttattaaagataaagatgcagaatttgttgatttaagatttaccgacccaagaggtaaattgcagcatttaactatggacgccactgtagtggatgaagatatgttaaagaatggtgttttttttgacggttcttctatcgctggctggaaagctatcaatgagtcagatatgattttaaaacctgacacttcaaggttttttttagatccttttacttcacataatacggctgtacttttttgtgatattttagatgcagttaagaaaactccttatgaaagagatccaagaggtgtggcgaaaaaagcagaagaatatttaaaagcatctggaattggtgataaagcattttttggtcctgaacctgaattttttgtttttgatgatgttaaaattaaaaatgatatgaatgaatgtggatttaaaattgatagtaaagaaggtccatacaattcaggtaaagaatatgaaaacggtaatat

SEQ ID NO: 311221 - DNA, 467 bp, Unknown
  Bacterial polypeptide expressing nucleotide sequence isolated from the Sargasso Sea
gtatcaagttggcccattaggacccttagaggttgcagatcaattatggatcagtcgatggctgctttatcgaattgctgaagattatggtgttagtgctactttacatccaaagcccgtaaaaggagattggaatggtgctggagcacatacaaatttcagcacaaaatcgatgagagatgaaggcgggataaaggtaattgaagctgcatgtgaatctttaggaaaaaaacatgaagaacatatagctgtttatggtgcgcataatgaagaaagacttacgggattacatgaaacttgttctataaaggactttcgatatggtgtaagtgatcgtggtgcatctataagaattccaatggctacttcgaatgatggtaagggatatttagaagatagaaggccttcagcaaatatggatccatataaagtatgttcaatattaattgaaactacatgtggataag

SEQ ID NO: 311222 - DNA, 649 bp, Unknown
  Bacterial polypeptide expressing nucleotide sequence isolated from the Sargasso Sea
aattttatgcccaaaccagtaaaaggagataacggttctggtatgcactgtcaccaatcgatttggaaaggaagtactgcggtattttctggaaataaatacgcaggtttatctgatacagcattacactacattggaggaatattaaaacacgctagagcgataaatgctttctctaatgcaacaactaatagttataaaagattaataccaggctttgaagcgcctgtattattagcatactcagcaagaaacagatctgcgtcgtgtagaattccaattacacaaagtaaaaaagctgctagatgtgaagttcgtttccctgatgcagctggaaacccttacttaacattttcttcattattaatggctggtcttgatggaattaaaaataaaatcgatccaggtaaatctttagacaaagatttatatgctttaagtgagtctgaagttaaaagaattccaacagtttgtggttctttaagagaagccatggaaagtttggataaagatagaaaatttttaactcagggcaatgttttcactgatgatcagatagatgcttacatcgctcttaagtatgaagaaatttataattttgagcacactccacatccaatggagtttcaaatgtactacagttgctaga

SEQ ID NO: 311223 - DNA, 1408 bp, Unknown
  Bacterial polypeptide expressing nucleotide sequence isolated from the Sargasso Sea
tatgagcgctaaggacgtactaaaattaatgaagtctaagaatattgagtttgtagatcttagatttacggacccaaggggaaaacttcaacatttaacaatggatacaactattgtagatgaaggaatgttaaatgacggtgtattttttgatggatcgtcaattgcaggatggaaagcaattaatgaatctgacatgatattaaagcctgatttaagtagaaaagtaatagatccttatacatctcataatactttaattttattttgtgatattttagatgcagttaagagagatccctatgaaagagatccaagaggaattgcaaaaaaagctgaagcatatttaaagaaaacaggaattggtgatacagcttactttggtccagagcctgaattttttgtttttgacgacgtaagaattaaaaatgatatgaatgaaacaagtttttcaattgatagttcagaaggtccttataactctggaaaatcttatgataatggaaacatgggtcatagacctggagtaaaaggaggatattttcctgtgccaccagtagatagtgctcaagatatgagaggtgaatatcttaaaggactaagggatgttgggattacagtagaaaaacaccaccatgaagttgctccaagtcaacatgaacttggaatgttatttggaactttagttaatcaagcagacaacgtccagctatataaatatgtagttcaaatggtttctcactcttttggaaaaactgcaacttttatgcctaagccagttaaaggagataatggttctggaatgcatactcaccaatcaatttggaaagggaaaactccggtattttctggaaacaaatatgcaggattatctcaaactgctctctattatattggtggagtattaaaacatgcaaaagcaattaatgcatttgctaatgcgactacaaatagttacaaaagattaataccgggatttgaggctcctgttttacttgcatactctgcaagaaatagatcggcttcatgtagaattccaatcacattaagtaaaaagggcgcaagatgcgaaataagattcccagatgcttcaggaaatccatacttaacatttgcctctatgcttatggctggtattgatggaataaaaaataaaattgatccaggtaaatcgttcgacaaagacctttacgctttatcagaaaagcaagttaagaaggtaccaactgtttgcggttcgctaagagaagcaatggaagctttggataaagatagaagtttcttaactaaaggcaatgtatttactgatgatcaaatagatgcgtatattgaacttaaatatgaagaaattcacaattttgaacatacgccgcatcctattgaatttgacatgtattatagctgttaa

SEQ ID NO: 311224 - DNA, 643 bp, Unknown
  Bacterial polypeptide expressing nucleotide sequence isolated from the Sargasso Sea
atgccaaaaccggtaaagaatgataatggttcaggaatgcacgttcatcaatcaatttttagtggagaaaaacctttattcgctggagacaaatacgctggattatccgacgagtgtttatactatatcggtggaatcataaaacatgctagagcgcttaatgctttttcaaatgcttcaacaaatagctataaacgactaatacctggttttgaagctcctgtactattagcgtattcatcaagaaatagatcagcaagttgtaggataccatttagtgatagcaaaaaaggtaaaagggtagaggtaagatttggtgatgcatctggaaatccttatttaacttttgcatctatgctgatggctggaatagatggcataaaaaataagatcaaacctggtaagccaatggatcaagacttatatgctttaagccctgaggaactcaaaggaattccaactgtatgttcatctttacgtcaagcttgtgtagcattagatgaagatagaaaatttttaactgagggtggagtgtttactgatgatcaaatagatgcttacattgatttaaaaatgcaagaagtaaataactttcaagatactccacaccctattgaattcgaaatgtattatagctgttaaa

SEQ ID NO: 311225 - DNA, 1000 bp, Unknown
  Bacterial polypeptide expressing nucleotide sequence isolated from the Sargasso Sea
gatgatgtaagaattaaaaacgatatgaacgaaactggatttgtaattgatagtgctgaaggtccttataattctggaaaaaaatatgataatggaaacatgggtcatagacctggaattaaaggtggatatttcccagtgcctccagttgatagtgctcaagatatgagaggagaatacttaaaaggtttaagagatgttgggattactgtagaaaaacaccatcatgaagtcgcacctagtcaacatgaattaggaatgttatttggaacgcttgtagatcaagcagataatgttcagctatataaatatgttgttcaaatggtatcacactcttttggaaaaactgcaacctttatgcctaaaccagttaaaggagataacggatcaggaatgcatattcatcaatctgtatggaaaggaaaaacaccattattttcaggaaacaaatatgcaggtttatctcaaactgccttatattatattgggggaatcttaaaacatgctaaagctataaatgcattttcaaatgctacgacaaatagttataaaagattaattccaggttttgaagcacctgttttattagcttattctgcaagaaatagatctgcttcatgcagaataccagttacgttaagcaaaaaaggtgcgagatgtgaaattaggttcccagatgctgctggtaatccatatttaacattcgcagcaatgttgatggctggtttagatggtataaaaaataaaatagatccaggtaaatcattcgataaagatttgtatacactttctgaaaaagaaattaaaaatattccaactgtttgtggctccttaagagaagcgatggaaagtttagatacagatagaaaatttttaaaacaaggtaacgtttttactgatgatcagattgatgcttatatagcattaaaatttgaagaaatttataatcttgaacatactcctcatcctattgagtttgatatgtactatagctgttaaa

SEQ ID NO: 311226 - DNA, 1411 bp, Unknown
  Bacterial polypeptide expressing nucleotide sequence isolated from the Sargasso Sea
aatgtcagttgaatcagttttaaagcaacttgaagaattagaagttaagtttgttgatttacgttttaccgacaccaaaggtaaagagcagcacgtatctatcccagctcatcaggtagacgctgacttcttcgaagacggtaaaatgtttgacggctcgtcaatcgctggctggaaaggcattaacgaatcagacatggtactgatgccagacccaactacgttcgtactggatccattcaccgaagaaaccactgcgctgatccgttgtgacattctcgagccaggcactatgactggttatgaccgcgacccacgttctatcgcgaaaaaagcggaagaatacttacgctctaccggtatcgctgacactgtattagttggaccagaaccagaattcttcctgttcgacgatgtccgtttcggtactgacatgtctggttgtttcgtgaaaatcgacgctaaagaagcggcatggaactctggcactagctacgaaggtggcaacactggtcaccgtccattcgtgaaaggcggttacttcccagtagctcctgttgactcatcacaagacttacgtagcgctatgtgtttagtgctcgaagaaatgggtcaagtggttgaagctcaccaccatgaagtggcgactgcgggtcaaaacgaaatcgcaactcgcttcaataccctgactaagaaagcggacgaaatccaaattctgaagtacgtagtacacaacatggctcacgcctacggtaagactgcgactttcatgcctaagccaatcgttggcgacaacggtagcggtatgcacgttcaccaatctctggcgaaagatggcgtaaacctgttcgcaggcgacaaatatgctggtttaagtgaaactgcactgtactacatcggtggtatcatcaagcacgctcgcgcactgaacgctttcactaacccaagcactaactcttacaagcgtttagtaccacacttcgaagcgccagtgatgttagcttactcagcacgtaaccgcagcgcttcaatccgtattccagtggtaccaagccctaaaggtcgtcgtatcgaaactcgcttcccagatccacatgcaaacccatacttaggtttcgcagcactgctgatggcgggtatcgacggtatccaaaacaagatccatccaggcgaagcgatggataaagacttgtacgatctgccagcggaagaagcggctgaaatcccacaagtagcgacttcattagaaaacgcccttgaaaacctgcaagctgaccacgagttcttaactcgcggcggtgtatttagcgaagatttcatccagtcttacattgcactgaaatctgcagaagctgagcgtgtaagccgtacaactcacccattagagtttgaaatgtactacagcctgtaa

SEQ ID NO: 311227 - DNA, 727 bp, Unknown
  Bacterial polypeptide expressing nucleotide sequence isolated from the Sargasso Sea
tatgagtgctagttcagttaaaaagataatgaaagataaagagattgaatacgtagatctaagatttacagatccaagaggaaagctacaacatgttactatggatgcaacaatagttgatgaagatatgttgaacgaaggagttttctttgatggttcatctattgctggatggaaagcaattaatgaatccgacatgattttaaaaccagatttatcaagagcagttgtagacccttttacttcacacaatacacttaatatattttgtgacattcttgatgcaattaaaaaagatccttacgaaagagatccaagaggtacggccaaaaaagcagaagcttatttaaaaaaaactggtgtgggagataaagcttacttcggaccagaacctgaattttttgtttttgatgatgtaagatattctaatgatatgaataatacaggatttcaaattgacagttccgaaggtccttacaatacgggaaaaaaatacgaaaacggaaatatgggtcaccgtcctggaattaaaggaggttacttcccagtgccacccgttgatagtgcgcaagatatgagaagcgaatatttaaaagcaatgaaagatatgggaattaaagttgaaaaacatcaccatgaagttgctccaagccaacatgagcttggaatgtattttggcacattagttgatcaagcagacaatcttcaactttataaatatgcagta

SEQ ID NO: 311228 - DNA, 997 bp, Unknown
  Bacterial polypeptide expressing nucleotide sequence isolated from the Sargasso Sea
atctattgcgggttggaaagcaataaatgagtctgatatgattttaaaacctgatttaagtagaaaagtaatagatccttacacatctcataacactctaatattattttgtgacattctagatgctgtaaaaagaaacccgtatgaaagagatcctagaggtattgcaaaaaaagctgaggcttatttaaaaaaaactgggattggtgataaagcttattttggtcctgagcctgaattttttgtttttgatgatgttaggataaaaaatgatatgaatgaaacaagtttttctattgatagctcagaaggtccttataattcaggtaaaaaatatgaaaatggtaatatgggtcatagacctggaataaaaggaggatattttccagttcctccagtagatagcgctcaagacatgaggggagaatatttaaaaggtttaagagatgttggaattacagtagaaaaacaccaccatgaagttgctccaagtcaacatgaattgggaatgttatttggtacattagttgatcaagcagacaatgttcagctttataaatatgttgttcaaatggtttcacactcatttggaaaaactgcaacatttatgcccaaacctgtgaaaggtgataatggttcaggaatgcatgttcaccaatcagtttggaaaggtaaaactcctgttttttcaggtaacaaatattcaggtttatctcaaactgctttatattacattggtggaatattaaaacatgcgaaagcaattaatgcatttgcaaatgcaacaacaaatagctacaaaagattaattccaggatttgaagctccggttttgcttgcttattcagcaagaaatcgttctgcatcttgtagaattcctattactttaagtaaaaaaggagcaagatgtgaaattagatttccagatgcttctggaaatccatatttaaacttttgcgtctatgttaatggcaggtttagatggaataaaaaataa

SEQ ID NO: 311229 - DNA, 1408 bp, Unknown
  Bacterial polypeptide expressing nucleotide sequence isolated from the Sargasso Sea
tatgagcgcaagcaaagttctaaaaatgatgaaagacaagcaaattgagtttgtcgatttaagatttacagacccaagaggtaagttacagcacttaactatggatgcatcggtagtcgatggggacatgttaaccgatggtgtattttttgatggatcatctattgctggatggaaagcgataaatgaatctgacatgatattaaaaccagatttaaacagacaaatcgttgatccatttacatctcataatactcttgttttattttgcgacatattagatgcaattaaaagaaatccttatgagagagatccaagagggatagcgaaaaaagctgaagcttatttaaagaagactggcataggtgataaagcttactttggtccagaaccagaattttttgtttttgatgatgtaaaaataaaaaacgatatgaacgaaacaagtttttcgatagatagtacagaaggaccatataattctggaaaaagttatgaaaatggaaatatgggtcatagacctggagttaagggtggatattttccagtacctccagtagatagtgctcaggatataagaggtgaatacctaaaaggtttaagagacgtaggtatcacagttgaaaaacatcaccatgaagttgctccaagtcagcacgaacttggaatgctttttggtacgttagttgatcaagctgataatgttcaattatacaaatatgtcgttcaaatggtttcacattcatttggtaaaactgctacgtttatgcctaaacctgtaaaaggtgataatggatcaggaatgcacgttcaccaatcagtttggaaaggaaaaactccagttttttctggaaataaatattcaggtttgtcacaaactgcgctttattatattggtggaatacttaaacatgctaaggcgattaatgctttttcaaatgctacaacaaatagttataaaagattaattccaggttttgaagctccagtattgcttgcttattctgcaagaaacaggtcagcatcttgtcgaattccgataaccctaagcaaaaaaggagcaagatgtgaaattagattcccagatgcatctggtaatccatatttaacatttgcatctatgttaatggcgggaattgacggtatcaaaaataaaattgatccaggcaaatcctttgataaagatctttacgctttatcagagaaggaggttaaaaaagttccaactgtttgcggatcattaagagaagcaatggaaagtttagataaagatagaaagtttttaactcaaggtggagtatttactgatgatcaaattgatgcttatattgctcttaaatttgaggagatacacaactttgaacatacacctcatcctattgagtttgatatgtactatagttgttaa

SEQ ID NO: 311230 - DNA, 330 bp, Unknown
  Bacterial polypeptide expressing nucleotide sequence isolated from the Sargasso Sea
tcccggatccggcagctaacccttacttagctttcttagctcagttaatggctggtttagatggtattcagaacaagatccatccaggcgatgctatggataaagacttgtatgacctgccaccagaagaagaagcactgatccctcaggtctgtggttctttagacgaagctctggatgcactggatgcaaaccgcgctatcttcactaaaggcggcgtaatgtccgacgcgatgatcgatgcatacatcgaactgaaacgtgctgaagctaaacgtgtttctgttgcagttcacccactggaatacgaactgtattacagcgtataac

SEQ ID NO: 311231 - DNA, 1408 bp, Unknown
  Bacterial polypeptide expressing nucleotide sequence isolated from the Sargasso Sea
aatgagctcaaaacaagtattaaaattgatgaaagataaacaggttgaatatgtcgacctaagatttactgatccaagaggaaagttacaacacctaacaatggacgcaactatagtagatgaaggaatgttaaatgatggcgttttttttgatggttcgtcaatagcgggttggaaagcaataaacgaatctgacatgattttaaaacctgatctttctagaaaaattatggatccttttacatctcataatacaatgatacttttttgtgatattctagatgctgtaaaaaaaaatccttacgagagagatccaagaggaatagcaaaaaaagctgaagcttacttaaagtcaacaaaaattggtgataaagcatattttggaccagagccagaattttttgtatttgacgatgttcgatataaaaatgatatgaatgaaactagttttgcaattgatagttctgaaggaccttataataccggaagaaaatatgataacggaaatatgggtcatcgccccggtattaaaggaggttactttcctgttccaccggtagatagtgctcaagatatgcgtggagaatatttaaaaggattaagagatgtgggaataactgttgaaaaacatcatcatgaagtggcaccaagtcaacatgaattaggaatgctatttggtactcttgttgatcaagcagataatgttcaactttataaatatgtagtacatatggtttcaaattcttttggcaaaactgcaacctttatgcctaaaccagtaaaaggagataatggttctggaatgcactgtcatcaatcaatttggaaaggtaatacacctgtgttttccggaaataagtatgcaggattgtcagatactgctttacattacattggaggaattttaaagcacgctaaggcaattaatgcattctcaaatgccacaacaaatagttataaaaggttaatacctggttttgaagcgccagtgctattagcttactcagctagaaataggtctgcatcatgcagaatcccaattacactaagtaaaaaaggtgcaagatgtgaaatcagatttccagatgctgctggaaatccatatttaacttttgctgctatgctaatggctggcttggatggaattaaaaataaaataaatccaggcaaatcttttgataaggatttatacgcactatcagaaaatgaaataaaaaatattccgactgtctgtggttctttaagagaagctatggaaagtttagatacagatagaaaatttttaacacaaggcggagtttttaccgatgatcagatagatgcttatattgcactaaaatttgaagaaattcataattttgagcacacgccacatccaattgaatttgacatgtattatagctgttaa

SEQ ID NO: 311232 - DNA, 1303 bp, Unknown
  Bacterial polypeptide expressing nucleotide sequence isolated from the Sargasso Sea
aatgagtgtcgaggatatactaaaaacagtaaaagaaaaagaggtcaaatttattgactatcgatttactaatacgaatgggaaagaacaacatgtaactgtaactgcaaatgaagatggcattaaatcagattttacagaaggtaaaatgtttgatggatcatctatagcgggatggaaagatattaatgaatcagacatgattttaatgcctgactcaagcactgcagtaatggatccattctatgatgaaccaactttgattgtaacgtgtgacgtcattgagcctgctgatggtaatccatatgaaaaagatcctagatcgattgctaaaaaagctgaagcttatttaaaagaaactggtattgctgataaggcattttttgggccagagaatgaattttttgtttttgatgatgtgaaatttgaagataaacttggtagttcttacttctcagtagactctactgaggcttgctataacagtagcaaatcatatgaggaaggtaatatgggacatagacctcttgtcaaaggtggctattttccagttccgcctgttgatgcattgcaagactgtagatcagcaatggtaacaacatgtcaagagatgggtgtggcatgtgaagttcatcatcatgaggttgcaactggaggtcaatgtgaaattggcacagtatttaatacacttgtaactaaagcagatgaagtgcaaaaatataagtatgcagtcatgaatgtggcacacgcttatgggaaaactgctacttttatgcctaaaccattagtaggtgataatggtactggtatgcatgtccatatgtctttatccaaagatggtaataatgtttttgctggtgataagtatggcaatatgtctgaagaagctctcaactatattggaggaataatcaaacatgcaagagcattaaatgcttttacaaatgcatctactaatagctataaaagattaatacctggatttgaagctccagtaatattaacttactcagctcgtaatagatcagcagctattagaataccttatgttatgagtgataaggcgagacgtatagaggttagatttccagattcaactgctaacccttatttagcttttagcgcacttatgatggctggtttagatggtattaaaaacaaaattaatcctggtgacgctatggatcaagacttgtttgagctaacaactgaagaagaaaaaatgcttcctacagtagcacctgggctagatgtagctcttgaagctctagataaagatagagacttctttgaagcaggtgga

SEQ ID NO: 311233 - DNA, 673 bp, Unknown
  Bacterial polypeptide expressing nucleotide sequence isolated from the Sargasso Sea
ttcacattcttttggaaaaactgcaacttttatgccaaagccagttaaaggagataatgggtctggaatgcatacacaccagtcaatttggaaaggtgatactccagttttctcaggtgacaaatattctggtttatcagaaattgcgttacattacattggtggaattttgaaacatgcaaaagctattaatgctttttcaaatgctacaacaaatagttataaaagattaattcctggatttgaagctccagttcttttagcttattcagctagaaaccgatcagcatcatgtagaattccaataactttaagtaaaaaaggcgcaagatgtgaaattagatttccagacgcagctggtaatccttatttaactttttctgcaatgttgatggccggattagacggtataaaaaacaaaattcatccaggtgagtcatttgataaagacttatatactttaccggaagaagaaattaaaaatattccgactgtttgtggatccttaagagaagcaatggaaagcttggatacagacagaagttttttaaaagaaggcaatgtatttactgatgaccaaattgatgcttatattgctcttaaatttgaagaaatttataacttagaacatactcctcatccaattgagtttgatatgtattacagtagttaa

SEQ ID NO: 311234 - DNA, 984 bp, Unknown
  Bacterial polypeptide expressing nucleotide sequence isolated from the Sargasso Sea
catgagtactaataatattttaaaaactataaaagacaaacaaattgaatatgtggatctaaggtttacagatccaagaggaaagctccaacatgtaactatggatgctaaaatagttgatgaagatatgttgaacgatggaattttttttgatggatcgtcaattgctggctggaaggcaataaacgagtcagatatgattttaaaaccagatttatcaaggtcaatagtagatccttttacttcacacaatactctaaatattttttgtgatattctagatgcaattaaaaaagatccgtatgaaagagaccctagaggaactgctaaaaaagcagaggcttatttaaaaaaatctggcgtaggtgataaggccttttttggtcctgaaccagaattttttgtatttgatgatgtaagatttaaaaacgatatgaatgaaacaggatttaaaatcgatagcacagaaggaccttataatacaggtaaagaatatgaaaatggaaacatgggacatcgacccggaataaagggaggttattttcccgtgccaccagttgatagtgcccaggatatgagaagtgaatatcttaaagcaatgaaagatatgggaattaaagttgaaaaacatcaccatgaagttgctccaagtcaacatgaattgggtatgtattttaataccttggtaaaccaagcagataaccttcaactatataaatatgcggttcatatggtttctcattcctttggaaaaactgcaacgtttatgccaaagccagttaaaggtgacaatggatctggtatgcatgttcaccaatcaatttggaaaggtagtacagctgttttttctggtgataagtatgctggtttgtctgaaactgcattatactatattggtggtattttaaagcacgcaagagctattaatgcgttttcaaactcaactactaacagctacaagaggctaattcctggatttgaagc

SEQ ID NO: 311235 - DNA, 1285 bp, Unknown
  Bacterial polypeptide expressing nucleotide sequence isolated from the Sargasso Sea
atgagtaaatccgtggccgacgtcgttcaactcgtcaaagacgaagacgtcaagtttgtcgacttccgtttcaccgacacgcgcggcaaagagcaacacgtttcggtgccggtgtcggcattcgatgaagacaagttcgaaagcggccatgcgtttgacggttcgtcgattgccggctggaagggtatcgaagcctcggacatgttgctggtcccggacgcgaacaccgccttcatcgacccgttctatgaagagtcgaccctcgtgttgacctgcgacgtcgtcgaaccggctgacggcaagggctacgaacgcgacccgcgttcgctggcaaaacgcgctgaggcgtatctgaagagcacgggtctgggcgacacggccttcttcggtccggagccggaattcttcattttcgactcggtccagtggaatacggatcagtcgggttgcttcatcaagatcggttcggaagaagcaccgtggtcgtcggccaaggaattcgaaggcggcaacaccggccaccgtccgggcacgaagggcggctacttcccggtcgctccggtcgacacgttccaggacatccgttcggaaatgtgcctgctgctcgaacagatcggcatcccggtcgaagtgcaccaccacgaagtggcgggtcaaggccagaacgaaatcggcacgaagttctcgacgctggtgcaacgcgctgactggctgcagcaaatgaagtacatcatccacaacgtcgcgcacacgtacggcaagaccgctacgttcatgccgaagccggtggttggcgataacggttcgggcatgcacgttcaccagtcgatctggaaagacggccagaacctgttcgcgggcaacggctatgcaggtctgtcggaattcgcgctgttctacatcggcggcatcatcaagcatgctcgcgcgctgaacgcgatcacgaacccgtcgacgaactcgtacaagcgtctcgtgccgcacttcgaagcaccggtcaagctggcttactcggcacgtaaccgttcggcttcgatccgcattccgcacgtgtcgaacccgaagggccgccgcatcgaaacgcgtttcccggatccgatggcgaatccgtacctgtgcttctctgcgctgatgatggcgggtctggacggtgtgcagaacaagattcacccgggcgaagctgccgacaagaacctgtacgacctgccgccggaagaggatgcaaagatcccgaccgtgtgtgccggcctcgatcaggcgctcgacgcactcgacgcagatcgga

SEQ ID NO: 311236 - DNA, 1399 bp, Unknown
  Bacterial polypeptide expressing nucleotide sequence isolated from the Sargasso Sea
aatgagcgcaagcgatgttttaaaattgatgaaagacaaagaaattgaatacgtagacttgaggtttacggatcctagaggaaaacttcaacatttaactatggactcaacagttgttgatgaaggaatgttaaacgatggtgtattttttgatggttcatcaattgctggctggaaggcaattaacgagtccgacatgattttaaaacctgatctgggtagaaaagtagttgatccattcacttctcataatacgcttgtattgttttgcgatattttagatgcagttaaaaaagatccatatgaaagagatcctagaggaattgcaaaaaaagctgaagcttatttaaaaactacaggagtcggtgataaagcttactttggtcctgaaccagagttttttgtatttgatgatgtaagaattaaaaacgaaatgaatgaaaccggtttcgtaattgatagtgcagaaggcccttataattctggaaaaaaatatgaaaatggtaacatgggtcatagaccaggtgttaaaggtggatacttccctgttcctcctgttgatagcgctcaagatatgagaggtgaatttttaaaaggtttgagagatgttggtattacagttgaaaaacatcaccatgaagttgctccaagtcaacatgaattaggaatgttatttggtacattagttaaccaagcggataacgttcagttatataaatatgtagtgcagatggttgcccattcatttggtaaaacagctactttcatgccaaaacctgtaaaaggggataatggttctggaatgcatactcaccaatcaatttggaaaggtgatactcctgtattttctggagataagtactctggattatcagaaacagcactacattatattggtggaattttaaaacatgcaaaagcaattaatgctttttcaaatgctactacaaatagttataaaagattaataccaggatttgaagctcctgttcttttagcatattctgcaagaaacagatctgcatcatgtagaatccctattacattaagtaaaaagggcgcaagatgtgaaatcagatttccagatgcagcaggaaacccttacttaacattctctgcaatgttaatggctggtttagatggaattaacaataaaattcatccaggagagtcttttgataaagatctttatactttaccagaagaggaaattaaaaatattccaactgtgtgtggttcgcttagagaagcaatggaaagcttagatacggatagagagtttttgaaaaaaggaaatgtattcactgacgatcaaatcgatgcttacatagctctaaaatttgaggaaatatataatttggaacacactccacatccgattgagtttcagatgtattac

SEQ ID NO: 311237 - DNA, 777 bp, Unknown
  Bacterial polypeptide expressing nucleotide sequence isolated from the Sargasso Sea
accatgaagttgctccgagtcaacatgagctagggatgtactttggaacgttaacaaatcaagcagataacgttcaactatataaatatgcagtacaaatggttacacattccttcggtaaaactgcaacttttatgcctaagccagttaaaggcgataacggctctggcatgcactgtcatcaatcgatttggaaagggagtacaccattatttatgggcaaagagtacgccggactatcaaaggatgcattgtattatattggtggtatattaaaacatgctagagcaatcaacgctttcgccaatgcaacaactaatagttacaaaagattaattccaggttttgaggcgccagtaattttagcatactcagcaagaaacagatctgcatcttgtagaattccagtgattatgaatcctaaggctgcaagaatggaaattaggtttccagacgccgcaggaaatccttacttaacttttgcatctatgcttatggctggaattgatggtattaaaaacaaaattgatcccggcaaaccttttgatcaagatttatattcgctatctgaaaacgaagttaaaaaactaccaaccgtttgtggttctttaagagaagcaatgcaaaatttagataaggatagaaaatttttaacagaaggtggtgtatttaccgacgatcagatagatgcttacattgaattaaagtttcaggaaatttataattttgaacatacgcctcatccgattgaatttgatatgtactatagcggttaaa

SEQ ID NO: 311238 - DNA, 742 bp, Unknown
  Bacterial polypeptide expressing nucleotide sequence isolated from the Sargasso Sea
atgtattttagtactttagtaaaccaagcagataaccttcagctttataaatacgctgtacacatggtttcgcactcttttggaaaaaccgcaacctttatgccgaagcctgtaaaaggagataatggttctggtatgcatgttcaccaatcaatttggaaaggaagtacagcaacattttctggtaacaaatacgcaggcttatctgatactgccttgcattacattggtggaatactaaaacatgcaaaagctataaatgctttttccaattcaacaacaaatagttataaaagattaattccaggctttgaagctccagtattattagcatactcagcaaggaatagatcggcttcatgtagaattccaattactttaagtaaaaaagctgcaagatgcgaagttcgtttccctgatgcagctggaaacccttacttaactttctcagcattattaatggctggacttgatggaattaagaataaaattaatccaggtaaatctttagacaaagatctttatgctttaagtgagtcagaagttaaaaaaattccaactgtttgcggttctttgagagaagcaatggaaaatttagataaagatagaaaatttttgactcaagggaatgtatttacggatgatcagattgatgcatatatagctttaaaatatgaggaaatatataactttgagcacactccacatccaatggagtttcaaatgtactacagctgttaat

SEQ ID NO: 311239 - DNA, 1408 bp, Unknown
  Bacterial polypeptide expressing nucleotide sequence isolated from the Sargasso Sea
tatgagcgcaaataacgtacttaaaacaattaaagataaagaaatagaatacgtagatttaagatttacagatccaagaggaaagcttcaacacgttactatggatgctaaagtagtagacggggatatgttagatgaaggaatattttttgatggttcatcaattgctggttggaaggcaattaatgagtctgacatgattttgaaaccagatttatcaagagcaatagtcgacccttttacatctcatagtactctaaatatcttttgtgatattttagatgcaataaagaaagatccttatgaaagagatccgagaggaacggcaaaaaaagctgaggcatatcttaaaaaatcaggtataggcgataaggcattttttggtccagaagcagaattttttgtatttgatgacgttaagtttaaaaacgacatgaatgaaacaggttttaaaatagatagtattgagggaccttacaatacaggtaaagattatgacaatggaaacatgggtcacagacccggtattaagggcggatatttcccagtgccaccagttgacagtgctcaagatatgagaagtgagtatttaaaagctatgaaagacatgggtattaaagttgaaaaacaccaccatgaagtagcaccaagccaacacgaattaggtatgtactttggaacacttgtagatcaagcagataacttgcaactttataagtacgccgttcacatggtatctcactcatttggtaagacagcaacatttatgcctaaaccagttaaaggtgataatggttctggaatgcacgtacaccaatctatatggaaaggtgataaggcattattttcaggggacaaatatgcaggactatcggatcttgctttaaattatattggtgggattttaaaacacgctaaagcaatcaacgcattttctaacgcaacaactaatagttataagagattaattcctggatttgaagcaccagtattattagcttattctgcaagaaatagatcagcttcatgcagaataccaataacattaagtaaaaaagctgcaagatgtgaaatcagatttggtgatgcagcaggaaatccttacttaacttttgctgctatgttaatggctgggttagatggaattaaaaataaaataaatcctggtaaatcttttgataaagacctttatgcattatcagaggaggaagtaagtaaaatccctactgtctgtggttctttaagagaagcaatggagagtttagataaggatagaaaattcttaactgagggtggtgttttcacagacgaccagattgatgcatacatttcattgaagatggaagaagttcataattttgaacacactccacatccaattgaatttgagatgtattacagctgttaa

SEQ ID NO: 311240 - DNA, 832 bp, Unknown
  Bacterial polypeptide expressing nucleotide sequence isolated from the Sargasso Sea
cgtggcgcatatttaaaagggttaagagatgtgggtattaaagttgaaaaacatcaccatgaagtagctccaagtcaacatgagcttggtatgtattttggtacattagtagatcaagctgataatgtacagttatacaaatatgttgttcaaatggtttctcattcatttggaaaaacggcaacattcatgccaaaacctgtcaaaggggataacggatctggaatgcacactcaccaatctatatggaaaggtaaaactcctgtcttttcaggaaacaagtatgcaggattatctcaaacagctttatattatattggtggaatattaaaacatgcaaaagctattaatgctttttcaaacgcaacaacaaatagttataaaaggctaatacctggatttgaagcccctgtgctattagcatattcagctagaaatagatctgcatcatgtagaattcctattacgttaagcaaaaatggtgctagatgtgaaataagatttcctgatgcttcaggtaatccttatttaacatttgcagcaatgttaatggctggacttgatggtgtaaaaaataaaattgatccagggaaatcttttgataaagatttatatgcattatctgaaaaagaagtaaaaaaagttccaacagtatgtggttcgttaagagaagctatggaaagcttagatagagatagaaatttcttaaaacaaggaaatgtttttactgatgatcaaattgatgcgtacattgctttaaaatttgaagaaatacataattttgaacacactcctcatccaattgagtttgatatgtattatagttgttaaa

SEQ ID NO: 311241 - DNA, 1408 bp, Unknown
  Bacterial polypeptide expressing nucleotide sequence isolated from the Sargasso Sea
aatgagcgcaaaaaatgtattaaaagttattaaagacaaagagatcgattacgttgatctaagatttactgaccctagaggtaaacttcaacacgttactatggatactaaagtagttgacgaagatatgttaaacgacggaattttctttgatggctcctcaattgcaggttggaaagctatcaatgagtctgacatgattttaaagcctgatttaagcagaactgtagttgatccatttacatctcataatacattgaatattttttgtgatattttggatgcaataaaaaaagatccttacgaaagagatcccagaggaacagcaaaaaaagctgaagcatatttaaaaaaatctggaattggtgataaagcatttttcggtccagaagctgaattttttgtattcgatgatgtaagatttaaaaatgacatgaatgaaacaggcttcaaaattgatagtactgaaggcccttacaacactggaaaaaaatatgaaaatggaaatatgggacatagacctggtatcaaaggtggttacttcccagttcctcctgttgatagtgcacaagatatgagaagtgagtatttgaaagcaatgaaagacatgggtattaaagttgagaaacatcaccatgaagttgctccaagtcagcatgaacttggaatgtattttggaactttagttgatcaagcagataacttgcaattatataagtatgcggttcatatggtttcacattcatttggaaaaactgcaacttttatgcctaaaccagtaaaaggtgataatggatcaggtatgcacgtgcaccaatcaatttggaaaggaaatacagcattattttcaggagataaatatgctggcttatccgatttagctttacactatattggtggaattttaaaacatgcaaaagctataaacgctttttcaaacgcaacaaccaatagttacaaaagattgatcccaggatttgaagcaccagtgttattagcgtactcagcaagaaacaggtcagcttcatgtaggatccctattactttaagtaaaaaggctgcgagatgtgaaattagatttggtgatgcagctggaaatccatacttaacttttgcagcaatgcttatggctggactagatggtattaagaataaaattgatccaggtaaatctttcgataaagatctttatgctttatctgaaaatgaagttaaaaaaatacctactgtttgtggctcattaagagaggcaatggaaagtttggataaggacagagattttttaaaacaaggtaacgttttcactgatgatcagatagatgcttacattgctttaaaatttgaggaaatacataatttcgaacacacaccacacccaatagagttcgacatgtattatagttgttaa

SEQ ID NO: 311242 - DNA, 1012 bp, Unknown
  Bacterial polypeptide expressing nucleotide sequence isolated from the Sargasso Sea
atgagtaaagttagagcagagtatatatggatggacggccatgagccaactcaaaaattaagatcaaagacaaaagtcatttctgggcctgtagagtccctggaagacctgccactatggggctttgatggttcaagtacaaatcaggcggaaggaaatgatagtgactgcatgctgaaacctgtctacaaggttccagacccaattcgagggggtgaggacctgcttgttatgtgcgaagttatgaatgctgatgggtcagtacactctaccaataccagagctcatttaagagaattagctgaacaacataaaggccaagaggcatggtttggtattgaacaagagtataccttgtttgaagggcggaatccattgggctggcctgaaggaggataccccgcaccccaaggacccttttattgcggtgtaggcgcagatgaagtatttggtagagacatagttgaagagcaccttgaactctgccttgatgctggtttagaggtttcaggaattaatgcagaagtgatgcccgggcagtgggaatatcaagttgggccgctcgggccattagactctgcagatcagatgtggttatcacgttggcttctttacagaatttctgaggattatggtattagtgcgacccttcaccctaagcctgtaaaaggcgactggaatggagctggtgcgcatacaaactttagcacaaaggcaatgcgagaagaaggtggaattaaggttattgaagatgcatgtgaaaggttaagtaaaaagcacgatgagcatattgcagtatatggcgcacataatgaagagaggctcactgggctacatgagacctgtagcatcaaagaatttcgttacggtgtgagcgaccgtggagcttccataaggattccaatgcagacggccaatgaaggatatggttatttggaagataggagaccatctgcaaatatggatccatataaagtttgtgcaatattattagagactacctgtagctaat

SEQ ID NO: 311243 - DNA, 892 bp, Unknown
  Bacterial polypeptide expressing nucleotide sequence isolated from the Sargasso Sea
cgacctggaattaaaggtggatattttcccgtaccaccagttgatagcgctcaagatatgaggggagaatatttaaaaggtttaagagacgttggtattacagtagagaaacaccaccatgaagtagctccaagtcaacatgaattaggaatgttatttaatacgttggtaactcaagctgataacgtgcagctttataaatatgtagtgcaaatggtttcacactcttttggaaaaacagcaacctttatgccaaaaccagtcaaaggagacaatggatcaggtatgcatattcaccaatcaatttggaaaggtagtactgcgctattttcaggtgataaatactcagggttatcgcaaacagcactttattatatcggtggaatattaaaacatgctaaagcaattaatgcattttcaaatgcaactacaaacagttataaaagattaataccaggatttgaagctcccgttttattagcatattcggcaagaaacagatctgcttcatgcagaattccaattacattaagtaaaaaaggtgcaagatgtgaaattagattccctgatgcggctggaaacccatacttaacatttgcagctatgttgatggcaggtttagatgggattaagaataaaattaatccaggcaaatcatttgataaagacttatataccttatcagagaaagaaattgaaaatattccaactgtatgcgggtctttaagagaagctatggaaagtttagatagagatagaaaatttttaaaacaaggaaatgtatttactgatgatcaaattgatgcttacattgctttaaaatttgaggaaatatataatttagaacatactccacatcctattgaatttgatatgtattacagttcttaaa

SEQ ID NO: 311244 - DNA, 1366 bp, Unknown
  Bacterial polypeptide expressing nucleotide sequence isolated from the Sargasso Sea
agctgaattcgtagatttaagatttactgatccaagaggaaaacttcaacatttaacaatggacgcaacaattgttgatgcaggtatgttaaatgaaggtgtattttttgatggatcatctattgctggttggaaagcaatcaatgaatctgacatgattttaaaaccagatactgcaagaatgtttatggatccatttacttcccacaatactgcagttttgttttgtgatatcttagatgcaataaaaaaagatccttatgaaagagatccaagaggtgttgctaaaaaagctgaggaatacttaaaagcttcaggtataggtgataaagcattctttggtccagagccagaattttttgtatttgacgatgtaagaattaaaaacgatatgaatgagtgtggatttaaaattgatagtaaagaaggtccatataattcaggaaaagaatatgaaagtggaaacatgggacacagaccaccaatcaaaggtggatacttcccagtgccacctgtggatagtgaacaggacatgcgtggcgaatatctaaaaaatttaaaagaagtaggaattaaagttgaaaaacatcaccatgaagttgctccaagccagcacgagcttggaatgtattttggtactttagttgatcaggcagataatgttcaattgtacaaatatgttgttcaaatggtaactcactcatttggaaaaactgcaacttttatgcctaaacctgtagcaggagataatggttccggtatgcatattcaccaatcaatttggaaaggtgatacaccagtattttctggtgatgcttatgctggcttatctgaaaccgctttacattatattggtggaattttaaaacatgctaaagctattaatgcttttgctaattctaccacaaatagttacaaaagattaatcccaggttttgaagctccagtgttacttgcatactctgcaagaaatagatctgcttcatgtagaataccgattactttgagtaaaaaaggggcaagatgtgaaataagattcccagatgcatctggaaatccatatttaacatttgctgctatgcttatggctggtattgatggaattaaaaataaaattcatcctggtgagtcttttgataaagatctgtatgaattgccgccagaagaagtgaaagctattccgacagtatgtggatcattaagggaagcaatggaaaatcttgacaaagatagagaatttttaactcaaggtggtgtatttacagacgatcaaattgatgcttacatagctctaaagtttgaagaaattcataaatttgagcatgcacctcaccctgttgagtttgagatgtactacagtagctaa

SEQ ID NO: 311245 - DNA, 659 bp, Unknown
  Bacterial polypeptide expressing nucleotide sequence isolated from the Sargasso Sea
caaaacagctacatttatgccaaaaccagttaagaacgataacggctcaggtatgcatatccatcaatctatttttaatggagataagcctttgttcgcaggagacaaatatgctggattatctgatgaatgtttgtactacataggtggaattataaaacacgcaagagcacttaacgctttttcaaacgcttctacaaacagttacaaaagactaataccaggatttgaagcaccggtgttattagcttactcatctagaaacagatctgcaagctgtcgaataccatttagtacaagtaaaaaaggtaaaagggttgaagtaagatttcctgatgcatctggaaatccttatttgactttttcggcaatgttaatggctggtttagatggaattaaaaataaaattaaacctggaaaaccgatggatcaagacttatatgctttaagtcctgaggaactaaaaggtattccaactgtttgctcatcattaagacaggcatgtgtagctttggatgaagaccgaaaatttttaactgaaggtggagtgtttactgacgatcaaatagatgcttacattgacttaaaaatggaagaagtaaataactttcaagatactccgcatcctattgaatacgaaatgtattatagttgttaag

SEQ ID NO: 311246 - DNA, 1315 bp, Unknown
  Bacterial polypeptide expressing nucleotide sequence isolated from the Sargasso Sea
accaactaaatttttagacgaagatatatttactgatggacttggttttgacggatcctctgtaagaggttttcaagaaatccaagatagtgatatgattgtattacccgacccatcaaccgcgtatatcgatccttttttctcagaaaaaactttagccttacactgtaatattaaggatccagtaacacttgttgactatagtcgtgatccaagaaacattgctaaaaaagcagaagcctatctaaaatcatcaggaattggtgatacagctttctttggtcctgaggctgaattttttgtattcaataatgttcaatttgactctggttctaattttgcatttcatgaagtagactcaatagaaggaacttggaacagtggtacagatgaaaatccaaatttaggtcataaacctcgtcataaagaaggatattttcctttgcctccagttgatacacttcaagatgtaagaactgagatggttatgactatgcaagatattggtttaagtgttgaagctcatcatcatgaagtagcaacaggggggcaatgtgaaattgatttagaattttctcctttactgaaaatggcagatgatatgatgaaatataaatacgttgttaaaaatgttgcaaagcaacacggtatgactgctacatttatgccaaaaccactttttgaagataatggatcaggaatgcatgttcaccaaagtgtttggaaagatggagatacactaatgtataaagaaggtaactacgctaatttaagtgatttagctcttaattatatcggaggtatcttgaaacatgctccagctctattagctttttgtgcacctactaccaattcttataaaagattagttccaggatttgaagctccagtaaacattgtttattctcaaagaaatagaactgcttctgtaagaatccctgcctactcgcaaagtcctaaatcaaaaagaatggaatttagatgtccagacccaagtgcaaatccatatttagcattttcagcaatgcttatggctggtttagatggtattaaaaataaaattaatcctggagacccaacagacatcaatctttatgcagctagtgatgatgtattatctaaaattcaatcaacacctgggtcattggctgagtcgcttgaagctcttgaaaatgaccatgattttcttctagaaggcgatgtgtttactaaagatgtaattgatacatatattagctataaaaaagaaagtgaggttgatccaataaatattagacctcatccacatgagtttaagttatactatgacgtttaa

SEQ ID NO: 311247 - DNA, 514 bp, Unknown
  Bacterial polypeptide expressing nucleotide sequence isolated from the Sargasso Sea
ggcggaatattaaaacacgcaaaagcaattaatgctttttcaaatgcaacaactaatagctacaaaagattaatcccaggatttgaagcaccagttttacttgcttactcagcaagaaatagatctgcttcatgcagaattccaattactttaagtaaaaagggagctagatgtgagattagattcccagatgcttcgggaaatccttatttaacattttcatcaatgttaatggctggattggatggaataaaaaataaaattgatccaggaaaatcatttgacaaagatctttatgctttatcagaagatgaggtaaaaaaagtacctactgtttgtggttctttaagagaagcaatggaaaacttagataaagaccgtggtttcttaaaagaaggaaatgtcttcactgatgaccaaatagatgcttatatagctcttaaatttgaagaaatacacaattttgaacatactcctcaccctattgagtttgatatgtattacagttgttaaa

SEQ ID NO: 311248 - DNA, 1012 bp, Unknown
  Bacterial polypeptide expressing nucleotide sequence isolated from the Sargasso Sea
atgaaggtaaaagcagaatatatctggattgatgggtatgaacctactgcaaacttaagatcaaaaaccaaagtattagatggagcggtttcttctgtttcagagcttccaacctggggttttgatggatcaagtacactacaggctgatggaggagatagtgactgtttgttgaagccagtatggatgtgtcctgatccaattcgtggtggagaaaatattttagtaatgaatgaggtttgtaatcctgatggaacacctcataggtctaattctagggcagctttagttgcaatcgctgaaaaattcaaagagcataatccttggtttggtattgagcaagagtatacgcttatggatggaaaacagcctgctgggtggccagaagaagggtttcctgaaagacctcaaggaccttactattgtagtgttggttctgaagatgtagctgcccgttctatggttgaagatcatctagatttatgtttggaagcaggattagaagtgtcaggaataaatgcagaagtaatgttaggacaatgggagtatcaagttggacctttacctgctttagaagtcggcgatcaattgtgggttgcaaggtggctacttgaaagagtgggagaagaatatggtctgagagttgaacttcatccaaagccgataaagggagattggaatggttctggggctcatattaactatagcacagaatcaatgagagcagacggaggtttaaaggttattgaagatgcatgtgaaaaacttggtcaaaatatagataagcatatagctgtttatggagacgctaatgaagagcgactaacaggtgaccatgaaacatgcagtatcaatgaatttaaatatggagttagcgacaggggggcatctataagaatccctatgggagtagcaaatgatggtaaaggatatttagaagatagaagacctgcctctaatgtagacccctataaagcttgcgcagctttaatcgatacaacttgtagttaaa

SEQ ID NO: 311249 - DNA, 1030 bp, Unknown
  Bacterial polypeptide expressing nucleotide sequence isolated from the Sargasso Sea
ttggccccagaaccagaattttttgtttttgatgatgtaagaataaaaaatgatatgaacgaaactggttttaaagttgatagttctgaaggcccttacaattcaggaaaagagtatgaaaatggtaacatgggtcatagacctggaattaaaggtgggtatttccctgtgccacctgttgacagcgctcaagatatgaggggagaatatttaaaaggactaagagatgttggaattacagttgagaaacatcatcatgaagttgcgccaagccaacatgaattaggaatgttatttggaactctagtaaatcaagcagacaatgttcaattatataaatatgttgtccaaatggtatcccactcttttggtaaaacagctacgtttatgccaaaaccaataaaaggtgataatggatcaggtatgcatatacatcagtctatatggaagggaaaaactccagtattttctggaaataaatattcaggattatctcaaacagctttgtattatatcggaggaattttgaaacatgcaaaagctataaatgcattttcaaatgctacaacaaatagttataaaagattaataccaggttttgaagcgccagttctattagcctattctgcaagaaacagatctgcatcctgcagaataccaattactttaaataaaaaaggagcaagatgtgaaattagattcccagatgcagcgggcaatccttatttaacatttgcggcaatgttaatggctggtttagatggtataaaaaataaaatagatccgggtaaatcttttgataaagatttatatacactttcagaaaaagaaataaaaaatattcctactgtttgtggttctttaagagaagctatggaaagcttagacaccgatagaaaatttttaaaacaaggaaatgtatttacggacgatcaaattgatgcatatatatctctaaaatttgaagaaatttataatttagaacatacacctcatcctatagagtttgatatgtattatagttgctaaa

SEQ ID NO: 311250 - DNA, 575 bp, Unknown
  Bacterial polypeptide expressing nucleotide sequence isolated from the Sargasso Sea
aatgagcgcaagtaatattttaaaaacaataaaagataaaaaaattgaatatgttgatctgagatttacagatccaagaggtaaacttcagcatttaacaatggatgcaactatggttgaccaagaaatgttaaatgatggtgttttttttgatggttcatcaattgctggctggaaagcaataaacgagtcggacatgatcttaaaaccagacttggcaagaaaaattgttgacccttatacttcacataacactttaatactattttgcgatattttagatgccataaaaaaagatccctatgaaagagatcccagaggaatagcaaaaaaagctgaggcttatttaaaatctacaggtgttggtgacaaagcatattttggtcctgaaccagaattttttgtatttgatgatgtaagaattaaaaacgatatgaatgaaacaagttttgctatcgatagtactgagggaccttacaactctggaagaaaatatgaaaatggaaacatgggacacagaccgggtattaagggtggatacttccagtaccacctgtggatagtgcgcaagatat

SEQ ID NO: 311251 - DNA, 1411 bp, Unknown
  Bacterial polypeptide expressing nucleotide sequence isolated from the Sargasso Sea
catgtcagcccagaacgttttggccctgatccaggaacacgaagtcaagtttgtcgacctgcgctttaccgacaccaagggtaaagagcagcacgtatccatcccttcccatcaggttgacgaagatttcttcgaagacggcaagatgttcgatggctcctccatcggcggctggaagggcatcaacgaatcagacatggtgctgatgccggatgcggcctccgccaaactggatccgttcaccgaagagaccaccctgaacatcgtctgtgacgtgctggaaccggccaccatgcagggctacgaccgcgatccgcgctccatcgccaagcgtgccgaagacttcctgaagtccagcggtatcgccgacaccgtgctgttcgggccggagccggaattcttcatgttcgacaacatcaccttctcgaacaccatgggccacagcttcgtgaagatcgaatccgaagaagccgcctggaactccggtaccgattacgagcacggcaacaagggtcaccgtcctttcgtcaagggtggctacttcccggttgcaccggttgactcctcccaggacatccgtgccgccatgtgtctggtgctggaagagatgggccaggtcgttgaagctcaccaccacgaagtggcgactgccggtcagaacgagatcgcgacccgtttcaacaccctcaccctgaaagcggatgaagtgcaggtactgaagtacgtgatccacaacgtggcccacgcctacaacaagaccgtcaccttcatgccgaaacccatgttcggtgacaacggctccggcatgcactgccaccagtccctggccaagaacggcgtcaacctgttcgccggcgacctgtacggcggtctgtccgagatggcgctgcactacatcggcggcatcatcaagcacgccaaggccatcaacgccttcgccaacccgaccaccaactcctacaagcgtctggtaccgggttatgaagcaccggtcatgctggcctactctgcccgcaaccgctctgcctccatccgtattccggtcgtgccgagcccgaaagctcgccgcatcgaagtacgcttcccggatccggctgccaacccgtacctggccttcgcagctcagctgatggccggtctggacggcatcatcaacaagatccacccgggcgatgccatggacaagaacttgtatgacctgccgccggaagaagcagccgaagtgccgaccgtggccggctctctggacgaagccctggctgcgctggatgcggatcgcgagttcctgacccgcggcggcgtattcagcgacgacttcatcaactcctacctggagctgaagcagcaggacgttgaccgcgtgcgcatgaccccgcacccgctggagttcgaactgtactactccgtttaa

SEQ ID NO: 311252 - DNA, 1408 bp, Unknown
  Bacterial polypeptide expressing nucleotide sequence isolated from the Sargasso Sea
tatgagcgctggtaacattttaaaacttataaaagataaaaatatagaatatgtggatctaagatttacagatcctagaggaaaactacaacatcttacaatggactcaacagtagtcgataatggtatgttaaatgatggtgttttctttgatggctcttcaattgcgggttggaaggcaattaatgagtctgatatgattttaaaacctgatctaacaagaaaaattgtagatccatttacatcacacaatacccttattttgttttgtgatattttagacgctatcaaaaaaaatccttatgagagagatcctcgaggaattgctaaaaaagctgaggcttatttaaaaaaaactggtattggtgacaaggcattcttcggtccggagccagaattttttgtttttgatgatgttagaattaaaaatgatatgaatgagacaagtttttcaatcgatagcactgaaggtccttataactctggaaaaaaatacgagaatggtaacatgggtcatagaccagggatcaaaggtggttatttcccagttcctccagttgatagtgctcaagacatgagaagtgaatatttaaaaggtttacgagatgttggaataaaagtcgaaaagcatcatcacgaggtagctcctagtcaacatgaattaggaatgtattttggaactttagtagatcaagctgataatgttcaactttataaatatgtagtacagatggtatcacactcttttggcaaaactgcaacttttatgcctaaaccagtcaaaggtgataatggttcaggaatgcacacacaccaatcaatttggaaaggtagtacgcctgtattttctggaaatgagtattcaggattgtccaagacagctttgtactatattggtggaatattaaaacatgcaaaagctattaatgcgttttctaatgcaacgactaatagttacaaaagattaattccaggttttgaagctccggttctgctagcttactctgcaagaaacagatctgcttcttgtaggattccaataacgttaagtaaaaaaggcgcaagatgtgaaatcagatttcctgatgcatctggtaatccttatttaacttttgcttcaatgttaatggcaggtttagatggaattaagaataaaatccatccaggtaaatcatttgataaagatttatatgcattatctgaagaagaagttaaaaaagtacctactgtttgtggttctttaagagaagctatggagagtttagataaagatagaaatttcttaaaacaaggtaatgtgtttacggatgaccaaatcgatgcttacattgcgttaaaatttgaagaaattcataattttgaacacacacctcatcctatagaatttgaaatgtactacagttgttaa

SEQ ID NO: 311253 - DNA, 1417 bp, Unknown
  Bacterial polypeptide expressing nucleotide sequence isolated from the Sargasso Sea
tatgagtaaaaccgtcgccgacgtcatgcagctcgtgaaggacgaggacgtcaagtttgtcgatttccgcttcacggatacgcgcggcaaggaacagcacgtgtcggtgccggtttcggcgtttgacgaagacaagttcgaaagcggccatgcattcgacggctcgtcgatcgccggctggaagggcatcgaggcgtcggacatgctgctcatgccggacccgaccgctgccttcatcgacccgttctatgaagagtcgaccctggtgctgacctgcgacgtggtcgagccggccgacggcaagggctacgagcgcgacccgcgttcgctcgcgaagcgcgcggaagcgtacctgaagagcacgggcatcggcgacacggcctacttcggtccggaaccggaattcttcattttcgactcggtccagtggaacacggacatgtcgggctgcttcgtgaagatcaactcggaagaagcaccgtggtcggccggcaaggaattcgaaggcggcaacacgggccaccgtccgggcacgaagggcggctacttcccggtcgcaccggtcgacacgttccaggacatgcgctcggaaatgtgcctgctgctcgaacagctcggcatcccggtcgaagtgcaccaccacgaagtggcgggccagggccagaacgaaatcggcacgaagttctcgacgctggttcagcgcgccgactggacgcaatggtcgaagtacatcatccacaacgtcgcgcactcgtacggcaagacggcaaccttcatgccgaagccggtcgtcggcgacaacggttcgggcatgcacgttcaccagtcgatctggaaggacggtcagaacctgttcgcgggtaacggctacgccggcctgtcggaactggcgctgttctacatcggcggcatcatcaagcacgcccgtgcgctgaacgcgatcacgaacccgacgacgaactcgtacaagcgtctggtcccgcacttcgaagcaccggtcaagctcgcctactcggcacgcaaccgttcggcatcgatccgcattccgcacgtgtcgaacccgaagggccgccgtatcgaaacgcgcttcccggatccgatggcgaacccgtacctgctgttctcggcactgatgatggcaggcctcgacgggatccagaacaagatccatccgggcgaagccgcggacaagaacctgtacgacctgccgccggaagaggatgcaaagatcccgaccgtctgcgcgggtctcgaccaggcaatcgaagcgctcgacaaggatcgcgagttcctgacccgtggcggcgtgttcacggacggcatgctcgacgcgtacctcgcgctgaaggagcaggagctggcgaagttccgcatgacgacgcacccgatcgagttcgagatgtactactcgctctaa

SEQ ID NO: 311254 - DNA, 1206 bp, Unknown
  Bacterial polypeptide expressing nucleotide sequence isolated from the Sargasso Sea
catgggaaaaaaagacgtcttaaaattgatgaaagataaagaggttgaattcgtagacttaaggtttactgatcctagaggtaaacttcaacatttaacaatggacgcaacaatagttgatgatgatatgcttgaagaaggagttttttttgatggatcctcaatagctggatggaaagcaatcaatgagtcagatatgatactaaaacctgacttatcaagaacaatcatagatccttttaattctcatagtactttaaatattttttgcgatattttagacgctgttaaaaaagatccttacgaaagagaccctagaggaacagctaaaaaagctgaagattatttaaaaaaatctggcattggagataaagcatattttggtccagaacctgagtttttcgtatttgatgatgttagatacaaaaatgatatgaatgaaacgagttttacaattgatagcgcagaaggtccttataatacaggaaaaaaatatgaaaatggtaacatggctcaccgtccgggaataaaaggaggttatttcccagttcctcccgttgatagcgcacaagatatgcgaggagaatatttaaaagctttgagagatatgggaattaaagttgaaaaacatcatcacgaagttgctccaagtcaacatgaattaggtatgtattttgggactcttactgatcaagcagacaacatacaattatacaaatatgcagtgcaaatggtttctcattcgtttggtaaaactgctacttttatgcccaaacctgttaaaggagataatggttcagggatgcactgccatcaatcaatttggaaaggcagtacgccagttttctctggagataagtatgcaggattatctcaaaacgcactttattacataggtggaattttaaaacatgctaaagctatcaacgctttttcaaatgcaacaacaaatagttataaaagattaataccaggatttgaagctccagttctactggcttactcagcaagaaatagatctgcttcttgcagaatacctataactttaagtaaaaaagcagctcgttgtgaagtaagatttcctgatgcagccggaaacccttatctaacttttgcctcaatgcttatggcaggtattgatggaattaaaaataaaattgatccaggaaaatctctagataaagatttatatacattatctgaaaa

SEQ ID NO: 311255 - DNA, 603 bp, Unknown
  Bacterial polypeptide expressing nucleotide sequence isolated from the Sargasso Sea
acactcaccaatcaatttggaaagggaaaactcctgtattttctggaaacaaatatgctggtttatctcaaactgctttatattatattggtggagtattaaaacatgcaaaagcaattaatgcatttgctaatgctactacaaatagttataagagattaataccaggatttgaggctccagttctacttgcatactctgccagaaatagatcggcttcatgcagaattccaatcacattaagtaaaaagggtgcaagatgtgaaataagattcccagatgcatctggaaatccgtatttaacatttgcttctatgcttatggctggaattgacggaataaaaaataaaattgatccaggtaaatcgtttgacaaagatctttacgctttatcagaaaagcaagttaaaaaagtacctactgtttgcggttctttaagagaagcaatggaagccttagacaaagatagaggctttttaactaaaggcaatgtatttactgatgatcaaatagatgcgtacattgaacttaaatatgaagaaattcataattttgaacatacgccgcaccctattgaattcgacatgtattatagctgttaaa

SEQ ID NO: 311256 - DNA, 739 bp, Unknown
  Bacterial polypeptide expressing nucleotide sequence isolated from the Sargasso Sea
gtactttggtacattagtagatcaagcagacaacttacaactctataaatatgcagttcacatggtttctcattcattcggtaaaacagctacgtttatgcctaaaccagttaaaggcgataatggatctggtatgcacgtacaccaatcaatttggaaaggtgataaagcgttattttcaggagacaaatatgctggactatcagacttagctttaaattatattggtggaatattaaaacatgcaaaagctattaatgcgttttctaatgcaactactaacagttacaaaagattaattccaggtttcgaagctcctgttttattagcttactcagctagaaatagatctgcatcatgcagaattccaattacattaagcaaaaaagcagcaagatgtgaagtaagatttggtgatgctgctggaaatccttatttaacgtttgcggcaatgttaatggctggacttgatggaattaaaaataaaattgacccaggtaaatctttcgataaagatctttacgcattatctgagtctgaagttaaaaaaataccaacagtttgtggctctttaagagaagcaatggagagtttagataaagatagagatttcttaaaacaaggtaacgtatttactgatgatcaaattgatgcttacattgcattaaaatttgaagaaatacacaatttcgaacacacaccacaccctatagagttcgatatgtattacagttgctaa

SEQ ID NO: 311257 - DNA, 898 bp, Unknown
  Bacterial polypeptide expressing nucleotide sequence isolated from the Sargasso Sea
ggtcacagacctggaattaaaggaggatattttcctgttcctcctgtagatagtgcccaagatatgaggggagagtatttaaaagctcttaaagatatgggtgttaaagtagaaaaacaccaccacgaggttgctcctagtcaacacgagctaggtatgtattttggaacattaactaacatggctgataatctccaactttataaatatgcagttcaaatggttacccactcatttggtaagacagctacttttatgcctaaacctgtaaaaggtgataacggatcaggtatgcactgtcaccagtcgatttggaaaggaagtacaccagtttttatgggtaaagaatattctggattatcgaaaacagccttatactatattggaggaattttaaaacatgccaaagcaatcaacgctttttctaatgctactacgaacagctacaaaagactaatacctggttttgaagctcctgtaattctagcctactcggcaagaaatagatctgcatcatgtagaattccaatcataaacaatcctaaggctgctagaatggaaattagattccctgatgccgctggtaatccttacttaacattcgcgtcaatgttaatggcaggaattgatggaattaaaaataaaattgacccaggtaaatctttcgataaagatttgtatactttatctgaaagtgaagtgaaaaaattacctacagtatgcggttcattaagagaagcgatgcaaagtcttgacaaagatagaaaatttttaactcaaggtggtgtatttacagatgatcaaatagacgcttatatcgatttaaaattccaagaaatttataagtttgagcatactccacatcctattgagtttgaaatgtactatagtggataat

SEQ ID NO: 311258 - DNA, 799 bp, Unknown
  Bacterial polypeptide expressing nucleotide sequence isolated from the Sargasso Sea
gggtgttgaagttgaaaagcaccaccatgaagttgcaccaagtcaacatgaacttggaaccatgtttaatacaatagtcaatcaaggtgatagtatgcaaatttataagtacgctgttcatcaagttgcacactcatttggtaagacggctacatttatgccaaaaccagttaaaggtgacaacggatctggaatgcatgttcatcaatctatatggaaaaataaaaaacctttatttgctggtgataaatatgcaggtctttctgacatgtgtttatattatattggtggaattataaagcatgctagagcacttaatgcatttacaaatgcttcaactaacagttacaaaagattaatccctggttttgaagctccagtgctactagcttattcctcaagaaatagatcagcaagttgcagaattccattttctaatagtaaaaatggaaaaagagttgaggtgagatttccagattcatcaggtaacccttacttgacatttgcagcaatgttaatggctggcttggatggcattaaaaataaaattaaaccaggtcgtcctatggatgaagatttgtatgctttgtccggcgatgaattaaaaggtattcctacagtttgtacatctttaaaaggtgcttgcactgctttagatggtgatagagcatttttaaaacagggtggtgttttcacagatgatcaaatagatgcttacatagaattaaaaatggaagaagttcaaacatttagagatacacctcatccaattgagtttcagatgtattacagttgttag

SEQ ID NO: 311259 - DNA, 947 bp, Unknown
  Bacterial polypeptide expressing nucleotide sequence isolated from the Sargasso Sea
tgtttggaatacaggcacagatgaaggtccaaatctaggttataaagttagaaataaaggcggctatttcccatgcccacctcatgacactatgcaagatgttagatcagaaatggtaaatcacatggttgctattggtatgagtgttgaagcgcaacaccacgaagttgctactgctggtcaatgtgaaattgatttaaaattcgacacactggttaaaatggccgatgatcttcaaaaatataaatacgttgtaagaaacacagcaaaaagtaatggtttaagtgctacttttatgccaaaacctctttcaaatgacaatggttcaggaatgcattgtcaccaaagtatttggtcaaacggtaaaccagtattttatggtgaaggcgggtatgccaatcttagtgatgaagcaaaattttatattggtggtttgcttaagcatgcaccatctttattagcctttacaaatccaaccattaactcttacaagagattagttccaggttatgaggctccggtaaaacttgcatactctaatagaaatagaagtgctatatgtagaatccctgcatactcaccatctccgaaagcaaaaagagttgagtttagatgtccagacgcaactgcaaatggttatttagcattttcagctatgcttatggcaggtttagatggaattaagaatagaattgatcctggtgaaccaatggataaaaatctttatgatttacctcctgaagagcaatctaaagtaaaagaagtacctggcactcttgaggaagcgattaacaatcttgagtcaaatcatgattatcttttagagggtaatgtgtttaccaaagatttaatcgagtcatatatcgaatacaaaagagaagaagaaatcgaaccaaataaactgctagttacacctgcagagttcgacatgtattacgattactaaa

SEQ ID NO: 311260 - DNA, 1447 bp, Unknown
  Bacterial polypeptide expressing nucleotide sequence isolated from the Sargasso Sea
tttgctaatcaggcaccatcaaaattacataggagacaaaatgagtgcagaaaacgttttaaaatttattaaagaaaaagaagcagaattcgtagatcttagatttactgatccaagaggaaaacttcaacatttaactatggatgcatcaatagtggatgccaatatgcttaatgaaggagtgttttttgatggttcatctattgctggatggaaagcaattaacgaatctgacatgatttttaaacctgatactgcaagaatgttcatggatcctttcacgtctcataatactgtagttttgttctgtgatattttagatgcaatcaaaaaagatccatacgaaagagatccaagaggagttgcgaaaaaagcagaggagtatttaaaagcttcaggtattggtgataaagcgttttttggacctgagccggaattttttgttttcgacgatgtaagaattaaaaatgatatgaatgaaagtggatttaaaatagatagtaaagaaggtccatataattcaggtaaagaatatgaaaatggaaatatgggtcatagaccacaaatcaaaggaggttatttccctgttccacctgttgatagtgagcaagatatgcgtggtgaatatttaaaaaatttaaaagaagttggtatcaaagttgaaaaacatcaccatgaagttgctccaagtcaacacgaacttggtatgtattttggaactttagttgaccaagcagataatgttcagctttataagtatgtagttcaaatggtgacacattcatttggaaaaactgcaaccttcatgccaaaaccagttgcaggtgataatggttcaggtatgcatattcaccaatctatttggaaaggtgatactcctgtattttcaggtgaagcatatgcaggactttcagaaactgcattacactatattggtggaattttaaaacatgctaaagcaattaatgcttttgctaactctacaacaaatagttacaaaagattaattcctggttttgaagctccagtattattagcttactctgcaagaaacagatcggcatcatgtagaattccaattactttaagtaaaaaaggtgcaagatgcgaaataagatttccagatgcagcaggtaatccttacctaacatttgcagcaatgctaatggcaggtattgatggaattaagaacaaaatacacccaggtgagtcttttgataaagatttatatgaattgccaccagaagaagtaaaagctataccaactgtttgtggatctttaagagaagcaatggaaagtttagacaaagatagagagtttttaactcaaggtggtgtatttacagacgaccaaatcgatgcttatatagctcttaagtttgaggaaattcataaatttgaacacgcacctcatcctgtagagtttgagatgtattacagtagttaa

SEQ ID NO: 311261 - DNA, 586 bp, Unknown
  Bacterial polypeptide expressing nucleotide sequence isolated from the Sargasso Sea
atgccagattcaaaaatttctccagaatcggaaaccagtgatgcgattaagattgtagatgaattaggattagactacaaattacttgatattaattcaattcacaaagaattcaatatgattttagaaccaaatgacagagcattaggaaatttgcgtgcaagaattagaatgaatatactatactattatgcaaatctgaaaaacctagttgctttaggttcaagcgataaaagtgagtttaacataggatattttacaaaatttggggatggaggagcagatgcattaccaattgtttcattatataaaacgcaggttagagaattggccagatatttagggattaatgaaacaattgttacaaaaaagagcagtccacatttatggccaaatcatgaagcagaacatgaaataggattagagtacgaacaaattgacgtaatcttgcattgtattttagacaagaatttgtcacttgaggatactgcaaaacaagcagatatcaatattgaattagtaaagaaaatccaccagatgtatcaaaatagtgagcataaacgtgtcaatccaaaagcactttgaa

SEQ ID NO: 311262 - DNA, 487 bp, Unknown
  Bacterial polypeptide expressing nucleotide sequence isolated from the Sargasso Sea
ctgctcccaataacagcgaatattaaggtggaattttcggtgaaagcgcagatcttaacagaaatgaaggtactcaagacaatcgatcctgagttcgaagtgcagcgccgtgtggcgtttattaaatctaaactgcaagctgcccgcagcaaagccttggtccttgggatcagcggtggtgtggattcttccacggcgggacgtttatgtcagttggccgttgatagcctcaatagtgagcatactgacggcggttatcagtttattgcggtgcgcttaccctatcaaattcaaaaagatgagcatgaagctcagcaagcttgccagtttattcagccgaccaaattagtcaccatcaatgtgcaccaaggggtcgatggtgtgcatcaggctaccttaacggcctttgtcgaagcgggattgcattcaccggatgcggctaaagtcgattttattaaaggtaacgtgaaagcgcgcatgcgcatga

SEQ ID NO: 311263 - DNA, 422 bp, Unknown
  Bacterial polypeptide expressing nucleotide sequence isolated from the Sargasso Sea
aatgcgcgccgaaataatggctgaaatgaaagttcagccaaccattgatgtaaacgctgagatctctcgtcgagttaactttataaaagcacgtttagttgcggcccactcacgctcgcttgtgcttggtattagtggcggggttgattcttcaacttgcggccgtttatgccaattagctgttaacgaattaaatgaagaacacagcaccaacaaatatcaatttattgctgtgcgcctaccttacggcgtgcaagctgatgaagacgaagcacaaatggcggtagattttattcagccaagtaagcgtatgaccgttaatattcagcctgctgctgatgcgttacatgagcaagtgttaatcgcaatgactagcagcggtgacgcattaccagagcaaagctcaatagattttattaaag

SEQ ID NO: 311264 - DNA, 550 bp, Unknown
  Bacterial polypeptide expressing nucleotide sequence isolated from the Sargasso Sea
tgacgagcatgaagcgcagctggcggtggatgcgatcaagcccgacgagtgccacaccgtgtacatcggcaccgcggtgctgggcctggctgccgccacgcaggcgcttgatcctttgagcccggcgcagcgtgatttcgtgctgggcaataccaaggcgcggatgcgcatggttgctcagtacaccatcgccaacgcgcgccagggcctggtcatcggtaccgaccatgcggcagaggcggtgatgggcttcttcaccaagttcggtgatggcgcgtgcgacctgacgccgctagcgggtctggtgaaggatcaggttcgacagatagccgcggcattgggcgctcccgatcagttggtgcacaaggtgccaaccgcggatctcgaagagctgtcacctggcaagcccgatgaggccgctcatggtgtcaggtaccgcaacatcgatgattttctgcagggtaagccggtaccggacgaggcggcccggatcatcatcgatacctacgacaagacagctcacaagcgccagttgcccaaggagccctga

SEQ ID NO: 311265 - DNA, 850 bp, Unknown
  Bacterial polypeptide expressing nucleotide sequence isolated from the Sargasso Sea
atgacatccgccgattacgccagccgccaacgcgcgatcattgccgaactgaacgtcgccacgcacttcgacgccgaggccgagattgcccgccgcgtcgagttcctcgcgcaatatcttcgttcgaccggcctgcggacctacgtgctcggcatcagcggcggcgtcgattcgtcgacggccggccggctcgcacagctgtcggtcgaaaagctgcgcgccggtggctacgacgcccgcttcatcgcgatgcgcttgccgaacggcgtgcagaacgacgaagccgatgcgcagcgcgcgctcgcgttcgtccgcgcggacgaggaactgaccgtcaacgtgaagccggccgccgacgcgatgctcggcgcgctggtcgcgtccggccatgcgttcgagacgccggcccagcaggacttcgtgcacggcaacgtcaaggcgcgcgagcgcatgatcgcgcagtacgcggtggccggcgcgcggcgcggcatcgtgatcggcaccgatcacgcggccgagtcgctgatgggtttcttcacgaagttcggtgacggcggcgcggacatcctgccgctcgcggggctgaacaagcgtcgcgtgcgcgcagtggcccgtgcgcttggcggcgacgaactgatcgtgatgaaggtgccgacggccgacctcgaggaactgcgcccgctgcgccccgacgagcatgcgtacggcgtcacctacgacgagatcgacgacttcctcgaaggcaagcccgtcgccgaccacgtgtacgaaacggtgctgcgcttctacgacgcgtcgcgccacaagcgcgcgctgccttacacgatgttcgactggccggccgcataag

SEQ ID NO: 311266 - DNA, 871 bp, Unknown
  Bacterial polypeptide expressing nucleotide sequence isolated from the Sargasso Sea
actgctcccaataacagcgaatattaaggtggaattttcggtgaaagcgcagatcttaacagaaatgaaggtactcaagacaatcgatcctgagttcgaagtgcagcgccgtgtggcgtttattaaatctaaactgcaagctgcccgcagcaaagccttggtccttgggatcagcggtggtgtggattcttccacggcgggacgtttatgtcagttggccgttgatagcctcaatagtgagcatactgacggcggttatcagtttattgcggtgcgcttaccctatcaaattcaaaaagatgagcatgaagctcagcaagcttgccagtttattcagccgaccaaattagtcaccatcaatgtgcaccaaggggtcgatggtgtgcatcaggctaccttaacggcctttgtcgaagcgggattgcattcaccggatgcggctaaagtcgattttattaaaggtaacgtgaaagcgcgcatgcgcatgattgcccagtatgagttagccggtttagtgggcgggcttgtggttgggacagaccacagcgccgagaatatcaccggtttttataccaaatggggcgatggcgcctgcgatcttgcgcctttatttggcctcaacaaacgccaagtgcgccaggtggcagcatatttaggcgcgccagagtccttagtctataaagcgccaaccgcggatttggaagacaatcaaccgctactggaagatgaagtcgcgcttggactgacctacgagcaaatcgatgatttccttgaagggaaagaagtcggcaaggatgttgaagaaaaacttatcaatatctacaaggccacgcagcataagcgtcaacctatacccactatttacgattaa

SEQ ID NO: 311267 - DNA, 862 bp, Unknown
  Bacterial polypeptide expressing nucleotide sequence isolated from the Sargasso Sea
tatgacgcaacacgattcaggcgcacgccaggcaagtatcgcagcggaaatgcacgttgctgccgaattcgacgccgcacaggaaatcgagcgccgggtcgcctttctggcgaactatttgcgcaccagcggcctgaaaacctacgtgctcggcattagcggcggcgtcgattcgacaacttccgggcggctggcacaactcgcggtcgaacggctgcgggccgagcattatgacgcgcgcttcatcgcgatccgtttgccgtacggcgtgcagaaagacgaggccgacgcgcagcaggccttgagtttcattcgcgcggatgaaaatctcaccatcgatatcaaacccgccgccgacgcaatgctcgccgcgctggataccagcggcctgcgattcaacgacgacgcccaacaggattttatccacggcaatatcaaggcgcggcagcgaatgatcgcgcaatatgcggtggccggcgcgcgtgccggcgtggtgatcggcacggatcacgcggctgagtcggtgatgggatttttcacgaagttcggtgacggcggcgccgatgtgttgccgctcaccgggctgaacaagcgccgagtgcgggcactctccaaagcgttgggcgcgccggaagcgctcgcgcacaaggtgccgaccgccgacctcgaaatgttgcgcccactacggccggacgaggacgcatatggcatcccgtacgacgatatcgacgactttctggaaggcaaaccggtaagcgccgccgcgcgcgagacgatcctgcgtttctacgatgtcacgcggcacaagcgggcgttgccctacacgccgttcgattggccggtgaagacaggcggggaatga

SEQ ID NO: 311268 - DNA, 788 bp, Unknown
  Bacterial polypeptide expressing nucleotide sequence isolated from the Sargasso Sea
cgatcctgagttcgaagtgcagcgccgtgtggcgtttattaaatctaaactgcaagctgcccgcagcaaagccttggtccttgggatcagcggtggtgtggattcttccacggcgggacgtttatgtcagttggccgttgatagcctcaatagcgagcatactgacggcggttatcagtttattgcggtgcgcttaccctatcaaattcaaaaagatgagcatgaagctcagcaagcttgccagtttattcagccgaccaaattagtcactatcaatgtgcaccaaggggtcgatggtgtgcatcaagccaccttaacggcctttgtcgaagcgggattgcattcaccggatgcggctaaagttgattttattaaaggtaacgtgaaagcgcgcatgcgcatgattgcccaatatgagttagccggtttagtgggcgggcttgtagtgggaaccgatcatagcgccgagaatatcaccggtttttataccaaatggggtgatggcgcctgcgatcttgcgcctttatttggccttaacaaacgccaagtacgtcaagttgcggcatatttgggcgcgccagagtcattagtttataaagcgccaaccgctgatttggaagacaatcaaccgctactggaagatgaagtcgcgctcgggctgacctacgagcaaatcgatgatttccttgaagggaaagaagtcggcaaggatgttgaagaaaaacttatcaatatctacaaggccacgcagcataagcgtcagccaattcccactatttacgattaat

SEQ ID NO: 311269 - DNA, 592 bp, Unknown
  Bacterial polypeptide expressing nucleotide sequence isolated from the Sargasso Sea
gatgaataaattatcaattataaagcccttcattaatacaaatgtatttgatggtctttttatttcatcgattgctgatgattctagagatattcaagagaattctatatttattgcaaggcagggggtggattcacacggaaatgagtttattagggacgctattcaaaagggagcgtcttgcataattactgaccagaaattagatgaagaggtggatataccaattcattgcttagaaaatttggaagataagattttggaaatcctttttagcttttatggtttatctgaagatgattttatctttcatggtgtaacaggaactaatggaaaaacaacaacagcatttatggctcataatattatcagagctcttaaaaagccctcagtttatattggtactttaggggctataatcaatgatgatcttttggagacaaaaggtaacacgacgcctgggatatttgagatatttcaaattttgcagacttgtaaatttcagcaagaaacatatatcttcattgagatttcttctcatgcattagcgcaaaaaaggttagggaaactacctttttcaagaacatgctct

SEQ ID NO: 311270 - DNA, 447 bp, Unknown
  Bacterial polypeptide expressing nucleotide sequence isolated from the Sargasso Sea
aatgaaatcaaaagcacataaccttaaggatcttttgtacggaataaaagatgctccgccaatcaaatacaataatatttgtgatgatagtagatatgtaaataaaggtactgtcttctttgcaattaagggtttaagttctgatggttgtgattttatagagtctgctattaactctggtgcatgtgcagtcgtctatgagccgccttatgatctgagcaatattgagacatcaattccaattatcgctgtagatgatttaaaattggaaattgctaatatagtttcgagacattatgagagtagcatcaatgagatgagcatcattggtgttacaggaacaaatgggaaaacaactgtatcccggttaattcatcaagggtttaaaaaaattggatataaatcaggttacattggtacattggggtatggcctagaaaatctaaa

SEQ ID NO: 311271 - DNA, 420 bp, Unknown
  Bacterial polypeptide expressing nucleotide sequence isolated from the Sargasso Sea
attggaccgagattcgcaatggtctgacctgtccgtctgtgttgtcggcctaggagtcgccggctactcgtgtgctgacgcattgatgcaacttggtgcatcggtcaccatcgtggatgaatcaccgggggatattcaccaggaacgagcagaagtactcggatcgttgggtgtggagattcggttcggtgaggctgctgacttgccactcgacagcgatctggtggtcgtgtcgccaggcatccgaccgtccgcgccggtgatatccccggcgctggctcgcgagattccgatctggggagaactggaactggcgtggcggcttcgccgcggtccgagagatgcccagtggctgtgcgtaaccggaaccaacgggaaaacgacggtgacgctgatgctggagtcgatgctcacggcatc

SEQ ID NO: 311272 - DNA, 377 bp, Unknown
  Bacterial polypeptide expressing nucleotide sequence isolated from the Sargasso Sea
catgcaagatcctgtcgtggtggtgggtttgggccgctcgggcattggcgcagcgcggctcctcaacgcccgcggtgccgacgtgtggctgctggagagcaacagcagcgctgagttgaagcaacgggctgatgagctcagctccatcggaattcaggtggaactgggcaagcccctggctctggagagctttgaagccttgccccgctggccctccacggtggtgatcagccctggcattgccttcgaccatccggtgctcaaccaattgcgggatcggggctgccgcgtcgtcggtgaagttgaactggcctggcaggccatggagagcatcccctgggttggcatcaccggcaccaatggcaaaaccaccgtca

SEQ ID NO: 311273 - DNA, 562 bp, Unknown
  Bacterial polypeptide expressing nucleotide sequence isolated from the Sargasso Sea
aatgatagataatcattcaagtaaaaggaatattaatcttgtaattggattaggtaaatctggattttgggctgccaagtatttgagaagcatcaataagagagtaattgtttgggaaagtaaagatgggatagaattcttagagagaaaaacagcattagaagagcttgatatcatagtttctctaaataaagaatttgtatttgaaaaaattcaaccttttttgaaagagatcgaatctgttgttgtaagtccatcaataccttatgaccatataactattaatgaattaaaaaaaaaaggaattaaagtaattggagaaattaatgttgcatgggaaattttaaaagacacaaattggataggtattactggcactaatggcaagactactgttactcatctactaagccatatactctgtgatactggcttatatgctccttttgctggaaatattggtacacctttatgtaagtatgctcactccaaaaaacatgaaaaaattgattgggttgtagctgaattaagcagttatcaaatagaaatatctccagaagta

SEQ ID NO: 311274 - DNA, 436 bp, Unknown
  Bacterial polypeptide expressing nucleotide sequence isolated from the Sargasso Sea
tctgaaaccagatctatctaatattaaaataagtggaatttcatttgatagtagggatattaaaagaggaaacttgtttgtttctatcaagggcaacaagtttgatggcaaaaaatatattaatgatgcaatttccaaaggggcaagtgtagtaattcattctcagccaataaaaagaaagagaaaagtaatatatataaaagtaaaagacacaagaagcgcactcgcagaattaagtgtaaaatattataaaaataaaccaaaaaatatagtcgccgtaacaggaacaaatggcaagacttctatatcagacttttttcatcaaatatttattttgcaaaataaaaaggttggatttattggaacacttggttttaaaaaaaatgggcatttaaaaaaaagaagtttaacaacttctgatgcaattagcttaaac

SEQ ID NO: 311275 - DNA, 469 bp, Unknown
  Bacterial polypeptide expressing nucleotide sequence isolated from the Sargasso Sea
atgatagataatcattcaagtaaaagaaatattaatcttgtaattggattaggtaaatctggattttgggctgccaagtatttgagaagcatcaataaaagagtaattgtttgggaaagtaaagatgggatagaattcttagaaagaaaaacagcattagaagagcttaatattatagtttctctaaataaagaatttgtatttgaagaaattcaaccttttttaaaagagatcgaatctgttgttgtaagtccatcaataccttatgaccatataactattattgaattaaaaaaaaagggaattaaagtaattggagaaattaatgttgcatgggaaattttaaaagacacaaattggataggtattactggcactaatggcaaaactactgttactcatctactaagccatatactctgtaatactggactatatgctccttttgctggaaatattggtacacctt

SEQ ID NO: 311276 - DNA, 619 bp, Unknown
  Bacterial polypeptide expressing nucleotide sequence isolated from the Sargasso Sea
tttggattatcaccttcatgcttgttttacttgggttagcattgttgagattaagataatccaagtgcaagataaaaaaccattaataataggtctaggtctcacagggaaatctttagtaaattttttatccaaatctcatgatgagttatttgtcgtaagcgagtctgttaaacctcatgaaatagaagacatcgaaagattgggggtgaaagtgcatctaaatccaactatagacgaagttttaataaacaaagtatcggttatttatccgagccctggtgtaccttatgatcatgagataatgaagttcgctagacagagaggtgtgcctatttcctctgacattgaattattccttagtttgcataaaagtaaaaaaatcttagtaactggtacaaatggaaaaacttcatcatgtctaatgatttatagtttatttcaatatttttacccaaataaaaggatcaaggttctaggcaacattggcactcctgtcttatcccatcttaatgaagaaatcgatatcgcaatagtagaaatttctagtttccaactggagttactaaataaaactgaatttgatattggtgttttattaaatattgaggaagaccat

SEQ ID NO: 311277 - DNA, 433 bp, Unknown
  Bacterial polypeptide expressing nucleotide sequence isolated from the Sargasso Sea
atgcctattaaaaataattcaaaaaaggaagaaaaaataaattttgttattgggttaggaagatctggtttttgggcagcaaagtatttaagaagtattggaaagagagttattgtctgggaaagtaaagaaaataaagaacttttagaaacaaaggagatactagaaaaactcgatatatctgtttgtttaaataaaaaatttttatttaatgagttctctacatgtcttaaacaaattgagtctattgttgtaagtccagctataccctttgaccataaaacaataatcaaacttaaagaacgaggaatccttgtaataggggaaataaatattgcatgggaaagtttaaagaatataaattggattgggattacgggtactaacgggaaaaccacagttactcacttattaagtcatatactaagagaaa

SEQ ID NO: 311278 - DNA, 709 bp, Unknown
  Bacterial polypeptide expressing nucleotide sequence isolated from the Sargasso Sea
atttaagtttttaaaagaaaaaaataagatttatttatttgatgacaataaaaaaatatcattaatacataaaattacaaaattaaagtttgacataataattttaagtccaggaataaataaaagaaaatgtaaattaaaaaattttttaaaaaaaaattcaaatataatttatactgatttagatgtttttaagtcatattttgataatcaatgtattactattacaggaacaaacggaaaatcaacaacgagccaacttatttatgaagtattaaaaaaccaaggatacgatgtaaagcttgcgggtaatataggatatccaattttatcaattaaaaatattaaaccaaaaactatttttgtaatagaggcatcatcttttcaattggattacagtagattatttagttctaaatattctatgatattaaatatttcacctgatcatttagaaagacataaaacattaaaaaattacattattgcaaaatttaaattaataaaaaatcaaaattccaactctgtagcttttttaaataaacatgattttaatattaagaattatttaaaaaaaaataaatttaaaaccaaaattattaaagtagacactaaactgaatgataagtatttattaaaatttcagaataagtattttttttcaaaaacaaataaagcaaatttattatttgctttagaaattttaaaa

SEQ ID NO: 311279 - DNA, 375 bp, Unknown
  Bacterial polypeptide expressing nucleotide sequence isolated from the Sargasso Sea
gatgaatatctttaaatcctcatttcttattctgggtgaaggcatcacgtttaaacattgtagtaatttttttagagaaaatgacatcatctattattcaactactacaagcgatattgttgatattagtgataatgagattttatgtaaaaagagcaagattgatctaaatcagattgattatgttgttgtcagtccaggaatctcaccaacaaatactatattacaaaagttaatctcatcgggatgtaaattaaccacggatatagaaatagtccaaaatctatcacaatcaaagtttatctgcataacaggaactaatggtaaaactttcactgtaaatctcatagcagacatattaaacgacaatgataa

SEQ ID NO: 311280 - DNA, 599 bp, Unknown
  Bacterial polypeptide expressing nucleotide sequence isolated from the Sargasso Sea
cctgaccgacgagcgtgagcccgacatatctctggccaaacttataaaaggcggcgtaccggtcctgacctgtaccgcgccgcgccttgagctggcgcatgcggccgcccggttctggcgccgccagcccggcatgattgccgctgtcaccggcaccaacggcaagacctcgatagtcgatttcctgcgccagatctggtcgcgcgtcacctgggatgcagcttcgatcggcacgctgggcctgcagtacgacgacccgcgcaagatgcagggcagcatgcacggcctgccatcgctgacgacacccgacgccgtcagccttcacagcgcgctgcagccgctgacggtggcccgcgtgacgcatctggcaatcgaggcaagcagccacggccttgcgcagcaccgtcttgacgggctgaacatccatattgccgccttcaccaatctcagccgcgaccatctcgaccaccacgcggacatggacagctatttcgccgccaagtcgaggctgttcaccgacctgctgctcgacggcggctctgcggtgatcaacatcgatgacgaatatggcgcgaagctcgccgcatcaatgcgcgcgg

SEQ ID NO: 311281 - DNA, 436 bp, Unknown
  Bacterial polypeptide expressing nucleotide sequence isolated from the Sargasso Sea
tatgagatcaataaaaatacataaacttttagatttggtaggagttattccttcattaaatttgatcgatcgtgaaatcaataatatttcttttaactctaaagaagtacaaaaaggaactttgtttttaggtatgcctggtctaaatattgatggaggggaatactgtattgaggcaattgaaaatggcgctgaggctgccattattggatctgctgcaaaagagaaaattggatctattgatcgagaaaggattttggttatagaggataatttagattatatttttggtcaaatagtcgctgaattttggaataggccttcaagaaaacttaaacttattggtgttacgggtacaaatggaaaaacgacaattacttttttattggaatatcttttaaaaagattagggaaaaagactgcattatttgggacc

SEQ ID NO: 311282 - DNA, 398 bp, Unknown
  Bacterial polypeptide expressing nucleotide sequence isolated from the Sargasso Sea
tatgaatcttagagtatcagatgtagccgagtatttatcttcttcttttgaaggaaccgacagagtaatcagcaaaatagttatcgatagtagagaagtcaaaagaggagatcttttcttggctatctctggaatcaataatgatggacataaatatataacagatgcgattgataagggagcagcttgtataatatgtgaaaagcctcataattttatatcttcgtctactccaattataattgttaaaaattccattcaagcgctgggtaatatagctaaaaaatataaaaataaaataggtcaaccacatacgattggaattacaggcactaatggcaaaactacagtaacaaaattatgtacatctatactaagtacttcatttagaacaagtg

SEQ ID NO: 311283 - DNA, 487 bp, Unknown
  Bacterial polypeptide expressing nucleotide sequence isolated from the Sargasso Sea
catgaaattaataattggtttaggtctaacaggtacttcttgtgcagcatttcttaaaaaaaaatcaattccatttataatatttgatacaagaccaaaaacggaggttgacgatagatatattgagaaggaagctgaaaatattttctttgaaaatataatgaaaaaagatttaattaatgtcgatgaagcgataattagcccaggtcttgataaatcacataaagtatttaaaatcttgaaagatttgaatataaatattattactgatatagatcttttcaaaagatcaaatagtattccaataatatcaattacaggaacaaatggtaaaactactattgtaaatatgttacaacatgttctaaataatattggaatcaactcaattgcatgtggcaataatggtatatcaccattattaattcctagtagtcaatataaatatataattttggaattgtctagttatcaactagactatatg

SEQ ID NO: 311284 - DNA, 642 bp, Unknown
  Bacterial polypeptide expressing nucleotide sequence isolated from the Sargasso Sea
aatgaaatttataactaatacatctgacttgagtaaatatctttctattccattcaaggagaactcagtcattaaatctatttcgacagatacaagatctattaaaaaagattcaatgttcattgctattagaggcaaaaattttgatggtaatgattttgttgatgaagcactagagaagggagcagttattattcttgccgatcacaaaagatatcaggaaaagaaaaacaaaaaaattatctatgttgaaaatacaatttctgctcttaaaaaaatctctgaaaacattattaaggagtttaaaggaaatgtaattgcaattactggtagcaatggcaaaacaaccacaacaaatcttgtatataaaactttaaaaaatagctccaaaactcttaaaaactttaataatgaaataggaatgcctttaagcattatgaacgcgtcttgtaaatcaaataatcttgttttagaaataggtgcatcaaaatttagagatattaactatttaagtaaaattctaaagcctaatgttggagttataactaatataggtcattcgcatcttgagaaattaggaaatattgaaggcgtatttaaagttaagtcagaattagtaaacaacattcaaaaagatggttt

SEQ ID NO: 311285 - DNA, 483 bp, Unknown
  Bacterial polypeptide expressing nucleotide sequence isolated from the Sargasso Sea
tatgctaataacagacaataatttagtacatttagaaaaattcattattagtaactcaaaaagggctattaaatttagtgataggttttgtatagattctagaaaagttaaatcagggcaaattttcatatccattgattctgatgaatcgaaaaattttaaaaatataaaaaatgcaatatctaatggagcatccggatttgttacgcaatttttatacaaacgaagtgacctaaagacttctataccttttttaattcaaaaaaacttagataatctttttcatatgttgtttaatgttgatctcataggatataaacataaagttaaaactataggtatcacgggtacaaatggtaaaacatcttctgttttattattagcacaatcattaacctatttaaaaaagaaagtgggggtaataacaagcgagggatgcggaatctatcccgcattagtggatagtgattatacaaccccacc

SEQ ID NO: 311286 - DNA, 922 bp, Unknown
  Bacterial polypeptide expressing nucleotide sequence isolated from the Sargasso Sea
ttgggtgttatagcccagaagcataaaataaatcatggatcgccattcactattggtataacaggcacgaatggtaaaactactgtaacaaaattaactgcacagatattgaaacaatcatatattactagcactacaataggaaattttaataatgatattggtttaccgctatcaataattcaatcaattaataccaaaatagataaatgtgtttatgagctaggagccagcaaaagaggcgacataagccgtttagtaaaaatctgcgagcctgatatgacgacattattaaacgtctcagaagcacatatggaatcatttggtagtatgaaaaatcttatattgactaaagaggaaatattctctcacctcaaaacaaatcaagtaattttaaatatagatgatataaactttcaaaattggaggaaaataaataataacaagaaaataattactatttcattaaataatattgcagattactttatcaaatcctctgatcatttaagttattccttctcaactgtgaaaggtgatttcagcgttagaaaagattatgtgtccgaaattttaccaattaatttattattcagcatatccctatcaatggaggccggtgccagcattgaggatgtaaaaaatggtcttaaaacttttgagggtgtaaatggaagattccgaagctacatttcatctaaaaaagctataattatagatgattcttataatgctaacccagagtccatgaaatcttctttagaccaattaaaacaatacaatgaaaataaaatatttgttatgggtgatatgggggaattaggaaaaaaatcccgcgaacatcatctatctatcttcaagactgcaaagactcagaatattatgtatctgttttatatgggtaaatataaagatgaggcta

SEQ ID NO: 311287 - DNA, 440 bp, Unknown
  Bacterial polypeptide expressing nucleotide sequence isolated from the Sargasso Sea
gatgcttcttaaagaattaataaaggaaattgaaaatttagacgttaggggcagtaccaatattaaagttaataatgtttcaaaaaactctaatgaaattaagcctggagatttatttgttgcaataaaaggttctaaagctgatggtcatgattttataaatgatgctataattaaaggtgctaaatgcatattgtgtgaaaaaagtattgatgttgaagatgataacttaacttttgttattactaaatgctctaaagaaacctactctagggtctgctccaacttttttgataatccgagtaataaactaaaactcattggtataacaggaactaatggaaagacaacttcctcaaaccttctataccaaatgtttactatcaacaatattaaatctggtttaatatcaacaaatgaaataattattggttcagata

SEQ ID NO: 311288 - DNA, 829 bp, Unknown
  Bacterial polypeptide expressing nucleotide sequence isolated from the Sargasso Sea
atgatagataatcattcaagtaaaagaaatattaatcttgtaattggattaggtaaatctggattttgggctgccaagtttttgagaagcatcaataagagagtaattgtttgggaaagtaaagatgggatagaattcttagaaagaaaaacagcattagaagatcttaatatcatagtttctctaaataaagaatttgtatttgaagaaattcaaccttttttgaaagagatcgaatcagttgttgtaagtccatcaataccttatgaccatataactattattgaattaaaaaaaaaggaaattaaagtaattggagaaattaatgttgcatgggaaattttaaaagacacaaattggataggtattactggcactaatggcaagactactgttactcatctactaagccatatactctgtgatactggattatatgctccttttgctggaaatattggtacacctttatgtaagtatgctcactccaaaaaacatgaaaaaattgattgggttgtcgctgaattaagcagttatcaaatagaaatatctccagaagtaaaacctaatattggaatatggacaaccttcacagaagatcatcttgaaagacataaaacacttgaaaattatttcaacataaaaaaaagcttgttagaaaaatctgattttagaatttataattatgacgataaaaacctaagaaatcactacagttcgctatcaagaggggtttggataacaactagtttcgataaatcaaattttattcattgcgattattggatagatgaacaagcgtacattgttgagagagggaagaaattat

SEQ ID NO: 311289 - DNA, 478 bp, Unknown
  Bacterial polypeptide expressing nucleotide sequence isolated from the Sargasso Sea
tatgttattgtctgagttgctgaatccatttgttgaacttcctaaaaagatggaccgagaagtgctcggtatcacaaccgatagtcgcgatgtagaaccgggatatgtttttatagcacaggtgggctacggtcaacatgatgggcgagatttcatacaggacgcacttcactcaggtgcgattgcagttttatcagagttgacggttaatcaagatactaaaacgagcctgctgatgcctgctcataccagtcatgttgtggtgccgcacatccaaatatataatttaaccgaattggtggggcacgttgccgataaattttataatcagccgtctatgcagatgcagatgataggtgttacaggtacaaatgggaagaccactattacgacattattatctaaggccatgaaacgtcttgatatattggccggtttgataggaacgcatggccaaggtctcgatggtgataattaa

SEQ ID NO: 311290 - DNA, 404 bp, Unknown
  Bacterial polypeptide expressing nucleotide sequence isolated from the Sargasso Sea
aatgttacttggcaaagtattaaaaaatataaatcaaaaatataaatcaattaaatttaaaaacattagatttaatagcaaagattgtaaatttaatgatatttttttttcaataggcggcaataatttaaatggtaataattatatcaatgatgcaattaataatggtgcaagaataattgtttccaatttaaagtatgaagggtttaataaacataaaattttatttattcggagtaaagatccaagaaaattattagcagaatcggcaagtaatttttattataaaaaacctaaaaatattattgctgtaacaggcacaaatggaaaaacatctatagcaaatttttattatcaaatattaactttgaataataaaaaagcagcagctattggaactcttg

SEQ ID NO: 311291 - DNA, 349 bp, Unknown
  Bacterial polypeptide expressing nucleotide sequence isolated from the Sargasso Sea
atggataataaagggaaagatttaagttacttagtctctaattcaaatgtccaattatatggtaatgtaaacattaaaatatctaatttatcagaaaatagtaaaaaaattaaaaatgatagtatcttttttgctataaaagggaataattatgatgctaatgaattcattaatgaagctattaaaaatggagcacatactatcgcatctgaattagatcctacaagaaatgatgttacttggattaaaacaaataatattagaaaattaatttcagaaatttcaaataatttatatggtaattataaatttaaaataataggtattactggaactaatggtaaaacct

SEQ ID NO: 311292 - DNA, 814 bp, Unknown
  Bacterial polypeptide expressing nucleotide sequence isolated from the Sargasso Sea
tatttaggtttagaagacagatgtactactaaatttaaaaataacatttcatttacaaaagtatatgcacatcatcctttagaaattaaattaatattagattcatttaaaaataataatgattataaaattatagctatatatgaaccttttggttcaaaaatatttttcgaaaatactaaggatgagtttaaaaattgttttgattcttcagatgaaattataatgttaaaatatacaaatataaaatcaaaaataaatattaataaaatatttgataaaattaatcattctaataaaaaaagaattgaaaattatttagatgtatttaattatttaaaaagtcaaatttctaaaacagcatttattttttttggtgttccaaataaatttaataattataatgttttgaatattgcagataatctatattttaataaatttacttacaaaaattgtaaaaaaatggataataaagggaaagatttaagttacttagtctctaattcaaatgtccaattatatggtaatgtaaacattaaaatatctaatttatcagaaaatagtaaaaaaattaaaaatgatagtatcttttttgctataaaagggaataattatgatgctaatgaattcattaatgaagctattaaaaatggagcacatactatcgcatctgaattagatcctacaagaaatgatgttacttggattaaaacaaataatattagaaaattaatttcagaaatttcaaataatttatatggtaattataaatttaaaataataggtattactggaactaatggtaaaacct

SEQ ID NO: 311293 - DNA, 883 bp, Unknown
  Bacterial polypeptide expressing nucleotide sequence isolated from the Sargasso Sea
ccttgaaggaaaatgcaaagaattaattgttacagatagtcaaaatatagatgattataattctagaaatgctcgaactgaatttggagggcataaaaaagaaacttttgagcaatgcgatcttcttattgtaagtccaggtgtctctaaagatgatttttttgttcgggttgcttttgattcaggtgcggaagttgttagcgaggtcgaatttgcatggagattatctaatgttccttttgtgtcaattacagggacgaatggaaagacaacaacattaactatgttatccaggattctcgaaactagcggtttccgaattgccgtcggtggaaatattgggaggccattaatcgatatagttcaaaatgaaactcaagatttagattttattttaagtgaaattagtagttttcaacttgaactatcgactactatctgtcctcatcttgcaataattacgaatgttacagaggatcatattggtagacataactctatagaagattatctttcagttaaggcaaagttattctctaatcagaaaaaaaatgacgttaaaattataaattctgatgatcctatttccagacatcttcaatttgaaggtgatcaacaaacccttactttcagcagaaaaaataaagtaaataaggggtcttttgttaataatggcaagatatatgtagttttagaagatgagattaaagaaatatgcgatataagcgaaatgtatttgactgggcttcatgatttggaaaactttttagcagcttgtgcagcaggcgcctatcttggtgcagatattgtggcaatgaaggatactgcgaaatttttcaaaggtcttcctcatcgtatggaattaattcttgaaaaagatggg

SEQ ID NO: 311294 - DNA, 836 bp, Unknown
  Bacterial polypeptide expressing nucleotide sequence isolated from the Sargasso Sea
catggaattatcaatgctatcaacggtctctaatggaaatctaattggcaactctctagatatagaaaattttagtttggattctagaaatatcaaacaaggggacttatacattgccttacaaggcaccaattttgatggacatgattttgtagaggaggctatatcgaaaggtgcttctgcagctgtagttcataaatccattagatctgacatacctcatatcttggttaatgatacttatgattttatgaaaagtgttgctctattcaaccgttcaaattttgagggaaaggtaattggaattacaggaacaaatggtaagacatctactaagcaaattctttctaaccttctagataataataatgaatgtcataagacatcaggcaataagaataatcaaataggtgttccgttttctttattaaatttaattaaccaatataaattctccgtaattgaaatgggaactagtgaaccgggtgaaattgaagttttaaatggattagtaaagcctgatatttcagctataacaaatgtttcaaagggacatttagcagcacttaaaagtactgatatgattgctaaagaaaaaggggaaatctataaattccattctgataatggagtagcttttctaccaagagattccaagttcttcgattattggaaaagttcaactaatgctaaagaaatattcagttttggtctgcacaagagttctgatttccttatctcggatataaaaacagacatagaaagcaatatgactgagttttgtcttcggtttgatggactcacagaaaattttagtattaatagcattgctcagc

SEQ ID NO: 311295 - DNA, 640 bp, Unknown
  Bacterial polypeptide expressing nucleotide sequence isolated from the Sargasso Sea
tttgcttagatatcaaaatagatcaatagctatttatggaatgggtgttactggttgttcggctgccaaagctttcaacaggctaagagcaaaagttttttgttgggatgatgatgtaaaaataagaaaaaagataacaaaaaacaaaaaatttgttttgcgaaaattttggttaaattctgccgcatcgtgtcgaattgataatattgttgtaagccccggaatagatattgaaaaatgcaaaataaaaaattttttaaagaaaaatttaaaaaaaatcataaccgatctagatttattttttgagcttaataagaaaaatttgataatttcaataacaggtactaacggaaaatctacaacctgtaaaatagtagaaaaaattctcaaaactgccaaatataatgtgagaactgtaggaaatatagggaatcctattttatcatcggtacattcaaaaagaaaatgtgcttatgttttagaagtctcatcttatcaattgcaatattcaaaactatttcgatcaaagcatgcggcaatattaaacatttctccagatcatttggagaggcatagaaatatgaagaattacacactggttaagtccagaaatatttttagctcaaggatagctctgatt

SEQ ID NO: 311296 - DNA, 504 bp, Unknown
  Bacterial polypeptide expressing nucleotide sequence isolated from the Sargasso Sea
aatgatagataataatcattcaagtcacagaaaaaatattaatcttgtaattggattaggtaaatctggattttgggctgccaagtatttgagaagcatcaataagagagtaattgtttgggaaagtaaagatgggaaagaattcttagaaacaaaaaaagaattggaagaacttaatatactagtttctctcaataaagaatttatatttgaagaaattcatccctttataaaagagattgaatctgttgttgtaagtccatcaataccctatgaccatgaaactattattaaattaaaaaaaaagggaattaaagtaattggagaaattaatgttgcatgggaaattttaaaagacacaaattggataggtattactggcactaatggcaaaactactgttactcatttactaagccatatactctgcgagactgaattatatgctccttatgctggaaatattggtacacctttatgtaaatatgcttccaaaaaaaacaa

SEQ ID NO: 311297 - DNA, 617 bp, Unknown
  Bacterial polypeptide expressing nucleotide sequence isolated from the Sargasso Sea
aatgaaaatagctcaaaatatttttttagaaaaaaaaatattaatttatggtctcggcaagagtggaatttcatcttttaaatttctaaaagacttagcccaagtatatttatttgatgataatttaaaaataaaaaaattattaaataaaaaatttattaatctaagtgaaataacaaaaataaaagtagatataattattatcagtcctggtattaatatttctaattgtaaattatcaaaatttttaaaaaaaaataaatcaaaaatttttacagatttagatatattttactcattttataaaaataagagcatcacgattacaggaacaaatggaaaatcaacaacagctaaaattttacatgacgttttattggatcaaaaaaaagatgtgagacttgttgggaacattggtaacccggtattaaatgaaagaaaaataaaaaaagaaacaatttttgtaattgaggcatcttcttatcaattagattatagcaaaatatttacttcaaaatatgcgattatactgaatataagcccagaccaccttgaaagacataaaaatttgaaaaagtatgtagatgcaaaattcaaacttctaaaatttcaagata

SEQ ID NO: 311298 - DNA, 319 bp, Unknown
  Bacterial polypeptide expressing nucleotide sequence isolated from the Sargasso Sea
agtaatttttatacaaaaaaacctaaaaatatcattgctataaccggcacaaatggcaaaacctcaatagcgaattttttctatcaaatattatcactcagcaaaaaaaaagctgctgccataggaaccttaggagttttatcaaaaaaaattaaattaaagacaaataatacaacaatagatcctattaaaatgcatcaaattttacagagattgaaaaattcaaatattgataacgtaattatagaagcatcaagtcatggcttaaaacaacatagactagttggattaaatttgaaaacagcattgtttacaaact

SEQ ID NO: 311299 - DNA, 418 bp, Unknown
  Bacterial polypeptide expressing nucleotide sequence isolated from the Sargasso Sea
tatgttgctgaaacaattaattaacaatcttccaaaggaaaaaaaaaacataaatattaatgggttaactactaatagcaaaaatataaaaaaaggatttattttttttgctataaaagggcatatagtaaatggtgaaaattacattcctgaagcagttaaaaagggtgcaatagtcgtaatttgctcaaaaaagtgtaagtatcaaaataatgaaatattaataataaaaacttctaatatcagattttttcttagtgagatttcctcaaaattttacaaattaaaaccaaaaaatttgatagctgtgacgggtacgaatggtaaaacttctgtagcagatttatactatcaaattttgcatctcaacaacatacctgttgcttcgattggaactttgggattaaaatacaacaat

SEQ ID NO: 311300 - DNA, 463 bp, Unknown
  Bacterial polypeptide expressing nucleotide sequence isolated from the Sargasso Sea
ttggctttaaatagcaaagaagtaaaaaaaggatttattttttttgcagtaaaaggaaatagatttaatggtgaaaattatattaatcaagcgataaaaaatggagccattgtcatcatttgttcaagtagttgtaaatttaagagcaaaaaagtatttgttataaaaacaaaagaaataagaaaatatttaagtaaaatcgtatctaatttttataaattaaaaccaaaaaatattattgctgtgactggaacaaatggaaaaacatctgtagccgattttttttatcagatactagatataaacaatgttccagtagcttctattggaacactaggtatcaaatttaaaaaaaaatttattaaaactaatctcacatctcctgatacaatcactcttcacaaatatctcgaagagctaaaaaagaacaaaattgataatgttattattgaagcgtcgagtc

SEQ ID NO: 311301 - DNA, 769 bp, Unknown
  Bacterial polypeptide expressing nucleotide sequence isolated from the Sargasso Sea
attggtatatggtcttggaagaactggtatttcatcttatgaatttttaaagaaaaaagctttagtttatttgtttgatgacaatcctgaaacagtaagaaaaattcataaaaaatgcataagtttaaaagaattaaaacgaataaaatttgataaaataatcatcagtccaggaattgatatctcaaattgtaaattatcaaattttttgaaaaaaaattttttaaaaatttatacagacttagatattttttattctttttttaagaatgactgttttacaattacaggcaccaatggaaaatccactacatgtaaacttttacatgaggttttattagatcaaaagtttgatactaaattagttggaaatattggaaatccaattttatcttcaaagaacataaaaaaaaaaactatttttgtagtagaggcatcttcctatcaattagaatatagtaaaatttttagatcaaaatttgcagttatattgaatatatcacctgatcatattgagagacataaaacaataaataagtatgtaaaagctaagtttagtttaattaataatcaacgcaaaggtaatttcgcttttgtaaaaaaaaatgattatttaattagcaacataattaaacataataaatttaaaagcactattatagaagttcagcaaaaaaattttgatacatatataaataaattggaaaataattatttttttactgattcgaataaagaaaatctatcgtttgttttagcaatatcaaaa

SEQ ID NO: 311302 - DNA, 505 bp, Unknown
  Bacterial polypeptide expressing nucleotide sequence isolated from the Sargasso Sea
gctgaaaaaaataattaaaagtctaccaatagaaaaaaaaaagttaaagattttaggtatctcaaataatagtaaaaaaattaagaaaggatatcttttttttgcaattaaaggtaaaaattttaatggtgaaaaatttattgacgaggcaattaaaaaaggtgctatagctattttttgctctaaaaattgtaagtacaggcataaagatataccagttgtaaaattttcaaatataagacgtattttgagtaaagtctgttccgacttttataaattaaagccaaaaaatattatagcagttaccggaactaacggcaaaacttcagtagctgatttattctatcaaattttagaactaaataatataccagtagcgtccataggcactttaggcattaaatataaaaaaaaaacaattaaatctaatttaacttctcctgataccatagtcttgcacgaagctcttaagaaaataaaaaaaaacaatattaataatgttatt

SEQ ID NO: 311303 - DNA, 448 bp, Unknown
  Bacterial polypeptide expressing nucleotide sequence isolated from the Sargasso Sea
atgaagccactcataaatattcttagaggaattaatgttatttcggtttatggaaataataatattttaataaaaggactttctgttgattcaagattagttcaagatgattatcttttttttgctgtagatggaaataactttgatggacatgaatacataaacttttcaataaaaaaaggatgtactgcaatagttgcaacaaaaaaaccaaaagacttacttaatgatatttgttatataattattgacaatataagagaagctattcatagaatttcttcgaacttttttgaaaatccttcaaagaaaataaagattattacagttactggtactaatggaaaaacatccattacatattttttatataatttcttaaaatcaattggtaaaaacgtgggtatgttctcaactatgaaaataaagttggagatagatctattaa

SEQ ID NO: 311304 - DNA, 418 bp, Unknown
  Bacterial polypeptide expressing nucleotide sequence isolated from the Sargasso Sea
atgaataaaaaactggtggttttagggataggtatatcaggtttaggagtagcaaatctcgcttttaacaagggattcaaagtttttgtttctgatattggcgctataaatcaaaaaataaaaaaacaactggataatttgaaaatattttgggaggaaaacacaagtgaagcaacctgtttaaatgatgccaattatttaattaaaagtccaggagtacctgataattctccaacagttctaaaagcaaaatatctagaaatacctgtaatttcagaaattgaatttgcgtcaatttataccaacgctaaaattattggaattactggcacaaatgggaaaacttcgactactgaattaacctatcacatactaaaaaagtcaggaattaatgtggaattgcggaaacataggcatt

SEQ ID NO: 311305 - DNA, 583 bp, Unknown
  Bacterial polypeptide expressing nucleotide sequence isolated from the Sargasso Sea
ctgaaagatctagaaaattttagagatattaagattagaagtatccacttagatagcagagaggtgaaagagggaggcctattctttgcagtaaagggtcatgataaggatggtagcgattttatttcctcagctatttcaaatggagcctcgcttgtcatttcggatacataccaaaaatatagggaaaaagttatttatttcgaagaacttaaaaaatacattggtatttttgcatcaaggttttataactctcctagttcaaaaataaaatccatatgtgttactggcacaaatggaaaaactacttctgttgaaacatttgcaaatatgagtaacttactaggctataaatctggctttatgagtacgatcaatttttctaaagatggattaatgttagaaaaatcagatctaaccacccctgatgccatcaaaatacataaaaatattaaagattcattagaatctgatgctatctacatcgctatggaggcatcttctcatggcttagaacaagacagacttattggccttgatatcgactacgctatattgactagcttttcacatgaccatttag

SEQ ID NO: 311306 - DNA, 316 bp, Unknown
  Bacterial polypeptide expressing nucleotide sequence isolated from the Sargasso Sea
ctcatagacaaggctgagatatttaactcagcagcaattcctgttgaagtattcaaggttgctatgctgcgtaaaaacgctggttttattattagtagattttatggtaatccatcaaaaaatattaaagtcacaggcgttactggaacaaatggtaagacaactgtttcataccttatcgcatatgttatgcatgaacttaaaaacaatagtgcatttattggaacattggggtacggattatttggccagatagaaactagcaaaacaacaactccagacccagttaaattacactcactattctcattgtagg

SEQ ID NO: 311307 - DNA, 784 bp, Unknown
  Bacterial polypeptide expressing nucleotide sequence isolated from the Sargasso Sea
ttgataaaaagcatttccacagatactagatctatttttaaaaaatcaatgtttattgcattaaaggggaataattttaatggcaatgattatgttgaagaagctcttaaaaaaggtgctgtaattgctcttacggacgataaaagatttttaaattcaaaaaataaaaaaattatatatgttaaaaatactattgttgctctaggaaaaatatctagaaacattattaaagaatttaatggaactgttatcgcagttactggaagcaatgggaaaacaacaacaacaaatattatcgccagcactttaaaagaatcgtctagcaccatagaaaactttaataatgaaattggaatgccattaagtctaattaacgcttcttttaaatcaaaacaattagttttagaaataggagcatcaaagtttaaagatatagattacttaagcaaaattttaaatcctcacattggaattatcacaaatattggaaactctcatcttgaaaagctacaaaatatacaaggtgtcttgaaagtaaaatctgaaattattaaaaatattagaagtgatggttttcttatagtaccaaatgaaaaaaaacaatacttgaattattggaaaaagattagaactgatataagaatactgacatttggaataaataaagaagcagactttcatgcaacaaatataaaaactaaaaaaaatggtactgatttttacattgcttctaaatttttagataaaccaatcttaattaagactaatcttgagggaacgcata

SEQ ID NO: 311308 - DNA, 808 bp, Unknown
  Bacterial polypeptide expressing nucleotide sequence isolated from the Sargasso Sea
atcatgttttaattttttaaaaaaaaataatcaaattaagatttatgacgataatcacaaaaccatacccaagaatattaaaaataattatttcataaaaatcaacaatattaaaaaagatttttatgaatacatagttattagcccaggcatagatattaataaatgtagactaaaattttttcttttaaaaaataagaacaaaataattactgatttagatttattttactttcagaatattaataatacaaaaataaccataacagggacaaatggaaaatccacaacgtcaaaacttttatatacaattataaaaaaacataaaaaaaatgtaaaattaattggaaatataggtaaacctgttcttgatcagaaggcaaaaaattctaaaacaatttttgtcatagaggcatcgtcataccagattgaatatagtaagtactataaaactgattattcaatgattttaaatattagtcctgatcatctagaaagacatcaaacaatgaaaaattatgtcaatgctaaatttaaattagtcaaaaaccagaaagataatggatatgcatatattgctaaaaataatatctatttaaaaagaatatcaaaaaaaacaaaattaaaatcaaaaataattttagtagatttcaaaaatattgaaactataaaaagtaatattctaaatccttactttaaaaatattaacaatttacaaaatctatcttttatttttgaaatatcaaaaaaacttggacttaaaaaaaaaaaaattattgaatctttaaattcatttcatggtttgaaa

SEQ ID NO: 311309 - DNA, 328 bp, Unknown
  Bacterial polypeptide expressing nucleotide sequence isolated from the Sargasso Sea
ctggagattacgggactaaccgcggattcccgtgttgtgaaacccgggttcctgttcgcggcgctgccggggtccaacgtggatggacgtagctttatagcggcggccattgagaatggcgccgcagcagtcctggcccccgaagatacaaatactccagaaggtgccccactaatcgccgcgctggatgcccgggccgccctcgcccatatggctgccgcgttttacgccgaccagccgcatacgatcgccgccgtcaccggcaccaatggtaaaacctcggtggcacacttcacacgccagataggacggcgctggcaacagcgcc

SEQ ID NO: 311310 - DNA, 817 bp, Unknown
  Bacterial polypeptide expressing nucleotide sequence isolated from the Sargasso Sea
aattatatgggtgaatgattcgataaaagcacttaaaacaatatctaataacattatcaaagattatagtggtaacgtaattgcgataactggcagcaatggaaaaacaacaacaacaaatataattggtaaaaccctaaagaataactcaaaaactttaaaaaattttaataacgaaatcggtatgcctctgagcttgatgaatgcttcttctaaatcaaagaatttaatttttgaaatcggtgcctctaaattaaatgacattgattatctaagtaaaatcttacgacctaatgttggactaataacaaatattggaaattcacatttagagtccctaaagaatattgatggtgtttttaaagtaaagtctgaaatagttaaaaatatcaagaaaaatggctttttagttgtacctaatgataataagaagcatcttaataaatggaaaaaaatgagatcagacataacaacaatttcttttggtatgagggatgattctgatttttatcctattgacgtaaaaataaagcaaaatggactaagttttttagtcgcctcgagactgcttgaaaaatctataaaaatatcatcttcactggaaggattgcataatgttaaaaatattctttcagcttgtgcagtgcattattgtttgggtcaaaatccaaaggatttttcaaaatcaattagcttatcaaaactggacaatttaaggcaggtaaaatgtaaatggctaaaaggatctaccttaattgatgatagttataacgcaaacccagattcaacaaaaaaatctatcgatttattaagtaat

SEQ ID NO: 311311 - DNA, 505 bp, Unknown
  Bacterial polypeptide expressing nucleotide sequence isolated from the Sargasso Sea
aatgttattaggagaagtttttaaaaatattgataaaaaatacaaaaaaattaagtttaaagacattaaatttaatagcaaagattgtaaattaaatgatattttttttgccattaaaggcaataatttagatggtagaaaatatattcgtgatgcgataaagaatggagctaaaataattgtatctagtcttaaattaaataaatctaaaaaaaaagatattttatttattcgtaataaaaatccaagaaagttactatcattgatatctagtcgaatttataagtccaaaccaagcaacatcatagctgttacaggcacaaatggaaaaacatcagtagcaaatttttaccaacaaatattaaacttgaataatattaaagtagcatctattggaaccctgggggtctcatcaaggaatttcaatttaaactcaagcaatacaacattagactctgtgagcattcataaaattctatataaactaaaaaagttaaaaatttga

SEQ ID NO: 311312 - DNA, 646 bp, Unknown
  Bacterial polypeptide expressing nucleotide sequence isolated from the Sargasso Sea
ttgagtatttttttagataaaaaaatattgatttatggtttaggaaaaagcggtatttctacatatcatttcctaaaaaacaaaagtgatatttcattatttgatgattttcaaaataagtttaaaaatttagatataaaaaaaaaaattgttagttacaaaaaagttttaaaaattaaatttgatcaaataattttaagtccaggtattgatattaataattgcaaattatctaaatttttgaaaaagaatcgtgaaagaatttattctgatttggatatattttattcattttataaaaatgataatataacaataacaggcacaaacggaaaatctacaacatgtcaacttctatatgaggtcttattaaatcataaatttgatgttaagttagtaggaaatattggaaacccaattttatcatcaaaatatataaaaaaaaaaactatttttgttattgaagcttcgtcttatcaacttgaatatagtcagatttttaagtcaaaatatgcagctatactaaatatatctccagatcacattgaaagacataagacattaaataggtatattaaagcaaaatttaagttactaaaaaatcaacgtaagggaaattttgcctttgtgaaagataatgatccat

SEQ ID NO: 311313 - DNA, 918 bp, Unknown
  Bacterial polypeptide expressing nucleotide sequence isolated from the Sargasso Sea
tttttgctgggatgataataaaaaaataagaagaaaaataaaaaatctaaactatccagtaagtaaattttggtcaaaagagaatttaattgatactatagtaataagtcctggaattgatattaataaatgtaaattaaaaagttttttaaaaaaaaataaaaataaaacaataaccgacttagatattttttttgatcttaataaaaaagcaataattatttctattacaggaactaatggaaaatcaaccacttgtaaaataatagaaaaaattttaaaaacggcagatcacaaagttaaaactcttggaaatattggaaatccaattttgtcaaagaataatataaatagaaaaaatattattattttagaggtatcatcttatcagcttcaatattcaaaattatacagatctcatcatgcagctatattaaatatttctcctgatcacctggatagacacaggtcaatgaaggaatacatagaaattaaatctaaaatattttttgcacaaaataagtctgatttttcatatataaacgaaaataataaacattcaaaaaaaattgaaaaaatttttaattctaaaaaactaaaatcaaaattgattaatatcaagggaaatgaatgcaaaaagatattaaaaaatgttaaaaataaatattttaaaagcaaaggaaatattgaaaatttatcttttgcttacaaaattgctaaaaaattaaaagtaagtaataaaaatatttttaaagctatcaatcaatttaaaggtttgcctcatcgccaagaaattatattttcaaacaagaaaatattatgtattaacgattcaaaagcaacaagttttgatgcttgcgcacaatctttggaaaattatgataaaatttattggatcgttggtggagttcaaagtat
